United States Patent Application Publication US 2007/0150978 A1 - sequence listing, part 4

SEQ ID NO: 20193 - DNA, 411 bp, Oryza sativa
  unsure (1)..(411): unsure at all n locations
gcttatgggtacacatagccataaaaaatcatttgttggctaatctcttaacttcatgaaatattcacttaaagctaaacaacgcccttaaaatctaacggaaagaatatctctatctcatgagacgttccaaactcccctaggtatgtaacacaagcgacaatgacacaatttcaatgacgtcttacttccatcattatagaataattattctcctcattcttatttaagcttagttcactaatggcgcagcagcggaatttaaaacatcatcaatgtttgattaagtccacaaatggatttcttaagtctgtaccctatatgtaccctatatgtgacttgtatgtcataacanaaccctcaagctatgttatgtatacttaattgtgcaagtcacaaactaagagatac

SEQ ID NO: 20194 - DNA, 432 bp, Oryza sativa
  unsure (1)..(432): unsure at all n locations
gcttacctntatcctcttatgcatctctcacaagattacttttatcattcctccaggtgaaattcaggctagcttcttcttggtaaagaaacgtcaacagctcattccacatgtcagaaggctacaaaaggacatatacagagaaatatggatccccaatactacggtatgccattattccactttgacaaaagaatgtgtcttgcactcaagctatactgaaatgatcgctgaaaattttgcaggtttcggtttctatgcatacatccaaatataaggattccacttatgtaaaatgtggtattctaccgaacccaagaaattcctccataagtgcacaatccattattgccctgagaaaaaacttgatacaacttacgctngagcagtcgaatttatctttgacatcatctgtctctggagaccacattg

SEQ ID NO: 20195 - DNA, 475 bp, Oryza sativa
  unsure (1)..(475): unsure at all n locations
agcttgctcttcccggctgcgtcgccattgctgcacttagctagagacaatactgcagccaagatagacattgctgcgaagatcgatcaatcacgcacgcttcgatgggttggtgtgtgtaacgacattgttgagttcttggagattgaacatcgagtgtaatgctgctgtaagtagatgcttgnttgttgtgtacaaaaagagggagcggacgatggcgagagatgttaatgctgccattttgtttctcctcctcctctcctttcatttgttttttttttctctggtgtttgttcttcccttgcgttnttttggggagtggtttccctactaatttgttccatctttgccatgaactctgtaattgctcgtagctgcacatcatcgncttgctctgttcaattcttgctattcaaacatctttangtagatgaacaatgannaacctctcctacttctatcttcagctctgatg

SEQ ID NO: 20196 - DNA, 462 bp, Oryza sativa
  unsure (1)..(462): unsure at all n locations
agcttccaactccaggtgccttcagtagaactggagtggtctttgtagatcaaggagcgtcttgagacttcatctatgctaaagaagctgcttttgatgcttgttctttttggtacttctatggtgatagcggatggtgttgtcacaccagcaatgtcaggttcacatatttctgatgcgttgctcattgaatntctcttcaccgngtttaatgatcattatatatgcttttatgagtgatattgtgctagaccaggttttctctttcctgtagaactaattccagttctttctattggtaaaaatctgcagagatgtctgctgtcaatggcttatagggtggaatatctaatgttaatgaaggtgacctcagaaatttcagttattgacacatagcactaattgattcacgaaaagaaataagtctgtactggctacgagtacatcatacttactattaat

SEQ ID NO: 20197 - DNA, 502 bp, Oryza sativa
  unsure (1)..(502): unsure at all n locations
ctcagcttgaacttcccagggagtaactgtccctccggtnacgatcaattactggttattcattcctcagatcttcaacctgcatctcacaaacagcaattacaataaggaccactatgcaagcaaaaacatatgaaggattagcttcttatttgtagcttaccattgaagagaagttctgagatgtgctccgactacatcctgcagcatcttgtttagttatagactcaattgggagggagttgatattggtttctgcaggagtgaaacgacagccaaccaattgatggaactcctcgatttcacgagcatactcaaccctccagtccttccacttgctccaagttcttcttgcccacatgggcaccccatggaggcgaccttgttccctcccaaactgcctagaanaccgatcaggtacatacacctcttttatgttaaagctgattagccatgtccgagaatagcagatgttatctgctgcaatgcaatattctggaat

SEQ ID NO: 20198 - DNA, 432 bp, Oryza sativa
  unsure (1)..(432): unsure at all n locations
atatcataagacatcaactatccttgttataaacacattgttatattaccttctttcccataacacagttcagtgagtccatgccacgcctggtattagcatcatccaagacatcatcatggataaggcttgntacctaaggtgccaggtaggagataagtcattgatataaataattctggaaggggtaaaaagttaaatgaaacagctaggttggacttatacatgaatcagttcagttatctcagcaagacgcatatatctctcacgaatctcattctttgaaccaacaattgggtcagccatgtccatgcttatagatgaagccatcaatagtagaacctgacacatcaatgaccaggcgcttctaatgatgaaattggcaggagtaaattgttagcatgtatgcatattataagtaacttgcgtctg

SEQ ID NO: 20199 - DNA, 489 bp, Oryza sativa
  unsure (1)..(489): unsure at all n locations
tggcgcacacganagaatgcgagagcttagaataacacacgcttagcccnctacctggcgcgccagatgacggagcgtggggctcctcaccgggagaccgcgcagggccccctttgccggttcggccggnggccctgngtgagattctaagctcctagtctgtggaaagttcgcgagaatggaaaaagcacaagacacgggcgatgtatacaggttcgggccgctgagaagcgtaataccctactcctgtgttctggtggatctgtgtatgaagaagctaccaagagctggagagccagagagctcttattctaaaaaccctcttctcctctcccgatcatcccccctttcagcctcctcccttaagtgggcaaggtcctccttttatatctcaaggggataccacatgcaccacttctncctctccccctttttgggtgggaagcccatctatctatnagtaaacttggcttgcctctcttggagctg

SEQ ID NO: 20200 - DNA, 426 bp, Oryza sativa
agcttgatgtagtagtatcattgaacaagctgatgttgttcaaagccagctaggcgtgttaattaatttaccagccacaggtgtttctgtgtggctgccattggtcacttggaagagcagcgaggttggaaaaaaggcgaaagtgataaaagggtgagaatttatccgtattttttttccagagaagaagtggtgatgtttggtacgagagacgaccatatatggaagtggtatacgtataataatacaaggcttgcttcatcagtatactaatggaacagtatgcctacttggatatcattgtttagtagttaagctgttcggcacacttctgctattgtggtcctgtagtacatgcatgcctggccttcccgtattgggcgttcaaaaaattaagcacgggagtagtgattaatccagttgatc

SEQ ID NO: 20201 - DNA, 399 bp, Oryza sativa
  unsure (1)..(399): unsure at all n locations
gacctataaaactcagcttgagcatttccttggtccacaggacttactttttcttgctattcaatggagaagcagctgactcgatctacatggaagtggagcttcgaaggctatcattcctgagagatacatactcaagggggagcacccctagcaatgcgatagtaggcagcctgagtacttcccctgttgcgaggtgcgtaaattactcgtttccattcattcacttcttttgtgccataaccttaaaattagcgccaaaccatcacgagcaactcataagccccgtgctctgctgtaatgcagcgcanagaagctgcagcgggagagggagatgcttgccaggcagatgcagaagcggctgtccacggaggagagggagcacacgtacacaaaatg

SEQ ID NO: 20202 - DNA, 450 bp, Oryza sativa
  unsure (1)..(450): unsure at all n locations
agcttatgcgtcttgggaataatgtggaatctgttatcatgtaaagggactatatggcgagaagagtaagatatcaggtgcagattttttcttgcgattataagaattgatctcttgctaaaacagccttacaaactcctaattatgcacaatttcctttgagcattcgtagatcaatcattcacaaccaatcttgtccatgcaaaacatcatttggaagtgccaacctattgttcgttggtgagaaaggtaggagtttcaacaaattcaattttgaaaanctttgcataaacataatttacatacaattatttactttcaaaccaagatatatactaataattaaacattcactactacatacaccctaatgggtgccagntgtgaatcctacgtaagtgccagattatccaaccggcacctcatatgtggcactgatgaggaggaatc

SEQ ID NO: 20203 - DNA, 244 bp, Oryza sativa
tctcctccgccgcgaagttcttggcgcctttctagctcatttatggcaatcgccttggccccgtccgcacctcgatctccgtgatgggctcgccattgtcactatccgtgctcgcattctcctcatcctcggcctccctcctcttcttgatccgacgtcgtcgtacgatgatagttgccgtggtgaagagcagcacgacgagcagtgttgcgccgacggtggctccggctacaactctgtgtca

SEQ ID NO: 20204 - DNA, 409 bp, Oryza sativa
  unsure (1)..(409): unsure at all n locations
ctcaatcatgatcaacagagaaacaagtacatgatcaactgagaaacaagggcacatcatgtgctgtntgattcgatgcatcggcaacaaagctatatactgcaagacgttcagctccttgcaggtgcagatgtaagtagacaagtagtggcagttggaatggcatatactgccgtataacaattctaacaatcgaaacatatntatcattcatgagcagtaacagagaactcgattactctgtaatagcacgaaaatacatntatggcttaaccaagccagagtctcagcacggaacggatacaaagacacaaaacgaccacgagaaataaggaaacagagagaaccaacgcatactgcaggttgtcagaagaaccatggntcacaacctgatgccctcttccacaca

SEQ ID NO: 20205 - DNA, 420 bp, Oryza sativa
  unsure (1)..(420): unsure at all n locations
tcaggcagaatcaggtcatcttcttcaccaccagaagcaacatgaggtgtagcacaaggtacggaggagcaagaacctttcaggtttcatgctcagtcgacaagccagtggtgattggccttgcagcagactcaggatgcgggaagagcacctttatgcgccggctcaccagtgtgtttggtggtgctgcagagccacccaagggtggcaacccagactcaaacacactcatcagtgacacgacaacggtgatatgcctcgatgactaccattccttggacaggactggcaggaaggagaaaggtgtgactgccctggaccctatggcaaacgattttgatctcatgtatgagcangtgaaggcaatcaaagaaggcaaggcaattgagaagcaatctacaaccatgttactggtctcct

SEQ ID NO: 20206 - DNA, 421 bp, Oryza sativa
  unsure (1)..(421): unsure at all n locations
agcttgcaactgtactatgtccatgtggttgcctgctactntaagaatttaatgttcggaatgtctgtttcctgtaggaagttatcttactatcagtacaaccttgcaaactatgttgttatcttatggaaatataaatgtttgtcactttccagtcttgcagctattgcaaagaatagacctgtttactacgaacgcatactgccagtgctacttggttttgaccctagtttggaggttgcaaaaggagctcatcctgcaagtctgcggtattccctgaaaacagctttgttagggtttctaaagagtccttgccaagcaatgattgaggtgagctcaccttatagttatatgccatctttaccattttctagagttcatagtatacagaatgtactcatctatcttcttcttcttcttc

SEQ ID NO: 20207 - DNA, 289 bp, Oryza sativa
tatgatgatatggtcaagcgaacactcttattcctaagaagttgcacattatacaaatatagcctaaccaggttaatctttaccttatactgtgagcatatgatagatatacatagcctgaatgttattgcatgatatgctcatatggcactgttccaccatgaagtttctgtaccatctgtaggagtattgattgcactggttcatttctatctgcctgccatctttatgatacatgaatttcaataatgaagcccttgaagtcttgtgatgacttgtgcattattgt

SEQ ID NO: 20208 - DNA, 399 bp, Oryza sativa
  unsure (1)..(399): unsure at all n locations
tactttccaatngccttttataaacctaataacaatatgaaaatttgcaaatagaatataccaaaaaagatagggttagtcttgtcatgctaagtaagacaaactatttctctctggtgaaatgattaatagctgctctggtatatatctcttatatatgggttcgtatgtaagtgctctctccaaaattaaatataatgtaccaacaattatctgcgaacctgaggtaaatgagctacatttgctaatctagtctaagttggtcgcagatatgagatagtaaaaaagagtgctatgattctggtctaagtttgacttatattcccgatgctttgtgtttaaaatgataaatctgataagttcctcatttgatataattactaccagagccaaaatgtg

SEQ ID NO: 20209 - DNA, 372 bp, Oryza sativa
cagcttacaatactcacaacttgctgtgcatctaatatccttacctgtcaattatttcggaaagcctttcttgacgatccacttcatacttttggtacagggaattttgcctacctgcgcgagaactaggtcatataaggctaaagatactgtgaaagaggtaactgggtcactttttattaacagtaactaaaattcagataaaatagatgtctaccttgctaattaataacttgctacttgcaattgtttgggaaaaactattttgacgacatgcccttatactttggtacatggatgtgcctcctgacaaaattaggttatgagctaaatacgaaaagagtaacggccaatttacttaagtactaaatc

SEQ ID NO: 20210 - DNA, 438 bp, Oryza sativa
  unsure (1)..(438): unsure at all n locations
agcttcggaaccaatcaagcgccgaaccatgtctctatgtctngtacacagcgtacgttcgacctatccatggcggttccccaagcgtcgccgttcgggaccgggcaaccgaacacgatggcccaacctcatgcgcaagtcatgacttcacccttcaccacaccatatccgcagctggtgccgaacaagccagggggtgagaaggggctaccgctgagcangggaatcaagattcatccaatcccaccccagtttaagttcccacctgttccgcggtactcgggcaaaacggacccgaaagaatttctgtccatctatgagtccgcaatcgaagccgctcacggcgacgaanacaccaaggcaaagggtatccatctcgctctagatggcatcgcccgttcttggtactttaatttaccagccaatagcatntactca

SEQ ID NO: 20211 - DNA, 482 bp, Oryza sativa
  unsure (1)..(482): unsure at all n locations
gtcacctgcggcatgaagcttgccatcttacacagaagaaccttgcttatcagagttgcagagctngaagaatctagaagggtaacatgtctgccttattatatggatcggatgatgaggatgatgactctgagatagctgccgccgaatgggtacggagcaaaaaggttataccatgccaatgggtgaagaactcatggaaagaggagaggtatgactttaatatcaccaaggctgacaaaatttttgacttgctactccgagaaaagcagattcaacttcctaccggtcatacaattccatcggctgaagaaattgngcaagaataggtattgcaagtggcataattctgtgtctcatactactaatgattgcaaggtcttcaggtagcagatccaagcagctattgaaggaggcaaaatcatgtttgatgattctaagagggccgatgaaagtgatggcaatccttttnctatcaatat

SEQ ID NO: 20212 - DNA, 418 bp, Oryza sativa
  unsure (1)..(418): unsure at all n locations
tcacttaccgatcaaggtgggtggaatttgattgtgtatgcctaatatggcctatacttacgtgaggatttgatccttctatgtggcatgaggtaaccttgggtcggcttgggaaaggctttgtcgcgaacctctgacaccggccagtgtctggagtaagttcgtgtcttgtaggtaaagtgtacccctctgcagaggttaactaactgttcgaacagccgtgcccacggtcatgggcggatgtgaggtggttcccgttgcgtagatttgtttgcttgtgctttctgaanagttgctgtggattgggaatcgtaaccagaatcaacctatgtggcagatggatgacctgagtggtcagaaacgaatctgtgtgattcgggatatcgataggcatcatagactangcttcccgagtgga

SEQ ID NO: 20213 - DNA, 493 bp, Oryza sativa
  unsure (1)..(493): unsure at all n locations
atccttagagtcacctgctgctgcagcttgccgatgcggagttctactacaactttagtttcttagctagtatgcanatggcaccatttgaagccctgtatggacggaggtgtcncactccgctcttttgagatcagacaggggaacgccagttgtttggtacagaagttttaaatgaggcagaagagaaagccagagctgtcagggatagattgagaatcgcgcaatctcgacagaaaagctatgcagacaatcgtcgaatggagctcgctttcgaagcaagggactatgtgtatcttcgtgtcactccgctcagaggagtacaccgcttccaaaccaaatgaaagttggcaccacgttttgtgggaccatatcgggttttggaacgcatgggtgaagtcgttaccagcttgagctgccctccagcatgtttggatccataatgtgttccacgtctcttaattgaagatatgtatgagagctccgaaagaac

SEQ ID NO: 20214 - DNA, 430 bp, Oryza sativa
tctcgtgcttggtttctgctggtggcctctgtagtcaccgctgtctggttatctgcaagggctcatgaacccttcactattgtacatacttcgcctcatggtcggaccattcttctgtatgttgatgatgtgattatcactagcaacgatgttgggttgattgcagttgttaaggcatgtctcaatgcacagtttctgatgtctgatcttagttctcttcgctattttctagggattgaggtttcttctacccttgagggattttatctttctcaagcaaagtatattcaggatcttctggatagggcttctttcattgatcaatgcacggttgagactcccatgaaacttaatcttcatctttctgccagtaatggtgtgccattagctgaccccacagtacaaaaaaccggaccgggtcaacgggtga

SEQ ID NO: 20215 - DNA, 473 bp, Oryza sativa
  unsure (1)..(473): unsure at all n locations
agctatcgacaatattgtcagacgtaaccatgctttattatgcagcagaaacagattagcatcacataattgttgcgtntgtcagaaacttaacgataatccaagcataccatctgatcttcgctgccttgtgcaagctgctctggctgatgatgaggatgcctcaatcaaatgaggaggccggcatggcgtcatcggctggggagaagatgggccttcggatccagaaggcaggcagccctctctcttggacatcagcctccacaatcctctttctccccggccaccgtgtggggctgtgacgagccgacaactgtgtgaggggctacagctgctcgtcgccgccctcctttccagacaggatctgagtaaatgagaacacgagtttgcacgagatgggatagcatcgccactacttgccgtcagagcgtttgcgccgcaactccttccgtacggcgagcgtctccatccca

SEQ ID NO: 20216 - DNA, 482 bp, Oryza sativa
  unsure (1)..(482): unsure at all n locations
tacaataagataagcagctccgacttgctacgacggatcttattctaaacagttgacttcactgaccaagaaagccccaaaggatcacatangagacagcttaatcggaagctttaagaggaaaagaggtccagccactacagtagtccagatcaacagtgacaggcccaaaacatcacctctgacggatttaacctttgtcagagatgagtggtcagtgttgtctcctctcgcctctaacgggtggaggcatcctttagtgatgactatcatatgtgacgggtcgtaaaatttcactcatcacatgtgacagatcgtaaaatttcacccgtcacaggtgatattgttctctaacggactacatattatcacccatcaatgagctgcttaatagggaagaaaatcagttcacatgttagcacccgtcacttatatgcactaatgtggaaaagcanaaaatacaaagttaatccttgttcatc

SEQ ID NO: 20217 - DNA, 471 bp, Oryza sativa
  unsure (1)..(471): unsure at all n locations
agcttagntggtgttctgaattatagccacctgctgtgattctatgataaattcaaagtcttggacgatntatataatgcacgacatgacagcctattagggcattataatgcacaaattggcactcttgcatatatttnttttccattttttctatggacgtccttatgagaggaaacttgctggaattgtttgtttaggtgaaaccatacatgctgctgttggtttggtttaattcggttgctgcagtgggcggatgtttatcttctccttctgatctggtgctaggctgatgcctgctgtgatacctcagctgacatatggngcttacactgagcatctttagcaacttgccagcttacactgagcagttgaccacttggtgtttgattggatgatgtgattatttgaaatttgaagcgcgtcaactaacatgatgtatctaatgcacccattgtcttaaacaaccca

SEQ ID NO: 20218 - DNA, 468 bp, Oryza sativa
  unsure (1)..(468): unsure at all n locations
ttcgtagatctataatctattcgtttcaaagatccccaattattttaaccactatgaacgtgaagaggaaaggaaggagcaaggggaaaaacctgatgcatcgcaatgggcttcatcatcatgcgcggatacgtattcttcacatttcctttataaaaaaaaaaagaggaagagagaaaaaaaaagttcttactgaatcttgcatgaacaaaaaacggagagaaattcgcaaggaaacccgacagatatactgataaaatgcggcaccttctgtaatgcgcgtttgggctatctagaaaatgcaggagattgttctnctncatcctctcctcctcggcctccttcgtnctcacgtcctggcgatgcatcgggagacgacgacgatgcggcggcggcggctcatcaccacgccggatggtaatcatggagtcgatcggagcccgtggaaataatctcatcaattgctgg

SEQ ID NO: 20219 - DNA, 475 bp, Oryza sativa
  unsure (1)..(475): unsure at all n locations
tctgattatcctgctactacatgggtgtattattggcaagatcctcagnnggatgctcaattgtacgctcagtggcaaacaacatcatcatggacaggtcaaagttgggaggaatacaaggcggngttgctacattcacatggcttgatgctcatgtccacagaggagtacaatatggcatataatcagtggaatgcgtagctatgcatgtccttgtttatttcctttcattcgaactagaattgtaatcgtggacattatactgtggactctattgttattggggactatatntgtattctggactgtattgttattctggacctacatgtggacatcgntatgctttgaaatgtgagattgatgattgttattgttgttataatgttatgaattattcgtattgattgaactccacaatatagagtangtcatggccgaattttctgttgtatagccacatcttaattaacta

SEQ ID NO: 20220 - DNA, 422 bp, Oryza sativa
  unsure (1)..(422): unsure at all n locations
tagctctanaagcaatcatcgacaggttatgcttctctgtcctacagncacttggtacactactattatcggcttaataggatcaatattttgcctacaactgaaacctggtacttctatgtaataatcatcgcctcaacagtggacaataaggagtaagcaatacatggaaaaaatcatttttaagctgatgttatctgtgtttaactcttggagcattaaggatactttgccatgagggcttgctgtcaacaagaagagaactgatagatgcctcgcacaacttgatgttcagtcacaattcccatcaatggtttttcttatcggcacattatagatttgcattgngtgataacttattttgtgcaatgctgcacattgaatgtggaactggcgccgagaatctacgggaaaagataact

SEQ ID NO: 20221 - DNA, 422 bp, Oryza sativa
tcggatgtgcatcgactacaccgaccttaacatgcatgtcttattgacccttaccccctgccacgcatagattagattgtcgactccaccgcggggtgcgaccttttgtgttttctagatgcatactctggttatcatcagattcgcatggctagggaggatgaggaaaaaactgcattcattacccccataggaacttattgttatacgacaatgcctttcgggttaaagaatgcaggtcctacttttcaacgtactactcgaatttctttgggtagccagataggacgcaatcttgaggcctatgttgatgacttggttgtgaagacgcgcaaccaagagaccttactctcggatctagcggaaactctcgaaagtcttcgctccgcccgcataaagctgaaccccgatcagtgccgtgt

SEQ ID NO: 20222 - DNA, 489 bp, Oryza sativa
  unsure (1)..(489): unsure at all n locations
tgagatatcgactctggaggatgagaganaacattccacatatgagcatgatagtttctctttcanaaacccctaggattcatgctcacaaaaggaatcccagaggaccacttccctgtgtgaggaccgcaaccacctttcggtcctcatttctaacatgtatagaggtgtggttgtggacgcttatatttatcacaaatactgcaaatctcgtacttgtttgtggcactaatcttgcagagtgatgtcccaatggtcgagcttgtgaccataaacaaagcactactgggagatagcccggattaatatggtaagtttcctttctaataaaagcaagaaccagttcttaggataatatgcacctttgggtattcttggccgctaaccatttcaggttgagattaagagcgagggtcatacaatgcctaagaacatggtagctacttcaattgtacactttggtgacccttggtattggaacacactcta

SEQ ID NO: 20223 - DNA, 422 bp, Oryza sativa
gacacttaatactctatgaaatagcaaaccagtccttctaaattaagattcatccttatcataaattttacaaaaaaaaccatatttttatatatgaaatacaatctgaaggagagaaatttccatttctacggacagtgttgtatcttaaaaagtatgagggcattctcacaacaacacatcctaatccaatcccatctctctctctgctgcctacccactcccaacatgcaacctctatccgtcccatccgccactcctatccgtgcgccctcctcctccctgccggtgccgaggcccttcccttctccctcccgacccaacagcgctgacgggtgacctattctcctccaccgccctctatcccctaccctcaccgctgcattcctctcccgcatcgatgccatagacctcggcgggga

SEQ ID NO: 20224 - DNA, 493 bp, Oryza sativa
  unsure (1)..(493): unsure at all n locations
ngcatcggactataccttngagcatgcatgcncttactccgagttggagtatatttggtccctagcattntactttgtcttgtccaaatgtaactaacgtcataaggtctaatattattactctacagatatgtaaggtcaaattagatttataaatggtgatagaaaaacaaatttaactgtatgaaacaactgcattttttttcacaaaatgattcttttgcgtggacgtcaaattcgctcttacacgttcttagttttcttaagatattttataactatttcaagcgtttgcaagaaaagatggcacatgcgtaaggtgtttaaagtactgttcccattgttagccttaacgtgtgtacagaatggtgcgaacgtgccgtttgaaccgctcgccgctagacacaagacggtgtccaggtcgaacgcgctacgcatgcacgctacgtacgcaatgccgncgtttcngtatcgaactgtcgatcctcttgac

SEQ ID NO: 20225 - DNA, 492 bp, Oryza sativa
  unsure (1)..(492): unsure at all n locations
ctcagcttggaagtattgtaggagggtttatgacctacaggagtttagcaagttttataatagaggtgaccaccacatctaattntatgtatgatatacataattaaattaagaggtgacatgtataagagcaagtttgctacagatctgtagcccgctgctcttctatctcatcttttatcttattacaacatgtttatagcangctaatagtctgctattgtacctgctctaataggttgtctctaccacacaatccccaatatctctaagagtaggtacaatagcaggctataagccagctgcaaacatattttaagaagatagatgagaatagagaagagcagcgggctacatgtagcacggactccaagacacactgtgtgtatgactggtgggaccaggtattaatagtgtagtatgtaactatcgtatgaatgagctattagatttggtatagatgaatcggagctagtagtctgctatactatt

SEQ ID NO: 20226 - DNA, 369 bp, Oryza sativa
tgctctgataccagatgtatgttcttatatgtatcctagaaggggggtgaataggctttcctgaaattctgtcaacaattgcagcggttaaattgacagggcccggaacctcctggcgattaacactggaacttccgggcatgatgagtagcccggaacttccgaagttcttgagccatgaacttccgggcaacagagaatagcgaaattaggggaagtaaaacaggtcctatctagagatgatcacgcacagatgtgcacaagatgtagatctcaagataccagcagattcaaacacagatcatgcacaagagagacaaatgctgatttttaccgatgttcggatcacacggatcctactctccattg

SEQ ID NO: 20227 - DNA, 388 bp, Oryza sativa
tctagggttcttggtctctgcccgaggcattgaggccaacctcgataagatacgggctatagagcggatgcgcccccccagcaaacttagggatgtgcaatgcgtcaccggttgcatggccgccctaagtcgattcatatcgaggctgggagagaaggcgttacccttatttaagcttctcaaacgctccggaccgtttacctggacggaggaagccgaaaatgccctcacccagttgaaggcgtatctaagctctcccccagttctggtcgccccggagccagacgagcccttgttactctacttagcggcgaccccgcaagtagttagtacagcattggttgtggagcgcgatgagaacaattctcatttcacgcttccccaccct

SEQ ID NO: 20228 - DNA, 378 bp, Oryza sativa
  unsure (1)..(378): unsure at all n locations
tggtgctctaacactctctctatttacacactctatttcgtattataataccgggacacacatatcaacctctacttcctcattcttcttcctcctctttctccccttcttcttctcccgtggccatccttgagctcttccctcggcgacagcgatggcagaaccatgcgctcatgaggcgacgatggcggcggtgagaggggagaagacgatagtggctgatccgtgcaacgataagggatagcaatagttatggctacgacgacagatacggctacagtgatgagctcgacaagaggggtgaagccggcgacgagaggggaggaggtgcgaggagggctcancggagcagccgcttgtcccttcttcacccgtaac

SEQ ID NO: 20229 - DNA, 286 bp, Oryza sativa
tgagtgcattctcgtcgataaatgccatgtcttgctgcacttctatacctttgacaggataataaggctaacatacgcattgggcattaatctctcaagaagtgagggtcatacattagaagatgcaaagtctatcaacttgtccctaagtgcacttggaaaatgcatcaacgcgctagctgaatacaagccacatgtaccagttcgtgattcaaagcttacaagattgcttaaagattctttggaggtaaatacatgctaacctgcatttggtctatgtaaaatg

SEQ ID NO: 20230 - DNA, 437 bp, Oryza sativa
  unsure (1)..(437): unsure at all n locations
tcanatttctattagcaatntcaccaaattggtgaatatgctacttgctgaacactgcgcacaagtcagacgctaaagtttaaggctagattgaacaaacagttattaattcatgctggagatcttcccacaaaaagaggggaaaaacttgagcgctgagaagatcccgtgcaacaatggcagtaacaggtcctaacccattttgtaaaaagtgtgcaaagtacaacatgtctctctgtgttcatttgcatgcatcatgttagtatttgattatctgctaaactattagtacccagagacatttgcactacgactacagtttgagcagcgtacatcatttatccactatggcactatctatccacctattagaaatcaagttcaattaaagaggtgttcatatgaggacactcagtctagtttttcttcttgacaca

SEQ ID NO: 20231 - DNA, 311 bp, Oryza sativa
tatcttctcttcctttcattctccatactcacaaaataaagttgtttcggtgtaccgtaaaagtgccgtgtggatatactttccccctccttctttcttaccattattttctttacccactctctataccttcttgtttatccacccacttttctcttcctttccctttatcacctcatatacttctccttcactttattatacctttcccctttctcttttcctattatttatcctacacaaacatttccattttacccttctctctctcccccatttctcaatctatctcatttctttatccttctttt

SEQ ID NO: 20232 - DNA, 440 bp, Oryza sativa
tctcccgctcagcccaatggccgaacgggcagtggcgcacattctctctccgagcgctagcggtgacgacggggagcagaacccgcgccgtcgagctcgtactccaccgcccccctctcgccgaagtcttaggcgggaggaggcgctcgagggggtcgaaagatccgcgacttcgccgcccacgagcgatgaagaaggacggcgagacggagagcgtcgcctcctcgtctacggcgatggcagcacgccccagggcgcgctccaagctgcgggcgcgctcttgcgtcacccgcccgtcgtccccgatccagagactccagcccgacgttggctggatgacgtggccgacttggtcatgacggcgcagcagcgcctatgcgccggtgggcggtcctccgctgccaaggtctctggcgctgctaccgccggctccgtgtcgt

SEQ ID NO: 20233 - DNA, 425 bp, Oryza sativa
  unsure (1)..(425): unsure at all n locations
agctgacacccaagtgacacagccactccccattaatgcgatgttatcttatcgccaaaatgaacaaacaagaacgacacccacgaaggacaacaacccaagctaccaaagaaccactcctacacacagctagcatcaacaatcctataaagagattgcagtgtgtcatcgttgccaagcttcgtcgccccagcaaagcaactccgactctaccccacagtaaccagataagagtgatgaacacgcgctgtagcaaggaacgaagccaacgaagtgaggcctcgtcaaacaccctacacctgaagagcttcggggacattgcatgagtncaccaaggctaccattgcgcgcagagggttcttggtgttatgaggggttaacgccatgacgagacctctaatgaggggaacggcgccaaatggcgt

SEQ ID NO: 20234 - DNA, 333 bp, Oryza sativa
tgatcacacatagctcccatgatcctcccatattctctctaaatctcatctaaactcctaatcccgaatcattcctcatcaaggtcttacacatgccgacatgctgccttaattgacacaccatgcttattatgcacgctctccctatctcccggctgttgtatgtgtgtgtccccttgagccctttttctcaatataagttgaattttctttccccatttccaatgacttacatcactacatctgtcgtcaccacccctacctgccttctaaccaatttaatgagtcctccctacccacaatgttggtccttctctctcctcttatatatcg

SEQ ID NO: 20235 - DNA, 481 bp, Oryza sativa
  unsure (1)..(481): unsure at all n locations
tacggttacgggcacatcgtataaatggcaccacccatcatggtatacacacatcgttcaagcgcataccaganagatttcatcctatttatatcataaaatttatttagcacctgaggtctccgaatcctattgtacacataatataaacataattctatgttaaatagaaattgttcgatatatcctataagaaaagcgttaattgaggaatccccttgatcctttaggccgctttgatttgtaggaaaagtgtaggaaatttgaaggatttcaatcctatggaaaatattcctatgaaagcctttgaaacaaaggattgaatgctacactatcctttaaaattcctatgaaatgtctaatcctatagagaatttagagaaaaagtagcaagaggtccaacccttttgaaaaanntcattgagtctatctctcatccgattcctgcgttntccttgtggtcaatcataccggcattcct

SEQ ID NO: 20236 - DNA, 332 bp, Oryza sativa
  unsure (1)..(332): unsure at all n locations
attccgaatacgctattacatgtttgcgctaatttttgttggttntgatgtggaaacggtctttctctacccttgggcaatgagtttcgacgtattgggtatatccgtttttatcgaagctttcattttcgtgcttatcctagttgttggtttagtgtatgcatggcgaanaggagccttggaatggtcttaactgaatattcagaacaaanaatataagaatgaaaagattccattaagacagttatgagtttgattgagtttcccctacttgaccaaacatattccaattgccgtatttcaactacactaaaagatctttcgaattggtc

SEQ ID NO: 20237 - DNA, 414 bp, Oryza sativa
  unsure (1)..(414): unsure at all n locations
tataaggggggaagtaaacctgtgtttattttcttggaaacgagtaccctcttcctccgtgtgaagaaaaggaagaaataaatcaatcaaattacgagaagcctcataaagcgcttccttaggggttaaacttccattggtccatatttctagaaaaagtatctcatattttgcatttccattcccacaagcaaaaatactataattcacatttcgaacaggcatggatacagcatctataggataacttccatcttgagtgttctttctgacttccgtgtgatatccgcgatctctcttgatccgtaactcaatacggaaatccgtgggttctgtcaagttagctataggttgtgcccgatcaacgatttctacggaaggcggtaagataatatcttgngccagtatgtatct

SEQ ID NO: 20238 - DNA, 255 bp, Oryza sativa
cttcttccaaagcatacagctttctatatgtatatgacgatctctatacagatggatcttatatgaatcgtatgatgaagtaccacatgagtggatatataggaaaggaatccaaatctgccgaatcgctcatgttatgatcttctacatcctatgtctccgcgttccgtcatctggcttatgttcttcatgtagcattcagatcgaatgactctatgaaattacgtcgatacttctacatattatgggtaacgt

SEQ ID NO: 20239 - DNA, 400 bp, Oryza sativa
  unsure (1)..(400): unsure at all n locations
ngtacagtttgngaagggggtttttgagagaaaagaagaatctacttctaccgatatgcccttaggcacggccatacataacatagaaatcacacgtggaaggggtgggcaattagctagagcagcaggtgctgtagcgaaactgattgcaaaagaaggtaaatcggccactttaagattaccatctggggaggtccgtttggtatcccaaaactgcttagcaacagtcggacaagtgggtaatgttggggtgaaccaaaaaagtttgggtagagccgggtctaagtgttggctatgtaaacgccccgtagtaagaggggtagttatgaaccctgtggaccacccncatggnggcggtgaaaggaaagcccccattggtagaaaaaaacccacaacccct

SEQ ID NO: 20240 - DNA, 482 bp, Oryza sativa
  unsure (1)..(482): unsure at all n locations
tgcattntatctataacacgtctaatttcttgtgggcactgcacatattcccctggttntgatacaggcgtatccaaaattcactcacacttaanagctcaaaaaagctcccattntaatcaccacacgtctaacaaatttcttgttcacatccacagaagaagctatccatgctgtactttacattgcagtattagactctntatactacttttacattacattattagacctttttttaacacaaaaatccacctacccaaccaattttttgccgggctggtcctcctccccccgcatgagccgcccgtgcgatgacgtctcccggtgggtcacaccgtcacacaccgtgctataaataggggggcttggcctctccgccatgagcaccacacttcaccagcttcgctttgcacaaagcctcagtgcctcactgcacttgcaccggtcacttaatggctcggctcaatgtgctcgtgtgc

SEQ ID NO: 20241 - DNA, 481 bp, Oryza sativa
  unsure (1)..(481): unsure at all n locations
tagcaagctctcgctatcgcacaacagtctaacaaatgaatgtgttgctgctctagttatcaaccgaactacactttcagagctgtaccttggcggaaaccagttacttacaacaagttggatatccaatttgacgtctcttagggtggttgatttatcccagaacttcttacacggatacaacggtatatctccgctctttttgttagtatccaaggcaatttatccaatatttgtgttttagttttgcaggtatatgtaacctccatcaactagagtacctacaccttggtgtcaacatgctacatggaaccataaattcatgcttgggaaaactacaacaattgaagtacctgaacatggaaagaaactttctcatggcggagaatgcaccgaacttacttatcaacttgaccaaactggagactatacancctggggtgaacaatcttaccggcacattcatgctctttctgctagc

SEQ ID NO: 20242 - DNA, 383 bp, Oryza sativa
  unsure (1)..(383): unsure at all n locations
caaactcaagcnnctgaccaaaacagaacacaccaagtagatgcagctacctctatcaatgatcacacttgctcgacgaccgcngatggcgaaaaaaaatctgatacaaattatggcgttgcaacctgtcatgctgctgtacctgcgtgctgagcacccgctgcacaatgatggatctgtagtccgttgtgtcatcacgaccaaagacttcaccatcctcatntctaacttcttcttcctcctcttcctcttncatgtcagaagtggtgatgtaaccatattctgtatcaacataggcccgttgactatggcaatctttctgcacatgcccaaacccttggcaaccgtggcactaaatgcgttctgtcgaggcgacagatgac

SEQ ID NO: 20243 - DNA, 318 bp, Oryza sativa
agaggtgacccattcactgtcaagcgggtgtcaatgaagaatgcttctctttgttgcttgttgaacaacctctccctcttctacaagaggagcaaaacattgagatataataacattctattataatctacgaccagcaatttttactctgtgagacctacggttagataccttgtgaatcttctccatctctggaagaaattgttcttcaacttcttgccaagcgagacctcagtcctgttcctacatgtaaagagtgtttcctacataagataggcaggaaaaaactactatcactaaattcgcatatattcgatc

SEQ ID NO: 20244 - DNA, 417 bp, Oryza sativa
ggagatcagaacttacaagtgcaatggaccctgtagtacggttatatcttctcatgttcaaatttgaactgattctaagaaccattagcctgcaaataaatagaatggtaagtactactggtaaacagaacctaatcataatcattacagtgacccaactttgagacacctttcaacatcaacattagaacttccatctgaggatttcagttgagtagagtatttataatattttcagttctgagatgtaaataagaagttgcaaaaaagaagaagagagaattatataacatatcaagcccattcacataagatgcaaagaactgacttgtaacgctcacagaaatgcagtgccatgtcgccaactgctgctccactgacaataacctttgcacccgagtcagcaacagctttgat

SEQ ID NO: 20245 - DNA, 439 bp, Oryza sativa
  unsure (1)..(439): unsure at all n locations
tatacggaagggaatacaaggtggcacgtatgtcagctgagatatgcattgtttgatattggttggtttgtattcggcttagagaattgatcgctacttggtactttctatatacgtgggccgaatacatctgctaaagaccggagcacgtctgtatgtatatatatcaagtgcatggccgattggaaggggaccaatcgaacaaaatcaatctacttatttagnttttcatctatttctggtttctctttcccgtgctttttctctctactggcaagctctagggtttggtggatctttgtcattttgcgctggaaaacggtcggttctcctccacgaaagcgaggaatctttgttgctttgctcggaaaaactccggtgatcgtcacgtaagcacggctagtatcgtgttgttggcggatcaattcgcgtgcaacat

SEQ ID NO: 20246 - DNA, 267 bp, Oryza sativa
  unsure (1)..(267): unsure at all n locations
atcacaccgtataacccacagtctattngctatgcgagtaactaaagaagtgcattcactatgaccagaaaacttgatattctctaaccatcgacggatcatgcattgcacatgagagactctatattttctaaccatggaaaacaagataatcaattcatcttcacgaatgagtctaagatcagctctatggaataaaatcatgccatgccatttatgcataatcctaatagtatgattatggatatcacttgttctaggctttct

SEQ ID NO: 20247 - DNA, 442 bp, Oryza sativa
  unsure (1)..(442): unsure at all n locations
gatgaacatccggagatatccctgaacccagatgaagaagacactgtgtggtgggagttggagacacatggccatttcactgtatcattggcctaccagatgttcttcatggcaagccttgtccttaatcccctatgtttgttcttcatggcaagccttgtccttaattccctatgtttgatgttgtgacggatcatccagaaggagagaaacacaggagcagtgtttgattatctgggcaagtacatatttcggtatttatgtcatgatcatttgctttggtctagttttcatgcagagtaggattagaaatctcangccgatgtgtccgaaatccccagtgaagggcattggcaagcgtctcaagcattntagattacttcagctnttgtctctatcaactctttggtgaaacattctangccaattattcctcttaacc

SEQ ID NO: 20248 - DNA, 456 bp, Oryza sativa
  unsure (1)..(456): unsure at all n locations
tctcatactgctaaacggtgtgtttattgcaatatgtttctatactatagttgcttcanaaaatcatatgaacccatttttgaaaaagaagctaatacttaattaatcacgctctaatggagcgctccgttttctgtgcgcaattcgcatgttgggaacagctgattctaaacacagcgttgattcgtcttcgagatggaaaaggactaccacagatttgtagtgtgtcaagaaccagtttcctttgggtacatcatgcgtgagttcctgtagttctgttgaaacatcaggtttattatccattttgtttgcagtaaagtatcgacttggtatgttagaataaacttctcatagaaacgaggggtcagcaagaacaacctcagtgtgtaggagcatttcataagtaagacatctcataattttcactttggaagaagtgtacattttttaagtcac

SEQ ID NO: 20249 - DNA, 489 bp, Oryza sativa
  unsure (1)..(489): unsure at all n locations
ggtgagctatgtgtgcaggagcanattgatgatatgtgagctttgctacngagggcgacactcgagagtgctctattagctactgcatgtttgagctttcacactagcccagcaagatcaaggagagagagcaagggaagagagggaaagatggagaagaagcaaagtgtcccaaagggaaactatatgtaatctttcctggttcaaactgaaaatattgtgccgctactagtccaagttgccacactggtaaaaataaatggccctatatgcaatttactcaaaaatctgtaatgccccttagtaagtgatatgtggttgggagtgagagaacggttacagatatgatgggccgaaatttgaataggaggtaacggatcagacaaatagtactcgagtgacaattcttgtgggacaaactctgactcatatgattagcttcatcgtatcgcctacacctgattataagctgtaacatttattggtaac

SEQ ID NO: 20250 - DNA, 422 bp, Oryza sativa
  unsure (1)..(422): unsure at all n locations
tttgaaggactcaaagaacaactccccccacttaagtccctaaaacttcctagagaaacaaacaggatggactaaaaagtccctaatagtgcattttccagaagtcccaaatggaggtgcttattgggaaaaagtggctctattccagccactgncccttcacgccagccatccctattcatttgcatcgccactgtctttgctcgccttatctcttcctcgacgtcgctctctctcgctcctcacaacggccgacccatcgccgcggctctgtctcgcttngtacaaccccgcgccctcgcctgcgtcctgctttagcccccaccgcagctacatgctcactaggtctctgcccggcgcttggttcgcctggtctcgtgcatgccgaccccgctcgcgcaagcctcacgaatcgcgcatca

SEQ ID NO: 20251 - DNA, 376 bp, Oryza sativa
  unsure (1)..(376): unsure at all n locations
agcttaacttagtgggtattgatagaaaattaagttccactcatccaggatcttaataaggctctaatttacacatgtgctagctagaacatatcttagttaaacttaattntactagcctttatagtatggagccatgagcaaatgctcagcttaataattagaccctgtgacatatctttcacaaccatatgtgaaaacacatgttgttactagaatagaaaactgtgtttaattagtgcacaacttatagcatagtataattgtgagtggtttatgagcgctatntaccactcttatgtcagggaaatnttcttaaacatatgactgaatcataacatgctacaaaatccaactgcatcgtcgactatgcaat

SEQ ID NO: 20252 - DNA, 490 bp, Oryza sativa
tcggaggatccctatgcttactaccaggatggtgatgaagactatggcgctcagtaggtcttagttacggtcgttgcctgtggcaatggcgtgccgctgccttaactccgctgccttacctacttctgtttttggaatgtattccggaccacttggtccgatgatttaagactatgcctgcgggcttatgatgtaataattcgttctagacactcgtgtatgtgcacttggtatttcagctatgaattcgtgtgtaccagactacttgatccagggaaatggtactgtttacacgattgatttctgttataaaaacgggggtccacacttacccaatcggtgcccaaccgtatcattacagataacgacacccagttcaccagtgaacttttcggcgactattgcgacgacatgggcatcaagctgtgctttgcctcgcctacccaccccaagagcaacggccaagtcgagcgagccaacgccgaaatct

SEQ ID NO: 20253 - DNA, 477 bp, Oryza sativa
  unsure (1)..(477): unsure at all n locations
ngctcccaagctcgnnngaggctcgttgtccttgtatgctgttgttgcaccancacacacagcactgcgccacgttcaaggcaggtctcgccaaaatggcctcgagctcgagctcctgtagtctgccgccaccgaggatctcgagcttcatgggcgaggaagcgtccgcaggtgaggccacaagttggagcaagctgagctcgaggccatgacggaattgagctggaggacgacgactccgcgacgatgttttagctccttctatcctcatcaatgctttcatccagaaagcgcgtgctgaagccaaatagtcgcctgctcacgttctctctcccttccaactcaacactataaccgacgtggctntcttatcaccggtccgcgatggtttattgcacctgctctaagtcgatacgtccggttccagaaaaagaggataggaatataaatttagtacttggacccaccgcacgctgc

SEQ ID NO: 20254 - DNA, 244 bp, Oryza sativa
tggaagctatagcggcgaggaagatgatgaatcggttttggtgattattttaccggtttcactgaatatctctctttgggctgatgcccattatgcatttataacccatatttcttggtgtggcctgccacgtgtcaccatatgtgattttacagtatgcgaatggataaacacccaatacccttaaaatcgctttttacaagtatgtacacaacttatcctatactataatactatacaattg

SEQ ID NO: 20255 - DNA, 163 bp, Oryza sativa
cttgctcaagacctcaacccggagcatctatatatgacacggcttgagagcggaccaccagcgggcggcgtcacggtggccgagatgacacaagctaagccatgtgcacaccctccgcgtggccgccacatcaaccgcacgacacgattgatcgcgcgggcgt

SEQ ID NO: 20256 - DNA, 335 bp, Oryza sativa
gagcatgcaatctatcacctaaagttatagacccaaaggttatgagtcttatgttttcgtacccgattcaaatgtgaatttgaattatatctgattcatattagcatctgaatcaaatatttctatatatagtatttgatacatctaaagtttatacacactaagttgatagacccaaagtttacaagtcaaatgtttacataccagattcaaatgtgaattagaattcaaatattagtttatagacccaatatttataagccataagtttacatacccattgtaaatttgaatgtgaattcacatatcttatatgtaggatctctatacataaa

SEQ ID NO: 20257 - DNA, 488 bp, Oryza sativa
  unsure (1)..(488): unsure at all n locations
tatgggtgtttcttgttgtggcctaacttatggttcattcctctttgtctattgttcaccttaagaacggttacttttttgcaatattgtggttgcatttataagcagttgttaaagttaaaacttaattntgaagtttatcttaagctttttcatcccaatttattttccagcgttgatctttaaatcactgaggttttttttaacaaaaattattgtttctgataagctgcacaacttgtatttagcatctagccaaccaatgggaaccataagtcttctatattgttgaattgagtagtatcgtgtcatcgttgaaagggcaacaaaccaataaaagtagaggaactccttttttttatatggtgttatgaatcaaactatcaactctttatgtcttatcaaattcaccagaatatcatattttataataagttaaaataaaccccacaataagttntggttcacacatagccacgatgactcga

SEQ ID NO: 20258 - DNA, 423 bp, Oryza sativa
  unsure (1)..(423): unsure at all n locations
gcgaggcacgataccacacacacatcgtgtaggtcccagaatcacaggtgtccaacctcgtgagcaatctgcancaatggtaatctcaccggacagcatatagttactaatgctgaccactctaaacatcgagcagctcaacagggatagaggcaatgagccatctcaaatgtgtggaagcgcagattatagactacaagctcctcaatttcccaaacacatcggggatatcgccatggaacatgtgatatgacaagccaatcaggggatacgtggaaagggtaccgatggcgctatcgatgcagccaaagagctgatgttactgtaagcttacacaccttatctatggaatccggacaagaacatgggaggcgccattaaggcaatgcataaggatgagtcgtgacaattgactgcaaaacg

SEQ ID NO: 20259 - DNA, 484 bp, Oryza sativa
  unsure (1)..(484): unsure at all n locations
tagntgctatgctaagttaaagagaantactacgccncttatgtatcaatatcataactcncgctattattcttgatagggaagagctaatactaacgtagacaaagtgaaaaccaagttcagacatctttcatgcaaaatgtaccgatctaaaagtctaaacactgctccttttgggatcagggcatggtataattccccagttcctcctcacttcatccaaatcttcatgaaaatgcttctcatagtacacagacataagatctgtgcacttaagacctgctnttgaagcccatgggaaataatgctgaanaaacagtgtcctttgtttctcattgaacctcgcagagcccccaacgactgaaagcatgcacattggaaggaacatctgttcaaactcaatgaccttaagggcagtctctccaatcaggttcgtaggaaggccgaacagcacatgccatnaatcatggacttcaccggcgcg

SEQ ID NO: 20260 - DNA, 301 bp, Oryza sativa
cttattttgtgatatactaaataatcgagactcatttgatgtaatatggagctttatgatattccatgtattaatgttacttacaatttgtaccccatctcaaatccgctcaccatgggttgcaataacatgcacctaacattcataatctctactatcatggttctattattttcattcatttgtaaacgacaatgactgaggagtgaaaggataactggcaacagggccaaattatgagaattcaaaatgctccatggatatgctaattaaaaaaaacaaccatagtgcaggatcaaaa

SEQ ID NO: 20261 - DNA, 417 bp, Oryza sativa
  unsure (1)..(417): unsure at all n locations
tttaagcaaaggctcactgcnttccaaatcctctntntccagttcttcccttcacaaatccccttgctataaaaaccccttcgtctctggtgatctctccggtgattcaatcttccgatggcgatctccccttgttctcaaccggttctgcttagatttgcggtgtacccagagcgatgccaaccacttccaatgttcacgaagtaagtctgtttttaccatcaattttcccttgtaaaaaccctttcccagttcttaaggtttcccgctttttttctgactttttcaacaccttaaaggccaagtcttgattctcgtccttcatgctaacacccaacattttcttggccccatgagcgatccggatcccacgatgttcattaatgctgagacgaataggatcccttttagagaatc

SEQ ID NO: 20262 - DNA, 469 bp, Oryza sativa
cttcgttcttatcaacatggcaatgtctttgtcttgttgaccatcaacccatgatgtcatccattatcctcatcacggtgggacctattcctttgcacagttcatatgagaacattagtaccaacaaatcagttatcatcatccacttgatgaccaaccggttgcatatgaaagatatgaatatgtgttgtaggtattcattaacaccacaagtatcatatactcgtacgcatgctcaagtgcaaatatccgatataaataatatgcaaataatatggatctagaacattcacaataaatgtataggatgtgctcccgctatatatatgcatacacaaaaatatacaagagatgtaagtgtatgcataagtaaagaagaaccaatggagtttatcctatacacgaaggcatgtatcaatgataaagataacatatcacataccttctgatcttatgttcttaatgtaat

SEQ ID NO: 20263 - DNA, 408 bp, Oryza sativa
tctcgggttcttggtctctgcccgaggcattgaggccaaccccgagaagattctagctatcgagcggatgcgcccccccagcaaacttatggatgtgcaatgcgtcaccggttgcatggccgccctaagtcgtttcatatcaaggctgggagagaaggcgctacccttgtttaagctcctcaagcgctcggggccgtttacttggacggaggaagctgaacatgccctcactcagttaaaggcatatctcagctctcccccggttctagtcgccccggagccaaatgagcccctgctactttacttagcggcgaccccctaagtagttagtgcagcgttggttgtggagcgcgatgaagacaatcctcatttcgtgcacccccattctgtgctaacttggcccgggag

SEQ ID NO: 20264 - DNA, 152 bp, Oryza sativa
aaccacgagatcacccagaaaagagaaaggaaggtggagccttgtcacatcaaagaagggatccaaagcacggaacagtggacacaaacgaacaggggaaaaactgaaagagctcaacaaaaacccgtgggcactaacaagcgctgaacaag

SEQ ID NO: 20265 - DNA, 379 bp, Oryza sativa
  unsure (1)..(379): unsure at all n locations
atgattaanacttgtgcttgagagacttgttatcttctactatcccaactagactatgtgcatctgaagcctggaggaaaaagtacaccgaaggtccctcaacttgttatggagttacaaaattgtgggtgtagctatatttacggtgccatattnttcatcaaaaaataatcggcatgtatttacattgtaagttcctaaattacatatgtaattttagtgtatttacaatggaagtctctaaattacatatgtaagtactaaaattacatatataaattcgaaaattacatactatacatatgtaagtggggtgtaaatgacgtgtaactactgtgtaagtggctaaaaaaaatcgactgtagcatatagcgctata

SEQ ID NO: 20266 - DNA, 482 bp, Oryza sativa
  unsure (1)..(482): unsure at all n locations
ntacctcttgntgaagattgaaaccgatgcaactcatctccttatttaagaactcgncgaaataaaacataagcaaaagggtggtgatgcgccaagattgtattgaatgtgtgtgtattttacataggactcggggtctatttatacccgaggattacaagatacgcccataccggacacgactattatctctaacaaactctaagataccataagtctttacggcaaacttttgcccacatctatctctaaggaatttacataaaatatcctaattaatagatacaattgcctgatcaggactccatccatgcgtggcaatcatcttgaagcacatcaactcgaacccgatgttgtacacaggtcgtgttgccggaatcggctatatcacttaaccaatctaactcagacttagccgattccaatcgtagccgatccggactccagccaactctcactctgtttctgcaacaatccccatc

SEQ ID NO: 20267 - DNA, 331 bp, Oryza sativa
tttgctatcgtcgttatctattaacttgctagacggtttattagctactatagctactacaggactattactactaatattgtaagactatggaataaaaataccctggtgaggacttgcctgctactctctgcaatgaactttataattagtagctgcggttaaccggactatgcccatcgatcattgcgtcccatgcagaaacaaaacggtgctgagtcatgggctatctcacgtttctttatgacgtactgtacatcatgtccaaatcttcttgggtgccaattagagaagctaatgtcttaactagaaagcaccaagtatatatcat

SEQ ID NO: 20268 - DNA, 487 bp, Oryza sativa
  unsure (1)..(487): unsure at all n locations
ctcagcttgcttaaacacctaagtttccgtgacttgctgagtacgaaagtactcacccttgctctatataaatatatatatatagttcctccgccctgaagagaagataaagtgaagattagggtttcgtcctggttcccagccgtcgcctgtggtgttgggtgttagaccgttggttccgctgctgctgttgttgttggtgttcgcctcgtccgtgtcgtcggttgtattctcgggctgtctgagctgcaacctaagttaaggtaaataaatcctctatctattttaaggattcctatgattcatatttgtcaccgtgggtaccaacactatgtcctgngactggtaccgagatcgcggtttcgtaggaagcggttcacgccgttttccctacgacacgctcctgtcaggtgccgttgtacggcggtatcagattggggtgtgacatcgcgtccgccgacgacngcagctccacctcttcagtgtc

SEQ ID NO: 20269 - DNA, 482 bp, Oryza sativa
  unsure (1)..(482): unsure at all n locations
tgaagggttccaaccagcttacatgtagaactttatgtatataaacaagtgatatttttgagttttccaatgatttatattgtcaatatattagagacgcctaattaattgataacaactttcgatctgaagcaaggaggagactctcaggtcgattgtctacagctacaggcatggtttttctggcttctctgctatgctcacacaatcacaagccagaaagatagcgggtaattaatcaattaatagtttgtttggacatatatttggtgttttgggatgataattaaaagcaaacatggattgaaattttgttccctcatgacaggcctgcccggngtcctcagtgtaactgaaaaccaaatatacaaaacgcatacaacacgaagttgggattttcttggacttgattacaagccgacaaatgggctgctcgcgaaagctagatatggagaaagcgtgatcattggtgtcgttgacac

SEQ ID NO: 20270 - DNA, 431 bp, Oryza sativa
  unsure (1)..(431): unsure at all n locations
tcatgctaagaacatattttggatcggctatacattctactcttatgttntagaccagcccagccccttccttttgagtttccgcccagcccactacctctgttcctctacttgggtgtctctctttgacccaactcacaagtggagctggatagccggccctctataaccgtcgaaagactgtctcatgtccatatgatgccaaaaccgatcctcctcatcaaatccgatcgaatctttctcgatattctaaaattggttgagggagtttgtataccctcgatctcatctttctgtatttaattggtctacagtttagatacactcgatcgtcaaaatctgttcttattaaaatcggagtgaatcctacaattcacgatacacaatgacttttcaatggagcataaattcactgaattaaagccgaattg

SEQ ID NO: 20271 - DNA, 209 bp, Oryza sativa
  unsure (1)..(209): unsure at all n locations
cgctcnctatggtggccgccgcgggctggaggttgttgatgacgctcatcgcgcacgcggcgacgcggatactgtggtatacgtgcggcggcgatggtgagggggaggacagctcggcatgcagagggtggtctgtgtcctcctgcacaagcaggtcctgacggtacatgattcgtgctctctctcaaccgccttcctctgttccgatt

SEQ ID NO: 20272 - DNA, 243 bp, Oryza sativa
cgtcatcgccctatcttcactcttcttcatctccctgcctatatgcatgccggagtgtattgggtttccatacccatacactcctcgtgggaagagttatctttttctgtaactaaccggctatgtaatttggttatgtaattctttttctaggaccctgaaaacggaattctgaccggttgtgttgtgtaactaaattatgccatcttctataataattaacgtgcaaattttgcgtcgtaa

SEQ ID NO: 20273 - DNA, 475 bp, Oryza sativa
  unsure (1)..(475): unsure at all n locations
ntaattagttaattgggtgactcttcttgatggtgcattttattctggcatggtactgatgagtaggtatccatgatgttctgtggtgaccaaacagacgatggatgctttttttttctccatcattatttctcccaattttgtttttttgcttggttataattgatattagtagaatgcttgattggtgctatatatatgctgttntggattcctctggaattcaaagtgtcggctgtgtgatctcaggtgtcggcacagataacctttggaaaatgaataaataaattttactacctagtactatcttctactgctaatatacagtattagtgactagtgagagcataaaataaaatatccagagaggctagaggctacctgcatgcacatccttaatgcgcaagcaatgacatgacatccaaattgctgatctgtgatcagtcaccacctgaccctctacatatactntatg

SEQ ID NO: 20274 - DNA, 322 bp, Oryza sativa
aagtaatgcacattttttttgatgtctgctccatctggagggaacttcaacctcaatgagggaaataaataccgataaaagggaacctcaacacctcaaagaagagaaaaagaacctggttaaagcgtattggcatcaacctccgttcaaaagataaatcatggttccctgcctatacattctcaaaaaaaaaaaagagcgccccaccttaattgcgaaaagccaaattgatacccttaggcattaataaacaactccgttgcaaatggatttaataatgcgatccatgaaaagagttaattggacagaacgtgctacaaac

SEQ ID NO: 20275 - DNA, 388 bp, Oryza sativa
  unsure (1)..(388): unsure at all n locations
gatcccgnttctggcttaagttcgcttctagttcatcttctggaatcttccgacttttagctcgcttctaattcattttcttgaatctacaactatagcttcttagaatctgcacaaaaaaactaaattgtttggggaagcttctgattctgagagaagatgcaacagttaaaaactcccccaagtacgcccatagtattatccttaacgatggattttctcttatttgctttatatttcataaaaacataaggagcctttttaaataggaatttacccatcagataacccaattctcttattngctctctcccaaacaggcccatagtactatccttaacgatggatnntctcttatttgctgtatatctcatagaaacataatgag

SEQ ID NO: 20276 - DNA, 352 bp, Oryza sativa
  unsure (1)..(352): unsure at all n locations
tggaagagaggcaaggttgatctgcacactctttgtctgatattattctgatttctctaagcgattnatttctttctaagtgtgggccgaatagagacttgcgtctcgatttgactttaagagatgtttttcaaccgctcatttggtaatgtaccgacctcccgggtcagatcattacttctcgggtccagagcccttccacttgattaatcggctctccacagcctttttattctgtcgagtcctagagtccagctgccagtagacacaataccgtccacttgaacgcctatcttgatgccgagacctccgaatacacgatttctctgacactcacgtctcatctgacaca

SEQ ID NO: 20277 - DNA, 450 bp, Oryza sativa
  unsure (1)..(450): unsure at all n locations
actcaagctttggagaagaagtcttaggtggagtcctggcttataccccagttgagcgcctgtgaagatggagccgtaggcccgctagtccgctactgtttatttntgattgccaggcctgaagcgcctctgtaataatgtaaatactatcgatataataaagatgtgtcttttatatcatgtttgtgtggtgtaccccgacttttcctgggacggcgattaatacactagcgntcgggaaaacgtaattttctcggtcgtgacaagctggtatcagagccatctcgactgtaggataagccaagtggataaaacctaaggacatattttataaataaaactatttgcgaaagttcctctttctcttcttcccctagtgctatttgcaaaaggtttacccttttcttccttcttcaaatttcaactagtactagatggtcacgtcagtga

SEQ ID NO: 20278 - DNA, 355 bp, Oryza sativa
  unsure (1)..(355): unsure at all n locations
agtgcccgcatgatgcaattggcagcggcgcactatatcatcatccatctaaacaaggcgcatgacatcccgtatcgcctcctccgcacgtcgcttataagccgttgtctaacacttgcgtcgctggattgaatcacgctgagtcaacgggcttggctatgttttctcaagcatagtagcaccagcactcaattcttctaacccaagatcaatgcacgacatcacaagaaagcaattccaatattatgtcacgtcggcgaatgggtgacaacagaaagcaacaagcngagattggttcacgacttcttccttgacatcatgggagcgccttactctccttcatcaagcattgatc

SEQ ID NO: 20279 - DNA, 511 bp, Oryza sativa
ctatacaacactcaagctggtgatatgaaggagtgggaagctcctgaatcacacagaactattgcgggtattttttgacagagaacatacccatcacaacgtctggagcatcctgagcagtctcggcttgaatgtggttcactcggtctcgaccaaagttgttggacgcatgagaaccttgtccacttgcctgtgagctatgacgagactgagctgccgctggagtaagagttctagcagtgctgccattagcatgccctgagctggtgttggtaggattctgagggcactgtctagcatagtgacccatctggttgcaccggaaacactgaactgctgacggtccctgcggtgacttgaaagaggtaacactgtttggcgcagtattgccactatgggcacgctgctgtggctggagtgccggacggctcatctgaggacgaggggcgtaacctggctgggcggtagcttgagtgaccgactgatggtattgcatgggctgaccgtacca

SEQ ID NO: 20280 - DNA, 188 bp, Oryza sativa
tgctagcatgcaagcttgcaccatctgtctgagagaactattggcattttgacctcctatatgacatcgccactgagaagagcgacgatgagcattgacaccgctgtccgtctagatcttcgggagaaccaagacagggtttacactcagtagccctaccaatagataggggacgactcgataatgcc

SEQ ID NO: 20281 - DNA, 382 bp, Oryza sativa
ctggtttctctcaggtagcagctgcataagacactttgaacacaccggacataaatttatacatcaatggtgcgtccctcttaatagtacgacattcctatactcacatgcataaagaaaagttataccactatgaatgccttcttgacatcttcttgcttcaccttgagggttgccaacgtaaacgtcattttaccattgcgactattctcatctacaactcattaagcacattagtcccaaatcaattatacttttgccttgatcaatgcccactttggcttttgacttgatgttcatcgaagaaccgcatcctcttgattttcgacattccatctttcactcatcttataattgatacagaatactcatagcttcaaat

SEQ ID NO: 20282 - DNA, 216 bp, Oryza sativa
  unsure (1)..(216): unsure at all n locations
caactcgantctctgttatggtcgaatacgatgctttccggtactcaatgcatatatatgttctttttacgcaaatggttgtcttagatagtgacatatatatacatatatgtaacgtcataatatatataaaatataagaatttataactggtacgctccatctcatactagattaaaattgtaagtagtacatgtacacatgcatgatcatgac

SEQ ID NO: 20283 - DNA, 480 bp, Oryza sativa
  unsure (1)..(480): unsure at all n locations
tggtcagatattggtacggatttatggtgaacaagatgcctttcttttaccttccgtattgctgcctttgagtggtgaagaaggctacagaaataattctattagtggttctggtggaactttcagctttggtaacttatttccaggaagtttctatctccgacctcttctcaaggtctctctctctctctctctctgcgttgnatattgtgccgtgtctcttgatgtcttctaaacaatcccaacatacggacatcagatattacatgttagtgaatctgttagcatatcaaatgtccattttttcagaatattcatttgatgcaaatttcattcactcttattgaggcttctattttctttntccaaaatgtgggctggaatttacttttgaatgacatgactcataagcaaactgcaacatgtatttattagcttgttctttcagctnntacaaccttcgtctgtcagaatagttta

SEQ ID NO: 20284 - DNA, 479 bp, Oryza sativa
  unsure (1)..(479): unsure at all n locations
ttgatggggggaagtgcaaaatcaaccggntaagaacttgctttcctactgcctcangagggttgggcatcttatacttggatataatcgcgagagccttaaggctgcgatggctatggcatgagtggagatcaccggaaaaagcatgggtcggcttangaacgccatgtaatgacatcgacaagctactttttgtggccgcaacatctataacagtcggggatggagcaagagttagcttctgggaatcggcctggctacaggggagaagactaaaggatgtagcccctctagtctaagcggccttcaacaaaaagaccagcacgcttcagcaggcctccccctcagatcaatggttacatgatctagacctgcctgggttacaccggttggacaacggagttaattgaccagctcatcgaagtctggagcgcagtgcagaatttgcacctcgttgagcacggagaggacataataac

SEQ ID NO: 20285 - DNA, 100 bp, Oryza sativa
taaaatccaaagcaaagtatggatgcgcccatgaagacggaataatggatacttgaccataattgatatctaatcaagggatacgaacaattgatgtaaa

SEQ ID NO: 20286 - DNA, 462 bp, Oryza sativa
taccagaatgctcatgctgtctgtgaagaccactctctatctctttcatcaacacaaggattggtccagcaacatatgcagcccatctgaaccagaaccaagaatgaatatgcatgacaagttatgatttttatagagtaaaacaaacgatctttcttacttttgggatgggtcctgagagaaatattctttggccttatcataggatattggtttgtcaccatccataaaatcagacaggtccatatcaaaggttggtgcacgattactcaattcagaaccaaatgatacctgtacagacatatttagtaagaagatcccagtcgtccaaatgagctgtgaagcatccaactaaatatatgctacatctttggttgtcaaatgaacttaagtttaagaacgcataataaggataagaaaaggtaagcgaagatgcttagagagtcagtgatacataacata

SEQ ID NO: 20287 - DNA, 489 bp, Oryza sativa
  unsure (1)..(489): unsure at all n locations
tgacagtttgngaaggggttctttgagagacaagaagaatctacttctaccgatatgcccttaggcacggccatacataacatagaaatcacacgtggaaggggtgggcaattagctagagcagcaggtgctgtagcgaaactgattgcaaaagaaggtaaatcggccactttaagattaccatctggggaggtccgtttggtatcccaaaactgcttagcaacagtcggacaagtgggtaatgttggggtgaaccaaaaaagtttgggtagagccgggtctaagtgttggctaggtaaacgccccgtagtaagaggggtagttatgaaccctgtggaccacccncatggnggcggtgaagggaaagcccncattggtagaataaaacccacaaccccttggngttatcctgcgcttggaagaagaactatganaaggaaaaaatatagtgatagttctattcttcgtcgccgtaagtaaatacgtaac

SEQ ID NO: 20288 - DNA, 305 bp, Oryza sativa
  unsure (1)..(305): unsure at all n locations
cttgtagaaaatataaaatatattcaatatcatattatttagactaatttagtatttagatgttattatttttttataaacttgatcatacttaacaaagttngagattataggagaaaaggcaatataacctaacaaagtttgattggttaaatagtcgaaacgaaatattatacgataaaacggaaaaagaggatcaaacttgatcgaaaaaaaagttggtatattatctcgcttaatcaatcctcgatcgatctaaactcgatatggggtgcagtggctacgtaccttacatgatcaatcca

SEQ ID NO: 20289 - DNA, 486 bp, Oryza sativa
  unsure (1)..(486): unsure at all n locations
tacttcataaactaattaacattatatacatgttgtcatttggttntgtaacatggttttggagaatatacctcactctgtattacttgtgtaattgcatttgaaatgttctattttcaacatagcactgaagctagtgttttgtttttacccaatattttgcaatcaggtggaagtacatcttccatgggagagaaaaagaataccaatactaaaagacagaagccctcgagtattggagatgaccctatgatgctgaagccaactctgcctcacggttttgtttagtttcagttggaactgcatatgtgaactggtgagagggagagcaacaganaataaacctaatactttgctacataccattntcatgttgcctttaagaataagtgcacattgcatcaaactattgatgatgctgcctagntatcggggatgttttacttgatgttngctatgagttcagtctgacctttaagctgaata

SEQ ID NO: 20290 - DNA, 460 bp, Oryza sativa
  unsure (1)..(460): unsure at all n locations
cttcctggcctagntagntactcagcctggggtgtcccacttcacctatgcggtcgcacttgttatatgcttagatgtaatcccaaaggaatcggtccttaaaagcgtgatcacttacccctacttggactatggttttaataatcatattatgatcgtgaatataatggcccattgtttaaaccgctgccttcctagtggtatccgtgcatttgcatatttatctatgatcgtaacaaataccaacaatattagcttgtcgttttgtgtaccttggcttgattcatgggaagggatttaaattttaatacataaaatagtttgaaaattggctaattnnttgggcgtaacaatttctctaaagatgtgttttacgttacactntcctaaccttacatcttcgttttccacgcacatgcttnccgaagggctagacagtgtttntttaaaaaaatatgta

SEQ ID NO: 20291 - DNA, 404 bp, Oryza sativa
  unsure (1)..(404): unsure at all n locations
atccttatatcacctgctgcatgcaagcttcacttacacgtgcattgttctttatcctttatatcttgtgagatcntcttaccgtctagacctcaatttttccaaagtctaatcccaatccatcactgacaatattcccaatgcctcaagcaacacctatacacatgaacaaccaataaaccgtatctgagtataagntcttactcaacttgacgcacattagcacacaataggataatatacatatagaaataatttagaagttataaacatcaacaatcaacatagtctataaaaaaaacaagctaaaatcggctccaaactacacttagggcccctttgaaaacacgatatgaaaatatatgaataggaaaatgtaaaattgaagttgatgtttttcaatc

SEQ ID NO: 20292 - DNA, 387 bp, Oryza sativa
  unsure (1)..(387): unsure at all n locations
taattcaagtttaatcgtaacagngaaaattgtgatcttgtatacacttcagtattccattctattatttgcataatttagttttccattgtgcaattaaaacgagaggcggatctatccattgcgtagggtgggacaccctcccccccagcctctctcctcctcgtcctcctcatagtagtgatgggccatcataattaggtatagcaagttgtgaaaatccaacatatcatcccgcatcaagcatcaacgtagctagtgttggtctgcctcttcacaacacatgcacgcacgccacataggggtggacattcggtctaaccgaaaaattcggctcggtttctcggnctttttgaagattcggtctcttgtatctcaagaccgatc

SEQ ID NO: 20293 - DNA, 496 bp, Oryza sativa
  unsure (1)..(496): unsure at all n locations
actcaagctttccatgaagtactggcacgccgaaatcgcatgaaattgtgtatatcgttctatgttggngctgtcctgtaatctgaatccaaccggcggaaatcctctcccctttggatcctctccatcgttcctgagtaaaacaagagtgcacgcgtctccggggtataaagaagaggaaaatgaactcaagaaagaactcacctaattgttncagtgacgtgcacgagcgcgggtaataggaccatgaagttgtacttgtggggacgtggatgtatcgatggtgttgatatcctcatcacatgttagcgaaaccgggcatccatactacctcgggaccttttttggatggttttatatagttgaggggtacacatttctggtattgcggttaggggaccttagacagactcggcgtacaattgagggatgtcacgtgaacttattctctttaagaatatcctttaatggaagtgtagcgtctcatgtattatcg

SEQ ID NO: 20294 - DNA, 341 bp, Oryza sativa
ggaacttcttcaggtgtatgactgcatctgtcaaggaggccatcaagctatcagactatgagcgaacgctgtataaagcatcttctggaaagttcaaaccagtccctcagcttggatatcactcaaccatgatatctagccgttggtgaccgtgttataaattactatggaacaatttatcactgacaccgtgctaactacggatcaattgctatgagtctcaccaatcgataaagtggaagttgaatacatgtacgatctcggatacacgttgcatacctgatctgctgcatccctaccacacatatgacaatgttatcatctgtactcagtatgaaccc

SEQ ID NO: 20295 - DNA, 478 bp, Oryza sativa
  unsure (1)..(478): unsure at all n locations
tgagatattctagttacttttaagtaaaacacttgcctcttattggccactatctngcggtgagcgctctgctgcagatntattggtgacatctaattatctagcttttactagataattcaaagtgagtcatcattcatcgtgttcattgctaactgatagacatacatatataagaggggaggtcctactgacagcgcgcatcatagctnttaactggtttttgagacaataaattgtactttttagcattttttgcactgtaccttaattatgaggtaatgatcaatatcagggcacacataccagctggagagtgcacagtttgagttatgctagtaactatgtactgctaaatgtaaatctactggcactggaacatagatccttgtatgattnntttgacctacaatatgcatgtattatttatgttaattngttgattatgtgagcttaagaagctgaanaaagttccatg

SEQ ID NO: 20296 - DNA, 416 bp, Oryza sativa
  unsure (1)..(416): unsure at all n locations
tccttggatngatccgactccaccaagaacacgacatcggtttacttgactcccatcggctgattctagaactntgaagccgatactgactctaaaccgatggtaactntgggcttaccaaatttcactgttaacatttagataacacacttactattgattataggcgcacataatgtactccttgtctcggcggtaccacaaggtgtcgtaaatgtagttgaccattccttgacggtcattctggagaattgtgacagtgaccacttgtggatcaaggaaggcaactttcggtgcattcttctgacaccattgccaacttaacctacacacaagataaacgatcttgtaagcgagttaaaccgattgttattagcagattgagttgggcgacaatacttacaaggagtagcact

SEQ ID NO: 20297 - DNA, 180 bp, Oryza sativa
cactgattgcagctgcgataatccaacggacaattgattctctcctcttcacttccggcgtgttgcatacgagtggatctggatgatcactgtgccacttataggatcgaatcataagaactaagccaatcagaaggggggtgaatggttggtatacccaaataccaaaacgtttagcgg

SEQ ID NO: 20298 - DNA, 419 bp, Oryza sativa
  unsure (1)..(419): unsure at all n locations
tccagattcttccacccccccccaccctagccatggcttgctcctcctcttctctgtcccttctctgcctcctcctcctgatgctgctcccctncccctcctactccgcctcgttctccttcgccaccgcttnctccaacgcctccctctccaccttcagcgacagcgacccggagccggagctcgcgcgggagcctactttcctcgaggaggtcatcgatgccgtgtcggagaagtacgactgggaccccgacgcggaggtccgggtctggccgctcgacgccgacgccgcccgggtcggcgccgtgcagcgctacgagttccgcgcacgggcgggatcggcgtcggcgctggtgcggctcgccgacgaatccgtggagtggaggcaccccgccgcgccggccgtggaggaggtggat

SEQ ID NO: 20299 - DNA, 346 bp, Oryza sativa
gactggctggtcaaaggagcctccgttctatactccagccgcctccaacacacaacattaatttgcttgtttttgggacaatgaatatctcatcagtctaactatcatacgagcccgaatctgattattaaaaatgaaatagatggtgcatgcatgcatgcatacatggtgttatgttgttgtatgttccctttaattgcattatttataacacataaacttatgttattacaatgtgcatagcacatcacatcatttagatgtacttgcctgggccaccatagtatacatgcataccatcgtcgttaagtccataaccatcatagctatataggtttagattatt

SEQ ID NO: 20300 - DNA, 393 bp, Oryza sativa
  unsure (1)..(393): unsure at all n locations
tcatctggagccatcggtgaacttcaatcgtccttcatctatggccgattgaacctgtcgncgaaacacattgcaatcattagtagagtgagaatgagaatcatgccatttacaatatgctcgacgcttcaactcttcttgcgatggtatgacatggcctttaggtaatctaatttgtttttcttgcaaaaggtaatcaaaaatcttatcacacttggccacgtcaaaactatacttaacctcactttgccgatctttgcgaggagtcggcattaagttagagcaaacaaaaggcttaattttattattccacgaccattcggcaacatanatatcatgatcaccctcctcctcactatcactagcctcagggtaatcaactacattaacatt

SEQ ID NO: 20301 - DNA, 469 bp, Oryza sativa
  unsure (1)..(469): unsure at all n locations
tcgagctggacgggagctgctactacttgtcatgtatcggttttacagaaggctgcgccagctttgagggcttgaccggccaaccgcagcacggcacgaccccatcattgctgctacggactcatcacaccactcgcgctacacaaacacacagctccaaccttgcacttgcgaacacgatttggattggattatttccagctcggccgtccgtccatgcctgccatgaccagtcgcaccaggcaccaccaccccaattatttccccgctgctggttctccccgagcgaatccatccatccacggatccaccaccgtgtcatcgccaatcatttgctgatccccggcctgcctgtgcgccgcacacggcatccnctccctcccggtgttggcttctggaacagaggaggccagctagcgcgtgcacactagcaccacaccaccacgtacagtacgtacgtacgtagtcc

SEQ ID NO: 20302 - DNA, 484 bp, Oryza sativa
  unsure (1)..(484): unsure at all n locations
tgtcaccctccttctacatagagncagctcgtttcccgtagtttttttttctttagcagncttttttctttctttctttctttctttccttaacagcagacaatgaccgtctgtctggtgcgttatgtaataaaaaaaactctatttttttctaatatactaacgtgtaatttatttttatacgttcgtgaaaagaaaagcagtaggtaaagctgaaccaaagaacgtttgtcaaacaagttaatttgtaccactggtgatctgtcttctgccccacgaattgaacgccgtaaccacgtccaatacgaggagggccctcgatcgacgtcttcaaacagccgtccatctacgggaacctcacaagtcacagacgaaacgagcgtgcacatgccatcggataagagcaggaacaatagcagactattagccagttataagcatattataatgagataaaanataagagagaacagcagcgaactat

SEQ ID NO: 20303 - DNA, 299 bp, Oryza sativa
agcttcattgtatagtaaggccacattttataatctttctgcagatatagtcacataagcctattaatgttggaatatatgcactgtgtgctatacttgatttatactatacaattttgttaaacttcagagatatgttcctctatatctctgtacttattcccctgtaatttgacactttatgattgtcatttagacattatagtgtgttatttattttcttgagcagttatatatgttattgaattatcttttaccgtgaggttgcacttaatattcgtctgtgcaagtttgaatct

SEQ ID NO: 20304 - DNA, 484 bp, Oryza sativa
  unsure (1)..(484): unsure at all n locations
tcacggctcgagacacgcggatccgcgacgtgtactgctcttttcttagcgactcanaccgtggtggaaccagcccaaccgaagtccaacacggtttaagtccgccacaagtatgtaggcatgtgttttttccatcctcgtttgcacgaattaggaaataaatcttacggtttaaaattacgtaaaagttacgtacacgttacattataattntattatacaagttacattataattacataacgattctgttgtatttatatttgacaaatttttagcgattntgctagatatttgtcatcaaatttctccccctaatatttatcaaatgtaattacagtacaatcatagtgtaattacactgtaacttacatgtaattacactgtaactgtaatgtaacttgtatataactnttaagaatctctcggtaacatgttatttcagtaaaatagagtccctgggaacaaatcctttcacatatgt

SEQ ID NO: 20305 - DNA, 431 bp, Oryza sativa
  unsure (1)..(431): unsure at all n locations
aatcggcagcacaaaatgtggattaggaccagagaatcaaatgatcagagctagctggaggcgatgctgctgctactgctaagcagctatccgcgaggttgacatttgaagacgtgacatgtttcacttcaccccgttcccgcggctttgtattttgttaagttttcctcctgtggttgacgagtgggcccctccatgatgaactgatgattaaccctgcgatattcggtgtccatgattggaacttacagatggaccgacgaatactcgaatctcagctttaaaatatggaaataatntatatatcttcatcgtggacgaagaatttgattcatcttgattaaattgcactgggatgatgtgccatgttacaacaaagaagacagagcaacacagtgacatctgaccggacacaagcctgggaaatatat

SEQ ID NO: 20306 - DNA, 386 bp, Oryza sativa
agcttgacgaatatcccgatctgccggagaacgcacttcgctctggtcgtatcacccaatatacgaagttgttgagtagtttgttgttgaagaatccatctcttgaacccatctcgtcaaaatcatgaagcaccaaaatccccctacctggcgcaccactatcgacgtttgatgtcacgactacggtatttgcataatatggggatcattggtactaggatatatgtgagattaaggtataagagatggggacgagggattttatacaggttctggcccctgaattgtatgtaataaccctactcctgttggctgaagctggtcgttgctcttattcatcattatcacaccagtacaatatttggtgtagcctatctatctgtcgt

SEQ ID NO: 20307 - DNA, 468 bp, Oryza sativa
  unsure (1)..(468): unsure at all n locations
tattgtcctctagctnctgatcgatcactgtatacattntnttttaaagtatcaggcttgcttgtttaattaacgatatatatcagtgttcttcatatactgttagtccagatattatatttatcgttaggcagattaacttacgctaagtggtcgattgatgtacagtagaaactcattgtaacgaaatgacatcatgcgacaagctgggaagtattaactcatgggtttgctagctctacagtagatactagtacatgtcaatgtcacccctgacatttacacgatcctgacgtacacaacacgatcagtatgacgatactcctacccacatagcccgtcaatgtcgccaaccttaggccgagtntagttctaanatttttctttaaacttttaactttttcatcacattagaacttttctacacacataaacttccagacttttcatcacatcgtttcaatttca

SEQ ID NO: 20308 - DNA, 468 bp, Oryza sativa
  unsure (1)..(468): unsure at all n locations
tcacagagcgaggttgagtccgcgccgaagaggcgcgaagatgacatcctcacaaaggcgctcggaaccaaagaacatcctggccgaactcggggaatnggtagcgatgtgccctggaagtatggactccctcagtacagctcccaatacaggaaacggaaagtctccaaggaagagagggacgctcgtttgaaggccgaacttaaggttgaggtcattcaagaactagaagctagcatgaatgcaagggtggaagatagggttaacaaggtgctcgccgacatgaatataccccgagtcacaacacctgctgtgcaaccaactcctcgtgtacaacacgacgcgagtccgtcacagcataagagtagttgtgcatccacagaggtgccggcccctggtctcccgatcgcaccactagctgcagtggaccacatcgaggtgaatggtgttatccgatccatatctaat

SEQ ID NO: 20309 - DNA, 419 bp, Oryza sativa
aagatcattacctcgtcatgcgtatcgatatacatccactcgttaatcatatcatactgatgacaaccgtatgcttgagaatcaagtgtgcttaattcacgctaaaattgaaaatgtgattgaaattggaacgatgtgatgaaaaaatagaagtctgtgtgtgtagaacagatttgatatgatggaaaagttgggagtgtgaaactaaactcggccatacatgcaccgacctatcttcaacccgacgcgcatgcatgcgcggtctatatatgcatgctaacaaaccatgatcccattccagtatttgtcgcggcttataattatctgacgccatacacgtactcttactccatcgttatgtatcaaactgtacgactgctcggttatctctacacagtcatcgtggatcacagtaacga

SEQ ID NO: 20310 - DNA, 464 bp, Oryza sativa
  unsure (1)..(464): unsure at all n locations
ctcagctttggtcttcgttaagcgcactctctttctttaattttaactcgatttcatcatgctggccctggattagtatagtgaagaaaaagttggatctttgaagcaattacaacacatggtgtagatgtgaattttatgtatagcactgttcgaatatggtccattatgctggaaatggtatgaaacaaaactttctcgagcaattcatcatgaatatggcagatgcagaataaaatacaaatagaagaaacaggtcacagctctgactgcacaaaaataaaaacagggaaatggaagggcaggaataaagcagcatgcctggaactacccaattntagtaactgatgaatcatagcagtaccaactaccaagaagctaacacagaaagcaataaagtttaaatcacattatccaatagttgacaggcaaaatgtctatgggtctaaagcatactactacat

SEQ ID NO: 20311 - DNA, 475 bp, Oryza sativa
  unsure (1)..(475): unsure at all n locations
ctttcgccgatcagtgcaatgggttctgtctccggcatcgacgactctcgtcttcccacccgggcagacgtttcggttcggcagcctcgatttcgtcaccaacaacttcggcaagatttctctcctcgactcggagtcagaccagtcgggagagaaccggatttcagtcccgtttggattcccaaacgcggctganagttacttcaagaccatctcaatcgagtcggcttcaaaccactcgggtgagatcgcatcttctccaacgtcaccagatcaagatgatggggcttacccaccgatcctgatgaagctccccgacgatttggcggccgtctccatcacgacagcgtatccttctcgtaggcctaggcggaagtcggcttcaacaccgatttcgcctagcttcagggaagtcggcgtcatcctccaaccactcggcacgggttcgacggatcagctggatggctacaacagc

SEQ ID NO: 20312 - DNA, 482 bp, Oryza sativa
  unsure (1)..(482): unsure at all n locations
taagggctaaggctcacggcgtcagaggggagaatggctgactcggacgactngtntgttaagaacataataaacgcatgcgactccctttctaggctccgggatctctcgtgtgtggcccacgccacgcttcggcgggactccttttggtcgacagacagcttatcctgtagtagtatgctgccaacaacggctatctttccattcagatgcagatgcggttcagtttatcctgaggcacaccagctcagcttactcctcaaattctcaaatggcaacgtcgtgtacgagaacgatcgctgctcccttcatcttaaaatatgacttcttaatggntacgatgggttaaaataagaaagtagatgaaaaaaagtaaatagagtactattgagatgaggggatggggtaaaaaatatttatatacatatattttaacataaattcaaatccttcaagtaactatattntgagatgcatatgtg

SEQ ID NO: 20313 - DNA, 275 bp, Oryza sativa
actcagctttacgatgtgaactgtatctccctgcctatttcctttaaattgaccgagatactatggatggaaatataggagagacattgtttattgaggcaaaagtcccaatgtcccaccctagaccttgatgaaggccatctatacactaacctttaaaaccggacatctaaccccctgaactttgtaaaactgttcatatttctatctaaagattaggatggtatttgggactttttaaagttacgggtgctttatgggatcccaatctatat

SEQ ID NO: 20314 - DNA, 381 bp, Oryza sativa
  unsure (1)..(381): unsure at all n locations
tataaaaatactaatattttctgaaaaacttagtttaaggatattgcttattctcatctgngctatattaattggtagtgtgatatattttatttatcaaatagatcacacatcaactttcatatgccttttatcattttagaacactatttgaaagcatttttcaaggtggattttaattaatacacatggagtaaaatcttgaaaagggattggcgtctaacttttaaatacttgacatgaaacatattcaaaatgatatgccctcctgtatggatgaaatcatgaaaacaatccaaaacggtatattgtcttccgagaccaatttcgatcagtcgatgaccatgttaccacattaactatttaatgtcgacaaccata

SEQ ID NO: 20315 - DNA, 295 bp, Oryza sativa
ttacactaagacgagatgtaaggggccattataagattccatttattaataccatgaccaaaatgtaactcccgctttatcatcgctttcaaattgatgtgccaatatcatcttgtcatcttttccacacttccttatgatttttttttattttcatactacctttacaataccaaatttgtttcttttcgaagaatatatataagagcacgataatatactttgaaatataataataacttgttccgatggaaccttctacatggtataagcataaccttaatgaataactaaa

SEQ ID NO: 20316 - DNA, 497 bp, Oryza sativa
  unsure (1)..(497): unsure at all n locations
ctcatgcttatccagaccatacaaatgcacggcgagcccatgcagaaggtttggttaatatatgccanattccgccaaatacacaaatgaaacccaaccatacatgtcccccaattatatcttctaaatcatccacactaacaatccaaccctctcccccaaaaggggattttagtaaataaccaaatataacaccggggctaagggtcaaattggtaatttttcttacatctcctcccccaggagcccaggtatcatatataccgccaaaataaagagctttgagtactagaagaaaagcacctatacctaacaaaattaggtgaaatacccaaaatgtagtcattntatttctatctttccacacataaccaaagaatggaaaagattcttcaagagtctccggtcccagaagcgcgtgataaatgccaccgaagcctaagactgcggatgaaattagatgaagtactccagatacaaagtaccgaaaagtatct

SEQ ID NO: 20317 - DNA, 484 bp, Oryza sativa
aactcaagctgagatgagagaagagcttgaagagctggtctgtttgtgttatctttagattctgagagaagatacaactgctacaaagctcccccaaacatacgcatagtatatgctacgccatgtggtgcgtggctcgtggcgggaggaaggttttaaggtccatttactacatctcctattctaaagctggaggaacagaatgtcgctttatgtgtatatgtaatctttatgagtagaatacccgagtcgtataactccagctctacgggataagtgaaaactttactaaacaggtcctaaatcaaactcaagtagcgcgtctgctattctgtttctgcacgggacactgcgtgttggtagaatggattatggatccatgggacttttgtatgacataaaatataaaatacacaagtggagttgtaatctttcggcacgatacaaaagataatcaataatattgccaaactatactcaccag

SEQ ID NO: 20318 - DNA, 501 bp, Oryza sativa
  unsure (1)..(501): unsure at all n locations
ttacggacctatgatactcaagcttttaatntaatgtgattgttntgaatgtttatctaattgctctcattgtagtaatagaatttgggcttccttgacagattccttatgttacattcttttcaattgttttttaacactctcttttacatgtgtaatctatcatatgtccatgttntcatgattcaattnttttcctatcctatattccgaatagtcatgcatgcatatcgatcacatcacgtcatcatgcatgagaacgtccaaaatcagaacagcttgttagaattttgacggcgtcgtcgttgtcgatgatcggtcgcatgcaaataaagtaagcaatgaacatatttcgacgaaatagtgttgtttttgtaggttagtgtggcttcagagacatttgtacgtgcttgcacgtacgctagcgagctactccctcctttctgcggantttggttggatacaatatatcttatggattttggtggatacgacatatct

SEQ ID NO: 20319 - DNA, 299 bp, Oryza sativa
  unsure (1)..(299): unsure at all n locations
tggcctcatccatggaggcgggagcccttgtcctgccttttgtatttataccncaacagtcgggaacctacatgtacatagatagggatgcaatagagaccccctggatctttcacagctaacactaagcacggtttactattttggctcgtaaagttgtatcggggggatcacgaatttccgaatggaatgatccaacatttgatcaaatctcacatttgaataaatctgctaagttcacaaacataaactaaatttaatgttgtctgaactctttctatccggaggaaatagctcca

SEQ ID NO: 20320 - DNA, 224 bp, Oryza sativa
cttctgctgctcgacaacaagacgtgtgccttatatgccctgcttcttccaattagttctttcagttagtactccgagagagtagtgtcacatgctgcttttcaccaagcgaatttctaactagatcgacctgacctcagcccgtataatggatgccatcacatcgagcatgaagatgaatcaccacatggtcgactgatcaccatcaacccctgcacaactag

SEQ ID NO: 20321 - DNA, 492 bp, Oryza sativa
  unsure (1)..(492): unsure at all n locations
taagcctcatatgtattgctaaggggtggataacatgtntgaaactttgaattcgtaattttaggctcaagaattcaatatttgggttactatgtcctagtattcgatgtacacccaccagctgttttttgatggatgagtgtacacccaccagctgttttttgntgggcaagggcatatagctatcagatcgagagtcgaaactctgtgggatgacacaagatgacgagcaattaaacaagaacatgtcgaatagtctcacattagttatgaaacggtaaaggaccttatgtgggggagcccctcacctcattggttagcttttgggctgaanaagaccctttacgatcctacagaacaaccaatcatacaagcagagcaagtctggaagtgtgttctacttgttcatacatctgcangaatctgatntccatctngatcaaatagttctctgtattcaaaatatagttcgataacagaaaatccaaagtt

SEQ ID NO: 20322 - DNA, 365 bp, Oryza sativa
  unsure (1)..(365): unsure at all n locations
aacacgcatgacaacttgctttgcttctacttgcatccatcatacaacggcatctggctatcttacaccaacttactaaacttctcataatctctgtcgttgtactctgcgtcttcaatgtcatgcaacatttgttatagacattgatggtccaaatctatggtctctccacctaaatgagaatggtcgaacatgccctctctagctgcagcggtgttctctacattctgatccaacacttcttcatctgcgacatcatgcgcctcttgctctccatgcttggtctatcangtatatttcctcatgaatccattcattatcaaatgaacatgcacttcatccttgtcttcgatcatctgttcatt

SEQ ID NO: 20323 - DNA, 458 bp, Oryza sativa
tcaccgagcctccagccgttgagatgtcatgagccgccaaagttcaattacgaatacaactctaccacggactcctcctctcaacctgctaattttttcggtatccatgcatacacgtaccgtgtccctgcatcctatccggactcctgagctcccttttggattgcaacaccaacacatgcttgatttgatcctgcatgcatgcaacatgcatgctttcctccaataatctatgcatgttgaccgtctctccaattttggctcaagttcccatgtacatgcagccagctacacgatacttcctatgcaccttgcttcttgtgttgaagaaaaccaagccaaacccaagtccctgttagactctgctacccagcttggtctgttgtgcgccctgctattgtgcgtgtcgagcctcacgacttttgctgccgcagccataccgcacgcttctcctgagc

SEQ ID NO: 20324 - DNA, 400 bp, Oryza sativa
ccacctcattttgtgttaaatacttaatgtgtatctgtatcttcatctttgggagagaagaacatcaccatacactttcatataagtggctcgctcttgacccttgttggttctgactcaatttcgaatgaatattaattatgaaccccttcttttccctaattttcttcatctattttcacatatttcattcggtatattctcttgttggcttgttttaaatttggacataattcttatttgtatcatctcccataagtgaatggctagcaatatgatctataaagctatcatgaaaacacaggcacatacattaaggataatgtaggattaaatgaagaaattacaaagtgaatatgcagcttcattctaccctgaccaatgagggtaaaatgtgctc

SEQ ID NO: 20325 - DNA, 490 bp, Oryza sativa
  unsure (1)..(490): unsure at all n locations
ntagctactcattctcataatatattatctaagctaagtggacagaaaagagaaagataatctattcctatacttctaatatacatagtatacatacattctagttaaccgatatactagataataccctctatccgatgccctcctggtactttaagaagccacccctgactgccgagttccttacgacagcccgtcatgaccgtacaaccgggcctaaatatagaggaataccctccccagggaattaacttaggattatatacaggcgcggaggaatacccgtactgagctatcaccatcagcggcccacctctcatccgcagcatataaccccaaataatgatatcccataatctagacaccacgcctaaactaccagatactactctaatatcatcgtcatgacatagagtaatggcataagcaaacattataccagcaccaaagcatctcccagataagctagccgtatattcagtataacatg

SEQ ID NO: 20326 - DNA, 349 bp, Oryza sativa
gaacaaaccgcggcagatgtgagattattgtacaacggcacacctcagatgagtatatggttgatcttgcaatatgccccgtacatctggttatgaagccaaatatatatagaatttcaaccagccaaggcaaattcttttggtttgcacactttacagcccattctggctgtgcaaagatagatggattccgccattaggcatctttgacacatacaatgaaacaatactgacatacctctgtcagaaattatggtaaacttcacaatatttagaaccgccccacttaagtcgagtaaacatactatggtacaacgatggggaacttcaactttggatgactgagaaa

SEQ ID NO: 20327 - DNA, 492 bp, Oryza sativa
  unsure (1)..(492): unsure at all n locations
acactatacaatanctcaagcttggaaccacacaagctcttagagtaaaattctttactcaagaagcttactgttactntntcaacggtcgcacattngggagcataaacgcagtggagcacccaaagctggcatcagtagccatggatattgccagggaattgaatggttgcttcatgggtgcaagcatctacagtggacttctgaaagcaaatatcaactntcaagtttggaggagggctctggccataatcagagaattcaagaagctcaatctcttactctacggtgcatatttatttgatgatccttggcaggcagttgaaccatcatatattatgaccgtaaacaaaattaactcggaatatcttcttgttcttgacgactatcaaatatgttctgctccgaacatgattcattgtcacaaaaactctgctcacagtgaagatgaagttcccatggtgaatgtgaaagatcttctatctggaaatg

SEQ ID NO: 20328 - DNA, 451 bp, Oryza sativa
tgtctgctcatccaacggcaatctgtatgctctcgatccggcagcccttcatcgatcctggcaggctagtgagtaggcatactacatgctcatctacgtgtgtgtgtcagaatctggatgagcggaggccgatgccagctgctgcttcaggtccggcggcccgtgggcggaggagcaagaggtggaggtggtcggacttggcgttgttaccgccggcggcgagctgcacggagaagatggagttgacggggcggtggtcggagaaccgcgactccccgcgcgcgtaccgcacctgctccatccccgaaccgcgccacaggatgcggtcacacctgcattcttagggtcagttaagccaaattcttcgtgttacttctagactcatagtactaaaaaatattatattctataccatacattttaatactaattaggagtatagcactattta

SEQ ID NO: 20329 - DNA, 408 bp, Oryza sativa
gtcttatccgctggagaagtttccgatatttgacggatattaccgtacatattatattatcgaccacacggtcagaaaaacctccatcccatttccgctactatgtctgaaagatattaccgtttactttgccatcaccgtcgattaccgattccgactgaaacggtctgagcaaactggaaacggatgctaaaaatctcggtaattccctaccgttttcacccatgagtgcaaatcgttatacaataaatgcatttactaacttcactacattaacttcataatggtgcgctaattactattaagaccatatatgcgtgcgtgcagttgtcatgatttgaaccacagtagatcgaggtatatatatatattgatatatatatatatatatgtatatatatagatata

SEQ ID NO: 20330 - DNA, 460 bp, Oryza sativa
  unsure (1)..(460): unsure at all n locations
cactatcgaaactcaagcttaagaaaaacataacacctcanattcttcggcttcaacacttccgattnttacctagcttctcaaaatacgtagctacaaaatctatgaaatagactagaagttaaaatttgggatacctagtgctttgaaactcttaaaagctaaataccaaccagttgcttattagaatattaattaagcttccaaaatgggtctatgtatgactcctttcaattaaaatctaagtggggtcgtcaaacctattgaaatagtttttttttccaatgacaccaaaagctctttctgcccttttgtgcctcctttggattgaaagaaaaataagaaattttggagggtcgttatccttataaaagaattagacgatataccacgcattanacggagatttgtagatattcatgtgtacatatatgtaattggacaacagatcaagatagca

SEQ ID NO: 20331 - DNA, 238 bp, Oryza sativa
tgactcggtgcttgttttatgatataataactgttatggatatatctttctttatacatacataatggtcagtaattattatgcaccttcaacattatcaccgatgatagtaatatatatcatatatgtaacattatacagtgcttaaaatttgcttgtgcatatctggctcatctttatatgtatttcttaaatggagagatgattatatgttgttttatgttccattctatattca

SEQ ID NO: 20332 - DNA, 425 bp, Oryza sativa
  unsure (1)..(425): unsure at all n locations
tctgcgtgccacgatgctatacgctgcctcgaattagtcgctgtagattattgctcctcctatggccatttctggtgatggagtgatctattgacagagaaaatgtctttagagcttttggttctgataatgttatttatcattggccacataaatgattatacttaatcccaaccgatcgtgagagttggggttaaaatggcacaagatttttcttagtttagctcaaatgttagaacaactgaaagtaacaataactgaatgacacaatggccaaaactaanattttcagtgaataaattatctattgtgaatttgaggcctaagagtaatagattacactcctaaaactccttttctggcgaacttattctgaagagagttctgcacgtctgtgtataaaaatgccgttgctntatgctaat

SEQ ID NO: 20333 - DNA, 471 bp, Oryza sativa
  unsure (1)..(471): unsure at all n locations
nggaagagaggctaggttcgtttgcaaatcttttattttgaaatcatcttgaaatcactaagtgatttatttctttctaagtttgggccgacaagagacttgcgtctcgattcgactttaagagatgtttttcaacagctcatttggtaatgtactgacctcccgggtcagatcattacttctcggctcccagagccattccacttgattaatcggctcccagagcctttttcattttctcggactcccagagtccagctgcccagcagcacagcaatccgcttccactcgggaagcctagtctatgatgcccgtagacatcccgaatcacacagattcgtttcttgaccactcaggtcatccatctgccacataggctgattctggtaacgattctcacaccacaacaacttttcacaaagcacaggcaaacaaatctacgctacaggaaacacctcacatccgcccatg

SEQ ID NO: 20334 - DNA, 440 bp, Oryza sativa
  unsure (1)..(440): unsure at all n locations
tactntcactaaagttccagcgtattcaagaacacgagcatcttgctcacatgcagctntcatgtgaataatgctcactttggcatgcatctgaatctcactagctatctttgaagcatgcttcttaccaactgtaggatgttgaactatgggacctggtactgggaaatgtggactcactgttccacagatcagtggtgctcttttcttcacttgttccaaactgtgctttcctcgtgacctttgagttcttgcaagtgttagaactgtatgaagaagatcatgaaggtgcagtggcactaatatgttctaggttatcagccactgaaccacatttcttatataaggtaaagactcgacttatatacgtggattntataccttgtgtntgccttctccaatacctctaatctctttgcttggacaaggaaaggcttttg

SEQ ID NO: 20335 - DNA, 470 bp, Oryza sativa
  unsure (1)..(470): unsure at all n locations
tgcatcatnnggtttcctaatatagttatgcataataatctgtctaatatagagatattcctgagtatatatacatgttagcatcattttaacgagcatcagctattggtaatatgattgtttacatgtataactggttaatgtgtcattactagtcaagttgttgtgctttttcaatcgtgcaatgcacgagttaggaggaagataaatagcatgtgagtgatgtattttgagcctactaatgtgaacacatactaacaatatgagtatttgacataaactttcttgaaacattttggcccaaaacctatggttccttgacacaaattgtaatacctggttctttgcgttacaagtgtctcataaccagaacgaatttatcagccattcatctgtcatgactcatcattcacagtcattattgaaatgtttgttcctatcaataattgacatgatcatgtctatagtag

SEQ ID NO: 20336 - DNA, 99 bp, Oryza sativa
  unsure (1)..(99): unsure at all n locations
catgtaagcatatttttttttgaacncgcctcttgaaatgacaggtaaaacaacggcaaattacacataatgacataagtgaaaagcaatcatacgcga

SEQ ID NO: 20337 - DNA, 431 bp, Oryza sativa
  unsure (1)..(431): unsure at all n locations
aactaagcttatagaangagctgagttgatccattttctgtcggattctgaccgtaaattgccctccactgacctctgctgacgcacgatagagagggggagggaatgagatggattactatagatgacgtactaaaccacttgcctactgatcttgttgtgagtagactattattgttcaagttgcttaagcaaacaacctagtatggtcgcatccccaccaatgatgcataccatacccctacacacaagccaactacacacgacctatcagctaacgaaactactcttccaggaagtattgcgtttatgtaaactccgggacaactctccttgatctttgcggaacgacgactctgaactgaccttcccgctctatgctgcatgaatcttgatgcttgacttgactctccaacagacacgacgctgac

SEQ ID NO: 20338 - DNA, 462 bp, Oryza sativa
  unsure (1)..(462): unsure at all n locations
tattcacaaggtaagtgcttgtgggtaatcggttacttttctttaatattatagcgatagcctncaaccttataagcatgagcacctgatcattaaagtaaaatccttatcacatccattagatcgattcctcatacaacaaagtgttggccaccttctgtaaagacaacacattgtctgaacctatcattgatctcaacaattgtagatctactttgcacaatatnngctctacatctgaggtatgatcatcgnctatcacattctcattgctgggaccatcatcactggcataatgatcgaagaaaccatcaacatcactactcacgggtaattcagtacccgttgcgatcacttttgcttggcatgcatgttgatcgtcactgtcaaaccaacatgcacattccttcttgaaacctctcataataagatgtgactttgtcatatgcatctacccatgct

SEQ ID NO: 20339 - DNA, 482 bp, Oryza sativa
  unsure (1)..(482): unsure at all n locations
tatcggcatgtattgtaatataccataccactgctattgactcaacgaatgatactgtatgagagagtgatacgcatgatccacactcccttttttgttatcttaatcatgtgttcggncggagccccaacacaacagctgctgagctgcacttattgtcttggataatattgttcatcatactcgattgttggcagagctaggttgagtccattttggcaaaatcgctgtgtgcaaagatgttagcatgtggcattgaattagaggtgttgggtcgatgattctataaagcttttatgctgctatattntgaccatgctagatgccgattgttgcatctgtcgtgctcatgcacatacaccaacgaaccttggtttccttggcttcttgtcatacaattgtgtatctataatataggtgttgaactgttgtactgtactagtgccgctatctggatattcattgatggtgtactaacagct

SEQ ID NO: 20340 - DNA, 389 bp, Oryza sativa
  unsure (1)..(389): unsure at all n locations
acattgatagaatgcgagaggtttaatatacttgctatacgcaactactactgtcgataacagtatctacgttggtgacaagacaattaattaattaatcattaattaattaattcgtcttctctgctggtacatcaatcgggcaatggccgtattctcccgtttattccattcaaacggatactgcccaagtaacccattctttccatctgctataaataccgtaccatctcctccacagctcaccatgcatatcaacagttatgttctacagttagtgagatgtagagagagatatggctagctaatccatgagatacgtctatatagagagagggagagatgatcagctcttcataagaagctactactanctatctagcctcatg

SEQ ID NO: 20341 - DNA, 389 bp, Oryza sativa
  unsure (1)..(389): unsure at all n locations
taatgaataagtcntatttgcctccctcaactcatgcacttgttacaatcgcttcctcaaccgcaaaaccgggtccccaactcccaaaactgttgtattggaggcggttttatccgaggtggtgtttgacacggcaagtcatcacgtgggacccatttgtcagcggcctccacctcatcccatctcccttacctctctccctgtctctctctctctctttgatctcttcctctttcctcaccatccatcaacacagaggcagggcaacgacgatggcgcacggtgcaggagcttgccaggcggccgaccgcgtcgtgcgtgggaaggagctcgccggccggccacgtaccgacgtacgggaaggaggcggaagggcgaatgccggatgg

SEQ ID NO: 20342 - DNA, 247 bp, Oryza sativa
actcagcttgctctgctatagtctgaacgtaactggcatgtctatagcgtactgtatcaatgactgacacctctgaaggcacgatggcaccgatgcctgccacaaatccacgatcatgagagagtacagcctgcttatacacatgacctagactgggggatctcaatgaatgaccatgcccctgatcacatcgacgtatgctgtgaacaagctctgtcatagggtcgaagattatctgatctactgc

SEQ ID NO: 20343 - DNA, 384 bp, Oryza sativa
  unsure (1)..(384): unsure at all n locations
gcaagcttcactaaggcgtgtnccaacacacttgcggactgttcgtgcgctgagcactacgacgcttacgacacactaattggtaagatatactgtatctagatctgaatttactagtatactgtatatgactttaaccctgtattgagtgatattttcacttattaagccatattcgcaataaattacgcttcgagtgacgagaaaatggacaaataggaacagatagtggctggcttaatataatcccggccacatatgagcattgcacatgattgtaagacgtataatggtgctctttaacgaatataaacaatgtgttcttatattattattctaatgcaatgtaacgtatatagcatatctctatatattttatatgct

SEQ ID NO: 20344 - DNA, 376 bp, Oryza sativa
  unsure (1)..(376): unsure at all n locations
ntaatcttctntgtcttctgaaatagtccttgtatgaaaactcatagaaattcttatcctaatgaagagaatatggcgtcaatctcaagccatatccaaaaccctagaaaagcgggtggcgcacttggacactctggaagatgttcaaaaacaactaaaggatgccaaggatgcaactaaagctcgagaggcctagttgttgacagaaataaacaacttgagagatgccaacttggagcttcatggaacactcggaggtaagtgtaatgccctacaaaagaataatatcgtagaagatattntggaagtccatatgtatttggtgtttgaaaaatagaagaaaaaccttaggtatactctagttgggctagcttct

SEQ ID NO: 20345 - DNA, 467 bp, Oryza sativa
  unsure (1)..(467): unsure at all n locations
aaaactaagcttgagctagccganatcctgaaactttcggaacgaatttatctcgaagaatagatcgacaatgtaatgaactgtcaaaaaccccgcaaactacgaagcatccgaccaaattccaacaacacaagcaacacgaaaccaaaacaagcaatcggccacttcaatcaagctaccgaaccacaaacagcaaggattatccgcagaaacacacctatccagcacagcagcagctcaacatgggggaaatgtgtgaacagtaacacctaanaaaacaggaaactacagcagctagcaggagaaaacatcaaacgccagtgtctcaaaccccaaacgaaccatacacgccgagaaaagacagcacgagacataanaaaaagagcaaaaaccaccacgaagaaccatagaaatccccccgcgccgaactcaatcaaccaataaaacataacataacgagaggaaat

SEQ ID NO: 20346 - DNA, 459 bp, Oryza sativa
  unsure (1)..(459): unsure at all n locations
atctgacagttatctctactggtgattcccgcaacaacggcaaatcatcggatcccgcaacaacggcaatccacataatctaatcagattccgcaacaacggcaaccctcatcgctagcccacgctcacgggattcgcggaagtccttaagcccgtaggataaagccattaagaaagaaccactaagccagcctgtcccattccaggtcatatgctcgatacgatcgctacggcgcttgaatgccatattacagttgntatttaaccctatgatgataaatatatgcaactgatacctcacttgatgatggtatactcagaattatcctgctatctgtaagttctagattaatggatttgtatanatagatgaataccatatgctatggatggatgaatgaatgcttacgtaatatatcatatgaatatgcaatactgaaactaataacacactaacat

SEQ ID NO: 20347 - DNA, 485 bp, Oryza sativa
  unsure (1)..(485): unsure at all n locations
ntagttcgttcgggtgtcccgagtcgttctgagctgccggttccattcaccggttcggttgaccgtntgagtggtcctgtgtcacgaagtatatgcttattgagtcactaattcgtgaggcttgcttactagtgatataattcagctgatctatttatctatgggcattaatatgtaataaatgactaatgttttttcatattagtaattacacaactcgtattgtaaaattcataactaaataatccgagctccattttaacctattcaagttgcaatgaattttttaaaatgtctataatccattaaaattgatttcttttgttgattcagtagtcttattgcttggatttcttgtatgctntgtttgtcgtttagatttcggcagttctaacgctacagtttattttgaagtggttgccaagggtccgtcagctcaagagcaaggcangccatacatatagcattgatcatgttgaacctat

SEQ ID NO: 20348 - DNA, 445 bp, Oryza sativa
  unsure (1)..(445): unsure at all n locations
agcttgtgtgcctatagacctatacaatcaagctgtgcatttcatcgattggatgtaagactgaactgccactgaaatactctctcgtagaaatctaatgtctccaaggtctgaaatcaacaagttccgatattgttatgttatgcaatctaatgttgtaagcatggagtgctgaattgtcactgaaatgtgctatacatctaatatctgaacgtgtcatgttctataaatgataacttctaaaaatgtcaangtatgtcatatgaacttgtgaacatgaagtgttgaatcgtcaccactatactctattactgaaatcagaaagtgtacagttcttaaattggcatggcatataatgtgtgcaagtgctgaaatcgttaagttctatcattgttacttctcaaatctgacatctgtaactgaagttaaaatgaataatgaatga

SEQ ID NO: 20349 - DNA, 488 bp, Oryza sativa
ggagctcgatctctccttgagctggcatgccactcgagctttcaagcccaccttctcccaatcaccatcagccaacccatgtcactagagttgctatctagatgaagatggaattgaggagctcatgaagtagcagagagagatggaactgttatcgagatgaagatgggattgaggagttcatgaagcagcatagagagactttctcgctgacatgtagactactggtccaaggtaaaagatttagtaatagtatatgatttaaagtaataaaagatgtgttaacactaatctctttattaggtgactagattctttcttctccttcaagatgagggggaagtctttgatggtgggtgttgaaattataagcacatagtgatttaatgtattccataaataaatcatgacattgcagatgtcaactagattaaacgcatcattagatctacacatgtaaactaagcagtgaaacatgaacagatcaa

SEQ ID NO: 20350 - DNA, 472 bp, Oryza sativa
actgctgcatgcactttatattcttgtgatccagatctgttatcattctatggaacctcttgttggatattcaccagataaaagtcagaatatggttcttatgggtggtttaagaaaatacattccaattacaatatcttcgtttgtatggagtaccctttctctttgtggtattccacctcttgctagcttctggtccaaagatgaaatacttagtaatagttggttatattcaccctcttttggaataataacttctcttactgcaagattaacttgcgtttatatgtttcggatatatttacttacttttgatgggtattcgcgtgttcattttcaatattacagtaatactaaagatgactcgttgtattcactatcgttatggggataaaggatatctataggagtcaatatagattcggtctatcaacagcgaagagtggagtttctctgtgtttcacaaatctat

SEQ ID NO: 20351 - DNA, 378 bp, Oryza sativa
  unsure (1)..(378): unsure at all n locations
catcacgcatatgtctatctttcatcataagtgcataacctattaaagactttcgttcaatataacagtctattactacctgtgaactgtcatagcatcagcagtctgttctgcatcaccttcttctacagcttaatctccataatacgcatcaagaataaatttctgttcgcatcatgcagataaaaggtatatgtataatagtacgcataaatgctacatagacatcacaagcacaatccactattatagtgaaggcctgaanggccatgctattctaaatgaatataccacagaacatactggcattgtatatggaatgcacctcaataatactagctcatatacacaccgaaggtacaaaaggcagtgtcattg

SEQ ID NO: 20352 - DNA, 409 bp, Oryza sativa
  unsure (1)..(409): unsure at all n locations
taccagccatggctcctccacttcgatgaaatttttctgttctggctcgntataagntcgagctggcaaagattaaataaaatcataagactaatataatcctctaccaaattgaccatctagatacaaagaaagcaacacagcgcaggaaacgcagaactacagggagacatcatccactcacacacacagagagacagaaatacagggagctgacaggcgctattaactctccagattcctcctcccggaggcgaagccgcgcgagttttcggagattccgccgcggtcgggctcaggctccggcgacggcgactgcgacggcggcggcggcggaactgcgagaaagaaagcaaggggttttttttcttcctttctcttctcgggttgggaagggctacacatttac

SEQ ID NO: 20353 - DNA, 333 bp, Oryza sativa
  unsure (1)..(333): unsure at all n locations
ttgtcatatgcatcatatgtatctataagactgaaggatgccatgcatagaagcaactntgttgttacctcatcaaatctatcattaaactctcgaagttgtctatcaatgatgcttataaacataaaacatgtcaacatggaagcgagggaaattcttgacctttctgaataatcttttagatcttccaaccggcttgtttataccatccatatctacaacttgtatgccatgcttcacacaaaatgaagtggatatctttcaaaaagataccattcatttattatcctcagcaatacttgaattgcatcttgattattagtcaattgatta

SEQ ID NO: 20354 - DNA, 446 bp, Oryza sativa
  unsure (1)..(446): unsure at all n locations
tggagctcgcaagctgctcgagcttgattcgttacaggcttgattcgagctcggctcgaatactagacaagccaagctcaagcctaggctgaggctcgcaagcctagcaagctcgagctcgaatagctcggcagggtttgattagcataagatgcattgcatgtaggaagatattcttgatgggtcaatgtatacttatcatcgtgtttgacctgcttgagtctcaagacctcatcgatgtttctcaataaagcaattatctgactgctagtaatagtattactattcctattagatgtagtagctagcttttgttaattgcaacgttttaaagccatgagttcatgagaaaagctgcagatgcttcattcangacaagcagcatccattacatttgactaccgatcatttgcattactatctcttatataagagtaagtttttgg

SEQ ID NO: 20355 - DNA, 470 bp, Oryza sativa
  unsure (1)..(470): unsure at all n locations
tctgctncactgatctgattgacattctagctgagataggctcactcgcacgctngctaagcgctatgtatgagactcatgtgagaaatggagacgactcgagtcttcccctcacccacccaacagacccaactgattgattngatcacctatggctccatggctgtggccatgtctgacccggccttctcgtacgctctgaagtcaaccatatgatgttttctgcatattcacccgcataggataggagacaaagagacagcactgccactgataggtactcccttccgttcaaaaaaaaatcaaactaaacaacgatggtaagtacaacgaatataaatagcatgtccatatttcgtgtactatatagtgtcctattggtgtctanggtgagttngttttgacggaggagtangagtatacattatttcttctgggcatcatctacagtatagaataagtactatact

SEQ ID NO: 20356 - DNA, 493 bp, Oryza sativa
  unsure (1)..(493): unsure at all n locations
gggcactggcgttctcggtgatgaggcaaataagtagtaggaggtggaggaagaagacaaggtgggtggaagtggaagagatggagcgagaggacatgtacaagaagcatctctgagctccgagctgctctccgatggcgtcgcggcgcagtgtggcagcanggacaggtgggggcaggtggcagagagggagactggactgggtttgaatggtccggacttctattcttgggaaggcgacaaanagcgttgcggcttgcagggttgctgaaatgaaaccgccagtcaaagcggagggtgggtntgttggttgggttgctgcagaatgttgcggcagctatggctgatcagtgtttgattctcttctctccttcacctctctaggagtactgcactataggacaaaggatacggatccttgtgtcagtgcctgattgccaatgcaatcaatgtcattagtttagtgctaactaagcccatcacaacaacatga

SEQ ID NO: 20357 - DNA, 307 bp, Oryza sativa
gagtcatcactcttcaccaatcaccaccacttctttattttcaccgtcccctcccacgattgaagggcttgtggtaacacggatgacggatcgtgagcagccctccatggagtttgtgcagtgggctgatgagctctgtggcgccgagggctgctcggctgaaagacgatgttgatggcacatatcagacgataagcttgcagtggtgtgtcacgcttgacagcttgggcacatatattgcaaagagatcggtcgataagccttatatcaatgcagatgcaaaaacttgcccataatggtgcagata

SEQ ID NO: 20358 - DNA, 475 bp, Oryza sativa
  unsure (1)..(475): unsure at all n locations
ctaagcttgagataaaaaactggggcttgatcatttaagtgtatgaattatgtctcctatcttgcacatatcatatttgcattacttaactctagtgccagcggaacagctctataatataggaaacacatatttccattgaaagctatccacgagaccagagttgctcttaacaactggcaacaatgattatggctgtgtttagatccaaagtttggatccaaacttccgtcattttttatcacatcaacctgtcatacacacacaacttttcagtcacatcatctccaatttcaactaanatccaaactttgcgctgaactaaacgcagcctatagaacctagagatgagatccgtaggctgtagacaactttcctgctaaacttaaagggtatacaactactttatcacgagggaaagacctctgngtcaacactcttataattaagacttataatagaatcttatgggact

SEQ ID NO: 20359 - DNA, 466 bp, Oryza sativa
  unsure (1)..(466): unsure at all n locations
tctcatcttcatcttcagcaagtagcttgacttgtgcagntacttctttcgtcaactnggcctagtaagttgtaaagcaaggaaataagaatcatatacattnttgcataaattctcaagacaaaacagtggcatctactgaatcctacaccatcatgacttctaacattaattatatntgcttcaaaaggtttgtttcatgaatcaagcaagacatgctccagtataaacctattgagctcaagacttcacagttggcatgactgacacagtaacatattgctttgaggtgaatgtgagctaatatttttcacagttctttgttaatcatcagcatatacataaataccaattattagcactgccctaagttctcaatattttggttctcatatcttttgaagaaaagactgccctacattagacagtccaatattntccatagctgtcttctcttattattaaa

SEQ ID NO: 20360 - DNA, 345 bp, Oryza sativa
agcttgactgatctgtgacgctagctcacgaactggtcctcaccactcctaaagaaacatctgtgctgatgacgcggtgatgatcacctcttgtatttacatgcgagataatgtaggtttcatcacactagcgaccgacgtgatgtttaaaggattgctcggaataccatataaaagtgtccaagtcgtaccatgtgccctgacacccaaatgttgctagctgactctctattaaatcttgccataatcctgacccagactgcatgtggaccacgaaggatctccagctccttgatgatgaaagctcatcaacgtctgcttagagcttctaacactgctctttaa

SEQ ID NO: 20361 - DNA, 369 bp, Oryza sativa
  unsure (1)..(369): unsure at all n locations
tgaacttatgggattcagctggatctagctcgatgggctgtgtatctgatcatgatagtctttctgaggccaaaagggaacaatttgctcctgctntgtctatccgagctcccttaattattggagggagaagacatgaatgcagcagttcattgccttcacagagcttaaacttagaccttaatcttaatcatgctgatcagatcgattctgaggatgttgatatgattcagagtaatggacaaccagggataaacgcttttcctctcaacaggggcctgttcattactgagcatgttctgcgccatacacattcttccagtgctacaggaaatccttcacacggtgcaagcttttctcatggaatga

SEQ ID NO: 20362 - DNA, 474 bp, Oryza sativa
  unsure (1)..(474): unsure at all n locations
tgtgcctgtttggagagatcatcatatattattaaagtatgtcgttcgcggtacataaaatactcagccagggctgctcccgtataaggagcgaggtattgtaatgtagcangggaatccgccatttcagctactacaatagtgtattccatggccccctcttcatggaaagtagttactacttgagctacggaggatgctctttgaccgatagctacataaacacatattacatcttgccctttntgattgagaattgtatctgtagctactgctgttttgccggtttgtctgtccccaataattaactctcgctgaccgcgcccaataggaatcatcgaatcgatagcaataagccccgtttgaaggggttcatatacagaacgcctggaaatatacccggacaggagattaattaacgagatccgaagctacaattcgctctccataataggttagccgacattatacaca

SEQ ID NO: 20363 - DNA, 474 bp, Oryza sativa
  unsure (1)..(474): unsure at all n locations
gcttctgtgactgcggcggcgacgtcgacaagctcttgttactgcggcggcgagctaagacgctctgccgctagcagattcgagcagagaagtgcggcggcgatctgcggcagattgaggtggccggcgagatggaccaatccttgtacacgggctcgtcttcaatgcgtaacccattcacaggcgagttgcacgtcggtaagtgtccgttatgcggtacgcagttggaagcaaagacatcgaggacccctgcttacccaaacaagcggttcgtgaagtgttcaaagcttgagcatgtaagttttaggcattaattgtcttgtaatctagatgcatgaatcctccatttgcacctcttggccttgcagtatgctctgtacctcgtcgattcgctatatggaattgcaagttcaacctcttttagtactgcatactgcctaatgcatctgttanatgtttgaccgtcttcaaatg

SEQ ID NO: 20364 - DNA, 430 bp, Oryza sativa
  unsure (1)..(430): unsure at all n locations
tacananatagtataacacctttctgtcgggcacctttntatttgcatcgtggtaattccaaagaattatctaactgcgttaaaaaggattntaacagcatcgggtcacatcattgtgagtacaaattgccaaagcaaaaagcgcctaagtccctagggatcacaacgggccacgctgctaataatattgggctgaagtactgtacaggtccaagcccattagcactcccgataccctaacaaaacaccaaagtccaagcaacgctntgtcttcctcgccaaaactctcgccatttccccactccttgctacagtgcanagccacgccgacgaagctagggttcatcaatccgccccaatccattctcaaaaatccacgaatcttctccacgcgtncaccgcaccgattccccattccccttcagctatt

SEQ ID NO: 20365 - DNA, 60 bp, Oryza sativa
agcttagcctgcatggtccccagaacagaagcatatctctctctctctctctctctctgt

SEQ ID NO: 20366 - DNA, 492 bp, Oryza sativa
  unsure (1)..(492): unsure at all n locations
actcaagctggacacatcctaggaatggattggttggctaagcacatatgacagatagattgtgccgaanagtccatcaccttgcaaggacctggaggaaagcaagtacgctttacccctaacactcctaccgcaagtcggtctatcttaacctgtttacaagtcacctccttggagtcngtgcccatagtttgtgaatatcccgacgtatttccggaagaattaacaagaatgccaccagaccgagagattgagttcgccatagaactggcaccaggcaccgcaccaattgcaaaaaaaccctaccgaatggcagctaatgagttagcagaaattaaaagacaaatcgaagagctggaaagtaaaggttatgtgcgacctagctcatccccttggggagccccagtgcttctggttaagaaaaaggatggctctgagagaatggtaatcgactatagagccctgaatgaagtaactataaagaacaagtac

SEQ ID NO: 20367 - DNA, 265 bp, Oryza sativa
ccccccctaaaaatgtattgtattcccccccccggggttgtgtctcaacaccaaatgcgggtgaagcgggacaagaggttctgggaaccccgacagaggccgggaaaaagtagcaacctctccaaagtacagcaacgccgagcgctttccgcgcaaccgaacgaagccgagctcacgaccacagcaccagcacgtacaggcagaagataaagaccaaactgcaaagacggacccacatccgctctgacagccagccacacccaca

SEQ ID NO: 20368 - DNA, 450 bp, Oryza sativa
  unsure (1)..(450): unsure at all n locations
agcttgagaggggatcaacagtagctagcaccaagttctatcaagaaaacaataagtccaacaacaagattaagggacaaattcaaagttggatcaaaactcccattacttgcttcatgtctaagaaagtgggacactatgccttgatgtgtttcaacaagattgatgaccaagccacacttcctaagaggagaacaagaagaagcaataggaagtgctatggatacaatgagaagggtcatgaagttgcatcatgcccncacatgaaagatgactctgtgtcatcaaagaagaagcttaatagcaaggtagcaagtaagatgcaagatgtggtgaagaagacaccatgtaaagacaagaatcgactttgctacaattaccgtgcaaagggacatattggtaaaaattgtcctctgagtaacatttctaaactaaactcctcatttgatt

SEQ ID NO: 20369 - DNA, 478 bp, Oryza sativa
taagataccaatgcgagttcatactcctggaggtggcatgactacaactcactactgcccatctgtgacagttgaaattcaagggttgatttttccagccaacctcattcttctcgaatccaaggacctagatgtcatacttggaatggattggttgacaaggcacagaggagtgattgattgcgccagccgcaccatcaagttaacccatgcaaaaggagaggtggtaactttctagtctcaagtgccgcagaagccagggatcagtttaaaccaggctgttggtgaagaacaagaggtagcagtggagaaaaccactaagaagctggaggatattcccatagtcagagagtatccaggggtttttccggatgatctgacaacaatgccaccaaaaagggatatcgagttccggattgacttggtacctggaactgcaccgatccacaagaggccttacagaatgggagccaacgag

SEQ ID NO: 20370 - DNA, 478 bp, Oryza sativa
  unsure (1)..(478): unsure at all n locations
tcacgtaactagtgtatacaagctatcaatcttaccaagtatgtcaatattgcaagggntcattcataataaagaataaaaaatatgcaagcatgcatgctgctgatgttctgaatgatgaaggaaagtacatctaaactttatatagaacaataacagaagggaattgtaacagaagcacatggaaatcatacatcaccttgttttgcaaattgaacacaacatatatctttaatcaacgcacagtttagatgtaagcttgctgcagcctgcacagggttgctcaatcaagattgtattgtagaagggatcttcattggttctatcgtataggacacaatgaatggagctctaaaggtgcttgcaacttaaccaggtgatccattcaaacaagatttaagtgtataattgacactgctttgtttcataaaacanagaacatgataaaaagcttttgtattctaaggtggacacattt

SEQ ID NO: 20371 - DNA, 431 bp, Oryza sativa
  unsure (1)..(431): unsure at all n locations
agcttgcacaaataagttaaacagatgtgaacaaagtttcaaattttgtacctttgaacaacaggttgcaaaagaaataaaagaaaggtattaaatcatcatgctcaatttattttattgcagcaagattaaataaaacaatattgtgaaacttttgctggtaaaatgagccattagtacagtaatggatgtacagtactaataacactggaataaattttgaatgagaaccattaaaagagattatgaagtgcatgtgccattagttcggtttaattaaaagagaaggggaggagaacagttctacttttccacatattttagagggcttctatggataaccatttggcataacctatggtcaaaggggctctgataccaacttgtcacgcccgagaattctatccaaaaatccanacgcttacatgtgc

SEQ ID NO: 20372 - DNA, 471 bp, Oryza sativa
  unsure (1)..(471): unsure at all n locations
tctgcagcaatccgacgttcatgctcatccttccgcctgaggtagtccgatcttgattcactacgtgcatatggacgtgttccgtcgttttgtgggttctctgtatctacccactcaatgtagttgcacaatttacggtatgtctgcgtaagatgttatgatggagtaaaaatctgttagcttttgatgtgttcagtatagttaattgaacttgtaacgaatgaatgatacctgatcaaggtttgcacattggaagaatctcctgccccgagtttctaccatgaggcttgacttaagtatgcatcgatccccacaagtgcataacggccggtcacaccatggtggaaacctaccggcgaaaggatcgcttcgccagttgagacgctcaagaaatggagcttccattctctctatatgtgtgggaagatgaaagatgatatgaagagctttgattcngcttgtctattatat

SEQ ID NO: 20373 - DNA, 333 bp, Oryza sativa
  unsure (1)..(333): unsure at all n locations
ctcagcttcaaatgcctcttgtccgctaattntatcccatttgtttctttgtgccaatggaaacaaaagtcgaggggaaccacacagtggcacacacatattctacaaaagtgacacatcgatgtgagaaacacccagagtagagaggggacgtacccgttcgtaccacacacacacgcacattggaagctagctacagcaagagagaagatgcgcaagacatgcaactaanagatttgtgaccagaattcacaaacaacagggggctgcttgcttgctcancctccttgcagagctgccatgacaagggaggaagcaactcaagataggacg

SEQ ID NO: 20374 - DNA, 425 bp, Oryza sativa
  unsure (1)..(425): unsure at all n locations
tgttttgcatatcttttatttgaagacattttgaaatcactaagtgatttatntctttctaagtntgtggcaaaaagagacttgcgtctcgattcgactttaagagatgtttttcaacagctcaattagtaatgtaccgacctcccgggtcagatcattacttctcggcttccagagccatttcacttgattaatcggctcccagagcctttttcattttctcggactcccagagtccagctgcccagcagcacaacaaaccgcttccactcgggaagcctagtctatgatgcccgcagacatcccgaatcacacagattcgtttctgaccactcaggtcatccatctgccacataggctgattctggttacgattcccacaccacaacaacttttcacaaagcgcaggcaaacaaatctacgca

SEQ ID NO: 20375 - DNA, 448 bp, Oryza sativa
  unsure (1)..(448): unsure at all n locations
agcttcaactngngcnaatgacagcgttctgtggagtttctaattctgacgataggatcattcactggtagttattattggtcagtagtattgacaaaatttgtggactctagttatgctgcaccttttcgtaactgcaaactccgttgcaagcagctagctggtgccgaatagtttctggttaaaattatctgaagctaaagtgggtttcttcttgctctaggtgttaatctgcagactgggttcttaaatgagatgcatctatgccgatatagcgctcaattgcatgtctattctattcctctgtgtccactaacataattctagtctgcctcttgtggtaattcttctgtaatacacagataacggctagttgtgctgatcctggctgcagacttcacttggtacaaatatgtccttggcataaatttgagataattcctggact

SEQ ID NO: 20376 - DNA, 458 bp, Oryza sativa
  unsure (1)..(458): unsure at all n locations
attctatanattactacgttgattggaggaacgctaaaacatatccattatacttattggggnggatctagattatagtgtgggagattaatangatatatattagagctatttcataagaaacactgttgcatattagtttcgatacaaacatgttattagtatctaactgcataattgcttggaaattctgctagtttgatgtttagatttactctttntcagcctaatattccctctgttaacacatgtatgccactctgacatgggcatggtaaatggtaatctaatacaacttcgagtctttcaccactatacataaaactatttagattggcgcttgtaaaacagcaacaatagatctgntagggaaaaaaaattcttcacaagtaatataattttaaaggggttcatttaaaataataattganataagccgtcaaggtaccttggactca

SEQ ID NO: 20377 - DNA, 477 bp, Oryza sativa
  unsure (1)..(477): unsure at all n locations
agctntcatatatgtcttccctttctttagccttgttattacaaaacatttcgctcttatggaaattaatctttaagccggataacttctcataggcacatagtatcatttttaagtatctggcctctttcaagtcattctccatgaagagaagtgctcttcagttatatttaatttcaaaaccttatgttgttgcagcaaatcagtaagaaacatcttagcatttgtgtgaaataggtactcaactaaaataatatgtttttttgaagaaaccacaaactaaaataatatgttactgtattaataaactgtagtgaataaaacaaccttgattaatgtccttcatttatgttgattacatttggtgcttgtgcagtctaaaacaagcaagttgtccccacttgtctcaaatctgcactataatacgaagtgactttgaaatttaaggtgctttaagaattttagtatcacaaagag

SEQ ID NO: 20378 - DNA, 476 bp, Oryza sativa
  unsure (1)..(476): unsure at all n locations
tgcagatgtcaatgttctatcaaatttctcatgctcttgcttatgagctngttntagactatacaaagacttcaacaatttgcacaccttgccttcttaacctttaactacaaacccatcaggttgatccatatagatctcctcatccagctctccattaagaaaagctgtcttaatgtccatttgatgttgatccatatagatctcctcattcagctctctattaagaaaagctgtcttaatgtccatatagatctcctcatccagctctccattaagcatgagtgccaaacattagcctcatcatccacactgccacaaatatgattcacaaactgtcacgctcggagattcactagtaatttccgaacttatttgtgcataaaatcctcgtccaggaatcagccgaggtacacaaactgacaatttaatatacaaatccatcataataataacgccttagatacttacaaaag

SEQ ID NO: 20379 - DNA, 475 bp, Oryza sativa
  unsure (1)..(475): unsure at all n locations
taatccanatgcacacgaatgcagagacagtgatgtctctttttgtctaagatgagagatatttttttctgcaagctagcagcagcagcactgcagagaggttctttccctctcctctgccttgcttacgcttgctgcctgagagaggtgaccatgttctgaaagcaaagcaaaagacctattctctcttatagactaatgagagcactactatgctaagcggctaacgaagctacgaactttgatctcccccgcgatacccgcgccgacatgaggatcgcattgcaacgaagaaagaaagcgaaagaaatcagcaactatgattagtgccccagtggtcagtggacctgacgctaagccccggccactatcaacgcctagctaataccagcagtattctactagtacaaaccacatcaatatcgaacagggaagccanagccagccaagccaatcaagaacggcgacctccaca

SEQ ID NO: 20380 - DNA, 387 bp, Oryza sativa
cgcagcagcagctgaacggctgaacaaaacaaggatttttacagaccaacggcccgaccgggaaaacagcctcaaacaaaagccggctaaccacacagggccaacagccagcccttgaaccctttggggcgcattatgtacaacaacaaactgctacgggcaagaaagcaaagcaaaacccaagagccccttttaccgcaaaccatcaaatctatggaagcgaacatatagcaaaaaactacccccttcctcaacataatgataacaatcccagcccacgtttaggtccaacctatacacataaagtaaagggccagccgccatcggataaaaatacttcaaaaccttcaaaaccaaacagaaagtgcagcctaaaacagccataac

SEQ ID NO: 20381 - DNA, 486 bp, Oryza sativa
  unsure (1)..(486): unsure at all n locations
gtctcggcctatagagcaagataagagttttcttaatcaaaatagagactagagaacactcgaaaatagaaaccaaagtaaagttttaaagtccaaataacatgtcaaaagtatgaatacaagagaacattcgaaaataaagatatccaacaaaaagcataaaattntaaatgaaatgcgtaaaataaagcgtcaagggagaaacctagaaacgtttgatacaaggaaactgtgattgaacgtgcaacaaactataaggatccaactcataacaaagttagttgttttcaataaactgggagactcaactctacaactcaattaaaagatcaatattaatgacagagcaaaacaaatcggtcagggcatatagcaaaagaataattngtttttataaactagaaaacaaagttcanacaaacttaagatgaaccgtgacaacaacaaaaattggaaactccaaaaaggatatttgaagaattgatg

SEQ ID NO: 20382 - DNA, 313 bp, Oryza sativa
ttaagacacgcagcagcagctgcacaatacgactggagggcctattttttactagcactgaacctacgaccgtggagaaaagcttggataacgataaggtccaatcgagatagcgcacacaacaataagcgtgagaagctccataatcggagaaatgacatcagggcacacccaatcatatttatgttcgacggcacaacgaccaaggtttatgtcacgatacaacagaacaggagcaaagccaaaggatggctaagtaagatatgccaaatatcctgaacaagtcgaacaagtacatcgactcatctggaaa

SEQ ID NO: 20383 - DNA, 407 bp, Oryza sativa
  unsure (1)..(407): unsure at all n locations
tcgggtgtagaggggttcttccatttcctaagaattcttgcttgcattgtgcattttntattggaataaatctcgagctatgcgccgcggttatgtatagtttcctttataggaataaatcttgtggattttttttgtttagcagctatcaacctacctgtttttcatgtcctacttggagacttggagtagcatttatgcgttttgtttccttagatattattagtactacgttgataacacattaacagatcgcatttcagattttgtaagaatacgggcaagcattaaaagaacacaaaaggccggaggctacaaaattcaaaatgtgtgctagaattatntgtccttcaactttggtacttgtgagtaatcatgtctttntatgttcagatctttgactgtct

SEQ ID NO: 20384 - DNA, 455 bp, Oryza sativa
agcttggcagctgaagcggggcgagtaacactcgtcctgattggaccacagagaggaaaatactctaaaaaccggacttaccgcgtgcgcggaaagaaaaaatcggtcgcggatggatatctagattgttgcctcaccacatttagttaaagctagggttaagcttggcaacaaaataacgaaggagtgtggctaatgtaccttatggaagactgagcccacctgcgttcaaactctatactagatacgggtgcttgtattaccactatttattttgcaatggtatacgacgtacctgttcacaacgagtcacttgtggtgacctcatcaatcgtggcacctcataatccaaaaaatacagttcagttttcggggtgctatagcgtaagtatgaaccgtggttatagggtatagctatgatatgagcgcatattatatgatttacaaaagttggc

SEQ ID NO: 20385 - DNA, 444 bp, Oryza sativa
  unsure (1)..(444): unsure at all n locations
cttaaggggttgggaggcggcggcgaaggcccactgttgtctttttactagaaggaaagttcgggagaaacgaatgcgaaacaaactcgaatccacgaatttccaaacgaatttagccgatggttccaaaggagaaaaggtagaggatatcgagaagatcgtttcccctctattgattcggccggaaacggaaaggaacggccggattggaaagcggcggcggcggcgcgaaactagggtttcggccggaggaagacgacgggctggccccacctgtcagcggtcggacgcgcgcgcgcggcggcggactgggccggctgggccgaggagagagagaagagaggttntgggccgactntcggccctaagccaaaagaagacatttaaaaccttcttcaatttaaattattttttagatgccattccatttattaaaaatacttc

SEQ ID NO: 20386 - DNA, 367 bp, Oryza sativa
cagccttgaccgatatttatttatgcagcactcttactctattatttctctctctctctctttcttttccgcgaagaagccgaagatacctcgaaggttcttattttctttcttttttcgcgttgcatgtgaaggaattatactaccgtactttggagcagctgtttctatatacgacagtgagctaacctgcgtgatatttctaatcaattcgggaagggaaggataaaactgttttctgttgctatgtgttcgaatcttaatgtaatcacaccgcttaaccaaatgtcttctacagagatgtccctccagcccgaaaatgttctttcttactgagactaccaaggttatttctcacctgctcttt

SEQ ID NO: 20387 - DNA, 416 bp, Oryza sativa
  unsure (1)..(416): unsure at all n locations
aatctcgcttattgcccgtctcttgccgggcatcgagcgatctgtcttcgcaagccactcaccgtggaaacatagtcatagcactcgttgtagtcgcacgagctgcagcggtaaagtttcgtggccagcggcgccgccgtctccggcagctggaggagcttgccggtgtcgaagccaccggccggcgcgagcagcacgttcctggcgtcggcggagcggacgtaggtggcgtcgaggtcctcgacgctggcgtacagctcgccgatggagccgaccatggagtccttggagagaaccttgacgactgtgccgacggngagggtgaggagggagaagaggaagtcgacgacgtccttgccggcctccgcgtacagcacgcgctgcgccttgctgtccaccagcagcttcatgctcag

SEQ ID NO: 20388 - DNA, 408 bp, Oryza sativa
agcttaacatgtaaagatgctacatcatcatccactatcaatcactaattcctaaagcttaacatgcaaagatgccacatcatcatccatcaacaattattacatttaggcatcatgcagacatgctatattatctaataatttataatttattacattctagagatttaacatgcaagcatgttaaaacatctcacataattcacataatacttcaatatatctctccatcattttttataatattctatatacctcgatagttcaccctcacttaaataggtaatattatttctcttttctctcattaaatcatatcacactgaatgggtttagtccttagatagtaatctatagttccaattatctctcttcattcgagttcttctcatcaagccatataatctc

SEQ ID NO: 20389 - DNA, 475 bp, Oryza sativa
  unsure (1)..(475): unsure at all n locations
ctcattntgcttttgcanagcactcaaagaagtagagtttgtatcacaagtttcaatataaatatctttgcacctcacacatggttcattgcttgggacaattttggagcacgatgcctcgctagggagagagagactgttctttaaggtttcgaacttctcttcaagagagaggtaagctttgtccaagccatccactctctcttgaagttgagcgttcgccacctcaagattagcatgagattctttggtttgcttgtaaagccgtaccaaagcctcatttttctctctctccttagcaagttcactcttgagttcatgagaccgctctntctcatgaatgagcaattcctcttgcctctcaagggttgcatattgattctcaattctcccaagcaactcactcaagtgtggtatggattccttggctatggatttgaacaactcgtcatccataacctcatcctcaacatct

SEQ ID NO: 20390 - DNA, 429 bp, Oryza sativa
agcttaagataaacttcataattaagtgttaacttttacatctgcttataaatgcaaccacaatattgcaaaaaagtaaccgttcttaaggtgaacaatagacattgtggaataaaacataagttaggccacaacaagaaacaaccataagcttatggtcagccataagagaataaaaattctgagaatctcatttcacactttgctccattctctctgcccaataaaaggatgatctggattctattctagtggtaaatgggcccacatctattgttcatacatgacttaaacagtgtagcaattggacaattatgatcaatcgctatagggctcacctttatgctatgttggacaataagtatcggccttgccctaagctgtagggaaaacgagaggacaacaattgattgttccatgaagcatgaa

SEQ ID NO: 20391 - DNA, 464 bp, Oryza sativa
  unsure (1)..(464): unsure at all n locations
ttctctttgatttcatgactactttaattcgatgntctctggactattgatagaaggatttaacttccaccaatccaaaaaagtcagcgttattttgttttcgtgttgaattgttttcagctgactggacagcttgagtttgttgccaatttaccgtgggatttcatatttttcttacctcgagtctgagttcttgctaaggacaaacatatagtaaagcgttcttccaacatgttaaaatgaaactggacgatgtattaccaaaagatgttccaatccaaactaaaatgtgttgaatagtttcacattggttgtggaagggcaatagacctaatatataagtggagaaacccttcacctcattggcttgcttttagagtgggaanagctctntacgatcctacaaaatgaagttcgaaagaaaatgcagaagtgaacaagtgatgaaaggaataggccacatg

SEQ ID NO: 20392 - DNA, 331 bp, Oryza sativa
  unsure (1)..(331): unsure at all n locations
cgactgnagcatgcaagcttgnaatgataccactgtgttatataacacatatattttgttgaagctnncatctcttcgacagttagtgtttgtcatggtaactattaacacaattagtcaacaatttcggtggaacagataaacttgctcaatatacagtgggttctcatcactccatttctttgacgccaagaatgtgatatccttcacagaagaataagacaaagcacattggcacctcacatctctgcatgtacttgatttttgtattagccctaatctctatcacttgctaaaatgatgcattgcctttcttccctgaaacagttgt

SEQ ID NO: 20393 - DNA, 402 bp, Oryza sativa
tctccaccatctcgctgctagccaagttggtgcagctacctctattattgatcatgcggcaacaacgctctatgacgacacactttgtttggaacaacgtgtgtcgctgattttgctccgccttctccatttgtgcgctaaggacacactgcacaatgaggcgctcatagtgatccgcaaatgcagccccaatgtgctcttgcggtggctcattatctgcatggtcagccgcaagcaaagcaagtgtatcatcatcgaaatcactatcagaggagtactcaccatcgtttatgactaccaaaactcgcttgctagtgcagtcacgctgcacatgcccaaagcccttgcaacggtggcactgaacatctctcattcggcctgtggatgtcattgaagaagcac

SEQ ID NO: 20394 - DNA, 391 bp, Oryza sativa
  unsure (1)..(391): unsure at all n locations
agcttgaatngaaatgcatgtatgtaaacataaccgtgctcggtgtgtggatcccccggagttgcttccaaatccaccgggtggatttacttcatccaaaccgtccctttaaattgatggactagattaaaccaatcctttctcctcctagctgctgctatctcggagagcctattttctttcaaaaaaaatgatgtatagcctataaaanaacgttatccagtataagagagaacttggtatcttcanactctattcaaactttatgacaacaattagataagaacaaacaaaatacaaacattgtaccgatagaagcttctagttctgtccattattaagatgaatgagtctgatgcacgtctcgatactgtctaattcataacaactc

SEQ ID NO: 20395 - DNA, 419 bp, Oryza sativa
  unsure (1)..(419): unsure at all n locations
tagatcactatgggaagaggctatgattatggtccatcaccgtctttagaatacaggagaagagcccgcagcccaagtcctcgtgggcgctatggaggccgagacatggatctcccaactagtcttttggtgaggaatcttcgccgtgactgtaggtaagtttctttgcaccttggtcagtaactgaatgagtgttttcttgttaagtaacacatgcaatcacacattccggttacactagtngtagttgagttggtgcaattcatcatcatttgggccaagataatgtctctttataaaattataatactactgatgtgcattntttaaatccgtaaattatttttcatcttgagcttctattgcatacagctcatgagcttggtttcaatgccaaaattatttagtctcacttataa

SEQ ID NO: 20396 - DNA, 359 bp, Oryza sativa
  unsure (1)..(359): unsure at all n locations
agctngtanattgaagtacgggaaaattagaagaggttttctaatgataaccgcttgcttgggcaaacatggcatcggagttggtcctcgggagaactcaagcgatctgccgcctctccggccatcgccagctgcagctgttccatggggaggggctccgtcgtctctctccggcgagctatcaatccttctgcagcagcgcgtgtgggcaagtcgacacgacgatcaaggttcgacctctatccaaaatttgccttttttcttttctacatccaagtagaatgattgtggcttggctattcccgttaaataaaaggcttgtgcttacacaagtagacgcgttgtagacagcttttcat

SEQ ID NO: 20397 - DNA, 412 bp, Oryza sativa
  unsure (1)..(412): unsure at all n locations
ttacaaaagacggntcaacacttgtccactgtgcaagataaatctgttcaaattttagttgaattcaaacatttagaaaactcancaattgctcgaaattgcaaaaacagaaattgccaaaaaaaattaaaaactaaacagattntgctaaacttaaacaaccatttgcaattttttttgatatgtataattggtgacaagttttgaattttgtaaagtatgtttaaattcaacaaatatttgtttccattagagtcttgcacatggtcgcccaagggtaaaattatcctttgcaaaatttccaagatatattaaaatagtggttggaatgtctttcgccaaacaactattcaactcctttaaaaaagagtaacgatggtgtcagcaaatatgccaccccatctattccaat

SEQ ID NO: 20398 - DNA, 196 bp, Oryza sativa
ccacattaccgtattaagcctctatgcatctcttgcgtcttcatttacttagaatgtaagaggaacctgctttccatggttaattgcatgcaacgcgacaaccttggtcatcaaaaatacttaacattctcaaaactcgggtgcgatgtatcactatggactatgttcacaacatgaccatgatacatgatgcatt

SEQ ID NO: 20399 - DNA, 466 bp, Oryza sativa
  unsure (1)..(466): unsure at all n locations
tctgctccatagggcttttccanatgtgagatattcagtttggatatatgctagcttaagctcgttgtggacccttatctactgcttgagaggtatgatttatgtgaagatcttggtttattatatgctatttctttaaggagagaaacctgtcatgtgctatagttttgtcaaattaagatatgggctgttctacaccttggcatctttgcaagcaattcaacagccaccatttgccattacttctatcaacggattactgcatatntaagtctgctgaggatattagactagaaagattatcaatggctttttcacaagacactttatttataacagctactcactcaatttcttagtattttgtttgtattttcttgttggnctgctgacattagaatttggaacttaccagcttttcattattttaagatcgcatattgcaatattgactactgtgtgagtc

SEQ ID NO: 20400 - DNA, 327 bp, Oryza sativa
agctagtgcagcaaaagcaagtatgtagtacacggtattcatcggacccccgcaagggatctagatggatctggggatattgtagtaagctcttgtacccgtggggtcgtacggcatggctgcgcggcggggacagcggttcgatcatctttacgccgtggcgccgagctgagcgagcaattcagcacagttgcgacactgttgacacagatcaacccagcttcttttaatctacaccatgcattgccttggcccatgtctgtctgaaacctctgaatatgcacagcacacggaagttctctctgctaaagagattagatatactga

SEQ ID NO: 20401 - DNA, 488 bp, Oryza sativa
  unsure (1)..(488): unsure at all n locations
taaataccatnttactngcttctttgatcaactgatctattttatgggttgcccggngcctaaaacctccagggccaaacactgttatatccacattcaaataagcaatagctcttgaagccagcatatccatgttgtcctcgacccattcagtagaccctatctgagacattgagtgtgccgcatcaatacacaaccttctgataaagaagcaattcagaacaagtgatcaaggacataccagagcaaactcttctgcatcccaactacacacaatgattgttcgtctaggcctccatcccttcttctcaagcttggacagcctttctgcgatctatatatatacgtgtgatgctaacattatatcatcaactcttggcattcagaaattatagatgccttttatcatcaacaaaaagaatatgcacttaaatntgtngtttggaaaatgagacanaggctaactagaaagggaaaggatgaaatat

SEQ ID NO: 20402 - DNA, 485 bp, Oryza sativa
  unsure (1)..(485): unsure at all n locations
ngatcaaccattaacaagtaatcctaatgtgggagggtttggtatggggatgcagaaatagtgcttcaggatccattacgcgttcaaggccttttgttcttcttcgcatccgttattttggcacaagtttttttggttctcaaaaagaaacagtttgaaaaggttcaattgtacgaaatgaatttctaggtcccgggatttcttaccatcaagttggtaaaaagccgcgatttattggcgattgctagaattctctatgatccattttggagaatctttttttgtttagactattttttgtttgcgagatgtcttgtctgcaattccttatttctatcatctcatgcaaaacgaggagaatgcaaggcaagggcgagaacaataaaaggaacaaatccttttaggagggattgctggtcttcttaatcctctattgngcacaagaaaaaggctnttntgcctttttcttgtgtcgattcttcttg

SEQ ID NO: 20403 - DNA, 415 bp, Oryza sativa
  unsure (1)..(415): unsure at all n locations
agcttaccatctaaattatatctaaaagcattttgttcgaatggatagatctgtctgtttgttgttgtgcacgacttcccaatccaacggagaagacactcatgcaaggagtgtgaggcaccaagtttagatctgtgcgagaaatgcttcatgacatgatctactgcagagggacgctctgatcaaaagcatactgcagatcatgacatggaactggatgactcattccttttccccaacttagtggattacatggatgacctatatatcgatatgacttgagtgaggngtggacggtgctgaacatgaggcagcggaaatatggaatgagcggtgagagtacaggactaaccatccgttgaagtgtaacttgtgtctagaattcaatatgtagatttacaaatgctgcatctgc

SEQ ID NO: 20404 - DNA, 420 bp, Oryza sativa
  unsure (1)..(420): unsure at all n locations
gacctataaaactcagcttttcagtattcgcttaggggaatcacgatgttctatgaatagagatatatatcatgataaattgatgatcgcntatatagatctgtgcctgcaacatatcagagagataatttgttctgcaatgttcaacgacgaacatatcctctgtagtctgtaccacagatgttgcgaagcacaactatgtttctactactacttcactctgaattctaattcggactcaattatacatgtactctgcagttctctacagatcttcttaaacctatgaataatcaaatataaatcatcactctattgaaacaccaaatgcataatgtcaagaattgctgtctggatattaatataccaaacacatgtagattttaacctgatttactaggctgtgtcttaagtctattt

SEQ ID NO: 20405 - DNA, 461 bp, Oryza sativa
agcttgactacaccccgtgaatcaacaagtatttttcctgtctatgatcgaaacaaagaaagcagcaatataacatcttcataaacaactaattcgagaatatctgtgtgagatatccatgcatggctcaacagccatacataagaaaccagctgtggtgcaaaatgttcatttaccttcacatcacgatgtatatgcccatgatgatgaaggtactccaaacctttcaggacttcacgaagtacagttgcaatgacagcttcttcaaaaccatctggatagactgacttcattatgtgaaggcaagaccctccactcatgtatggcatgaccacccacaacgagtggttatttgtaaatgaacaatgtgccttcatgacgttaggctgatctatgagaatcatccgctgaacttcacgcatgatgttgttctgcgtcagcatattcgtgtactatcattt

SEQ ID NO: 20406 - DNA, 473 bp, Oryza sativa
  unsure (1)..(473): unsure at all n locations
tagagagaggaggtcttacaggctcttggccccaactctgttgtttttacagctgcagttgaggcactcgccggagcagccgcccgccaccaagcactattctgcgtggacgccgccgccgccgccatagtagcagaaggatttggagctgccatgacaagatcactgtggatttgggtaaggggttaccctggacctatgatttcatcctcctcttcgtttcttgggccggtntgctcggcccatctatttagcccacttatcggccccaaagccacagtatgccaggagtgaaaaaaaccatcagctttttttctttttcatttttacgattacacagaagagacacacgcataaacacctctatacactcacaccttacttacatatccgctgatgtatcactaacacacactctaagagaccatctgtatatccttagactcactaaaatcctattgaacgcacatcta

SEQ ID NO: 20407 - DNA, 428 bp, Oryza sativa
agcttaccattgccgaagaggacgaggaagataccgctcgccgccgccacctcgatcggatctttgcttcgctggtcgccgctgctccagaatccatcttctgtgtcaagcggatcgccgccgtccctcgcgttcggtatacgcgtcatcgccggcaacggaggagaagatgaagatgtggcggcggcggcggcctgcgaatgaagagcggccgtgtgcatgcgtggtgctatccggacggttgagggcacagagcatcagatcggacgaccaagtgataccgaagcccgctcaactggagtagtattctctctctcttatgtatggagtaagagtatcttctttctttctgtgtggaagaaaggatcatgggcgcgcgtggaaaatgttagttattcccctgaaatctgattacctctataattttt

SEQ ID NO: 20408 - DNA, 468 bp, Oryza sativa
  unsure (1)..(468): unsure at all n locations
tgcattanacacctaagttcccgtgacttgctgagtgcgaatgtactcacccttgctctatataaatatatacatagttcctccgccctgaagagaagataaggtgaagtgaagattanggtttcgtcctggttcccagccgtcgcctgtggtgttgggtgttagttcgttggttccgctgctgctgctgttgttggtgtttcctcgtccgtgtcgtcggttgcattctcgggttgttctgagctgcaacctaagttaaggtaaataagtcctctatctattttaaggatttgctatgattcatatttgtcaccgtgggtaccagcactatgtcctgngactggtaccgagatcgcggtttcgtaggaagcggttcgcgccgttttccctacgacacgctcctatcangtgccgttatacggcggtatcagattgnngtgtgacaagagatggtatcagagcattagt

SEQ ID NO: 20409 - DNA, 470 bp, Oryza sativa
  unsure (1)..(470): unsure at all n locations
cttgaatcctctggctgtaagttgaacaaaacagactttctcttttntctctntctttntgcccaaatagtccttaagataaccaggctctggtctcctatgtcagacactgacctagttcagttccaaatgtagttttgtcatatctttacttgcagaaatattatagaagcaggacagctactgatgaactccatgtctttctcccctaacaaaaaatgcttttaccatcggagatgggtggtcaaacattttatcattttggtgcatctttctagaatctagatgttcggattggttatattgcaatcatatgatatgataagagttggcacttggcacacagagcatcattatgatattacattaaactggttatttttatgaacatggctaggtcatgtcgcataccatgagaangttagacaggaggtttntcttactggtgggtgcaagcagaaagtaccctt

SEQ ID NO: 20410 - DNA, 431 bp, Oryza sativa
  unsure (1)..(431): unsure at all n locations
agcttgcggctacatcacgccatgtgcatatgtggcctctaatgatcaacttaactgttcgtctattgagtgcccctgcagtaatcatgcgcttgtatataaaaggtcctgtactgtggagaaaattattgaatagtgcggacaagtctcccaggaatcttgcatctttgcatttgcagctgcaagcaagggtgtcaacctcgttgcactgacacaattagctgtcataaatgggggagtttctatcggtgagaaagatcgctcatgcccccatggctgtacatcaaggtnggaggagcaaacgaacaaggcacgttgacgtctgaactagaatcatttttgaagtcttgggcccgctttagtccctgtctcaattttttaaagtatacggacacacatttaagatattaaacgtagtctaataataaaac

SEQ ID NO: 20411 - DNA, 445 bp, Oryza sativa
  unsure (1)..(445): unsure at all n locations
tatatacagttcagaataaaccatgttaaggaccattactctataaagatttagtcatatatgaaattntgctacatgtggatttatttgccagttttggcacaagtgaactgaacaaatggtgaggatggcacatgatacctctagcttttcaatgagttctttangcgttggggccaagacgatgatatggcgggcactaggtctgatgaacccttcctccacagctttgtcgatgaaagacagcaacggattgtagtagccatccacattgagcagcccaacctgcaacgtttcaacgacaagtctgatgtcagttttaacacattatagttcaaatttaggacgaattntatcatattggacagttgggtaccggtttgtcattgaattccaagtgagcccattgcattacttctagtagctcttcaagtgttccataccc

SEQ ID NO: 20412 - DNA, 464 bp, Oryza sativa
aatatattacttcctccatctacttttgatagtcatatttcatcttgtcacacagatcaaagataagtaattctacttatcatatatttaaacatgctactagtcattcctcgtaaataaacgattcattaatatttacatttctcgatgctcatttagccaatcttgcgtggaagttattaagataggttgttggattgaaatatgcctatcaaaaataaatttttcagatttagaaatatgtctatcaaaaatagatggagagaatacattattataaaagagtttgaaaagaaaccacaatatctggtctaggagcccaaaaataccatattaattagagaaaagaaaacataaaatttcgcattgatagatcttagcgtacatactctctctgtcccataatttaagaaagtttatgactagaaacaggtattaagaaagtaggtagaattaactagaag

SEQ ID NO: 20413 - DNA, 395 bp, Oryza sativa
  unsure (1)..(395): unsure at all n locations
atttgacactctcaaatntctcatagtagaatttatgttaatgtggataaaatttgacatcaaaccagacatccatgccttctactcctactagaaaatttagttcaatgaaaattggagtagctttaatccaaacaaagcccttaaaatgagtacaaagccgtcatttctgccgctgcgagaacaacttgccgaaagcacccccgaattcttggaaggagaagagaatcccgaaaccaagccgccgccgccgccgccactatgcaccgaaaccctcgcctcctcctccgcgccgccgcctccctcctccgcccctccttcttctccgccgccgcncgcccaacgccggcgctccctcctcttctgcggcgcccgcccctcttcttcccggaggg

SEQ ID NO: 20414 - DNA, 489 bp, Oryza sativa
agcttaaacaatattgacgtgaataaacgctttcttattatgtaataagcaatgtcaagaataaatttcttatacactaatcatgcatgactcaatggaaaatataaatatatgattatagcctataggatccatacttaaacggtaagtgctagagggttttagacactgtaaacaatcggataaacataatgtcatgcaagttcaaacagagttcaaagttactgaaacattggccctccataaagtgaagttactgatgacttaacttcaatgccataattaaagttaacaaactgagcattacgctatgcaattaagatgatcaatgtacatctgccagtgactccgaatacaaaggaacatagggaagataatgccgcgtcaaaatatctccaagctcacatatataatgcacttccctgctatccattttataggaaatgaatattccatcattcagtgaatccaacaaatgatatccgttta

SEQ ID NO: 20415 - DNA, 385 bp, Oryza sativa
  unsure (1)..(385): unsure at all n locations
ggtctgccctagactgcatcccaatgggacgatgtgantttttttttatctcttctaaaacaaataaaccttccacatctcgatgctgcacagatccctcaattctagctagctgaacaaaaaaaatagattaccctcgtgattgcctaccaccaaccatccaaatttcaccagaaattccgctgttacctacatgagtcgatttcacccctaaaggatctatcactaatttcaagcacctatacgggacacaaaaactagcaacagggtggtacataaatctacagcctatacagattgagattgagaggattagattagagagactcacacgcgagacgctcgcgaaccctatagcgggatggatcgatnccctccggacgcc

SEQ ID NO: 20416 - DNA, 394 bp, Oryza sativa
  unsure (1)..(394): unsure at all n locations
actgcagcaccagcttgactcagtagccggcgacttcactccacatttnttccttgacggcaacgacgaaaccaaccgtgatgagacagcttcaactgagaagaacctccgctctggtgtgggggaaaagagagccagactgatcactacccactggactcagcgagtcctaccggaagaggaggcatgatgcatgacataaccacaggaggctgaaggttcactcgcaataacatatgcatttaaaagcagtaggtgaaaatacgaaaacaactgtagtaagcaatcagtattaacccatcactatccaacgctacaccacgttgcaacaggccgaacaaaccacctgaactacaccagttcattaaactaaactatgggtgagactaatcac

SEQ ID NO: 20417 - DNA, 386 bp, Oryza sativa
  unsure (1)..(386): unsure at all n locations
actaagctataagggagccctgctaacataccgagaaagatttatgtctttacatgcaaataccatctaatagtctggagtatacagagaaagaagatatgacaataagcaaacttgggaacaaatatgcactcaaatgtaaaaactcgttttgaaactgccggatgctaaatgacaaatggaatggaagaacgtaatgtgggaacagaagtggaacaactacagtgggaacaactacgtgtttttaacatagtagcagtttcgatgtgaacttataacagccggaactgtgttttggaaagtattatctgcatggcccaacagctaaattaattgcacttacctacttagaacttncaaaagcaccgtaatcagcagcactgcgt

SEQ ID NO: 20418 - DNA, 417 bp, Oryza sativa
  unsure (1)..(417): unsure at all n locations
atcgtcaacaataaccaacacataccactttcttccaacagattgcactctaactggaccaacagtgtccatgtgtaatagccggcccggtgcatccgtcgtcacagaaacaataggagcatgtgaagtaaaaaccatcttatcatgacgacaccgtgtacaaaccaaatcaagatctttcttaaagttaggcaaaccacgaacaagatccaaaccacttaatctagtgagatgatcaaaaccaacatgtccaagtctacgatgccaaaacatcacatctttatcaaacttagcaaccaaacatgttatcacaggtgaaacacgatcttcaaaatcagcgttaaacactctcgcatagcgagagatattcgacacagaatcaccaccagaatcacgaactttaccttcagntttctt

SEQ ID NO: 20419 - DNA, 434 bp, Oryza sativa
ataatacctggatgttcaagcgatggacataatggtggctcattgcttcgtggaagaggctgtttccctagagtcaagtttggtctagcattgtatacaagtctccctagagattctccacaaattttgctctgcattattaattcaactccacccaagaaacttagtttctaacacaaggcccaccaattgacctcctgcgaggagtgagagagaattgtgtgcgcaggttggaagactcatggtcatgttcatcaaacttatagcctgcaaagtaaaacgtcataatttcagagccaaattcaagcttataacctgaacaagtattagaagctcaaagtttattctctccctaccaatgaaacgtctagttttatgatggaaagcactaaagttgatgtgcacacaaatattattacatatgatatagcaca

SEQ ID NO: 20420 - DNA, 415 bp, Oryza sativa
  unsure (1)..(415): unsure at all n locations
tgcagcatgcaagcttaacatgcgaagatgccacatcatcatcaactatctatataccacatcatcatccactaattaacaagatgccacatcatcatccactaacaatcatcacatttaaacatcatgcaaaaatgctatatgcttatagtctttataatgtaagagcttctcaaatacaaacaccggaaantatcatccaacataattcacataatggctcaatggatatctttattatgttcgatgacatcctatatacttatataatccatcctcacttagctagtgcttaaaagattaatctacgcgccaaattatctttctccttttttctctaataacgcatatacaacactagttttaaccttagatgaataactacggtccaactatctccctacttttttctcca

SEQ ID NO: 20421 - DNA, 400 bp, Oryza sativa
tggagctaggaaggaccgaagagctgagactcagagaaaaagataagaggaaacgacacaagcagtagctcggcacaagaatttgagagcagcgatctatcaccaccagcctgtcgctgattggtttagagcagttggagcgtcacatgcttgttgggctactaagagaaggtacagtagcatattattagccagctataaacatattttaatgagataaaagataagagagaatagcggcgggctacagatctatagccagctacagcacgaactccaagaagtaatgtgtgcatgacaggtgtgatcatatattaatattatagtaagcaactattgtataaactggctattatatcggctatagatgaattggagctagtagtgggctaatgattaa

SEQ ID NO: 20422 - DNA, 267 bp, Oryza sativa
  unsure (1)..(267): unsure at all n locations
gcagctttggttggcacaaaggaagtcattctggacgagttgcccaccgaagccgcagacggattgtaagcgctatcacatacacagcccaccccaccgagctggagttacaaaaaaacaaccggcgaaaacttacagccaggggttcacatgcaagcgcatggagagaaacccactaccacaggtacgactggcgggggcaactcgtaaggcaggccgaccgggaatnttcagcagccaggcgaataccccgcagcatctcaccgc

SEQ ID NO: 20423 - DNA, 393 bp, Oryza sativa
  unsure (1)..(393): unsure at all n locations
agctagatcttcaagcacagaaagaaagaaatatactgattcttgagctacaacaaatacgcccaaagaagcttatttttctcggcatagagcatcatatccatgcataaccagtcatttacattaaacaaaatactagttggttcaaatattgttttaacttttaagcgatgactaagatatatcatagtacacgtgataagcctacagcgcagttaagttagggaacaaagcactgaatgttatgcatgcttatatcgaaaggagaaatgggcaaactccttgtttganaatgcccaacattctatttagattagaaaactaaacgaaattcacaacattgcgtaacaacctctatcagtcaagttaaaggtcaagaacattaagctcata

SEQ ID NO: 20424 - DNA, 471 bp, Oryza sativa
  unsure (1)..(471): unsure at all n locations
ttaattgaacgctactatcgcanagataggacctgcgtatagtggcttctgatatctgagacctagtgcccttcctaatgaccgggagcacctgcctgaaatcccctccaaacacaatcgtcttgcctccaaacggagaacgtggacgacccattatatctctcatgctcatatagagggcctcaaccgcttgcctctttgtcatggaggcctcatcccatattataagcgacgccatctggagaagctttgccgtcccactttgcttggtgaagctgcaatacgaccctatctcaatgttgagtgggatcttgaaccgcgaatgtgcggtccggcctgctggcattatagaagctgcaacacccgacgtcggggatgccacctctatatcaccattgacacgcactgtatctatgagcgccctatataagacagtcttccccgtgcctgctgtgccatctacgaagaaca

SEQ ID NO: 20425 - DNA, 402 bp, Oryza sativa
  unsure (1)..(402): unsure at all n locations
tgcaagcttntntataggtgatgtgctatgtgaactttctaatatgttgtcaactctacgttggacgcatcatattatgccaagcagtcggtatatcacttggatcatattattcggagattcacaccgcatatgctatatattgatatcaacgcacttggttgattacaattatcaaaaccactcggttggctagattatttattccttgactatatgtttggatggttcaattaaccacatagtcgggggctacacctattaggtgcatctattcgatgcacctgactttatttttcagccctccacaatcttcagatttggttaaagtactctggagaccatggcgaagatgatcgaagcactcggctttggagtaatctagttcgagagaagatatat

SEQ ID NO: 20426 - DNA, 412 bp, Oryza sativa
  unsure (1)..(412): unsure at all n locations
tctgctactnttcctccacagaatggaagtgctgcagttcctatcttcgagcaagaaattcctgcaccagccactgtcaatggccacgaatcatcaacgtgagtatatcgatgtttgtcttgtggaggatcgcgaacatcatgccggcattatatccatgtagtttaactgtctgtactataacttgatgagaacctgttaggtacctaggccatttctttaccatcatttacggtttgaatgttgttctgcatatgnttgaagccatgaaaaatcatgcttccggtcattatggccgtagcaattttatttcttgttagactcttgggtggaagtgagaacagagaacgtgatgaagtgaatcatttacttgtgtcttgtagtaattatatctatcttagaattgatttat

SEQ ID NO: 20427 - DNA, 481 bp, Oryza sativa
  unsure (1)..(481): unsure at all n locations
agcttatactatataaattataaattaacttcatttttgtcatgtacaaaagttagagattttattgaagagtcattcaatctgtaagctgtgggtcaagtatagacatgccctataaatatcgacatatttagaatacggtaattaccatattataagaaacggtaatttccgcaagaatacggtaaatacggaaacgatcggtataacagcaaaaccatttccgtgttcatttccatatnttgtacaatttccatttgtttcggtcgattaccatttccatatggcttggccggtagaaagtcgaaaaggaacaccggtcggtcggtaattaccgttatcgttttcacccctatcggtagcccgtccacttacttgacaccctcanacgtcgtggtgcagacagagacgaccgacaacgtcatcacaaaccggatcgcaacgatgggaacgatgaaggagtcgccgctttcacaagcat

SEQ ID NO: 20428 - DNA, 472 bp, Oryza sativa
ctcagcttatccctaattgcatcaccgggagagaaattcaccctccttcggtgccggagtcaccatggaggatcactggaaatcgcccatcagagcacctccgtgaaaaccggatcgactagcttactcgtagcctcaactgctggtttatatgatactcctatctgatagatcatctgaggcgtttcaattgggggagtgcagatgagtattggcatcctcgttaggcttgccacagaacgggctagcatgcgccatcgtgatgagcctagacttcaagtcgaaatccacgtcccctatgttgacctacggcccaatggccacattgtcagcagagggagcagcgaactcacggagagtcttgtagccatagtcttgaaagttggtggcgctggtaccgctggtttctctgtcggtagagtattctgcggagcagcgacttgcggcctgacgctccggaagaaagcttctg

SEQ ID NO: 20429 - DNA, 358 bp, Oryza sativa
  unsure (1)..(358): unsure at all n locations
agctctgaaataaanaaaatattntaaaatatttttattaatgaaattaaaaaaataaaaaattctcaaaattcatggcacaaggcgttacttgttacaactacaaaataactccacccctttccatccaaatgcaacggttaatttgagggttaattgctgatgatacactgtacatgcttgtgcagatcatgtgttcaatcgaataaggaaggtggtcggagaagaaagaaagaagcagctgttcatggctacctgccgtggagtatattggatagcggcgtatcgctacctcctcttcaaataagccacaaataatcaaggagatagttaagccaataatagcgtggattaatta

SEQ ID NO: 20430 - DNA, 441 bp, Oryza sativa
  unsure (1)..(441): unsure at all n locations
ctcagcttgcctttcaagttgcttcctgctctgctcgtgtgtttttttttgcagttttggtcctcttggagatggaaaaggatcaaaggaaaggagtggtagttttccataagagtccctctaattactactccctccgccaaaaaaaacaaattaggattagatgtgatctattctaatacaataaatctagacatatatactccttccgtcccaaaaaaaaaaaagccaatctaagagatgtcacaacaacgaatctagacaaacaacgaatctagacaaagagatgtgtagattcgttgtactaggagaaatcatatcccctcctaggttggtttttntgggacggagggagtatgtccagatttactgtattagaatgtattacatcatcaagtattatgttgggtttttatgggacggacgagtagaataattcta

SEQ ID NO: 20431 - DNA, 343 bp, Oryza sativa
acatttcgccccaattgcttgttaaggaccttgtacatcagcctggcaaaggttgctccggcattcctcagaccgaaaggcatcctgaggtgacaaaaggtgccgaacggtgtgaagaaagctgtcttggggatgtcggccgggttcatgcgaatccgatgatacccggaatatgcatctaagaagctcatgagttcgcagccggctgtcgaatccacgagctggttaattcgtggcaaggggaaatcatccttcggacatgctttggttaagtatgtgaaattgacaaaaatgcgccatttgccatttgactttcgcaccaacactagatttgccagccatt

SEQ ID NO: 20432 - DNA, 484 bp, Oryza sativa
  unsure (1)..(484): unsure at all n locations
tgcgactccctccactaccctcngtgcctctgctcccctcccgtccacaggctcctcttcacctatgggtggcgcatctggcggtgcgcccacgactatccaaggtggtggcaacacttctggcaacaacggctcgatcaccaccaccaccaccaccaccaccaccaccacttctgacggcaattatccgaacaatcatcgacacaagaaaagcaatggcggcgacaacaacaacacaagcagcaccaactctcctagcactggcgcgttggctgctcctggctggccgtcgactttctagcatccttgggccagctaagtccaaggtgtgacctatgcactcgttcttccccggcacatcacagcctcgtctgcacgctcttgttgtcgatcaccctagcgccatgggctnttcagccggcctacctacttatggatngcctccttctcagcagtggacactggcactgccagaccatgcctc

SEQ ID NO: 20433 - DNA, 348 bp, Oryza sativa
  unsure (1)..(348): unsure at all n locations
ctgcagcttgaacttggatgaatgcaaatctgtttatataaggcttgngttttcatactatagacgtgctctccttgagaaatgggaacatctaaaacaaagtgaccaaactgttagggagtactctcatgaatttaaaaattgtatcacttatagtgggttacaagaatctaatgagaacacaatgactatatttttcagagggcttaatttcaatattcaggctgggcttgttaatgtgacatataatcatatacgccaattggtcatgcttgcttgcattgttgaacgcaaaattttggagaatccaacggagcaacaagatatgcttgtgcctcctatcactga

SEQ ID NO: 20434 - DNA, 396 bp, Oryza sativa
  unsure (1)..(396): unsure at all n locations
tgtcaagtctactntaaatggacctagcctcatgtccatatgagttctggagggccataatcttcgttntactatcgagtccttttctgtccacagtgccacgtgacctctttgggccgaataggccgtgtatcaagttgggtccattagggatgtgtcctaaggttggagaacaaccccagcactggcctgtggacatcctcctcctcttcttatagctttctccgccgccaagaataatcgggttttgtttagatcaaagtatagcatcgttgctttgctgagttcatcctgtgatcggttagatcgccagattgcttgttactgaaccccacttgttacttctgttgattcaatccaatatctttgattcggaaattaagttgcttgatcatc

SEQ ID NO: 20435 - DNA, 367 bp, Oryza sativa
  unsure (1)..(367): unsure at all n locations
agcttgngattacgtcacctgctgccacacatcgactagcatcttcctccccggcgacacgccggtgctgtcgacgacccaccgtcacagcgacgacccggtcttcgtgctacccatcatggtgatctcaagcgcttcgttcgccaggtcgaacagcatcctgtgatcagctgcatcttcttcagtggtagagggctcctctacctcgtcgaagacgtantcgcagatcggtcttcttgccattgagtccacccgggcattgttcatcatcgatggagacgagtacgacgacccgtcttcgtatagtcccacggcaatgaggacttgctctatgtacgccatctcagtatagctctcctcggtttca

SEQ ID NO: 20436 - DNA, 494 bp, Oryza sativa
  unsure (1)..(494): unsure at all n locations
tggttacattgtagttcaaggcacaagtagaggacctttcacatgctggaggatcccagcgtacaccatcatatggagctccaaatttagaggcatcaaaagttgcataacgaatccatgcgggaatacgatcaacccatgctccacccccatgcctaaagcgaaatttaaccttggaattgtgagggatggcaggcttcccattgacatgtgaaatcttgattgaccaaatgccaaatttatccttctccatcttgtggtttgcaccattccagttattgaactcaccaatgagctgtgcttctctatatgcatgaagaanaacctccaagttaaatgcattgaatatttccccgcananaaatgcattatatattgcaaatactggtaaggtcttaacaaaaacgacaattaagaaatcacagcctcacaagttcagaaccaactacaatcggacacagantaacataatttctctcttcatggcattatgg

SEQ ID NO: 20437 - DNA, 481 bp, Oryza sativa
agcttagactggaggaacaatccattacggttacatatattgttcgagcgtccaaagcgtgggtgcagagatcgctggcaggtggctacatcctttgctgaacaaacatttctaaagagatattttgtctgccccaatgtatacaacgatttcgttgtatgtctaaccatttacaaaatccgctatgatttgcacaaaattactacccacactgaataacattactatttttacagggcaatccaaggatgggtggatttactcgatggatcgacaatgtcactccatcatatcatggccagaagataacagagtcagaaacacaattagagtatcaacgattgaaggaccacgagaatgctatgcattctgaccgacctataaagagccgataaggtaccgcatgcttgattcctcgggatcgacatatttgtaccgtgtatcgatagcacttcttatctatcttatcactacaacagtt

SEQ ID NO: 20438 - DNA, 428 bp, Oryza sativa
  unsure (1)..(428): unsure at all n locations
tgtcaagaatgcattcggcaagatattgaatacgttttggaattgttatatacactntagttgntgggtaccctctttctcaatatggtgggtatttgtaaatgaagatatcatcagtcatgtgcatttcttctatacatgatctggtagagatacactgtatccattcttgtataatcaaataaaaaataatttccgagttcgagccttcgatgtacactcatgtctgcccatcgcagaaagaaaaatagaggaaaaacagagactcatatctgtccaaaatcctgttttgggtctgatcagttcggtgatcaccagctttctttgccttgatgggcctccagcctgtaatggcgtatcaggacgaccttgtttttggatagtttcatgcagaccttacgtttttttctcaataacgaaatagaaca

SEQ ID NO: 20439 - DNA, 302 bp, Oryza sativa
ccatggatataatagaacaaaggaatcctaactcaaactccatatgacgaagtggtgcgtactaaagctatcagcgaggtatatgactgaacttgcgcttagagcaacaacaatgtataataccgaagcggatatcagagggggaccatttggcaaaaggtagtaattaaatcagacaccacaacgcatatggatagataagaggcattaagacggggcccacaaataaaacaccggtccaaattctaacacaaatgtctaacatcacaaatgcctaacagttggctgacaactctgaacaa

SEQ ID NO: 20440 - DNA, 433 bp, Oryza sativa
  unsure (1)..(433): unsure at all n locations
ttgcgtcgagtttacctcgtcgcaccgagctaagcactgtcgttcctgctctgctctgggtctcaccgccgagaagttgttccggccgcaatccgtcgtctcagtctatctcggtgagttctttcattntaaccatctacgtactccctagattccatattcgcaatcggccagcattaccatgccaccttctgggctgccgacatgagctcgtccgtcgccaatggaggtgctcgtcggcaagttcttccacaccttgccgaaagtcggcaagctacctaaatccttctaagtaccccgtagatgctctaggaacccttcccgtgctatgcctaactctcaccaccccgatcaccttcacggcctatccatgtcaccggcggcctagccggtagcccacccacacatcataataaccccttcgcgcgcactc

SEQ ID NO: 20441 - DNA, 308 bp, Oryza sativa
  unsure (1)..(308): unsure at all n locations
agctngctagctcacattcagctctatcctgtaacatatcgtttcattcatctagtgagcgagaactcatatcatctaaggggcaccattgcttcttgaccttgctagccgggcttgacatcaatgccctattctcgctgggagctgtaaggtggatccacgacgaatctccacagaccgggaacgggacggatccgactaggagaagagtgaacactgactgggacgtatctcccaggtcaagctgatcatagaagtcgtcatcagaaagaacgcctcttgaacccacattatctaaaccttttaac

SEQ ID NO: 20442 - DNA, 456 bp, Oryza sativa
  unsure (1)..(456): unsure at all n locations
ntgatgtgtgttcactcgtcaacgaaaataatgccgagcgtgatggttatacttgaataccgtagaggctgagcagttactcgggcgaatgtgtctgctcacaaacattgaacacatacgctcgaacgctagtactaagataaaccaaatttttacgtccatcaggacatggaaatgctatttttattatttnttcaaacggacggtgtgctctggacgggcgctgcaagagcctcactatgtccgagagcagtctggacttaatcatcgcgaggaacgtcgaactgagctctctaaaagatgcgtgcgggtgatctacactcaattatattcgaattaaaagctgtgggaagtccagcattcagaattacagattctgtaccggtggaatagcgagacatcatgctgtcatataccgactactcgtggacttgggagaatgataacagcggaaag

SEQ ID NO: 20443 - DNA, 278 bp, Oryza sativa
  unsure (1)..(278): unsure at all n locations
gagctngcttatagcatatttagtactgttaagttcacaggtatataacgggtggattagatgctttatccttaattatccttagatgcttctattatctaagaaagtacaaattatgctcgtatgctagcgatgtccattgatttcctaaagagaattttctttttaccttaaccttttactgttatgtaggtgagtgcgttatatttgctacaaactttattccacacacctaacagagtttaagacatgtttaatatttcagagcccacatgatg

SEQ ID NO: 20444 - DNA, 494 bp, Oryza sativa
  unsure (1)..(494): unsure at all n locations
ctaagctacatattcttccgattcattattntcattcattacatccaccatatgtggaacgttgtaaatttgtagggtgctaccacaactnttaggatgctacaaaaggtttcaaaattccatacgggttttcccataaatcttgacctactcctccagagctgtttattgctattgttattttatgcatagggttttagttcttcctcgccaaggatttggattaatacgaatgtatattagcatgtgtaaaactattaatattgtttaccatccaaactataagctgtttggaggattnttaattggtactcgtagcctcgtaggtcctagctgtgttagtgttgacagaaaacatgaggcctgngagatctgtttaacttcagtgcaggtccaaagctcgccttctggtgtgctagtgtgccagttgatttgatcctgtaatcaacaagaagtagaagcaaagaaatcgcgcgtaaatctataaatgatag

SEQ ID NO: 20445 - DNA, 381 bp, Oryza sativa
agcttactaaagacctatgagtatgacttatacgctctatccgaagggtagtctacagacggtctagtaccagataagactttgagtgaaacttgcttgcacaagacttgcaattcaaggcgtagtccattgttcaagttgtgagtaagtgtagcttggagttctaggtggatgttcaaccttaattggtctccatcgaaccgctggtatataaacagtatattggaaaaggcaaatctcagtgggattctgagatctggtgggggattgttggaactaatgaatgggccttagcccactcgaagaataattctttggaaaatcacaaaagcccacctcatggggtggcatgcatgtggagtttagtaccaccttgcttat

SEQ ID NO: 20446 - DNA, 457 bp, Oryza sativa
  unsure (1)..(457): unsure at all n locations
tagcatgcatgcaggttatgcagagatataacacaggtatcttgagatcgcatatactcctcctctttgtgcatgcagaaataatacagaantttgcagatgcgtgtaagagaacatcttgcatgcatgcagttggcagttacgtttgaccgttttgagcttgcaatgcaacagaatcttagtacaacaccggtgatcaatcctagctagtgcccacgtacgaataatattacgtatttttttagataatgaaatgaaaaacatcccagtcttaagagataaagccatttattatagtctaccactctcgaggagtgaagttcaaaataaagcaatcacaccaaataaaagaaggaaagccaaacaaaacaaggagaacattatttcagtctattagtgaatctccattcatagctggcaaatatttgcataaccatcgtctcaagcgtacgacatg

SEQ ID NO: 20447 - DNA, 451 bp, Oryza sativa
  unsure (1)..(451): unsure at all n locations
agcttcttgcaccatgctgttcaatttggcaaaggctcaactagtgctggtcactcatgcaggagcacaagccatcatgaacacacattcccaacatttgagtatagcttggttcaaggtaagttcaaattgtgattctgtagataataacttgtgtgaatcatttaacaagtggatcctagaggcaagattcttcccaattataaccatgcttgagacaattagaagaaaagtaatggttaggatcaaggaccaaatatcaaactccaatagatggaacacagttatttgccctggtatattaaagaagttgaatgtttacattgccgagtttgcatttttcatgcaatatcaaatggngctgaggcatatgaggtgaaacatcatgagcatatacttacagtgcagctagacaaaaaggaatgctcatgcaagtattggcagctatctg

SEQ ID NO: 20448 - DNA, 327 bp, Oryza sativa
  unsure (1)..(327): unsure at all n locations
tgcatattgtctttgacaatgtctttntctgcttgacaacccttcatcatggcaacatgttgtttgatccttcacgtcaacattgctctccccttgatttctttggccccacacctgtgagacttcactttcccaacatatgaaaggagcatcctatatatcgagttacaaatccacatatggccaaatgctcttggatgattttagtccgtagtatttgtttgaaacataactgatgctagaggattgtctcanagctagctcacacatatntctcttggttttatggtcgagtgaatctttttcattttgagctatgggctttat

SEQ ID NO: 20449 - DNA, 408 bp, Oryza sativa
agcttgttgcgacaccatatccatttagtttttcattttcattaatcttcttactaacaaaatcttaccatgctatagatttcagcctcttattctcatattcctgctctaattatgcaccttgtgaatccataggttggtcttgttgttcgatacttggagcatctggtggagtataacacggagtacaagttggtgtcaatgcagtcaaagactcctcggtggcagcagggttcggcattttgtcaaaaaaatgatgttcaaaacatggatcaatcaaacataaatatctctaagtactacctcaatatcccatgctacaaagtttatgttctgctcggaatctaatatgtaccgaacaatgtaaaactacctcaagtgcagtaccagatcatgttctatggcatg

SEQ ID NO: 20450 - DNA, 456 bp, Oryza sativa
  unsure (1)..(456): unsure at all n locations
tggaagagaggctagggtggtatgcanatcttttattttgaatatcatttgaaatcactaagtgatttatttctttctaagtttgggccgaaaagagacttgcgtctcgattcgactttaagagatgtttttcaacagctcatttggtaatgtactgacctcccgggtcagatcattacttctcggctcccagagccattccacttgattaatcggctcccagagcctttntcattatctcggactcccagagtccagctgcccagcagcacagcaatccgcttccactcgggaagcctagtctatgatgcccgtagacatcccgaatcacacagattcgtttcttgaccactcaggtcatccatctgccacataggctgattctggtaacgattctcacaccacaacaacttttcacaaagcacaggcaaacaaatctacgctacaggaaacacc

SEQ ID NO: 20451 - DNA, 396 bp, Oryza sativa
  unsure (1)..(396): unsure at all n locations
agctngccaactagtatttttataatttcaaatatgttatatgaatttagatgaagtcaaactttaaatcaaaatgttagagctcgagacgatctacaaactttgtgggtaacaactttttcatttaagatctttaggagtcaaatgacctctgatgaagacaagctttatacaaaagttgtatatctaaatgagatctacaattgtgttgtttatcattttctttttcatttaaaattatttaaagtgtcaaataagcattactattttttttaaaattaacaccggctagaaggatcttaatgcaaaaaaaaacatttaagacccttctcgccctctataagggtggagatctgttaattttcaaaacaaagaattatatattgttagtatttt

SEQ ID NO: 20452 - DNA, 466 bp, Oryza sativa
  unsure (1)..(466): unsure at all n locations
tccncgttcgacgttcgccttcgagccggcccncgtggatcgttaccatcttaggtctctcgacttcgcctgtctcctcggccacgagagcaggatgctcactgcagacaacaggggaaacaccgtcgtcttcgacgccgactcctcctccgtcctcgccttccccaacctcatttctcccaagaggtataacgccatatccctctccattatcaacaacgatggcagcaacaacaacaacgggttggaaccaccgccggaggacggcctctacgtgatgacccggagtcccgacgtccacagaatcaaggatgggtgctttgaggtgctcaactactcttcttcctctgccgatttccgtgagatgacccctcattgggtttctctgccaccaccgcccttcgccggctgcatgaacgccgaaattacctcctacacggtggttcacggcaccaccatctacatt

SEQ ID NO: 20453 - DNA, 348 bp, Oryza sativa
  unsure (1)..(348): unsure at all n locations
nagcttgaatcagacaaatggaggagagacacctcttttaattgaanaacagcanagccgtaaccgcccgtcatctcggagaccctcttattcgaaatcaaatgcatcattttatggtcggttgcatttacaaaagcatgcatacccaagtgttccaccagagcaagcaatgtaccatatgtggcatcatgtgcaagcaacacatgaaaagccgcattttccaatggtacccactatgggcagtacaggctttccaccgcctccaactgtgctccacatgtaccctccanctagagggcaattcaccatgccatccagccaagaatggttaagtcttattccatgtta

SEQ ID NO: 20454 - DNA, 487 bp, Oryza sativa
  unsure (1)..(487): unsure at all n locations
tgagtngttagtagcaactctcattgacctggacgccatggatgggaanaagagtgtttccttacttgctgaatgttcaagctctccagatgttaataccaggtatatcacagcattattgagtacagttacctgcaatgtatgttgcttctgcgttgttagcaagatcgaatccatcttcaagtacagaaaatgagaatatacagaaaatgagagaatgttaatataaagaatgcagatttgatatgtcctgtctctatacatcatggctatgtgccaaaatagctaattagcgacaaaaaataatttatggataaaactattatgtatatgtccttagtgacttacaagccaattcanaaaaggaactatgttgaaaataccgtagaattaactcacaaattaagtcttanagtaaatttggcggtggctgattcgttgtacggcaaacgatgaaggctctatgtatatatctgaattacatcgc

SEQ ID NO: 20455 - DNA, 451 bp, Oryza sativa
  unsure (1)..(451): unsure at all n locations
agcttctgtgctgagatggatgcgtttcttattgcttcttggtcaccttaattactacgtcaattgtgatgtaaaatttacaaatacaatacctaattctccaaatagttttacatgtgccacggattctcatatagatgttgctagccctattttcaatggatacactgtatcggctaatgatagttcaaataattatttgagatctctaaattatgaatgtaacatgcatagtacagtctatgcaaagttaattcacatgctttaaattntaacaatgctatcaatatacaatatgcacacaccttttaattgatcggcaattatttcacaacctattgttacacaacaaatcttgccgatgaaagatatgtatggccatggcaatattaattatacagtcgattctattaattcattgcatgtcatgccaagtatcggtcactcacat

SEQ ID NO: 20456 - DNA, 179 bp, Oryza sativa
  unsure (1)..(179): unsure at all n locations
tgcttcggcagctggaggaggaagaagacatatatatangggtgggactttagtcccggntggtagcaccaaccggngctaaagatcaccgggatctttagccccggttggtgctaccaaccgggactatagacccacccctatatatatgtcttcttcctcctccagctgcccgagct

SEQ ID NO: 20457 - DNA, 469 bp, Oryza sativa
  unsure (1)..(469): unsure at all n locations
tgcaagcttanctntactttttctgtatgatagaagagatatatagaanataaatttagttctccttgatgttggtgaaagaacttatacgataattaaatatgaacgacggagggatggatggagtatattattgattatatgattatgtgataacactttaagagtaggaacgaataaattacttattaaaatttatcgaaggttgctttaaaatactatataaaaacttatgtatagaattgtttgcaccgttcaagtagctttcgaagcatgtcaatggtaatctgtattatgtaagaagaanagaatggttaagtatttaataattttggatggagattactaataaattactgtcttaataaattgtatatctttgtattgttgtggatcttaaatgtgtaaaatcatcttttctttgtcttcatggtgttgaaattgggtttgagccaagaactttgaaaat

SEQ ID NO: 20458 - DNA, 429 bp, Oryza sativa
  unsure (1)..(429): unsure at all n locations
ttttcatctagcttcaattaaatatccggtgtctttactagatgagaatatttgttagagcttagacaaggggaaaaaaccaacgtcgtcgctatcaattttaagttacttaaacaaccaaacttggtgctatttgtcatattcctaacgctctatctctctctctttctatttggcctccttatggaatagctgaaggagatggcaggaaaccacgttgagaaaggagatgaanatggattctgcaacgggaaacaagataattagagaccaactgcaattgtggcaggttggctcatgcagcatctgaagatttctacacagccctcacacaggaaaataatctgtgtcatgcagcatataaccaaactttgaatggagattccctgtgcaataacacggntntatcatgccctcgctatggactat

SEQ ID NO: 20459 - DNA, 421 bp, Oryza sativa
  unsure (1)..(421): unsure at all n locations
ctggaacaagtgaacttntgcattcaatcaatcttcttatatggtagattccggactatcactctgcatttcctgatctttgagccctgtatagcaagcaagttaaaaacaactgcaggtaactggggaaatagctgaagagaaacatatgatagtggttccagagtacagataaacaccatgcaactcttgtgaagaagggggacacacaacaactgaaaattaggatcttaagcgatctcattctatctcctacccacctattctcacagctgcaattgtagccatgcaagatagtagtagtagattataagtggagacaaagcgggagcatatctattgtgtcattcacggaataatattaggatctttctaactgaaagaagaaaagcttgattaactcactgactaatcaatctct

SEQ ID NO: 20460 - DNA, 487 bp, Oryza sativa
  unsure (1)..(487): unsure at all n locations
taagcctattctcgtganaacagaaggaatgacctagcaacctatataactaagctagcagcgcctgcgaccaaggtcgggcatactttcagaggacagattcctgcgccattgccgcaaccactttgggccacgttcgattgcattgatagaacacctgattgttcatctccttctaaatgtacaaagccccaagggtcacaatcgtgtcgaagccaccgcgctgttccttttggactttgaagtggctagagcattattttgatggcatattatctgtccaacccagttcaaatgaagtcttgtcacagcaatctaccaggaaatagtttctttctaaaaaaaatcagccaagaaatgagaatactcagaagtgtagccttgattcttgttcaacggaaactgcgtgttcataacccataattcaagtgattcttcttgtatgttcaagggtcctcgccatctatacagaacctgttacggacac

SEQ ID NO: 20461 - DNA, 426 bp, Oryza sativa
  unsure (1)..(426): unsure at all n locations
tctaatcgactgcagcatcaagcttgcccagaccaagacctccactgagagtttggtctttgttcttggagaagccggcgaggacgcggagcttgaggtcagaaatgttcaagcaccataggaagcgggaggcggcggaagcagcgtctgagcggtcacaggcaggcgagagcacgtcagtgcgggaggcggaggatcaagaggaggaggaggaggangaagacgaggtttcatcngcggagcacggcttggtgcagctggggatgtactcccggagcatgtcggcgacagcgcggtatcagcggagcgcgaggagagagcgcgcccggagctcgagagcggccttcatgcgcggcgacatctctagcaccgcgttcactaatccaagcgccgtcgtagccgctgagtgctcgccacctttcccat

SEQ ID NO: 20462 - DNA, 487 bp, Oryza sativa
  unsure (1)..(487): unsure at all n locations
tctccccccaaaccccttccgctcctcctcctccttccatatatatcacggcgacgccgccgccgcagagcccctagctcccggaggtccctcgcccccgccagctccgacggcctcacggaaggaggagtaacgtgggcgttgattggatttttttggtntccccccaccttgagtgagtctgtgccgtttccccggcggcgagggagggcaaagggctgatcatggtcgtgcgccgccggtgtcttgccgagatttcccccaaccgccaccgacgatcggtcactgtatgcatgctctcgctccccttnctttttgagttgngttcgattatcaagtagtatgtatcacgccgggtattagtattaccaccaaattctcttatgctagtgtgcgcccgctattgctctagtatttacaagctgttatttntacttcttagtactacttgttttggtcaagatcacaacgtctactgtacctgttg

SEQ ID NO: 20463 - DNA, 410 bp, Oryza sativa
  unsure (1)..(410): unsure at all n locations
cgcttnttaaacatgataacatctggacagcgtctcttctgctttttatggcattctgtcaagatcaaatatttcatctctagttaaattactagatgcaagtacttttgagaatgcacaattcagatggcccttcttttccgcaacccacaagtgtgatttagattggtataaatctgagtacttcaagtgctgaaaatctgatctcacttcttcaatcatagcacggcatggagagtttgcccaatgaacgggaggcaatgatgatagcgttgggcatcttacaatctcaagctcctttagtgtaaggaatagagtgctgtccatctttgaatatggcaactctataagttctgggcaatctcttactatgaacactnctaactgagagaacacactggaagcatcat

SEQ ID NO: 20464 - DNA, 489 bp, Oryza sativa
  unsure (1)..(489): unsure at all n locations
tccaggagaaaaggaaggaggagttgaggaaggaaccaaatattttatgagcaccactgttntggaccgctcttctactcgatccatccgtggctgcttcgattacactgaatttccaagctctccccagtgtcaactgatcgttttctcctccaaaaaccatcgagatacacaaaagtagtccctcacgttaataattcgtagccctaaaatttaaatttttaaacttgattttaaaggtgattttaagatacttcaacataatttattgtcaacattggctttaaatcactacgaacaaatgtataaaaaaaattgtctataaattgtttttattccctaacaagccgtattgaacaaaagctcacgttttgaacaaaagctaacatcataatttattatgttaactataattagaatctaagatattaaccatacatattgtagtattagaaaagtactctaataaaataatatatttcgatgata

SEQ ID NO: 20465 - DNA, 365 bp, Oryza sativa
  unsure (1)..(365): unsure at all n locations
tgcgaaaagttttacaatgggaaaagctgacaaaacgcctcttgttcctaagcatggtgataatcaacttttcgttcagatttatgtggatgatatcatctttggctagttgactcatgctttggttgtaaatcttgctgagactatgctcacggaattatagatgagcatgacgcgtgagttatcgtactttctgggattgcaaataaacaaacacctcaaggtactttcgtgcatcatacaaagtataccaaagatctnttgagacggttcaagatggagaactgcaaaccatattcaacaccaataggttctacacctgtgctggatcctgatgaagacggtgaaactattgatcaaaagga

SEQ ID NO: 20466 - DNA, 405 bp, Oryza sativa
  unsure (1)..(405): unsure at all n locations
ggctgagcaggttctcgatgtctcctaggcttatactccctccgtttcataatgttttgacaccgctgactttntagcatatgtntgactgttcatcttatttaaattntttttatgaaatatgtaaaactatatgtgtacatgaaagtatatttaacaatgaatcaaatgatatgaaaagaataaataattacttaaatttttttgaataagacgaatggtcaaacacgtacttaaaaagtcaacggtgtcaaatattttgaaacggagggagtaatagatagagtaggctgtgttgaccatgtctaagctagtcctagctcttgccatacttcttcctactaatatctttccattcaattggaaagattaatctcattaacttattaacacacagattctcct

SEQ ID NO: 20467 - DNA, 368 bp, Oryza sativa
agcttctcgggttcttggtctctgcccgaggcatctatgttatttccgagaagatacgagctatagagcggatgcgcccccccagcaagcttaaggatgtgcaatgcgtcaccggttgcatggccgccctaagtcgcgtcatatcgaggctgggagagaaagcgttacccttgtttaaactcctcaaatgctccgggccgtttacttggacggaggaggctgaacgtgccctcactcaggtgaaggcgtatctcagctctcccccagtactggtcgccccggagccaaatgaacccttgctactttacttagcggcgacctcccaagtggttaatgcggcgttggtcgtggagcgcgataagacaatc

SEQ ID NO: 20468 - DNA, 421 bp, Oryza sativa
tcttcgctgcacctcgttgcccgcgtgccctcttctgtccaatggttggttgactaccactagcctcctcctgctggttgccctccatatccctttccacgagcccctgctggatcccctccgcatccctctccacgatgcctctctcgctcaaggactgtgtcggagcctacatctcctcttcttcattccagtactggctgcttccctccgcgattgtatcgtacaatatctggtcctcatcgcggcagccatctgttgatacaagacacatctgctaagtcacgagacatttatgttttaacaatctaagtcatgtatgctaagtgtaaatgtcgtacattagaaccctacacaagcttacgtgctaagtctaatacaaatcgtgatataagctaaattaggtgacgtatgtatacaa

SEQ ID NO: 20469 - DNA, 420 bp, Oryza sativa
agctagagctatcccatactagcacaagtggtctgtattgtatacgacatgaaccgacattgagagaaggccttaggccggttaggacgcactctccctctatcggaacataactaatcaccacatgtgcaccacttgaggcccaaacctaaaatccatgtcttccatcattttatgtgtcaaataccttgatttattcatctctggccagaaacttaataaaatcatgtctcatgttaatatgagcccaagcgataagcaaaaccattctaagcttggctaagcaatatagtaaactagcgtaactcatattccaagcgagaacaggatatgactcctaaagtcacgaatgaaggatatggatacatgccggattaaagtcgaaatgccaatcataggaggttgtctaacacagctaac

SEQ ID NO: 20470 - DNA, 443 bp, Oryza sativa
  unsure (1)..(443): unsure at all n locations
nggccagngtnntttttcttggcaagatgtctgtgactctgtgtgctacgccgacggctatgatgattggtcatctaggtcattgttgacccccactagtagaggataactctttccatggagctattgatgggatgaaaacagatatagcaaagatagttgatgttgattatatctagaccgtagataaaagacaatggttgatattggctcaaatccacattgtgaagttaccaactctaggagatccgcacctatagtattactctcggctgatggaaacacgtggtctgtggccccgattgcatcaattatgagtggattgtctatctagccatttgatgttggttaaaaaaattactttatgaaatatgaatggttagaaattctttataattctgcgaaactcttataaactaagggtgcacccatactattaacct

SEQ ID NO: 20471 - DNA, 477 bp, Oryza sativa
  unsure (1)..(477): unsure at all n locations
agctttngtggacgaaagttgcggaggtcaacaaaattgtatcanaatctcatgagcacactgacacacattggttgaccaaattaaccgctataattaagttgctcgagcttggtcaggcaaattaaagcgctctagctactttgtgattatttccggccttatcatttntactgggaagcagtcaatcagtacacctttctccaggcaactgtgttcagacttgaaagtttgcattgctagaaagagatcgaccgattctatatctgtattgtcacgttttttccatctctaaactccttattagttaagagatcagcatcgatcaaatcgatcctacaccgcgtctcgacgaaagaaacattacctgcttcgttatggaatcgatcgaagcgtcgccgtcgtcgatcggtcagagcccatgtgctactagcgaagaacacatcgagacananacacacctctgctactcgtcat

SEQ ID NO: 20472 - DNA, 461 bp, Oryza sativa
  unsure (1)..(461): unsure at all n locations
acctataaaactaagctattttagatttaactctttcttcaacttccactttttgttcatcgcaatttcctacacacacaaacttgtcaattttccgtcacatctgttataatatatttcaaactnttaattttggcgtggaactgaaaaggtataccatggagaggagcgtggcctggctgccctgggcgctgcaagtcaaacatgaaatcgatcgaaggaggacgaattgaagactatcgaacttcatctaagacgatgatgcaagcacaggtagctagctagctactccctctgttcaaaataaatgcaaactataggtctccgcgtacaactttgactgtgcgtcttatatggaatttctttataattcctactctcattattggtagatgataaaacatgattaatattttatgcgtgactttgctcttacaattcttttataaatgttttaaata

SEQ ID NO: 20473 - DNA, 357 bp, Oryza sativa
attggcacgggacaacattgcaaaagaaatatctgggcacaaaatgcacattggcgacgcacacatttgaagctacactactgattataaaacagaagtgatggaaaggtaacaatggtcgcaccttcttaagaagaagcaggtagtctacaaagaggtctcttccaaatcacaggcactatcttggctccagaagggtaatagaaaccaagagcctgaccagattgcctcccaaacgaaccgtccaagcttggccctcgcaaggacagcattgacattagtaaatacatatcagcatctcggctgggtaagaagaaaaagatggagaataccacacagatgaaatgaacagatcaa

SEQ ID NO: 20474 - DNA, 471 bp, Oryza sativa
  unsure (1)..(471): unsure at all n locations
actcagcttgaagtagtctggctcgatgagctcagctctttttttgtggagcttgagcctgggacctaagcttgctcgagctcagcttgctgacagctgtactctatgccagtaatgcatgtttggtttatgcccaactttgtgatgatgggttgagacagctatggcttatagtctggaagccacaactgtggcagtggactaaactccttataatgtgtggtgtgactaagattgcatggaaagttaggcatcaaagttaacacttacaatccttctcttctatcaagattagtccaactcatatcatccccaaatattntgtttttgagggcagtcactgacttactggccattacctgataaatttgattattatttgaagctgtagacattgaaccaactgtatgatccatgacaaagctattgttttgaagatccctacgcnatcctgctatcaatgcttgacct

SEQ ID NO: 20475 - DNA, 473 bp, Oryza sativa
  unsure (1)..(473): unsure at all n locations
agcttagatcacatgantctttggatgaaacagaagtctatattttagttcctacaagaattccatgttccaaagagaacctgatgtgtttaagaaatatttaaaccccttctgtcaggcagaatactaattacattggagtaaatttacagaggcagagacccctcgtgaaatacattacctattctggacaaaaaaggggagatttatatnttcaataaatcgacatttagtaagcattaacatagttaaactttgcgatgttgctgatgcagtatggtatcctagttatcctgtcatttatgtttttcccatnttatgtttgctcatggtgtgtggtcagaaagtaaagcactgcatgtaaattatgtgctaatttcctctaaaaataagacgttacagcatcatctatgggccttctgtaactgaaacatgtagctacgagtanatcactctatctaactctgctcatt

SEQ ID NO: 20476 - DNA, 473 bp, Oryza sativa
  unsure (1)..(473): unsure at all n locations
tcgntcagactagttcagagcaggggttgaaatttcgaaattgtattttatgccggcgctagcgaaattatttgaaaatatgaatgaatttgaataaaatatgaccaaattcacaaaaaaattgcaaaaattcgaaaattttgggcgagatttgagcatgccggtgggggtgaaatttctgaaatttcgaaccgaaatttcaaacccagattcagagtgaactggtaagcctgaccaattgatttcactcggtttcacttttacattgcaaaatcgtagcaacatgagcaccaaactttgatccaagaaaaaaattcctaaccaacttgatagttaagctgaggaggattatgttgcattgggtgctttttttttaatttgtgtaagtcaaaatttgaacttgcatgtgttgtggagtgatatatcttatattaatctatcttatcattcnttttaanaaaagataactattt

SEQ ID NO: 20477 - DNA, 350 bp, Oryza sativa
agcttcatctttggtaagttaacaatcaaactaatattattcgctcgttaagttacatgacaagttaccaaagtatgacaagtttataacctggttatcttgagaaacattgtatgatgagagagttgttgatcctaaagcgattattgacgtgtaccccaacttttcttgggacggtgatcaatgcacaagcaattgggaaaaggtagttttctgatcgcgacagcgcacatgtgcggtcgcgtggagctcatgaacaccacatctggtcacctggagctcgcataccaccggatctagtggtggtgaccactgtgcggagagggaccctatcagcgacatttgcgtgg

SEQ ID NO: 20478 - DNA, 460 bp, Oryza sativa
  unsure (1)..(460): unsure at all n locations
tattacggacctatgaaactcagctnggcagggcctgtntggcacaacatacttgtgcgtggacaatgcaaccagaaaggagtatgcgtgcaagtcgatcgcaaagcagaagctcgtcattgatgacgacgtggagttcatccgccgcgagatcaggatcatgcaccaccttgctggccatccaaacatcatctccatccggggcagctacgaggatgccatggcggtgcacattgttatggagctctgcactggcggtgagctattcgaccgcatcatcagcaagggatattacacagagaggcaggctgctgaggttgcccgcatcatcgtctctgtcatcgagtcttgccactctctcggtgtcatgcatcgcgacctcaagcccgagaacttcctcttcgttagcaacgaggaggatgcgccactcaaactcattgactttggcctctncatattc

SEQ ID NO: 20479 - DNA, 460 bp, Oryza sativa
  unsure (1)..(460): unsure at all n locations
agcttgggatgctctggcgttaatntcattcccagtcatttcaaagacctccaactgaggtgctgactgtttgaaggtattgataattgctacagtgcccttgttctcaagattgagatcactgagatacagctcaacaagatcaggaagttttgaaagggttttgctgagagccaaccctgcctcaactccaaacaagttgtccctgagatncaagttcttcagacgagtacaagtccctaatgcctcagccagagccaccccaccatcagatcctatccttgttgctgagcacctgaaactctctagattaggagaacgtttaaccatctcagcaataaacatagcaccttcatcccccgtcatattgttgtggaagtggaggatcttaagcttctcagttgaaagaataagttcagaaagagcttgtgcggctttctctgatataccatcattcatc

SEQ ID NO: 20480 - DNA, 455 bp, Oryza sativa
  unsure (1)..(455): unsure at all n locations
nggatcaaggtgcaacatgggaatttcttggtattgctttatatgaggcatggcatctgtcatacccgttcgtgttcaaatatgagaatgaggtagaattttaacttcagtcatatctatagcttaaggaatgagtagctgtttctgaatatgtcaatacgttaccttttctcttgtagatttatatgatgccagaggggaacaaaaagaaggagctacgactttatcgagctactaagtttcctcttgaatggacattggagaaggtgctcattgataagccacttattgattcctcattagttcaatatgatggactgtggtggctgtttgcctcagattttacacggcatggtatagaanagaatgcagagcttgaaatttggtacagcaactcacctcttggccttggagtgacataagcaaaaccctatttacagatctgacanaagttt

SEQ ID NO: 20481 - DNA, 475 bp, Oryza sativa
  unsure (1)..(475): unsure at all n locations
agctttttattcataaagaacatactccagtactcctattctatnagcacacatgcatacaagatcagcgccgaggtgaaatttagtctaaagggctgttctaaagtgaagattgaattgactatcttctcgattttcgtttgaatgcttttcaaactgctaaataatatattttattaaaaaatataaaatttgcttttaaaaattaaataatgttatttttaattgttaataattgatacacaactaattatatgctaatcatattatcgttttgcatgcggctaatcagccattcctatactcttgttataactcacccttagtgaccagattattgcagtgaattatctgcatgataaatacaaactaaatattgtggtgaataaacttgataaatagcttataataagggatctaagcaataagcaatgtggtacaaggagtttatttattagaacatgtattctatata

SEQ ID NO: 20482 - DNA, 466 bp, Oryza sativa
  unsure (1)..(466): unsure at all n locations
gggacatcatcctanggatggagtggttggctaagcacaaaggacagatagattatgccgaaaggtccatcaccttgcaaggacctagaggaaagcaagtctgcttcaccactaacacccctaccgcaagtcggtctatcctaacctatttacaagtcacctccttggagtcggtgcccatagtctgtgaatatcccgacgtatttcccgaagaattaacaagtatgccaccagaccgagagattgagttcgccatagaactggcaccaggcaccgcaccaattgcaaaaagaccctaccaaatggcagctaatgagttagcagaagtcaaaagacaaatcgaagaattggagagtaaaggttatgtgcgacctagctcatccncttggggagccccagtgctccttggtaagaaaaaggatggctctgagagaatnggtatcgactatagagccctgaatgaagt

SEQ ID NO: 20483 - DNA, 399 bp, Oryza sativa
  unsure (1)..(399): unsure at all n locations
cttctcggagttttggtctctgcccgaggcattgttgttttcctccagaagatacgagctatagagcggatccgcccccccagcaaacttagggatgtgcagtgcgtcactggttgcatggccgccctaagtcgtttcatatcaaggctgggagagaaggcgcttcccttggttaagctcctcaagcgctcggggccgntcacttggacggaggaagctgaacatgcccttactcagttaaaggcatatctcagctctcccccggttctagtcgccccggagccaaatgagcccctgctactttacttagcggcgaccccccaagtagttagtgcagctgtggctgtggagcgcgatgaagacaatcctcattccgcgcacccccaccctgtgctgact

SEQ ID NO: 20484 - DNA, 458 bp, Oryza sativa
atggtgtcgtattcaaaggaaggttacaatatggtcgtatggttgctgtgaaattcttgcatgactcaaaaggaaatggagaggagtttgtgaatgaggttatgagcattggcaggacctctcatattaatatcgttagcttatttgggttttgtttggagggctcaaaacgagctcttgtttatgagtacatgcccaatggttctttggacaactatatttattcagaaaatcccacagatattctagggtgggaaaaactttacggaattgcaatcacggttgcccgtgggctagaatacttgcaccatagctgttacacacgaatcatccatttcgatataaagcctctaaacatccttctagaccacgagttttgcccaaagattgctgatattggttagccaaactgtgccgtaccaaggagagcaagctttaatgacaggtgctataggaac

SEQ ID NO: 20485 - DNA, 285 bp, Oryza sativa
actgccacgctgatcgctaagagttttatcccagggctgcaaaaacaaatgggggtgacatatcttcatctgaaatgtaaatcccggttctaggctgctttggcctaaaaaaagggaagttggctataatcgccaccagacgaagacctaagtattatcactattgactacatctggagatgagaagttggaaaccaggaatgtgatcggcaagaaataaccattacatccgggtcattcaaatcagagcgaggaggcattcttctcatatcttggcaagaacgc

SEQ ID NO: 20486 - DNA, 405 bp, Oryza sativa
  unsure (1)..(405): unsure at all n locations
ttggttcttagatgattttgtttctaatggatctcaaatcctctcttagaattgcctttcanattcctgtgaaactctaggtcaaattcaaattcaaatcccttcaaattctcctcaaaattcaactctataaatccctgcgaaaatgtgaaatatcactgttcatattgggcctccttcccttccctctctctcggcccaactctcctccacctctcctctcttctttcccctgagcaggccggcccagcgcagcccatttctgctcatcgtccccttccttgagccagccagtgcatgcacacaaggtgttcgacgaaataccgacccgagtcgctgcaccgntcccgcctcgttcccgtaccgcgttgcaccataccaccctcccgtgcgctccacaacgtg

SEQ ID NO: 20487 - DNA, 460 bp, Oryza sativa
  unsure (1)..(460): unsure at all n locations
tgctagctcggttcaatgtatgctaatgtgaagctctgaactatgaacactaactatgccactattactatttgtgcccaacaaaccccaagtagagccgcctaaccaacaaccaacctcgttgaccgctagagccgctaatcactctggagtcgggacccatcaccgaatacgcgagaacccgaggaccaaaccgcanaagcctcacctcaccctaggctntgatatgcgtgcggacgcctaaggctaggagttaacctctgcgttagagagagagagagagagagagataactagcagagcactcgcggaggcgaggagagagagagagagagagagatgttggaagaggaggggagagtccacgtgagtgagacgaggatgaggaggaggagatacctctctcgcgcgcatncgcccctatcgccgatccccaattcgtcatggatccaccctacgc

SEQ ID NO: 20488 - DNA, 393 bp, Oryza sativa
actgagcatgcacttgttaacgaccgacaagttgagctcatatgctcaattctcacaaaataaccgggataaaaattcgaacagtcctgctccctgaacggcatgtactgcttgtacacacagcttttacacgtgaaccgtcgatacacagcattttgcctgctccagaagtaaaatgtcaaaacgatcggcaacaagttctgctggtccgtgtcatgttgcgtctctctaagacttgtggctgcttggctgaatgggtgaactcgttctgaaaatctggtcagaaattaaagacggagtggaaatgtatacgactccaattgtcgtgtcctgccaaaattcagaaaaaagtaccgttattcttctttgatcttaccctcgacggaaagagaa

SEQ ID NO: 20489 - DNA, 489 bp, Oryza sativa
  unsure (1)..(489): unsure at all n locations
tacgtgtcgaagtgagcgaaagagacggcaatgattgccanagtcttgtcgctctctcgtacatgaccactagataaggaaagcatctacgtatatatatgtacaactctagctagttcttagtactaggacaaaataaaatgggaaaataccaacaaaaccgtagccagaggagatgtatttgccataagttttaagataatgtcgttatttaatccattatttatgtttatgtatatatctacgcagccacagataattaaagatcgagtacacaagcaggtagagctagttgcacttgaagcaattcatggcgccactgcatcacaggtcaatctcatctcatgtaggagttccatcatatgaacagggacaaaacggngatttatgagattacaccactatccagtatcaatcactgtcatgtcatactcaagaaaggggcctgtctctgaaccaaagcatgctctccatgtactcagatactag

SEQ ID NO: 20490 - DNA, 354 bp, Oryza sativa
ctcacggacaaataggctgcagcactggcaccctaccacatgagagcaccaagttgtccagatcgtgtctctaacaaatacgattggagacagccctaacaggcagaagtaataaatcataaccaatcttatctctaacctcgctaacactacatgaaccggactaatctagtactatggccagcacaacctatagcctcatctcacacaccaacagctagatggaaggtacagcatgagctgcttccatgagcctggcacgctgacccctcataagccttctaccagccgtgatgcatcatgcatgtgactcgaacagaatagttttaaatggggcaaggcgcacaatgcact

SEQ ID NO: 20491 - DNA, 454 bp, Oryza sativa
  unsure (1)..(454): unsure at all n locations
tactcagcttagtggatgctgtggtggcggcgcttacgaaaagtgtattctttttgtaagcttgaaaaacaagttgaaggcgatatgacaaattgataaggtgttggtctgcactgggcgtanaatccaggagctgcaatcaggaaattcttggtctttgtttccattaaaaaagaatacagtgataattgaaacttcgttcccattctaagatagtaatggttgagacattggatatgtgggcagccggataatgagatattttttctttcgccattagttacatcatcagacacatgtacaccacctgtagacacatgaatgcatatgcatggttctggggagaatatggaggggttcgtccggcctgtatgagcctaatctcttatacagaaaagataactgaatgctcatattcagtccttctttctctctctatctatgggtggtaccc

SEQ ID NO: 20492 - DNA, 372 bp, Oryza sativa
  unsure (1)..(372): unsure at all n locations
agcttattntgagacaaactgctaaaaataaacttattatattcttgtacgataccattgtattcttgtgctagagtagtactccttccatctcaaaataaaccaatctctacgagatgtgacacatcctagtattacgaaactggacatacgcttagcatttgaatgtgtcatattccgtataagggtaatttattttggaatgaaaggagtactcgtatggaataaccaatctaaatggagtagtagtctaatgtaaggtcctcacggcgtgtctcttagcgcctggctcctactttctgtactctccctgcatcacgtgcacgaggtgcacgtgattcttgaacgcatacgtacaccgctgtccgctat

SEQ ID NO: 20493 - DNA, 310 bp, Oryza sativa
tggtggatttcaggcgcctctcataattgccttgtcacgactctgaccctcgcgcggcgagcacacgacacggagttgccaacacatggcgaccccgaatcggctcgggtgtcatcatccccacaataattcacctgctcccgcccacatcgtgaccgccactagcccgtctataatagcagctcgcccataggctataaaaaacccactacgcgctggtcagtatccaccacacagcggtacacgctctgctgcatcggctgctgtactagtgagcgcccaggcttctccgccatgttcaagcccgatc

SEQ ID NO: 20494 - DNA, 305 bp, Oryza sativa
  unsure (1)..(305): unsure at all n locations
taagacattgtggtccattacatctaagacaaaggcaaggagaatagggggcatgggagctggtgtgcaccgcgaagctaaagacgagggtggcacgattagcgaggttgaggcagacaacgactggttcgcaccactgagcaccgccttcgccttgtgtcctctctcccaccttccgcgcgtctnttgggaaggaagagttgaggccgtcaaccgccgctaatcccctctatagtctatgtcgcgcccgcgagatgggagctatcgcgcctcgtcgatgccgcactatggcagtcattcctcca

SEQ ID NO: 20495 - DNA, 447 bp, Oryza sativa
  unsure (1)..(447): unsure at all n locations
agcttgtgcggtggtggagcatcggtgcgccagccgtgcctttgntggtctagtggcggtcggccacgcttagcggcggccgatccggtactagccttctcctgggcgtgtgtgttggcgatgtcgtcgtgtgggtggtggtatttttttcttttcctgggtacgactctccagggttataatcttatactttgtttcctgctctatcaatagaacttcgcaccgtctcgtgcgagtcgttcaaaaaaaaaaaatcttcggagaacatataatgggcatcaactaaggttccatgcaaccttgttcccaaagttgaaggggatgaccttgcaagacatggtagaagttagagagatttacatggatgacggaacattgatcagtcttgagtatctaanacttgatggtctacacaacttgccatgtcctgatgtattgagttctcat

SEQ ID NO: 20496 - DNA, 493 bp, Oryza sativa
  unsure (1)..(493): unsure at all n locations
cctataaaactcagcttcatgaacgtgtcggctgggttngcaatgcctggtggtcactctgtgcagtacactacaaatcangttatcccggaacacctggttcatcatgtacaaccagatggttcagtagtacctcaagttattcttgagcatttggcgcgtggtattcagccgaaccttcacaattaccaggggggcaatttgagttatcaatatcagcctccatcaccgcaagttcagtaccaacaggcaggatcggttcaacctcagttttacaaccagttcgagcccacaccacaacaacctaaaggaacacctcagcaacgaccatgggctgatgtgatagccgatgttatgagggagcaaattgggcttaaaccaaaagagactggnaatttgtgccgacaaccttatcctgaatgtgttgaaagagttcctttacctaaccggttagagtaccagatttctcaagttttcacggcaagacactaca

SEQ ID NO: 20497 - DNA, 400 bp, Oryza sativa
  unsure (1)..(400): unsure at all n locations
agcttagaatgtaaataagaagaaaanattgtccacataacttagtggtggattttctgagtgctaaatagttggatcgctcaagcagtgcttagataccatgtttacaacaaattttggtggtagagtgccatgttaaaccgtagacggcaagtaacacaattctgatggatgaaaaggatagtagtaattgatgtatattttacacaatgtatatggccacttccaagttccaagagcttgcattgcatactgaagtgctgctgttccaaatgatcaaaggctcaaagtcatggccattacttctcaagcaagggctactgtctacacagtgcagtttcagctgccaaacaatcttcactccggttaatttctgctcttgtaatgagctactgtgctg

SEQ ID NO: 20498 - DNA, 437 bp, Oryza sativa
  unsure (1)..(437): unsure at all n locations
ttgctagaganacaacagagtnttttttgaaggaaaggttaaaagcattgccttgtatatattaatagagcaggagaaaattataacgagctatatacagagttagacgaaaaaagaataacccgtaaaagaagaggcaaaaagcagggattaggtgatatctcccaagattccaaactcttgtaaggttgcagcccctgctttgactcatgctccgctttcttccttgatttttgctagaattgaggacggcgcagacgcattgttgcggaagattcttacgtttcgttcacaccagatttcccacgagattagaatcaccagagtcctgagaggcttgcgtggggtgcttgtggactccgctacaagagtccaccattgctcaaccgagtggacaattttccaattgttcatttggaggtcagtcccagtccatc

SEQ ID NO: 20499 - DNA, 359 bp, Oryza sativa
aatctactgcagcatgcaagcttaagccaaaaccactcagaatagtgtctgtggggtggctaattccgccggtagtgtaaaatgtgcggttctgtttgtcaaagagtaattccatccactgttatagttcggcgggtaattcatactctttcctctacaaaaccgacgaaaaccggacgcactattgaaaaatgatttatttacaggcacttctactgcactagcggaccgagtgggtaactccacaactgcctgtactgaaatctgctatgggggagccgtcctgtatcacctacaaagacatgattaatttttagttacaaatgaacttcttgactggctcgagaatataaattgct

SEQ ID NO: 20500 - DNA, 394 bp, Oryza sativa
  unsure (1)..(394): unsure at all n locations
ntgatcaatcaatctggaatattagtcaatactatgttaaacatggtgaaaacaatggttgatggttcaatggctgagtatcaagctaccggactggtttatctaccaggaggagtgttcctaaactatcagccattaatcactgataatcaaccaattggccagttaattcctcttaatgcaccatcggttcagccaacggcaccagtatcggctcctgcacctgctgcaccaccattggctccaggccaattagttaatccccggttgcaggtaagagaacaaccacaacatagtggacataatgtgaatcggctaacgcaagatcaggttgcatctatgttcttacttnctcaacacactactgatccaacccagcagcagccgattcagc

SEQ ID NO: 20501 - DNA, 462 bp, Oryza sativa
  unsure (1)..(462): unsure at all n locations
gcttaacatataaagataccacatcattatccacttataagatgtcacataatcatctactaagtaataagatgccacatcatcatgcactaacaatcatcacatttgaacattatacaaacttgctatatctgtataggttntataatataagagagcttttcaaatacaaacatgttaaattatcatccaacataattcacataatggttcaatatatatccttattatggtgtatgatatcctattacttatataagtcatcctcacttaggtagcgcttaaatgaataaactatgggccaaattatctttctcggtttttcctctaaataagtcatcatatcaaatggttctattctttatatattaatctacggtccaaactatctccctaggtttcttcttcataaaatcataccacttacttttacggtgaatcacatccacatactattaatta

SEQ ID NO: 20502 - DNA, 474 bp, Oryza sativa
tggtggtaataatcaaccacataaggatcactgctgtgacttgctgaatgttgcattcttaagatagattcgatctcttcagatgacatgtacttagatctgaattttattcctccactatcaccattttgattaccagtatcaggcaatggttgagaaaaacgtatgttgtgttttcctcttcctgaccttgatctcttgtctcttgatgaaggaacactgctaacagaatcaaatcttcctgttaattctggggagtgatgttggtaaaatatgtgaggtggtaaatatacgtaattctgatgggatggttggacttgaacttgtgccaatctctgctgctgttgagaaaataacagtgatgacatcgtgctatttggaagtgatatttgtttctgtaacatgttcggcagtagaataaattgctccccagcatacagattggcttggcttggccaatcattttgcattgga

SEQ ID NO: 20503 - DNA, 395 bp, Oryza sativa
gctagatcgattccctctctgaaacaagaagttctggaccgtgaggtataagatcaatcacttggcgtccatccgatgcatcgactatggatatttcatatccccccttttctttacgcagtatttttcttactacacctgttgacgttgcattatagaccgtattgttactcttgctaccatcaggatagatctgtccccttcctcggtttccccccacatatatgggatattttaagaaatgaacgtctttcttcatagcagggtcgggggaaagaatgggaaagacgatttcactatatttcttaccgggaacagggcctatcacaagaatattttttttattgagacgataactctgaaaagagagaattcctatcttttctttcaactca

SEQ ID NO: 20504 - DNA, 406 bp, Oryza sativa
  unsure (1)..(406): unsure at all n locations
acctcagagtcgactgcagcatgcaagcttgtcctgctctccgagctatcacagagcaanttgtgtgttttcaacttgacgaggctacgtcagagactttcctccatgtcggagtatttcagtgctccatgacaaatgctgagataaaagttgccacagataccttgctaaaaattgcattgggcccacactcttgtgtactgcactcgccacaggacagagcggatccgaagagaggcggtgaggaggggaacagaaagggagcgggcatatctgaccggaggaggccgcatcaaccactgccgaagagctcaacgcggcggcaacccaccgctccgcgccgtcactggggagctcatcgaccctccctccaatatgagccaccgagctccatctacggggctcc

SEQ ID NO: 20505 - DNA, 411 bp, Oryza sativa
  unsure (1)..(411): unsure at all n locations
taagcttgatcaanggcgaagagagtcgntcagtttcatgaagatacaatatgttcattaaaaacgaacgaagatacaaacatcacctcctcaaacagctcatgcttgggatgaggctttctttngctcgacattagggtgtttccataattttcataaggatcatccctgaattggaagggaatttccggaggatgaatatcttcttcctccggctccagtgcctataatgaggattcggcagttgagtcggattccgaccccatgtgcacaggttcctcatggataatcttgacctccgggacggcttcgcttcggtagaaaggaggggatgataactntgggccacatattggccgaaaggaaagaggggatntcngcttatctctntcttgttataagctctattaa

SEQ ID NO: 20506 - DNA, 450 bp, Oryza sativa
agcgctttggtttctgaaataatcgagccaccatgttttttgctgatttgatatttattattgcatatatcatgtattaggcaagatcttgaaaggagactgtttgataatttgtatttgtgacttgtgagcactgccatatcatatagatgaacctgaaatggagaaagctatgcgaatttgaaaaaatatattcactagtacatttgtttctatgacacgtctcagctaaacgtcaactgtattttcttggtgctaatgttgctgtgcttttgctcagtgttcttgttcatagcggaagagtacatggcggtcactactatgctttcatacggcctacgctatcagaccagtggtgtgtaaaaatctatacctcttgtattgtacctcaatactttctttgagttaaagatattctgggtatattttgttttgtcatgctaccatcac

SEQ ID NO: 20507 - DNA, 440 bp, Oryza sativa
  unsure (1)..(440): unsure at all n locations
aacctccaaatctttcagctgatatcaactattactcctggcatccctttatgcttatcattntgatagccggtatatgacatggttgcagaaattgttcgatgcttgataaatatgtgcattcgatgatgtacaggttaatcaaatactggaatcctgtgcatggtaatctatgcaatgatatcttcttagcattatggcactcctcaaatataagcgatatcatgtttggtaagttgtcaggcaggaaccagctatgacaaaaattctctccttggtaaccagtgacctccacatgttgaagattcggatgaggatgtaggttttcacagacttccaattgttcctgttcatatctagcatcctctgcaaattgagatatatggagagagtagagattattcttctttttcaacacagtaagggccaatattcttttt

SEQ ID NO: 20508 - DNA, 474 bp, Oryza sativa
  unsure (1)..(474): unsure at all n locations
agcttctaagaaataagaaaataaacttcagaaattctctattatatgcaaaacattcaacgcttaatcctgcattaatatcatggatccctttatcttgggcattggaagattgcaatcgctttacatatgtatacgcacatgatagctaggccaccatattgaagaacaaaaatcaaagcatgttatcttgtacaaaatcaaatcacttaaggtgtcaagtggggttatagcgatcgtgcaaagtgtacggagttataccaaagattattagcacctgattcgtacgagattgccaaccatccaatcacaacactaaaagaacctactaggagttacaaagagccacaacaacaagccaacaaagaaacgccatgataattaaattataatgataatacggncttccaactcgcatatatgtgcattattacgtatatcacatcactcaaaagtaacatgcacaaaatgata

SEQ ID NO: 20509 - DNA, 446 bp, Oryza sativa
  unsure (1)..(446): unsure at all n locations
tgtcaaggacctatngctcatgttattctctagcaatgcatatattatgtccttcccctgtctttgcatgggaattctgagatattttagattgtttaacttcacctaaaatcatgacaatgagagaccacatattgtttctccaggccagattgaactcttcactcatgtcccagttctgcgtaactttgttgaacatttgaaacggaaaaatttcaacgtttgtgctgtgtaccttcttgattcacaggtttggactcttggatcactaaccaaatatatttatccttgagaaaacatactgagcccaaacacaactacacaagtcttacttgagttttgttttgcttggttaaagtttgtagtgatgtgacaaaatacatcaagtggtgcatggcttctctttctgccatgattcagcttgaacttcctcatatcaacattct

SEQ ID NO: 20510 - DNA, 396 bp, Oryza sativa
aaactagcttgtttactttattccatatattccaacttttatgtttcgtcttccgctcacatgcttatgaaaatgctaaacgatacgcgctttgtaaaaagtttatatataaaagttgctttaacaaattatattatctatcttttaaatttgttatagctaatacctacataatcatgtgataatctattgctctgtgtatcttacggaggggaggggccggtatcccaacccctctgaaaagacgcggtcttatagaagctcttaatatggggagacaccacggctcttgtaagctaccttaatctcaacacgtacatcgagattaaatatctgattatgcaaccacacctgtatgcatactatgtgacgtgagctggggctatcaaacaaacg

SEQ ID NO: 20511 - DNA, 407 bp, Oryza sativa
  unsure (1)..(407): unsure at all n locations
agctttaacctatccttagagagagtatagtctcttgttttggttgagttgggtagtcctctgagtgagctttccatagagtccaagttcatcataaacggactcccgagcgaaaagttatagccgttctactctgtgcatttcggaaagtccgaacatttttgggataactccgaaacttttcggacattccgaaaatggctgcgaatctgagatttgcttctgtaagttttcagacttgtctgaaaatgcttttcggaaactccgaanattacagtctgggcctccaacggctagtttttgaggggctcgggtatataaactcctccacccctcatttgagtggctgctgctcttggagagtattatacacatccaaagccaaatagccatgctcatttccctac

SEQ ID NO: 20512 - DNA, 460 bp, Oryza sativa
  unsure (1)..(460): unsure at all n locations
actgcttactgatntctgtgacttatagagatatcttgtatttagatattcaatctgtgtaaaagctggatgcttttcttcaccctcatctattcccatcaaacagctcttatgtggattttgcacaatagcacctaaagacgtatttgtgctaagataccctcccagcttccagtttgtacaacatccgctgaaaccttctagcaagagctcgcacatcgcattgggatgttccacgatttttttgtgtgtgtagttttaacctctaaaactatactgaaagccaatatcattttcttctgcagtaaattctgtgttcggaaagattntctaacaagcccagctgtgtaaagaagcgacttgtatttgtgggcatatcaatgcttatcctttcaccctgccttgtaatattcccattagtgtacctcattctgagacatgctgaagaaagattatatca

SEQ ID NO: 20513 - DNA, 479 bp, Oryza sativa
agctttggccgttaaccaatcgacatatgatatatttgtatttcgtaccatagcgagtcttatctggtgatatgtaaacagccatgtacccgtgtattaatgtatagtcgtatgataggtttattcagttgttccgataggtggacgaaccgacgaaggcactagtgtgtatttccgactcacttgccgtgtgcatctaaacgcttgtgataaactaattggtacgattgtaaattctgacttgtaatctcgtattggaatctatgagttatactactataataatgtcttttttcaattaccaagccatgttgtcgagaaagcatgcatccagtagcaagacaagaaaataaagaacagggtagatgattatatagcatcccataagagacttttgacgtaacatgtacaatgttctaaatttatatattaattctgaatgcaattcaatgtttcaactataatttagcatatgtatc

SEQ ID NO: 20514 - DNA, 477 bp, Oryza sativa
  unsure (1)..(477): unsure at all n locations
atgaaactaagccactaagacctngagttgacttatcgctcacccgagtgtttctacagacggtctagtaccagataagactntgagtgaaacttgcttgcacaagacttgcaattcaaggcgtagtccattgttcaagttgtgagtaagtgtagcttggagttctatgtggatgttcaaccttaattggtctccatcgaaccgctggtatataaacagtacattggaaaaggcaaatctcagtgggattttgagatttggtgggggattgttggaattaatgaatgggccttagcccactcgaagattaattctttggaagatcacaaaagcccacctcatgggatggcatgcatgtggagtttagtaccaccttgcttattctangagagggggacctncttaaaatggaggatgccctcctagtcgcttgaagcatgtgtggtggagagaagaggggaaacacacgcgcgcgct

SEQ ID NO: 20515 - DNA, 430 bp, Oryza sativa
gcagcatgccacctcatgagttccacacgcaagacaacttgttgtgtttctacttgcattcaacatacaaaggcatctgacaatcgttcacaacttctaaacatccatcatacagggcatctgcaatctttcaaaaactctgtcgatgtcctctgcgcctttaaaggcatgcaacattgtagatagacattgagtaggcaaatctatggtctcttcaccctaaagagaaagaacaaacatgccttctctagctgtggaaggttctctacatactgaccaacactttatcagctgcgacatcaagcgcctcttgctctccatgcttggtgcaagatggatatttctttcataatccattcattattaaataaacatgcacttcatcgctaacttcgatcatctggtcatcttatagcgcctacatagacac

SEQ ID NO: 20516 - DNA, 445 bp, Oryza sativa
  unsure (1)..(445): unsure at all n locations
tatatctcttcaattgtgcattaaagttgaagtttattctatccattattttctatntgaaatgtacaacaaaacgagcccaatattgattatattcggacattatgtgatatttgaatttttctagacccacacgtcacagagacacgcctcacatgtattcagtaaaattgggctataaataatattctcatataaaattaaatgcccaataatttattatttcttctatgaattttagcacaaaaattcatcaaacaattggcgagtagtagccaacgttctccccaagtcaacctccccacaccgaactctcaccaatctcgaggcgcatgcgaccctcccgcgccccaccacataagcaccctccgctcacctcgtcccgccacgcgcacaccgacacttcttctccgcattctcttacccacccacaccgcgcgccaca

SEQ ID NO: 20517 - DNA, 401 bp, Oryza sativa
  unsure (1)..(401): unsure at all n locations
ctctaagtcgactgcagcatgcaacttcaggctcctcgccacgctactgtcatttgtttcccataaccggatcgaccggaagcggtacataccatagagcaggctcctgtgggtcttctcctcctggaagagccacattggcaacaatcattcctctcaagtatgccacccatatcaagtagcgacggcggtaggataacactgcatcagttgaccaccagccggcaccattgatatggtcaatccgcacattcctgaagactctccagccgtcggagccggagaanaacatgtagatgttaactgcagaaagttggtatgaccttctctccatctcggccacaacgaacgaatccttgctgcaagacaggacacccatggccaccctactcatgatgcgt

SEQ ID NO: 20518 - DNA, 162 bp, Oryza sativa
  unsure (1)..(162): unsure at all n locations
cggcagctggaggaggaagaagacatatatatatgggtggtactatagtcccggntggtgacaccaactgcgactaaagatcaccgggatcattagcccctgctgggaatacctaccgcgactataattaagatctttagtctcggctggtaacaccaaccg

SEQ ID NO: 20519 - DNA, 326 bp, Oryza sativa
tgcagcatcaagcttctatgaatctatcttcaatgacttactagacaactcgaaatgggccaactcctaatcggcttattctttgctgacaagatccaatgccgaggagggatttcatcaaccctgatgatagatcggctgcttatccttcaaagacaccctctgagtagtattgacaacatagaactggcaacattcagaagcaaaaactttgacaggtgtggcggtgaatggaaactgcatttattccaccaaccacgcttactgtacatgacacaccactttccagatgttgtccctcaagtaagtcttcaacttttgctcaa

SEQ ID NO: 20520 - DNA, 441 bp, Oryza sativa
  unsure (1)..(441): unsure at all n locations
tggatctgttngngctatacgaagacaaagcacttgtttgctaccctcctatagtcattcttctactcgaagacaaaggttgagatagccgaatcgaggagaagaggatggtggcgaaaatacttctcttggaacgtccgatcagataaaaatcatcggacacctacgaccagctcacttcttatttactaatttcttctctctctgtcgacgtcaggaaaatactacaaatcagcagcctggtggattggacgaaccatgttaccgtaacatgcatgtctatctgtttcttttcattctttcctcctctctntaaattnntttctcctaaattacttatccgatctacgaacctatcacatcgtttgtattcgttgcaattaaatctttacaacacaatatcacatgattatattatgtccaaagagaaacatgtgtttc

SEQ ID NO: 20521 - DNA, 429 bp, Oryza sativa
  unsure (1)..(429): unsure at all n locations
agcttgagtgtcaacgcaacccacagcgcatatgtactgccctcccatctactatcttatttgtaccaacggcagctagctagttgctactacggcctattaacaactgaaaactactcctatatatatttatatatactaaatctatctgtttttccccaataatttcttgcttgttggatatatatgccgctaaacaaatactccctccgtttcaaaatgtttgacaccgttaactttttagtacgtgtttgaccattcgtcttattcaaaaaatttaagtaattatttattctttntatttcatttgatttattggtagacatactttcatgtacacatataatttaacatatttcacaaatttttttaataaaatgaacggtcaaatatgtgcttaaaaattaacggtgtcaaacattttgaaac

SEQ ID NO: 20522 - DNA, 477 bp, Oryza sativa
  unsure (1)..(477): unsure at all n locations
nggaggtctcccgacgtggctgatccccacgggctgtgtgattctggttagtaatgtcgtgtgggtaaagtgtaccccctctgcagaggttaacaaactgttctaacagccgtgcccacggtcatgggcggatgtgaggtgattcctagcgtagttttgtctgactactgcttgtgaaattgctgttgtgaaactgggttcgatgtttgaaaaatcagcagctgacgggatcagctaggcccgggtggccgtttgaaaagttgttggcccgggtggccgtttgaaaagctgttggccgggtgccaaccctgtttcaagatctaaagactgatacattgcacatactccgaccggacgagacgcactgtctcatctgtgtcgtttgagaagcactcacttagactttntagaanagagttcaaacaaaatcaattacgaaaacaacagcctttccttgaagcctgcattanacactta

SEQ ID NO: 20523 - DNA, 474 bp, Oryza sativa
  unsure (1)..(474): unsure at all n locations
agcttcatctaattagcatggtgaanaagtctagctctatgggcttatcgtttcaaatcctagtgtaaacaaatatatctgtgtgcatcatgaataggctgaatgttatattatttccattgtaaaacaaaggactnttagtctgagccataagacagcttggatccaccactacatgtgaagtgccacgctattatattagctcaaagtcatggaacaaagataaaaaggttgaatttatcctggctacataagagtgatatcatgatatgatgggacaaaggtcaataccacaaaacaacacatcagtgcccccatcatcaatgccggttcgtgaaaacctgacattgatgatggtttcgatcccatcccanaaaacaagcttgcacaatacatatccttcacccgacattgatgaagagatatcggtgccgagtcttataaccatctggcactaantatttcgcaacatat

SEQ ID NO: 20524 - DNA, 455 bp, Oryza sativa
  unsure (1)..(455): unsure at all n locations
taagacattngagtatgaanacaaggaaaacttttttattattcacccacgttatggctcatcagtcaaggctaacacacatagatatgaactgtgctgtgagaatttgaaggatttgaagttggtgcgtcttgtaacagagccagacggcccagaaataggacttctgtttttgttggggaagtgcaaggcgttagagaaactgtgcctggagtatgttactggtgttattgacaatgacatgattgtgctatcccaggcctgcaaaaaccttaaaagcatctcactttggctaanaccagaaacattacgttgtggtggtcatatagagttcacgacaggttttactgatgaaagtctcaaggctctagccctcaactgtcctttgcttcaggatgttgaactcacatttacaggttgtgcgcactgngatcccnnctgaataggcttcacac

SEQ ID NO: 20525 - DNA, 478 bp, Oryza sativa
  unsure (1)..(478): unsure at all n locations
ctaagcttgcaatattaagtctgactttatgtgcagaaagtgaaatttccagcttaatcacacaataggcagcaaacaacactaatccatcactacctaagcacctattagtagacacgacaacgcataagacaataacatagttaaacacttgctcaagctaaatatcaaccgtggaaaatgtctgcatcatcttaccactatccacagtaaccatgaccgtgatgctgatatccacgactagggcaccaaccatatattggttcaatcttaaaatatcccccaaaataagaactttgtcaccatacgctccaagatagttcaggctacacaagtaggcagacaaccagtaacagcaatcgtgtcaggctgaatagtagnttgattgggcaagacaggcttagaacaatcacactaccataaagtcatgcccgacagcactagaagcttgtctgagtggcacttaatcatggattat

SEQ ID NO: 20526 - DNA, 233 bp, Oryza sativa
  unsure (1)..(233): unsure at all n locations
tcctatatcacttaaataggcaggattagctattcctcctttctctttaggtgatcttatctcgtgtccggtatggacttgttctaaccctacggtataaatattgacacctaacggattcgactcatcaactaattcaatgcagtatgattttggcacatagcctctctctcgatgggatcttgttctcaagtaaggctgcatccgttaagntaattttcaacgataaatca

SEQ ID NO: 20527 - DNA, 456 bp, Oryza sativa
atataaaccataacatggtgaaaagaagtgtgagaaataacaatctcttcttatttcttgagaatgggctgcaaagctaaggccaatttaaacttaacggctaggctatatcttataaggttaggctataaaggtttatgacctttactatggttatattgtggtacgcacccgatgtatgcttttagcatactttataaagtatcatgaagtatcgtattttctatttataaacaatgatacttctaaatactcgataactcgagaaaccaaaattcttatagtaaaatttatatatcacgcacacatgcactaatctaacacaacgacgcactaacaatatatatatgacctaccgaaccacatcgtcgcactaacgatatgacctacccatccacatccagaccatgcgaaaatatatacactaatgcaccatgcacgttgtacactgccgtg

SEQ ID NO: 20528 - DNA, 467 bp, Oryza sativa
  unsure (1)..(467): unsure at all n locations
taaggtgctaccacaaggaatataatacaatattttcattgctctttgcctgtngggcatggatgggaagtaattttttttcttcggtaggaccaccttgtgnttttccatgagcttaaccattgcagacattgccatagttattgctatcttcagcggttcctactcttattgtcaattgagtcacaaacattggccttgcccatgactcatcgccactctccttttcagtgttgacttgctgcgtgtagtctgcttgacctccctcgaaactagctatatttacaactatgaattacatatacttatatttgtaactgaaagtatcaaaactcacgctataattacatggtaagtttcaatattatgtgtcagtgttatggataccacatacctaataataattgactaaatctcggcaggacccaccacatactatgtcttatacggagacaaccttccgatat

SEQ ID NO: 20529 - DNA, 173 bp, Oryza sativa
tgagctgaactactggagagcacatatatccttttatatgagccatctctccctagatctcaatttaacatatgcaacagcttaacatatagttctttgactaagagcttggcgaattcatatatgtcaatatttcatcgcaccataattcagatatgtgtacaatgtatatc

SEQ ID NO: 20530 - DNA, 479 bp, Oryza sativa
  unsure (1)..(479): unsure at all n locations
gcctggctccataaagaccacaagaaaggccgatagctccccaccacttgtctaaggccacaagcgtgaacgcggcaaggggaagttggtgccggagccaaaaaggggcaaagctacgatgtcgatgcccgtgagcaaagcggggaaggtcgggagggcgccagcccaatatgagctatgcatgccattggtggaggacaatgtattatccgtgatgggtattgcttgccgagagctacataagcaattcatggagcttagcaatgctaagcggaaaatgagggagtcatccatagttggacatcacgaccaccagccgctcctatcatcgcctgcctatataactataggctttgatgacctcttcgaccttttcaggatctcgcaagtggacactggtcttctaaaatgctacctcttgtaagtgcataccttctatgcttgtgatatgattggactatatctnctaaataaataag

SEQ ID NO: 20531 - DNA, 190 bp, Oryza sativa
gtgatatgcgcgctatacgaatatcggatctcttgtgtcagcaccaaacaattctgcatactgctctaacccagtatactgattagacaactaaaggtgtgttggatgatgtattactagacgtgggattggaattgtgaattaatgatgaacatgctattctgaatggaagaatgaatcctatatcata

SEQ ID NO: 20532 - DNA, 328 bp, Oryza sativa
gacctataaaactaagctacccgcggtcacaaacacaccttatcgggatcagtttttgtgtactgagcggacagtctcaaagtttccgttagatctgaaagtaatgtctcttggctgcgcgtaattactaacaagtcatcgacatacgcctctacattatcgcctagttgactacccagagaatatttagttaaacgctgaagagtaagacctgcattctttaacccgaacggcattgatgcataacattatgtgtctacgggggtaatgaacgcagctttttgctcatcctccctagccatgcgaaactgatggtaaccagagtatg

SEQ ID NO: 20533 - DNA, 318 bp, Oryza sativa
atggatgacctgagaggtgaatccagcctgcaggagtctctccacctcctctcggatgaatgcttgacgttattgggcctgacgacgcactttctgcctgaccggacttgcgcccggccgcacggcgagactgtgctcaatcacctcccttgggacccccggcatgttcgccggtcttcaggcgaatacattcagtgtttgccagcacgaaggagacgaccgcgtctttctattttgtcgccataagagcaccgattcgtgtggtctttgacgggccgtcgtccatggcaaccttcttgacacggaccttgtagcacg

SEQ ID NO: 20534 - DNA, 436 bp, Oryza sativa
tctccagatttggtgaatgctgcacgaaggaaattattggtcttatgtcagcacccatacaccattcaccaagggacaatgtcttcaggttactataagttgggcatggtttcagctccctattcatacatcacctcatatggcacacacagatgaattagttcagcgtttacaaaaggtaaagaataacttggtgctatactaccaaggaccagcaccgttcactaaaaatgcacatctatttctggtataaaaatgtgtacgaatagcgcgaagatacacatatgtaaactccatgtgtatccaactgttgcaatcaccaaaggtcagctcaccagcatgaaaaacaaaaccacctttcttatatcaattttccagaacaacacctgtgcttaaatatgtgaatatgcacaacttaaactcacaactctttagt

SEQ ID NO: 20535 - DNA, 453 bp, Oryza sativa
  unsure (1)..(453): unsure at all n locations
agcttcttcttgagtccgaagccgcaatgtcaccaatcctgtctcttctgcattgttcgttgggagtataagacaatttaggggcggagctaaaacgaaatagagagatgtaccattcacttgctntactctactntaaatcaagtttaagctaatatgagtatttgagtttggattaaggaggtacatatatagttaaaatagaataactatagctaaaaaatatttcttggccaggtttctgtgcaccgctctctcctacctagctctgcccctaagtgcattgcccgttcttctctactagtcaagttntaggttgaacnnttttnttaggggatagttntatgttgaactgatctatccatatatggcccttaaatttccatcagcttaagcactggggttaaaataatatatgcatgcgaactttggcttactaacacgcatttactt

SEQ ID NO: 20536 - DNA, 431 bp, Oryza sativa
  unsure (1)..(431): unsure at all n locations
nggtagcaaagctcatgggccttgatggattgcctacacacaatatcaataccttcaaaaaagacgagtcaatgaagacagtaagttcaccaagggcactttttgatattgagatgcctaaggtccagcaaaatgatgctcatatgagttctccttattcccgaaaaagtaatgtttctctgtatgattctactgtgggtaatgagattggctcaatgaaaacaattatgagggaaaaaggcatagagcaacctcaaacccgagcagccaaggatatcaaggttgtatctcacacaagtcgaaagcaacaaataaaagagaccactgaaatgggcaggagaagtagtgacaaacaaagacctcattcgacttatangaacagagaagggaggaaggataccaagtctaaaacaggatcagcatctcggtct

SEQ ID NO: 20537 - DNA, 499 bp, Oryza sativa
  unsure (1)..(499): unsure at all n locations
atccttagagtcacctgaggctgcaagcttgggttcaagttctggttagttgcttccgtatgtacctttacagtctttactatagaagatttttgagttttgcatttcattttatctcctagaccaatcaatactactgatacatttcattatggatgtgtggcaacacaagtagggtaatgccgcagatattgctcatacttcactgctagctggctaaaattctgcctgaagtttagtattaacatatntctggctattttgattaaacaattgttctaaataaactaatgaactgggtattagcgaccagcaaaatcagtacctgataacaaaaaaagaaaaatcataccgtgtcagtttgtctccacaggtacattcaaggtgctcctttaactgggaacaccatcgctactacagatgatattctcgctgtggatactccatcagatatagctgaagcagtcatggtcagtaccaacgacaaatctactcaatc

SEQ ID NO: 20538 - DNA, 472 bp, Oryza sativa
  unsure (1)..(472): unsure at all n locations
acctgcagcatcaagcttgttaattacgtgtggtttagatgaatgcgataaagctcaagaatngacgtttntatatgcgcttaacaaaataattcaagacatgcttgattgtcaaagatatacatctctntctcatttgttacagcttgcttgcaatgctgaaagttaaatagaggaggacatgaagaagcaacatgctatgtttttgtcttctattactaaccatttgcacgaagtgcatattcatgaaaaggatgagagagacatgaaagagccgctagtcccattgatcacactcaaagtcgaggcacctccattatctgaagagggcatcaaaggtaaacttaatggtgctgaaattaataaaggtgagtgtgtagtaatgaattgaatcgncacttttatgcttagcagagcaccatagtggacaactgtggactctttgcacaagtgattatactgttttggataa

SEQ ID NO: 20539 - DNA, 458 bp, Oryza sativa
tcagccaacaagtcaaaacaagaagtaatgatgggttggttggctatttacatgattcagccaacaagtcaaaagtgagagcacttaaatgctttcttgggaagggctgattcacttcaaaaagttgcaaaagggttggctgttggtggaggcaccaataaatgcatttgggggtggctgatgtggtgatgaaggtgctgctggttgtggtggacgaaatttggtggggttggaggtggatttcgtggtgaatatggtggtgatggtggcagcgggatgaaaataaatgaagtgatggtggaagtgtttgcggtgacgaattcttgagcagaactcgaaactctaaaggactatactactagaaccagcaactcaaccaatcgatgcaatcgaatactcagcaagcaaagactaagtagaacagcacaggctcaacatgttttggtgatttctggtct

SEQ ID NO: 20540 - DNA, 238 bp, Oryza sativa
tcgcctcagcatcaactattcctttgttacaataacattcttttgtattcatcggttaattctgttgcttattcgcagggacgaaattcgccagtatctgtttaccatttttggccatctagtattgtaggatgtcaaacatgacctgaaaaatcctcctatataaactggttatcttccatactatcttcttgcatctgctcatgtgatctaccataatcgcatgtctattcaagtg

SEQ ID NO: 20541 - DNA, 409 bp, Oryza sativa
agctttcgagttcagacgacgacactatgtccttgtaattctcgctgacaagcagcgccgtcagcagatccatgaaggtctctctctctataccatccatgtcactttgcttacttgtactgtcttggacataacatcacattctcgctgaacaagcccggacaactcatttttacccttatcttctcgactcacatatgtttgatgtaggcgaagagtcttcccctttgacgttccaagtagccccatctcatataagtacatttgctgtagactggttttaatacctaactaactgcaaagaattactaaaaccgtccctcacaaagacccaaatacaacaaatccttactatactgaaaaatgttgtgaccacaactgtggaacagacctaactcaattccagtat

SEQ ID NO: 20542 - DNA, 459 bp, Oryza sativa
tcctgagatacgcaatctgctcattgtacaaaacttctttctacaacatactttgtcaattatccttggagtgtcatataatcctccatgtcaattaccttacccataactactgcattaattttcaattttgttgctaactgcagctcaatacgcatatatgtttaagcaccatctgaatattggaaataacatggaaccacaatttgtgtagatgtaaaattttcagcattagtaaatggtgctacagattttgcctttgatggactattggcgctggatgtatttgcttttcatcaaataaagctcttgtttcttaatttgctgatggcacaattttttatcttggcaggagctctgctaagcattttcatttctcattggtcatatatgcagaccaatatatctttcccaagtttagaaacttctgaaatatatattattgtgagggaaaataat

SEQ ID NO: 20543 - DNA, 435 bp, Oryza sativa
  unsure (1)..(435): unsure at all n locations
acttcatttatagcagatgaatatgtgctcttatattgtgtgaacgtgacaatgtcatcacaatgcttcacaaatcaacacattgtactactataataatacatgcaaggtacctggtgcatgtagctgcgaaatagttcattctgtttctttactctatggacaaagcgttttggagcaataacgccagcctttttctttgactggcttacctgcaatatatattatgatccattaaattgctgacagagacaatatcctgacagaaatttcagagaccatacaaaaccgagcagtaaacataatgcacacagatcaatgaatntgtgggtacgacatcaagccaaatatcttatttggaatcaacttgtgtgatggattttagaatatatgctgattgtacagcaagtcagtgtacatactctaaataagttg

SEQ ID NO: 20544 - DNA, 378 bp, Oryza sativa
tctcctgtgaatgatagcaatatgcagtcctatctcattattacagaaccaatcaaggatgatgcggtcactagaacaacgccagctatatttctccagaatcaaaatgagcagccacgcttgtgggtttcaggtcgctacttatcattgcgtaatccaaagtttgcagcaatcatgtaataaataaatatattcatgtctatatacagtgagcttgctatgtttatggatgaataatgttgaggatacaatgtaccgaagataaccaccttccctttttgtttaaggcagtgccttgtgttcgtgtaataacggagaaatgtgtaatacagacaagatctaagaggaatctttttgaagatgcggatatgtgatcat

SEQ ID NO: 20545 - DNA, 385 bp, Oryza sativa
  unsure (1)..(385): unsure at all n locations
ttaagtaacctgatgcatgcaagctngccagcaaatgattggcacaaagaaagagttatctttcctgttntaacaatgacattaatgcacatgttgactagagtcaatcagatcccactcacctctttgctgcccataattcacacacactacacattagcgccacaaatacagacaacagttgttcaaaaattaaacttgatgctcataaccatgtccaccattttcacttccttgctctcactcacaggtattaaaaccaaagctctcaattatactcatattagcaacctattacaccaagagagaccctcaacttatctcatggaagaagaggaatatgagactcctgatctcaaccttgatcctggtgtgcaagaagtgc

SEQ ID NO: 20546 - DNA, 411 bp, Oryza sativa
atagtactctcttattatatcttcccttgggataaaataaatacgataccttggaatattcccgggtgaaatgctacaatggtatatccatgcgcttgcggatcacatatgttaccataatataccaagggtatttctaatgctattgctgggaattatatttccagtagtgtcgctcataaataccattcagtatgtacttgtccacgtccaaagattggttcaactttaataatttgaggattattgtttataaagcccatagtagatggtttttgatttgaagtctgggcacctagtctttgacgattggggcattgttgagcaaaatgttcacgctttccacaaacaaagcatggtgaatcttctattctcatgcctcggctttgaattggggcataccacgctata

SEQ ID NO: 20547 - DNA, 504 bp, Oryza sativa
  unsure (1)..(504): unsure at all n locations
catgcaagcttaattaatctacacanatatagtatgtggttgtgaattgtgatgatccagcagagagccagaaatacttaaaagaattttaataccacggggggtggatgactggatgctcaaaatcggactacaatcaacattaaacagccataatataatgctgaacacaaatatggtgggaaggcaactggcacagaagatatgccaacctcccatcttagtggttacagcttaatgttgattaacaaaagagtaaataatagatgcattgcctcctanaagaaagaagaaaaagaggaagaattaatgcatttataaacatactaaatatatatatattacggaaattaatatcagccacaataggtctgtttcaggatcctaccttaacaagattggtgagttgttcttccaactcgcaatttaaagtctaaggtattatgagaatatgtttattcttgaagtattcttaaataaatacctattgttttgccttgaggc

SEQ ID NO: 20548 - DNA, 339 bp, Oryza sativa
gatctgaagaggactgaacgattcttatttttttagctgctttcttctgaacaattttgttcttgttctctttttgggtgaagccaacccaagctaagctagctgccgcctacacaagccaacgctaccatgggcaaccggatagcctgatgaacagataatagagacaaagggcatgtttagatcccacaaattattttaccataacacatcgaaagtttggatacatgcatagaatattaattattgacaaaaaaaaaagaaagaaaaacttattacaccaattacattgtaattgcgagacgaatcttttaaatctaattgcttcatgatctgata

SEQ ID NO: 20549 - DNA, 469 bp, Oryza sativa
  unsure (1)..(469): unsure at all n locations
ctatgaaactaagcttcntccttngcatgatcttacccacagtctaagaccactgaatatgtacatcactttctccagtgaaggactatcatcagtacttaacgagctgacatttcaacgacgcacctggtatcgtgtccccatatcatcaccaagctctattcgcgcaatgatgcggggatgcgtggggtacgaggctaaaagattgccctatagcaagccccttttcgttttctgcatcggccatgatgcgaatgaagtttgttgaaagccgacaatggcaaccggccatgaagctatgcaacgaatggagcaaggaacggaggaagaagaaagacattatgagaatgagtttaaaccgtctgatgataatggacggtggatagaatggaacttcacgctcatgactttgatatgcaaagtcagaggatccgcgtccgctcatctgtcatctcgttcttctcacgtc

SEQ ID NO: 20550 - DNA, 431 bp, Oryza sativa
ggacacttaaaactcagctgtgtgtcgtgctataccactacagtcagataagactctatcaccgcgatgtcatttgtttgaaaagtctggagtctctttggattagatcataaactgattgatttggtgtgtgttgtaaagaaaggttgaacatggagtaggcccacgatatgtcgactggcatcttaatatactggaggacagggctaggtcaagctgcatatgttattttagatataacaagatgccattttactttaaccataatctgcgatgggaaatgtagcccaaaaattctttatagaggatgctctgcctgaataatatgtgagagttaaatggactctcttttatctctatacattgtgagcaacgagaagctttatgggcctctctaccaagactaactgggaagagatgttagagttcac

SEQ ID NO: 20551 - DNA, 253 bp, Oryza sativa
  unsure (1)..(253): unsure at all n locations
ttgtcggctcgtgattctcgtctgagggacaagatttggccgcactacgatccttctcgggctcagatgttgtcgacgttctgtgctccacttcagcgggaggatccttcgacatggagtcctccagggttataactacngcgttctctgcttccgccattgatggaccaatccagatcagcaccgtggtgtatactcggaagacgatctcgccgacttgagtccacgcctacattgttgcagacaaactcct

SEQ ID NO: 20552 - DNA, 297 bp, Oryza sativa
  unsure (1)..(297): unsure at all n locations
agcttcagcgaataacaacagatatatgagatatatcttncttctataaagtgcgaaagagggcctctctgaaaacaaaatgcaggggtattcgtaaaataaatatggaccgttagcaatggtagcggcaataagggttcctttttgaaaaatgcaggagggaatgaatcctggccattggatctatcaccaacggttagatctccagtacaagccatttccccgccggcgacgtcttctccaccggagccggtgagccgcctgctcccatcgttaccgtcaccaacaccacgttct

SEQ ID NO: 20553 - DNA, 447 bp, Oryza sativa
  unsure (1)..(447): unsure at all n locations
taccgctggaatattgttaagtgtcatgctgaagttactgctctcttcccttgnttgcaccatgttgctgtccaattttatgggtgaattgtgatagccatacccatcagtcctgagagaagcttggtgtttgatgttttgataaccttgcttcttttgttaaggccctgtttaaatcccaccccaaaatttttcaccctttcacatcgaatgtttgaagacatgcatggagtattaaatgtggacagaaaaaaaaaccaattacactgtttgcgtgtaaattgcgagacgaatcttttaaggctaattgcgccatgatttgacaatgtgttgctacagtaaacatttgctaatgacggattaattaggcttaataaatttgtctcgcagtttacaggcggattatgtaatattgtttgtattagactaatgttaatacttcaaatg

SEQ ID NO: 20554 - DNA, 368 bp, Oryza sativa
  unsure (1)..(368): unsure at all n locations
agcttctgtactaagaagctatccagatacttgaactatagtacatgtcttataaaatacttaagtattcatttgacaaaaacagcattgtcgcactactactatgtcccatatagagtatatttcattcaaaaactagcagtgaaatgaagctactgatgaaatccttcagaatataactcatatccatctgaatcaccctgcaaatntataaactgatatacagtatagaattggaatntatcaaatctacaaaacaaaagtcagggttagcataccgccagtagctgggtatagctacccaaaaaatcaaaatcctggtgagaatcttttgtactattctccaatatgttctcttctaatggctc

SEQ ID NO: 20555 - DNA, 329 bp, Oryza sativa
  unsure (1)..(329): unsure at all n locations
tgcatacgcangagtntatttaccactttcagattattccctatggtcaaaagtgaatatatggtttaagatgttgccacctcttactaagagggaagttgggaggcaaaggaagaaccaaatagtcgggtgccttgataagggcaaggctaggagcaaaggcaagtggcaagttcaatgtaagagatgtcttgccatgggccataagtcgacgtcgccaaaatgtcctttgaatggaacgaagaaaaagtaagtgtataaattggcatttgttttagttctagcatatttatttgtttcagatctatcanatatatttgttttacttt

SEQ ID NO: 20556 - DNA, 391 bp, Oryza sativa
  unsure (1)..(391): unsure at all n locations
cgttcgtactccatcctagcatgaatgaactatatggtccgntcatgttgcgttatcggcccgccactcgaagtaactctgactgtgtctattcattgtacgaattgacatttccttacattctcctatgtacatcaaatgtggggatagttaagttaatgatatgaccgaggagtgatgaatagaatagttgtaattaccacaaaatcattgtcgacaatgtttggacacacgaaacacctttgtcctcgagttcagtgccttacggaccttatgacctgacaacggtcaccacaacgacactctggacgctcacgccacgtggggagtccttggggatttacctgccattctaaagcctcagcagcaattcgacgntcatgctcattct

SEQ ID NO: 20557 - DNA, 202 bp, Oryza sativa
tgctgaacagatctattcaaaggacagcttattttactaatcatagcctacgccatactcgctcgccgacattagcacgtactactcatagtatgcttaccgtaacaacacgcagcacagtgggatagtaaaactcaaatgataaatggtgtgcttacagagagtctcttcatggaggaaaccaccggatcctgcaacgccg

SEQ ID NO: 20558 - DNA, 448 bp, Oryza sativa
  unsure (1)..(448): unsure at all n locations
aactcagcttggatgttgactcttcatggagaagaagcacacccagtatgagtatttataggctggatatcatctcagctcactgtgattaatgcaacataaactaattgaccaatggcagtagtagtaaccagttggtgattaaacaaagcacaagttggctttatgagaagccaagaaccagtttaccttttgctttttattactaatctgttgcgagagagagtcactactctgtgagaggaatactaataactatattattctacattgattccatcatgaattgtaagagctagctatagctagcaatgcatgatgcatctgctgttggtgaggatgattggaattggagaagcacgagaccgtaaacngcgttcagttttctccgtgccgacagctgttgcttgatcgatgcaagcgtttgaatgacctttggatctgacac

SEQ ID NO: 20559 - DNA, 373 bp, Oryza sativa
  unsure (1)..(373): unsure at all n locations
agctngtcttgcgcaattatatagtcatcctctattccagcaccttaccaattcttcaagagataacctgtgataaaaaggttgagaatcttgaagggatacaactggagattagaaaataaatgtatgtgattgaaagtatgaataaatcacatacactatttctatggaagaagtaaaatatcctgtattcattttctttgatattcttggcgttggcaatcttcttggcatacgcgttgaggacatatgtatccaccacttcgcttggtgaataagatttagacaatgatgaccatgtgacttttacattgttcattagatcttgcaaatttctgtaccacacataaataagatgaatgctgttagtaat

SEQ ID NO: 20560 - DNA, 403 bp, Oryza sativa
  unsure (1)..(403): unsure at all n locations
ntcggtttctctcttatagaagttgaaggatacatatgttaaatactccctccgtcccataatgtaagagatgttgactttttcttacactgaccactcatcttattcaaaaaatttgtgcaaatataaagaacgaacaggtatgtttaaagtactttggataataaagtaagtcacaaataaaataaataataattctaaaatattttgaataagatgaatggtcaaaaaagtgcaagcaaaaaatcaaaatcccttatattatgggacggagggagtatataagataaaaaatcttcatctgttatataattaattaagacatctcataaattaaaataggcaatacatttactctggaggcctagaaatcatcacctanaccagagaaaaaaagataaat

SEQ ID NO: 20561 - DNA, 451 bp, Oryza sativa
  unsure (1)..(451): unsure at all n locations
tatgtgtatctctctgcattccaaaagactgatggatgtgttaatgaccaaanggtagatcttggatccatcaaaaacttctttgcgtggctatctagcaaggtagtattgatggacaaatagatggtttacacaccagaggacatatcactatagcgacgagcacataacgagcatatatntgataaagatacatttcataaatttagcattcattcttcacgatgttctatatcagtagtagatcatgctgtagtagggtctatgccaataaggttctttatctacgcccataagaatatttcactctttttagcttaagggctactactataatgtgagatctagctattgtaagaacacttcgagcaatgtaatctgctgtggaaataacacaaagaactgttaaaatcttcacctcttaatactggcaaatagaataactttgtat

SEQ ID NO: 20562 - DNA, 398 bp, Oryza sativa
catgcaagcttccttttgaggataacacatttgatgttataacctacgtggtactatatcttatacatgataagttcagcctctgataatgaacaattttttattatttcacaatgctataacccatatggcacaagtagccaactaatattatattttggcgcctatcggattgcttctatgatctgacagcatagtttgagtgtgcgggttatacggttagtgtagactactttgacaataaccaattgatgttttcaaggaaatgagacgaatacttataccaagtggatcggcctaatgaggcaatacatatagtaactccattattcatgataatgtgattaactacaaatccttgtttctattatataaacctctttactagatcgttatat

SEQ ID NO: 20563 - DNA, 443 bp, Oryza sativa
  unsure (1)..(443): unsure at all n locations
tgaacaacttcacccataaatgggcgctgatccacctcatgctgcacgcacatagaagcaatagctgctacttttgcaatgctatcgaataggatgctatttccaagtgatggatcaattattgtttccaagccatctctgctagtaagaaaaggacaagcccatgcaactaaattttcttgccctggaggtctcaaaatatcccaccggttccttctcggtagaagctcaaggaggacgacaccatagctgtagacatcactctttactataagatgcccagtcattgcgtattcaggagcaacatacctataaagagttcataatctttttaaggtgaggatgttaaccaactacaggtagtaagaatataatttcagatcanaacttacccgaaagttcccataacacgagttgaaatatgctcattcccctcacctatg

SEQ ID NO: 20564 - DNA, 448 bp, Oryza sativa
  unsure (1)..(448): unsure at all n locations
agctntacaccattgattccgatggtgatgcaagcattcattgatcgagagagagagaaccaaactgtctctctntcattacaccacgcagacttccatgcccagtaacatttggctagcccaaagaatcgagcatgctcgaagtacgtcagaagctcagagcaaaataaaaataaaaaataccagtgattcttccaaaattggaaacgtctgattccagagatgcagtaaccatgacaaaaatcgaagtacaggggaaacatggagaacagataacggaatcctttcctggatatttgatctgtatgagcaaaggatgagtcatcagctgctcgtccttcgtcatgagaatgctctcacatttgtagatgtacaacttacaagtacattgtctactacagctacttcgtctattttcacattctggacatacaaaatacaactgagc

SEQ ID NO: 20565 - DNA, 249 bp, Oryza sativa
ttgtgttctaatcacggtatgtcccaaagttatttttgacttttaccgcgtcattgatggagaaaccctttggccacttgatgagcggtcctgacgatattgatggctggctcactgggaaagaaaaggtgaaggccaactctctctgtcttccttctgggaagtggaaatcaatacctttaatattaaccaattttgaccatgcagaagcaataaaatcaaacagttcctgcctttattgtcagaaaa

SEQ ID NO: 20566 - DNA, 458 bp, Oryza sativa
  unsure (1)..(458): unsure at all n locations
cttaagtcacctgaggcatgcaagctgactgccgacggagccaaaggggcacaatatatattttccttgctgaataatgttcaacttacttgctntcggcacttagaaactgagagatcttgtgagtcaagcaccaatcatccaagaaagcaaagactaatcgacgattagtcggcgcaggccactagttcgtcggtaacgtacacgtacggaccaaacctatcaggtatatatgacgggtttattgcgccagtatcagtatgccacacgttagttttgtatgacgattcttcttccacacgancgggagtatagtagactacaaattatatagacacagtacttgcatctatattctacgttatcagatatcacaaacagtggattattgccgaattcatgccgtaccatacgggcaacatatagaaagatacatcggcattcgatcgttgactttc

SEQ ID NO: 20567 - DNA, 429 bp, Oryza sativa
  unsure (1)..(429): unsure at all n locations
ntgcccatcttctggaatgccttccgcttgagcctatcctttgcttcatctggaaatgtgaaccatttctccattgccgtccaagctcactctttctcggcttctgtgaccttgccgatatctttatggaggatcccgaagttctcacgtgccgccagcccgcagtagttagaccatcttccaatgacagacctgggcgccgtgggcctaccactagcgtcaacctctcttataactggcactgtggtcggccatatattttgtgaccgcggatttctactcgacctacttgcagttgtcccgcctgacatcgacggatggtggttctgcggcaactctgcagcacaaacagaaagcaacatatgcttaggggtgctagctaaaaattatgtggtcatgtggtgaaaatttatcctataaattactatg

SEQ ID NO: 20568 - DNA, 486 bp, Oryza sativa
  unsure (1)..(486): unsure at all n locations
agctcgcatatacaccatatcgntaaatacatatttattcctgaggcctacacactacaaattagcatgtatggcaaagaggtgcatgaagacaggtaatccaccaatgacaggtgattgaatcaattccgaatagaatcaagctcccaaaggaatatataaaccacagctntacaaataacgcaaagattcatgagccacagcaaaatagccctcggcttgattaaaagaattaagaatcacacgccttataaatataggattatctattccatgatagtcttgcgtgtctttcttcagagtaatggtactacacctgaatagaaaggataggacagcatcttgattctactctaattccgatgctatgtataaaagagggcatgattatctaccattccagcaacttctgcctatgacatgctacaacacttaataataccgttacagagtagaattataagtaatttacttcttgattgccta

SEQ ID NO: 20569 - DNA, 462 bp, Oryza sativa
  unsure (1)..(462): unsure at all n locations
ggggagaggcaaaagagaagacaaagatagtgagaagaccatcatcatcatgcccaacaacaacaagtcgaagggatcataccaagggaggaagatggagaatcttatgaaggcttttcaacaagtttgcgccgcttttgagccactaagtgatgtaaatggtgaaagtggagatgatgataagggaaagaacgtctccgatgtttgcttcatggcgcgtggtgaatctgacacagagtatgaagataatgaggtgagtgcttttgaggaagctattaatattttgagtgcaaaaaataaaaagtgtgagaagatgtataaaaaacaagaatttatcattgaatctcttaaatctaaaattgataggttaaaatctcttattcctaatgatgatgattgtgaanattgtgaggttttaatgaatgagatttcaacaattagagatgttaatgctacacatga

SEQ ID NO: 20570 - DNA, 393 bp, Oryza sativa
  unsure (1)..(393): unsure at all n locations
agcatggaaattatgtaactctatattttatatatgatgtggaacttaaatacatggatattttgatcagatgacagtcacacattcctaacaatcatattttatagatataaaaataccaaaatacccgtcagtaatatcttaagcatgacaagttggtaagtatagaatagattcttctctatgtacaaacaagaacccttcaggtatctggactgaacgagtgacttgtttcgctaatactatagcaacttattcttgaanaatttcaagttagcacctgggattaactgtcatcttgagaccgtctgcagataaaccagatgcagtgccagctggattcttatcttctttgctcggcgctggatgtgagtgccatggatacaatattga

SEQ ID NO: 20571 - DNA, 471 bp, Oryza sativa
ctgtggtagttgctcttagttgcgtaactgcaaaagtttgtgccaaattataaatggccgctcgtaaaatgtcccttacacgaatcgccaccatgcaggtcttgttaatcgcttaattactcacatagttaagaaaattgcgttcgagaaaaaaacatagttaagaaaattattgtattttaaactgtcagtagagtaaactatgggctagacagcaacatttttcgacaattctgaaatcataatagatttttttcggttgaatttaaactgtttttgcacacccacccacagattcaccatattggcgtggcggtaaattccgccaattttattttttgcggcgcgaacgaggtgcatgcaaacatgaattgaaccaagcccggatctaccgccgccgcagcagcacggacaaaaaaataaaaataaaataaataaataaattaataaaagcgcgccaataattcatca

SEQ ID NO: 20572 - DNA, 482 bp, Oryza sativa
  unsure (1)..(482): unsure at all n locations
agcgtcctcaagatagatgagatatcttctcttctctctcttattgagaaaatctcgccatttgaactgacattgggatggctatttagcaaagtctcaaaccacccacttgctgatcttcgcatataaatgataacaaaaaaccgaactggagtacacgcgcattcccccctgtcaatgagaaaatattgtcagaatgcacatganaaatataacaaaggacatgtataatgtagcacaggattaacacaagagattctatctagaaaattacctactgtaactcgtaggttctggaaagtgcacatattgcatcagctcattcggaattgatgtcttctgaaagagttttatttgtcttctcactgatcaaatttcttatttctaaacatttgataaaggaaagtacaacgtaaacccaatatgcaataagaaacagaattgacgcgaggaaacatgtccttcgactttaaagctaccct

SEQ ID NO: 20573 - DNA, 462 bp, Oryza sativa
  unsure (1)..(462): unsure at all n locations
aaactcaagcttgctgagaaagagtatgtgaaactgatataacatattaatttagtctattttctagctagatgcctgttcaaaattcctgaataaaccattgacaaaagttggcatgcaaaactttgttctaatagttggtttagcataagtgacacacttggtgggctctttcctgacaccctcagtaagctgtgtgcttaaattggcaggttgcttgaatgcattatctgctagcagagctgcgtaactccacttaactcaattgttggacatgccaagcaagaattatgatctattaaacccaccaaattaatggtttatagattaagtattatttgcttcccctgttattntgtatctaatgttttggaatctacctggtcaaacattgctaatatgtttaaatntatcaagctggagaaaactgtgccaatagatttgctgtaaaaataattttgt

SEQ ID NO: 20574 - DNA, 336 bp, Oryza sativa
  unsure (1)..(336): unsure at all n locations
aaccatcataattgccacaaccgccatgaggatccacctatcattctccgaccgaatttggaggcctgctaggctggcctaggttcggcggaaccctgccaacgacgcctnagctcgtgcctccacgtgtacgttcaagatgcttccgtaatgacggtgtggggcatttncgacaattccaacccgtttaactgtcattggaaggctatataaaggggtcactctattcatatctacacaccttaagtaagaagctttgatctctctctcaagtctagtttaatgctctagtgctaagtggagtacaacataatacttctcagagtacttgagtct

SEQ ID NO: 20575 - DNA, 415 bp, Oryza sativa
agcttgcttacgccctggagatggcttcgcgcaagcttatacactacttccaggcccacaaagtcacggtgccatcgtagtaccctttgggcgaagtactccggggcaaggaagttactggccggcttagcaagtgggcggtggagctatctcctttcgacttgcattttgtcactcgcactgctatcaagtcccaagtcctagctgacttcgtggccgaatggacaccggcgttcgcccctgagcccgagcccgtcgaacaaccctgggtaatgtactccgacggctcgtggtcgcatatagaggcgggcgttgcggcagtactcacttcgccaggggcgtgccgattcggtatgccgcatggctgcagttcgacacaaccaacaatgcggcagaatacgaagccattcttctg

SEQ ID NO: 20576 - DNA, 443 bp, Oryza sativa
agcttatgtcatttaactatcttacacaatatattatacttattattatcatagtaacatcccacaacaacgtgaacggcttcacctaatatgggtataaaatttctatctgcctacacaactgcacgaacacattctaacacaatatatggttgtaacaatatgatccatctaaccaatgaaccgatcttttcaatgaacgtaaacgcttataaagtgaggattaccgtgtggatatagatttactcggagaagaggacaggccttctactcaaggcatattcattgctctgatttcacgatcatgagcttgattgaaggggcctaacaaattgataagtatgacgggttgatgcacgcttggttcaattggacaataatatatcgacacagccaacacagtagccaatgatctttataaatcataagaatagactatgtga

SEQ ID NO: 20577 - DNA, 259 bp, Oryza sativa
tcatgcgactaacaagtaaccaccatgcccgattgctgtactggctgtcttaaactaaatccgtatacgaacaccaacaccaggccagcccaacaatagaatgcactatttaacggacaatatgagaatattattaattgtattgctcagttgaagacttgtagcctcatcttttgcactgcaagaagtactcgtggtactcatggcttaaaactcttcacgtcagattggctgccgcacgtgcgtgtgtgcaggttta

SEQ ID NO: 20578 - DNA, 395 bp, Oryza sativa
  unsure (1)..(395): unsure at all n locations
agctggtggagtctactttcagatgggactgactattcatttgtcgggtgatatttaacaagatatcacccaaatttttctacccttagatntacattcaacgaactacaaaaagaacataaaaaaaatacatatttacttacacatcattgttatcaaaattacaatgcacttacatgccatatcaactgaatttacaaatataattctagttatataggactggtattttacaatttaaagaacataacaaatacatatttacttacatatcattgttatcaaaactacagcgcacttatatgtcatatcaactataattacatatgtaaatttagttatatatgacatgtaatttacattctagagaaaatacacacatatctcttacatat

SEQ ID NO: 20579 - DNA, 462 bp, Oryza sativa
  unsure (1)..(462): unsure at all n locations
tgatgaatgaagacaagcgctgccgccctatgctatttgatcttaatcataccgaaaacaacaatcaggtgacagagaagtgcttcaatcatttcattttattgttggtagtggcagctagaaatttttaagttagacatatttcctgcataaaacagatttctattccatttccatcatttaatactagggtgtacacaattaagttagtttattccattntttagctcttacttaacccttacgttcataatacataaaataccattttacctcttatatcaaatattgaagtgccttaacaacccaatgtgacagtagttctggagcagctttactagaatggttaatgatgatactgtcattgtaaagaatgatgctgaactatgtaaaggtaaataacattgatccggaaggatcacttgaaatatctgaagctaagtcttagatgagctggatatg

SEQ ID NO: 20580 - DNA, 287 bp, Oryza sativa
gttgaatattgcatccacgctctcttccatacctttccgatggatctggaagagcaaatgtgtgatgaagataaaagttttcatatggcttcttttctctgatatgctgaacacgagagacatgttggacacgagaaaatacgcccccctaaatgctgatcttacttgtgtcttatgccctttgcatgacagagaaactctgtctcaccttgtctttcaatgcccttttagtagaaaatgttggcagaagctgggaatatcttggaacacttctctagaattctttc

SEQ ID NO: 20581 - DNA, 420 bp, Oryza sativa
  unsure (1)..(420): unsure at all n locations
tccctgatggccaacggaactgttatacattaccaaccaactgttgccagaagtatctcatcagagccaccttcacttatggaaactacgatgggctcaactcgtcagagaagggttctttgtttatctttggactccatatcggtgtcaacttctggacgacggtaaacttgacaaagtgggatccatccagcacggtatggaaagaggtgatcacggttgctccggacaagtccgtatctgtctgtctgataaacatgggatcaggaactcccttcatatctacactagatcttangcccttgcaagacacaatgtatcccttcgtgaatgcctcaacgtccgtcagctatttttctcggataagaattggatcggttgatgaatacatcacaaggtgagatcgaanactgccggttc

SEQ ID NO: 20582 - DNA, 312 bp, Oryza sativa
tcaacattgcggccgatctgagttgagaagcacctctgaattatgcgttggtagggtgctcccgcgttcttcaattcaaagggcatggtgatgtagcagtaagccccaaaaggcgtgattatatgacgtcttctagcagtcagattcttttagtccgatttgatgatatcccgagtagcaatccaaaaaactgagtatctcgcagccggccgtagagtcaactacctgtgcaatgccaggtaacccaaaaggatctttgggacacgacttttgaggtcggataatcacacacatgactattgcccggctttt

SEQ ID NO: 20583 - DNA, 297 bp, Oryza sativa
  unsure (1)..(297): unsure at all n locations
caccgaccgctttttagtggctaaaggatattttgaaataaaaggagatatttgaacagccaatgacatttaaataacctcagaaatcaaaaaaatattaaatagcataattggtatcaaaatgtatattttgaaattatatgaatttacgtgccaagtntcatcggaatcggatcttcgattaggagatactaaaagatctgcacgcctgttggcgcgccaccataattaacctggaatatggctcatctgtaatatatatagaaaattccgctacctctcatttattatatttta

SEQ ID NO: 20584 - DNA, 447 bp, Oryza sativa
tggacagaagcccgtcctgccgtcctgttagttgtgttgtgtgataggtactgacacgatctccccctttgcagtgccgtggaggtacttctgggcatgacaacatgtgtggaatcgtgtcttgtgggtacagaggtacatctctggccagagtaaaactattcgaatagccgagcccgcggttatgggcgggctgagtaatgtttttcgtaattagtctcacacctctcacaaataattattgatgcaataactggtaataatttattttgctcctggtttggagatagatctgaacagccgggtatggttgttcaggatggttgggcctgagcagcatgggtgtgctgttcagtgctgaataaaacatctaattaattactctatgggtttactactcctaacttcttgctaaatgctggcttcgcagatgagcctatattatgc

SEQ ID NO: 20585 - DNA, 473 bp, Oryza sativa
catgcaagctttacaccattgattccgaaggtgatgcaagcattctttgttctagagagagagaaccaaactgtctctcttccattacaccacgcagacttccatgcccagtaacatttggcttgcccaaagaatcgagcatgctcgaagtacgtcagaagctcagagcaaaataaaaataaaaaataccagtgtttctttcaaaattggaaacgtttgattccagagatgcagtaaccatgacaaatatcgaagtacaggggacacatggagaacagaaaagggaatcctttcctggatatttgatctgtatgagcacacgatgagtcatcagctgctcgtccttctgcagcagaatgctctcacatctgtagagtacaacttacactacattgtctctacagctacttcgccattttacattctgacatacaaatacaactgagcacctgagcgtgcttactctgcacttt

SEQ ID NO: 20586 - DNA, 277 bp, Oryza sativa
ttcatgtgttaaagaatgatcttgattgtgttctagtcacggtatgtccaaaagttatttttgacttttaccgcgtcattgatggagaaaccctctgtccacttgatgagcgttcctgacgatattgatgtctggctcactgggaaggaaaaggtgaagcccagctctctctgtctcccttctgggaggtggaaatcatcaccttccgtatcaacaaattttgacaatgccgaagcaatataatcaaacagttcctgcattaatagtcagaaaatac

SEQ ID NO: 20587 - DNA, 424 bp, Oryza sativa
  unsure (1)..(424): unsure at all n locations
ngttcgggccataagggtcaaacgatcatgtaagattcgttattttttattacccgctagaacgnattaactaagctgtgtaatccgaaattggttttcccaatttcatggctgggggctaagaactcgctgcttcagcatagtttgttataagatataagctgcctttgtgaaaatacgattttccataaagacagctaggggctaggaagagtacagcaaactccgtctagcttatggcagctttggcgagagtactattttattgtcacacacagatttaatttattttcaatatgttgattcatattttcaatttagagtatataactcccaagcgttcgctcaagggcttttctatctggtggtttggtctaactaattgattttcagaaagtcaaatattcgagatttgtcgcatact

SEQ ID NO: 20588 - DNA, 429 bp, Oryza sativa
  unsure (1)..(429): unsure at all n locations
agcttgcagaagaaaaggcagagagcaaatggcgcttctctaggaattctccaagcctgaatgaacccgactgcctcttcttttgatgccgatcgttcttccaacagaggtgcactcatgtcatccttctcagcatccttctcatggatatcctcctcgattccaatcatctccggaccgacaggcaagaacagaaacactgcatgcccaacgactgcgatcatcactccaaggactgcaaacgaccatgaccatccaaacttcaacattgcagctgcaattaaggaaccagatatgtttcccacagatgtatgagcattccagattcccattatcagcccttctttgctctctccanaccaattaccaacaactgcaaccacagatgtgcagccggatgactgatacatgccacccatcatctgaaca

SEQ ID NO: 20589 - DNA, 446 bp, Oryza sativa
  unsure (1)..(446): unsure at all n locations
ggcattaaacacctanaattcccgtgacttgctgagtacgatattactcacccttgctctatataaatatatatagntcctccgccttaaagagaagatgaagtggagtgaagaatatggtttcgtcctggttcccagccgtcgcctgtggtgttgggtgttagtccgttggttccgctactgctgctgttgttggtgtttcctcgtccgtgtcgtcggttgcattctcgggctgttctgagctgcaacctatgttaaggtaaataagtcctctatttattttaaggattgcaatgattcatatttgtcaccgtgggtaccaacactatgtcctgtgactggtactgtgatcgcggtttcgtaagaagcggttcgcgccgtttttcctacgacacgctcctgtcangtgccgttgtacggcggtgccggattgggagtgacaagaa

SEQ ID NO: 20590 - DNA, 404 bp, Oryza sativa
tggacgaacggattggtgccaagagctggctcaaaagtctctatgttcttgtcaaacaccttgtaaaatggcaacaacatattacgggtggcatcaccgttccaccgcagactgttccaccattgttcttctccacggatctgcttcaaccgagcaaagccaccgctgtctggctggaactggaacgggagctccttcagcaatgggcagtcaaacacatctatgtattccaaacaagggcagaccatcttaaatgtgcagattgattccaagctcggcaggtgcgttaactgtaatatcctgagtcttgacaggcaatggactctgctggcatctcttctatctacattttctgcgttggctaagaccgagttaagcttgctgcagaatgacagatcaagatg

SEQ ID NO: 20591 - DNA, 461 bp, Oryza sativa
  unsure (1)..(461): unsure at all n locations
atccttaagtcacctgcngcatgcaagcttagtcgcatctagctgtcttgtagaaaagaatatataatagggcatgggtcgcgtagcccataatatggcccagaacgattaagtcgaacttctaagtaacattatcttcaaagtggcaagctatgtataaagcaacaatacttgctcaattgcagtttgctaatctcatattaagacccatttaagggtggtaatgggcacaaccttttggccctacaaatgtaagggctgggtgtctgggtataaaaagggttgcgctgaaattattagattcctagctaaaatattaatgctcagatgtgtgtgaagggcccgaggccctgcccattcccccctaacccatattatattaacttttgcatctcatagctaagaatacgctgatattctcttagggtaacactcattttatgtccctcttttccttggct

SEQ ID NO: 20592 - DNA, 460 bp, Oryza sativa
  unsure (1)..(460): unsure at all n locations
actcagctcattccgacctgataagtttgatattgcacgggtgagtaccaatcgtactcaacaagccaccacagcaacaatgcacatgacggtgacgcgacggcaggcggcgatggtgacgtctgcacggctcggggcggctagggacaggcgatggaggaggggcaaggctacaaaaccacatcgagcacctagagtgcaatgaacagggtctttttcctatttttctcattntagtctatttcttatataaaattggttccacaatttctaatttttgcatatatgaatttttctcaatattggtgttatctcaactaatgaattcaccctagattaatattactcatattntatttatataaattatttgaagttttaattaggggtaattcttattccatcgcattntaatgtaattgatacaaatatgatcgngataatcatttatttatttcta

SEQ ID NO: 20593 - DNA, 482 bp, Oryza sativa
  unsure (1)..(482): unsure at all n locations
agctngactaganagcagtggaaacttacattcctgtttttttggatntaaattcagcagagaggagccaattccagtgtccaagtctgtgctacttatagtaccatcagaagaggctgtatatagtaatccatcattggtagtgtcaaacctgtacagaacataatcaagttgcaatattttatccttggacaatagaaacaaacaataaaaactgtggaggaatagctcttacttcatgctgttgagaatgcaagaatgcacagaatcataagtaatcttctcatgcaacttgacgtaatcccaaacacctaatagtcctttctgtgtgggcagaacagctaagtatggtcagtagttgcatatgttccagaactgcaactgaacttgataagaaattaagtggacaacatagtccctagtacggagtatggactgtaataccttgtctcctgataaaagcacattattcttagttggat

SEQ ID NO: 20594 - DNA, 420 bp, Oryza sativa
  unsure (1)..(420): unsure at all n locations
tgcgttacataataataattggtcattacataagtctctttcttttcttcagaaagacatctgaccactgttctgattaagattactaccacgtttgtcaagccatggatttcacaaggtttgcagcacaaatagtttgttactagcttgcataacctagtgacaaactgacaatcgagtgatggtgtgtctcttgaatcatttcacaggtaaatctgacaaatgccaacttggaaggggcacttgccacaggaaacacgacgttcaaaggttccaacatatatggagcaggcaagttactggtcctgtctctctgatggccatgcccaactaaatgactccttttatctgcaaactatcggattgttgcatattaatatgaacaattattatttnttcaatctctaaccaacctcttac

SEQ ID NO: 20595 - DNA, 400 bp, Oryza sativa
cgagcgactccactccacaggcattccttgtctgctgcgaccaaaccaactttgacaaaacagctcccactaggaagaacttcagctctggtgcgggggaaacagagagcaagactgagtactacccactgtactcagcaagtcataccggaaggggaggtatgatgcacgatataaccaaaggaggccagagggctctttgcataaaactagcacttacaagcagcagctgaaagcagttaaacagatggagcaatcaatcaatattaaccaaacactgtccaacgctacaccacggttgcaacatgcccaaccaaccacctgaactacaccacgtcattaagctaaactaggggtgagactaatcacagcgacactagttgatcgcccataaccgccg

SEQ ID NO: 20596 - DNA, 363 bp, Oryza sativa
  unsure (1)..(363): unsure at all n locations
agagtacttgcctgatacccttgcacataaatgacagctcgcaatatccgtccttntttaccagcactgctcttcagtgccaaagaatctccttgtagtttaagtagtacaatcgtatctctttgttctgaagaatntgttgccaaatcctcgctagagccatgttgcggaacaaccatgacatgttgttctataagaacaacaggaacacgtgaaggatctgcatatatttgcatatcttgaacggacagcgtgttgatctgcaagatgctntaaatcagtaaacgattctaaattaacaagcttttcactcataaaagtattccacaaaaataacaagccgaaccttcatttgtgctatac

SEQ ID NO: 20597 - DNA, 341 bp, Oryza sativa
cacatagcaccacgccgatgcgcacaataaatactccttaagaacaaggacatatgtaccgataattgaagagctatgggaagagataaatcggttccttcaaggtcacaccaagggggttgacaatctaatgagatctgcggctgcatgttcctaaaaaaatactcaatctggcaaaatagatgtgcacgacatcttgtgtcaataagattagttaagatagatacacctactcaatcaataccgacttcgctttcttcttcttcgctgcgccggtggcgggagcttctcaaaaagggcacaccgaagagaagtcctggttcactctctatgcgtctctt

SEQ ID NO: 20598 - DNA, 312 bp, Oryza sativa
agctagacgcaacctctatctggcgcgccaactgtctttacttgatttcggcaataataaaaggtgtggctatcaagcttggaaagagtatgggtctggagacaaaagatttatacacgttcaagccttcttattcaagaagaaataccctactcctgtccggggatgaatacgccgagtgtcttcttaattgaatgatttggagaatatcaacatgtgcccctagaagcacccggacctcccttatatatgggaatgagtccgtgttacaaaagataatctatatccctaacggaatatgcatatacagat

SEQ ID NO: 20599 - DNA, 469 bp, Oryza sativa
  unsure (1)..(469): unsure at all n locations
tgccattgccattgccaaccccctccaccctcacctgttatagcactgtctcactccctcccttctcaacccggattacaactctactccgcccgccacccaccgcgttttctcccatggacggcgaccgctgggtctgggtgcggcggccggccgacgaccaccaagaggagcggccgctgaaggtggtgttcgactccccggccgagcacttcacggacgccgcgcccatcgggaacggcagcctctgagccatggtctggggcagcgtcgcctccgagaagctccagctcaaccgtacgtngccgcttgccgttatttctcgggttcttggccctgttgatgctgctcgcaaggcgttcgacgaaatgccccagctggactatgctcatgatagcgacagtcttctcctttttttctttcttatgtgtctcacagctgaatgatctttgagatgataccctttggg

SEQ ID NO: 20600 - DNA, 384 bp, Oryza sativa
  unsure (1)..(384): unsure at all n locations
agcttncttgttaanagaaaaggttatatcgttattttgtatttgcagggattngccatcggctctgcagccttggtgtcacttgcactntttggtgcctttgagagccgtgcggctatctctacggttgatgttctgacaccaaaagtgttcattgggcttattgttggtgctatgctcccatactggttctcagcaatgactatgaagagagtaagcagcgcggcgctaaagatggtggatgaagtccgcaggcatgttaacaccatccctggactcatggagggcacaactaatgctgactatgcaacttgtgtcaagatctcactgatcatccatcaagagatgaccctctgtgcttctgtatgctacccactatcgtcg

SEQ ID NO: 20601 - DNA, 148 bp, Oryza sativa
actcaatgtgtacaatgatgcatatatctcttaacgaattaactaccaccggcaattagaactatctttgggtggcgctagatgaactcatcattaacttgcatgaccgaagtgttatctattccagctttcgaaaatatttgcgcgc

SEQ ID NO: 20602 - DNA, 352 bp, Oryza sativa
  unsure (1)..(352): unsure at all n locations
aattataagcacagaatagggtctcttgcgctacatggacactgattacgtacacaagatataataacccttgactaactctgtatttctatctgtgcctgataatctgcagcatgaggacgctgggaagtcttcaaagagaagggccggaagaacgtataagtacgtacttttggccgaagattttgtactgcacatttttgaatactattcgacgtgcagtgctaagacgaccgcatttgtgctaataattagctgattgacaagaagaaaacattcagatatgatatgancactgatgattaggcagtacctgtatctcaatacacctttgcagactcattccgttgca

SEQ ID NO: 20603 - DNA, 360 bp, Oryza sativa
  unsure (1)..(360): unsure at all n locations
acacttgaatactcagcttctcggntcttggtctctgcccgagcatctaggtctactccgagaagataccagctatagagcggatgcgccccctcagcaagcttatggatgtgcagagcgtcaccggctgcatggccgccctaagtcggttcatatctaggctgggagagaaggcactgcccctgtttaagctccttaaacgcttcgggccctttacctggaccgaggaagctgagcgggccttcactcagttgaaggcgtacctcagatctcccccagtcctggtcgccccggagccagatgagccgttgctactctacctcgtggcaaccccgcacgtgggtagcgcggcgctggtcg

SEQ ID NO: 20604 - DNA, 440 bp, Oryza sativa
  unsure (1)..(440): unsure at all n locations
gggtggcggtggaaaagagaagggcgacngtgagggtgtattcttctctctcccctccctctntctccacatccgcacactgctttgctgctgccgatggcatcgacaagcgtgaggaggcgacngtggtggaggctggttgcggcagaaggcgtgcgccgctccctctccatcgcgcctgagagaggagaggggagagagatgataaaaggggagagaggaggaangagaggagtgaggatgacatgtgggggccatgtgggtcccaccattttttttattaatttatgtgtgaaactgacatgtggtcccacagggtttattatttttcttagatcaaattgccacgtaagcgccacgtctgtgccacgtcggatgaagaccgagtcaaattagccatgtaggcaccacgtcagccaaaactgctatcaaaaccatcg

SEQ ID NO: 20605 - DNA, 222 bp, Oryza sativa
actgcagcatgcaagctagcctgtgggaagagcataatccttgtattgtctctagttcaaatccaccaatatccttttatggaatgtaatccactcatgtcgctcatgcatgcacgctccccgacatatgttagcatcaatcggcggatcaaggactggttttctagctggcttaacgaaaaaccggacggaccatccaatttctgacgagtcaatagcaca

SEQ ID NO: 20606 - DNA, 407 bp, Oryza sativa
  unsure (1)..(407): unsure at all n locations
tttgtgggcgtatcctaatgggaagatggctggggtttaacataatgttagttctaatggaaactttgggatttattaattgtgtatgcaaaacattattttcaaacaatcttcttttatagtatgtttctaatgttcgaagattaatatttcattactttaagcttcaaaatgatttcaatattctggtaaatactagaaaagcctgatacaataatttttcatgataaatggtattagcattttcatataatctacatacttacctgaaatttttagcgaacatcaacatcctagaagtggattgaaaaaaaataccaatgccctgcatgaaaattgtttatatgccctgccattgatnaacataacacgtagcccatgaatgttgtgcgtacattatgcctatc

SEQ ID NO: 20607 - DNA, 468 bp, Oryza sativa
  unsure (1)..(468): unsure at all n locations
gtcacctgcngctgcagcttcgctgataataagcaacattatgtggttttatatctttagactntgagtattctcttatcatttggacactttggaatggttggcttatgttggaattggacacacacctctcttcctctttcaaaacccctaaaacctgttttcggtggggtttgggtgcatgccagttgtgggaagtagcaccccggccactataaggactaaagctcgggcctctgttgctaagcactaccgtacttccacatgtctaatgggtaatgcttagtttgtggctcagtctagtcataaacaatagtacacggattggagatggatgaagtcgggcgtcgatggacattctccacggcaaatgaaggctacacgagctgctgccctggagtctagatgtcatacggcggatggttggtgccaatgcttgngctcaattctgcctgcctgcccgggtat

SEQ ID NO: 20608 - DNA, 452 bp, Oryza sativa
tcagtgtaagcggaagctatactagaagagagattcatcctatgctatgcttggccagtctattagtatggcatcccttctcagacataggaaagctcaatgttttgttgcctgcttctttatatgggccttctctcttggatggtattatccactggtatattgtgaaagtctctacaaagacgaaaggaccccatgccttctttgaaaacgatatccctcttcaacgcttccgctagccctagactcggaatactctgcttaagagatccccctctccggccagagaggatttgagtacaacattgattgcggaagatctttgttcctattattgaaaagcctaactatgcccgcaccggtgagtgcgagctgctttcaagaaatgctggaaaagagccagttacgctatcagtgaatagagctggtgtaagtccagcttaagaccatac

SEQ ID NO: 20609 - DNA, 342 bp, Oryza sativa
agcatatacagtatgttaacgctatatcacacacctcttttcttggctgaaagaatgcctcttcaaagccaaattctttttacaggagaggactagattaccagcttctggagatgcgaatgagctctctgtcattgaaggacagctcacatgtgctagccacataattgaagccattctcatgattaagcagaccattggttgtaggtgagaaactaacaatccttgctctcttatattctggatgatatcctttatttttcacctacaatgctcagtttctcatgctctcaagaatcacaggagtttattgatgcataacttgcagcacgtgtgttacat

SEQ ID NO: 20610 - DNA, 357 bp, Oryza sativa
acctcttgacatgctatagcaatagatatgagaggtttaatattgttcgatggaatataagctgattttgactagaaacgctcagatccgacaataagactagctagcttattagagagaaaatgttcatgacttttgtagcgtgcattgtaaatacacacttacatgtatcgctatgcctcgagcaatggcttattctttatctctatttgctgcggtactctcgagttatagttacacgccaatattcctgctgccactctataataataggaccatatttgttttgagcaaatacaattaaatgtcatgtttggtatacgggaaaatgccataaatacaaaccacccatgccta

SEQ ID NO: 20611 - DNA, 275 bp, Oryza sativa
tgctgcaatatccatgcatattcaccatgtgtactctacgcacccaacagcccaccctgtctattaacaattatcctagaaacctccctatccatctcacatcactgtgctcttggtggctcagaacaactgatagagggacttctgattccagcacatctgaaataaagcttaaggcatcatccttgctgtataattgcatgcatgactctacacctgcaattgaattgtcccgtatggcctcaaaatccttccatgattttcacccatactgc

SEQ ID NO: 20612 - DNA, 230 bp, Oryza sativa
aaataactacgaaaagctatcaaaggaatctattctgccaagagaccaaagacctcctttaccaaacaggcaacgctccctttgttgacctccctcgaaagcaggtacataaatctgtcataaacaaaaaagacctgtattcaatccaaccctatagaataacacccatacctatatgtcaataatccactgaattcacaagacaacttccagctattgatctaaatacc

SEQ ID NO: 20613 - DNA, 430 bp, Oryza sativa
ctaagcttcattgggttgtctcccaagatgtaattagcctgacatgcatcagaatatatgttataaacttactgcacaacaccttcctggtcagatgctaccaacacagcagagcagaaatagtgtgtaggtcatgagtcatgacaaccaaagttatcatagaatgtagtttaaccacaaaggcaagcagtgtgtcacaatgtgccgatggctcgtgacaaaaaaaggtatgcatgtaaatacaacgaatgtttatggtgtttcttgttgaacttcaacatggcaaactggaatttcagtatcttgcaaggttttctgtagttcacctgtgatatagcaaaattgcgtatatctgtaggactgtagtactttccactgcattgcactgctgctgtttgcgatgtgagcatgtaatcactgtaaacaacag

SEQ ID NO: 20614 - DNA, 465 bp, Oryza sativa
  unsure (1)..(465): unsure at all n locations
tatacacttactttctaattgtggagatattgatgcactattatataagctagtttcatgccatttagagctctgaaatgggggacctgtagatactactatgatttcaaatgcatgaaactcaatgttaaatgtacttttttctaaaaaaaaaagaaagatttttgtgtatgcatagccggccatgtataacagctcaattaattaagtgtagcatgcatgttattaatgtggaaaacatttttccgaacacaatggttcttataaatgttgatcaatgtctgttgtataaccaaattaatgcatatatagctacattgatcaaatacccagctaaaaattatataattgaagttaatttgaatttcagttcagacttgtgtgtgcaaattgcttagtcccaaaatgaaactngatatggccaagtttctacacgtgcaactccttgaagaagaaacacatttt

SEQ ID NO: 20615 - DNA, 306 bp, Oryza sativa
  unsure (1)..(306): unsure at all n locations
agcttgggatcactagtccctaccacagcttcaacggtgatgtgcgatataaccaaatctatcatgaatgaagggcttcacccatgaacccaagatttatgataccaaggctgccatatgtgactatggcacaaactattgacctgtcaacatggcaatgcccaccctgtgcattagcccatccagcctagaggaatccatggtagattatgccaattcctttaaggaaccatnttggtgcatccacttgaaaccaattaataaattgagattgagcttaggactccctttaccttcatgataccg

SEQ ID NO: 20616 - DNA, 397 bp, Oryza sativa
tattagccatggcttcatcaccaagtctgccattggtgacgtgtgccctgctgctgctgcttggccgggcatgccaagctcacccttactggccactggagttggcgtactaccgcgacaagtgcccccaggccgaggccgtcgtcaaggccgtcgtcggggaggccgttcgtcaaaaccccggcaatggcgccgccgtcatccgcatgctctttcacgactgctttgtcgaggtgcgtacgttagcttcttcctcttctccggcgagatcgattgatcgacttgagctatgtgtacttagatgtgcatggtgttttgttgtaagggtgtgatgctttcattctcctggacccgacgccgttcaacccgacgcccgagaagctgagcgcgccgaaca

SEQ ID NO: 20617 - DNA, 392 bp, Oryza sativa
  unsure (1)..(392): unsure at all n locations
agctngatcagctgtctgagggccagatcaaatctaatattgatcggctcgaggctcacaagattgagctcttggcacagcttgaagaatgcaacgccgagctggatatagaacacaaaaagctagccgacctcccaaagtctatcgaagagcagaaggcaagacttaaatcggctatcaagaatgttgctgatctgaccaagtctttgaaaatcatccctggaaccgatgctcaagacgcctaagccattgaagaagtagaacagattangcaaagggctatatcggctatccagcactatnttgctcggtgactttttgtgcaatagatcttataaaatttttgtaatcggctaagatactctagtancttactggcttgacaatccttt

SEQ ID NO: 20618 - DNA, 342 bp, Oryza sativa
tgagaacatggagccctgctcaagtgtcaattgctcaggtttgtcccatcatactgataattgggtgctctacttatttgtgttatactccctctatcccattttaatcatcacataaggtttttaaagactttccaaaatgatcatcctctaacaagtgcatctttgtttatttgtgccaagagtaaatgagcatcattgaatgcactgtacgcaactacccaagattaatttctattggtccaactacatgcaatatttaaaacttgatgtaattcacggagcacgaagcgacgtaacaccttaaccaatgagtattaatgcagaatgatgaatgtttta

SEQ ID NO: 20619 - DNA, 423 bp, Oryza sativa
  unsure (1)..(423): unsure at all n locations
agctgaatggatgagacggtgtgaatggcagctttatgtttccgttcttccatccatgggatcatgcagctaaagaaagaaaataagtcgagtctgcgtattcatcaaattaagcacgcagtaacaatggagtgaatgaaccaaccaatttggtcatgaacttccccctgtgtctaggtcagtagagcttcagaatcatgtgtatgtcgcgcgtcctcgcagaaaaggaacatggcgcggctggctgtagcgatacttgtgatattgtggctatgcatggagtcatggtgatgggtgtatttggggagcatttacacgtttgntgctagagagaatttgctggcagccagtaaggaacagtatgataatccattggggtgtaatgcttgttcatcgcgcttatgtcatgttcctagtagttat

SEQ ID NO: 20620 - DNA, 344 bp, Oryza sativa
tagagtgtcataaagatggaagcactaatcccgagaacgctagccgccataacaagtttacctcttggtgatgatcgaaaccgatgcagcttaacccgaaagcaagaactcatcgaaacaaaacgaaagtatagagggtggcgatgcgccgagaatgtattgaacgtgtgttaatttgattacatggggctcggggtctatttatacccgagaattacaaaatatgtccatgtctgacacgactcatatctcttacaaactctaagataccataagtcttcgcgtcagacttttgccaaacatatctctatagaaatacctaaaatatcctatttacagataca

SEQ ID NO: 20621 - DNA, 405 bp, Oryza sativa
  unsure (1)..(405): unsure at all n locations
agctctctcctttgacatctggtgctttgaagatctctgacttaagtggagagtgcaaaggagattcatatttgcaagcatcatgcttagcattctgtttggtgtacaagtaagaactgcgtggcaatgagaatctgttattgcaaaacgtggaagacgaatggctataaaaggtcttgttatgaatgcgaagactgaactcttcgcccagatgagcgagagagatcttgtaatcatatataactctagaatttggtttctggtatggctgcagttcaatcctctttgaagcanacaggtgcaccagatttaaacctatctaccaaaaacttgaatatcagaagcagttctaagacactaagatatcnctcatatcacaattcaaacttgcatacaaactgtggt

SEQ ID NO: 20622 - DNA, 417 bp, Oryza sativa
  unsure (1)..(417): unsure at all n locations
acacacacttatcggggttcaattttatacgggcggagcagaggctctcaaaagttttcgctaaatctgaaagcaacgtttcctggttgcgcgtttntacaaccaagtcatcgacataagcctcaacattacgtcctaattggctacccaaagaaattcgagtagtacgttgaaaagtaggacctgcattctttaacccaaagggcattgtcgtataacaataagttcctatgggaagtaatgaacgcagtttttcctcatcttccctagccatgcgaatctgatggtaaccagaatatgcatctagaaaacacaaaaggtcgcaccccgctgtggagtcgacaatctgatctatgcgaggcaagggataaggatccttangacatgcctctgtaaggtcggtgtagtcgatgcaca

SEQ ID NO: 20623 - DNA, 315 bp, Oryza sativa
caaaaactaacttaatatggtaaaacactgatcgagagagactttaattttttgtctcatatgcaccctctcgaaaattggacagattctgaagcctgctttcaagcgcaaattaaaccatttaaatggcagaataaaaatatgctttctacataaaacggtgtaggtattgtgctgtaaatattcaaaatatatatattttcagtcatagccttttcatatttcaagatataaaagatttgaagtcagtcttgcgtataatctaagccagcgatccttgttaatgcgttatgacgggatggggcagtacgttca

SEQ ID NO: 20624 - DNA, 466 bp, Oryza sativa
ctgaggctgcagcttgccaccgctactgggtttgccttcttccttaagactagatgaccaggcatcagctcgtcggttgaacttatctgttgtaagctgccgaagtgcttgtggcatacttgcgcatgtgctcgagtgcgtcgactctgatcccttccaagagttcgagcgacactccgcgccctttttcgcccctagagaacatcacccttggtgagttaacggcttgctctgctgaggtcattacctcatcggcataaagaagcatgaacgggctaaactcggttggtcttgtggaggtcgtccgaagggcccatagaaccgacagcatttcctctggccattttcccttcgctgccgccttgacctttctttagtgctttagtatctgcatttgacgtcggccgcccattaactgcggtggcgacgacagaaccgtttccagtagtcttgacattcttgactg

SEQ ID NO: 20625 - DNA, 435 bp, Oryza sativa
  unsure (1)..(435): unsure at all n locations
ntgtaagatggtgttgcctttaattatctagtgctctagagtatttgtgttaagtgccatatcccaaaaaaaacttcacccacaacgcatgccctggaggggaaaaaagaacatcgtcttgtgaaaatcttgtaatcaatcctggatcagccttcatataggaacatacagtacagaacacaatactgggtaagtatacactggattattccgtattcgttggatatgatactccaaacaagagatgctttttagccttcccactagcctgcaccaagtggcttggcaaacaaacaataggtgatgctgacacctttcgatggcatcagcacaagtgcacaacacatgttgagttttgagattgtctacctcatccatttctttcttgggagcctgttcaactcattatagatgcattgcatgtatatatgtctg

SEQ ID NO: 20626 - DNA, 274 bp, Oryza sativa
  unsure (1)..(274): unsure at all n locations
ctacctcttcctacgtatgtgcctcccttgcctntacacacttataagtcttaacttatacatatgatttctgatccgtttaaaacatcacattctttacgattaaatcaacaattaaaaactcagtttcgaatatatcttaaatcataaagatattattgtgcatactagaaggatattaaactccctactaacgttctctaactgccacatgacgatctacaaatgcttttaagaactcatgtggcgctctaataagttttggaaaaaatta

SEQ ID NO: 20627 - DNA, 414 bp, Oryza sativa
  unsure (1)..(414): unsure at all n locations
tatcatctattatcacatgtgaatagcgctactntaatttctacaatataattggttagtccacagcactactacataatacccttttggtgctggttgggaaaccccccttaggtgtcggttttccgaaccggcactatggaggcagcactattgattcccagtgattggttacggtttcaaaaccggcacctttgaggcgcttgtgagccaaaaaaaaaaaaagctcgatgcattgagcgcatccaccccccacgttgcccccataatctcaaatccacaacatcaatgaatcaaccaacatcatcacaacgaataaaccaacatcatcatagaaatacagactataaactcccgaatcaaccaatatcaatcacagacctcacacaacagacattgtaagaacaatcaact

SEQ ID NO: 20628 - DNA, 340 bp, Oryza sativa
gagagaggtatcgaaccggtcaccgctaaatgtacggatcgatcaaagatctggtactatgctcacggaggaacgctcaacccaattgatggcttcttggtcttcagcgatcagatacgcgaggctgcgagtcgactaacggacgcagtggaagcctcttctcacggcacgttctgacccgacagagagaacgacgatgctgtctctcgccctacatactccggagcatccaagactaacacgatggaaaggggtgattccttggaagatcggatccaggaggacatccacacgtacacgatgcggatgacgagcaagagagataccgatgcgatgattg

SEQ ID NO: 20629 - DNA, 457 bp, Oryza sativa
  unsure (1)..(457): unsure at all n locations
ntcccatcgatctgtnttcagaattgaagagtgaaacagatctatctcttcagattgggctcttaattatctagctcttcagccagtgttaaattgttattgattctaattaacttttaacatctaattatactatgaataagttcaccaagtcatcgaatcgttgcttcggcgtattagtagatgctagttaaatcgatggcagcagattaactgattaagcatgtataaatgcatcatccaggcgcgccatcgtggaggaactggcgagcttcggcgccacggtgcacacgtgcgcccggaacgaggctaccctgaacaggtgtctggaggagtggagagccaagaagctcgccgtcaccgtctccgtccgacgcgtaggtgcgcgctgacccggaggcgatcgccggcagggtcgccgtcatgttcggcggcaagcttgacatccttgtacgta

SEQ ID NO: 20630 - DNA, 403 bp, Oryza sativa
agcttgcatagagtcaatcatcaccttcttgcatatttgtctgacacaaaaccccaaccagaagctcctattagcataccatcatacactacacttgagagcagactctcattgtcagcagaaatgttccattcctcccgcaccagtggcccaacaaatgacaatagcataatttccatggactctacgacccaccccatgcctgcatatgcaagcacaagtagtaggaatttcgcaaccccaagaattcaagcgctatatccgtagtgtatggttccatggtgacagcgtctgctttgttaaggcaagtctgtaagactaactgatatgacaaactttttgtaaagtaactagtcgatcgatcggctgttcagctgtagtgtgcagacagtatgcaccacac

SEQ ID NO: 20631 - DNA, 440 bp, Oryza sativa
aaactaagcttataagactatctgcgcgttaatgcgcactattctttctatctattttcgctatacggtggcttattgaaatgctatttcaaccacagattctggtgttcttctctgttgctgcaagttctgttgcagaaaatgatctaccacattatttctatagccttattaatgaggagataatgaatgaggcaaagatgaggagggggaggctagaacaatcttggttgctgattccaaagtcatataatgagaaacaagcactggcttgccgacagaagtataaacaagctctgattcgtatttcctcttctgatggagtaaatctaccgggtgtggttctctccacagagcccacttagttccctatatgaaggatcttaactcccttgccttatctacaacgccgtttctattttgggttggtaagaccttct

SEQ ID NO: 20632 - DNA, 286 bp, Oryza sativa
agcttaaccaatatatgattataagagcaattttttatcaacgcgattggcgtcatgaagttgcataaagttattatcacaaaggaaagcataatccacgatcatctagatatttgtcggttaaaagacccaatatcctttgtgacttactgtgcgaatcctaatgctacacatccgtatattaaacacaatcagaacatccgacggcgacgcatcgtacctcatgctctatacccctcgccgatgctcgcttagatcggctcgccttccgccagcgacggacgcc

SEQ ID NO: 20633 - DNA, 301 bp, Oryza sativa
  unsure (1)..(301): unsure at all n locations
cnttcttcagaatataatgtacggatcaaacatgcatatattttttctaatactaaatgcgcaacgccacttgcctatcactaaattgacaaatgaattgacattacaataataaccaataaaaaaaattctgcaaagcaagaatgtatcacaagaaaatcgctaatgcgtcaataccgaaacacatgtctgccgtaaggcatctgatcaatgaaaaagaagatgaaagcagatgctctttcatatttctgaagaaaggtcttttgcgaaatataaattatagagaacctttgacacatac

SEQ ID NO: 20634 - DNA, 504 bp, Oryza sativa
  unsure (1)..(504): unsure at all n locations
agcttcatatgcgatggatgtcatgtctatgcanagagtcaagtatattgtcgggtggatgtgtcacattcatctaaaatcacttatattatgggacggagcangtataaaaatactagtaactgctaaagctcagctataattgggtaagttatggcttatcgatcagtcctagaaaaataaacgaatatagtcaagtattcgattaactaaacccttaaaatcctaaaataacttaaaaagtaaattntgcgcccaataagtcaacaagcatagatgacgagatgttatgctagtcaagttattaagggtgtgctcggtactggaagttgggaactaatgcctcctacacgcaatggagctacttagcacatgatcaantaactattagctactcagcaatcatcacacacaacnggagtattcgttagaaaatggataatatgactcattatagcaactntcgtacagaatnnnttcttttaaaaacacaacgtttagtag

SEQ ID NO: 20635 - DNA, 304 bp, Oryza sativa
  unsure (1)..(304): unsure at all n locations
ataaacttggtgcctggaaaatgatcgatctaactttctggactctgggaatcaaactcaagagttagatgagttcagtacgcatgncatgaatatatcatagatttgaaagcttaaagctttcgtattccaagccgagatgaatgcatccaagtttccagttccattaaacaaccaaaaaagtgctcaaactattcctaaaacattacatctattttgggacacataattaacatttatatagataaagaaagctattgcacagttgatggaatcgcaacaaatttgaccaataggcatatag

SEQ ID NO: 20636 - DNA, 356 bp, Oryza sativa
tctatttcctctcaagcagaacggaggaccgattatacgttctatagaatagcacagagattatatagtgcgggtagcattcatggtacaattccaaaatgggcagattatgctatcagcatatacctataccgctatacccaaccaagtcctttgtttttcaccgtcggtatctacacagatatgccaagtcaaagaccatacctttattactataccaaagaatctaataattgggagcataacttactctgcttttgtacaaaagaacctggctatatgtaaatcttttatgactatgctactttatcatcgtaagtaccggcctactccacaatattcagtgacatcatttg

SEQ ID NO: 20637 - DNA, 395 bp, Oryza sativa
tactcagcttggaacaataatgactcgaagctctgcttgattttttttctgtatggccgccgtcctttgggaaatcggagctgctgcgctattgtgagcttggcatcgatgacccaagtcttacccgcgtcagtcgtggtttgctccagtgtgaggcggtgagtttttttttttcaaggcttgtaggtctttctcgcccatgcaccaataagactagtgatcgtgaagtccgagctgcggcatccacggggcgtgacatgcggcaacgatgacatgagccctcttgaatagtgcttcagcgtggggcggatctttgtccttacttggcgtttctaggcgaagtcggagccgcccgatcacgtatgcgatggtgtgatgacgaaaatgtcagtata

SEQ ID NO: 20638 - DNA, 448 bp, Oryza sativa
agcttactcataaggaatcaaaccaattgtgaagatagcatgtactctgagaattgacagagatgagagtctggctaaatagtcaggcatgtgaaatgccttaatgaactctgtattccgatagatgagatacctcatttacgcagtacatacatgacgtgggttcttcgatccattcaaactctagtgctgatccacttatagatatttctcccttgcatatgctctttgcatggacttctcaccatataacattgcggtgccctaaaattatattactacctacacgaaatcagtgtaatgcacaatctactttgtatggagatatattggactcttaacattgcttatacaaatgattattatctttaggtaatacaatattgctatagtacctaaatggataaatgtacatgaatccactagcactctgattaatgaaatgttt

SEQ ID NO: 20639 - DNA, 373 bp, Oryza sativa
taagtaagctcatcacaacctcttttccactactcagcatggaactcacattgatgttggcatatcttgtgacttgcttgatgatagtgcttcttgtcatattcctcatgttgcatcatctagcatttctacctcttgtgatgatcttattgatatacctagctctagctctagctcttgtgtttctatttgtgatacctcacttgttgttgagaacgatgagcttaaggagcaagtggccaagctcaacaagagtttggagaggtggttcaagggtaagaacactcttgacaagattttgagtgagcaacggtgcatccttaacaaggagagagttggattcattccaaagaagggtaagaaaccttttcac

SEQ ID NO: 20640 - DNA, 323 bp, Oryza sativa
  unsure (1)..(323): unsure at all n locations
tggaccactntttttctcctataatcactgctttttccagcaaaccactatgacatctgcaggtgactctgacacaaataaagctcctctcgaacctccgccgtggcatccgagcctagttagaggctagaaccataggcttgagaccacacgttggatcccatcacttccctgctagaaacattggagtactatcttgaagtcatactgtagttttttttattagatacatacgctcggtgaacacaggtgagttagttcattttccgggtcaaagtttcttgcatatgagataccgagaaacctcttatttgcgttcggat

SEQ ID NO: 20641 - DNA, 445 bp, Oryza sativa
  unsure (1)..(445): unsure at all n locations
ntatcgntctgtgattgatagctcgctatatcttactcgcatctatgccggatatcatgtttagtatttgcatgtgtgcacgggttcaagccacccccaaggagtgtcacttaatggccgtgaaaaggattctaagatatttaaagaattcctcaactattggcttgtggtacccaaaaggttctaagttcaagctagtcggctattccgattcggattatgtcggttgtaaagtggataacaagagcactttcggtagttgccaattgcttagtagatctcttctcgatcctaatcatcttctgctgcttctccattctttcttctctgtggcgtcaagcactgtcccttctgacgatgtcaaccccttcgcggcaggctctgtggccatctcggcggcgacggcgcaactcatcaacattcaagtccacgttcccgtgatcct

SEQ ID NO: 20642 - DNA, 488 bp, Oryza sativa
  unsure (1)..(488): unsure at all n locations
agctctgctaattagcctaccacctgcgtaatgcttttgtcagtggtggctaagaaaggcaagttgtaccggataattcctctgttntatattataagtcatacgattctttcttagttcaagacactgttcagattgatattattntcaaccataacattttttttcgtcaaagttgccaaaaaaagttctatgtctagtttgttatcaaatttataaatatataaaaaatcctgccaaatatttgacaatattattaacttgctaataccaaaatttggtaaggtttattttggctacaatatcaacaggtcccaagttccttaagttgatcaaatttataaaaaatatatcatcatctacgacaaaagattatttctattaaatatatnttaataatacattattttgtattaaaaatattagtataccatctattcaattgattacaattaaagaacaaaactaggagtattaattaatataat

SEQ ID NO: 20643 - DNA, 446 bp, Oryza sativa
  unsure (1)..(446): unsure at all n locations
tggcagaaacaattctacgcacaagaacagaanatcacggaatataattggaagggaataaagggcaacgaagaagtagccaaacaggaattggctaccgcaggcagctctagcatccacgaaatatctgaaaaagaggacaaaagatctacccaaacagatcacagaccaccaacctatcatgaacacaaccacatcctctccaagaaaaaaaaagaanaaaaaagaataaaactcgaacacaagcaaccatcaacaggaggacatggagaacagcaagcccacaacagaaagagaaggggatagcagcaagcaagcaaaggcgagatcgagctccctacctctccctgccgatctcccacttgctgttttcccttccccaagcccgctagctgttatttctcctttgccatgaccttggaggagaggagaaagggagagagaga

SEQ ID NO: 20644 - DNA, 514 bp, Oryza sativa
  unsure (1)..(514): unsure at all n locations
agctccgcgtanacgattcagtacgacgtgcacgtcgttttggtgttattcgggtctatttttcttcggatgaggctgccgtggctcatggcgtggagatatttctgccacgccattgaatgctgctgttgtatactccatcgatccatcgctcgctacaatatatagtattagcgtcaacggctagctcagcaactgcagctgctgatgagtgatagctacgaccaacgcgtgcgtcctccataaatttctcaagcagtggacgagcaagtcctctctgtattaaaatataactacttttaagatattgtctaaatgaaactagctactccatcctgtctaaaatataacaacttctaacccttaagatttgcccataatataataatatcttcaccaatattttcttctcaattaatcacagacctttaccattcatatttctcacttatctgcagctgctcaaccaataacaactgtccgctacttagttctaccgaccttcttaatactt

SEQ ID NO: 20645 - DNA, 442 bp, Oryza sativa
  unsure (1)..(442): unsure at all n locations
taccagccatggtgaatacacggcaacgtcggcctacaatgtgcaactctctcggcaccacagccaccaactttaataacctaatttggaagacctgngcgccacgaaaacacaaaaccttcgcatggctaatcatccaaacagagtatggacctccgacagactatcaaccagaggatggccaaacggttccatatgtcccttatgtcgtcgatctcaagaaactgccctacacctcctcgcgggttgtagatacacaaagagaatctgggaggcaattgcggaatggacggcgtgtgaggggttgaaaccatgtcngtggcagcaaacctccacggtgttaaaatggtgggaggctaccttaaacatccaggaggcacccaagaaggctcttcgcacactgatcctgctggtcgcatgggagatctggactaatagaaac

SEQ ID NO: 20646 - DNA, 452 bp, Oryza sativa
  unsure (1)..(452): unsure at all n locations
ntgagctgtttttgctgctgatagatcgatgctttcaaatgcctttctgaataagcaatntacatttgctacataacactaatagcgctctgtgagggtcatggctcttttaattgtcttctctatatatggcgccatgtatatatcacaaactgcacatactactataacatgcctgcgagtggttgactgtctgagtctttcagagcttgaacctaaccagttcgatctccttggcatgcaggcacaggttggtcaaggcagtggggagtaaaatgttagtgggctggacacgttgagacatgttggcacaatattcgatgaaagtaagaccatacttcctctgtcccggataaaacaaatctagtactggatggaacatattatagtacaacgaatctgaatagagatatgtccagaattgtagcagtaggatatatcacattcagtac

SEQ ID NO: 20647 - DNA, 469 bp, Oryza sativa
  unsure (1)..(469): unsure at all n locations
gcttgttgtatgtanttcataacggtcatgtcttcttggaatcgctcacaaacagtcacaagttcttataagtatgacgttataattaagaagatacctcgtttcgacagtatatacttcttcaccgctgattcattaaactctgatatgctatctacatttgcagattacccatggatgcaacaatcgttacctgatgaactttgggcatccgcgcgttggcaacgctgcattgcatcctacttaccaaatatgtgcccaatacaattcgagtgacacatgagcatgacattgtgccgcatttgccctcatattttttcattcttccagaccaaacataccatcacttcccaacagaggtatgctatctcttgcatataaacatgaaatttgctacttcctctgtgcacaatgtagtcattcagcatttccacattactattatattactaaagccattaacttctac

SEQ ID NO: 20648 - DNA, 469 bp, Oryza sativa
  unsure (1)..(469): unsure at all n locations
ntgcttgcattgcctattggatatatcatgtctttctttgattgttcatgccattattattaagggttttatatcaatcactatcaaaagtatcaatcaattaggttagatctaccaaacttgttattgatctagaactatcttggttaagtccaatcttctaggttataatctgttaattagatttgttcaagtcaataaatacttgatatagtttaatcgaaatattagccgatgagttatctatttattataaattaatctactgtatcgaataatgcataaattttgccataatcggttaagttgttatttctattaatttcaatcttatactgtctcggntaggcccgatctatcaagattgtgattaataaatttagattgctaacaattataagctgggatagcctatattagtttgtctacttaatgagtaatgatagggtttaattgatatatggtacat

SEQ ID NO: 20649 - DNA, 505 bp, Oryza sativa
  unsure (1)..(505): unsure at all n locations
acctgaggcatgcaagcttctctctagcagagactctcaagtacctatacctcctgttctctcctccatcagacatatgcttcgatgagtgggtcttcaataccgaagcccacccatcgcgaattgctcctttaaatgacaatagcaaagcccactcagtaggcattgcaacaccgacggtacgaccgttcgggaggaagcaggtgaaacaagagtagagttgaaccatagagcacaggactttttcatctgccctctgattcttgacctgcctgatccaaggttctgacaggagcactgattctgcctgtagcagtattaaggctgatagtcatggcaataggctgtttatgcaacggaattatatgtagagcacgatgagatattctgtgacacattgaaaccttagagtataaatcgagaccaataaccccatgaaagttatatctctgtacttgttagngcttcctgcatattgatcctgcatgtaaactaacagagtcat

SEQ ID NO: 20650 - DNA, 354 bp, Oryza sativa
gcagaagctattgcggtgaaagctggagatcttcctctaatactgtgacgcactgggctgtgggacatacttctagtgcgctgctgagatatatcttgtgctgcgttccttcctgaaaacgctggagttcgccttttacgtttctggcaacgcataaagaatatatatactgtaagcaatctgtgtggattgaaagagaggccattaagtgtgaatcacgatatacattgaaagagacgccattaagtgtagaacctcaaaaatgaaacagacgccacattttcctggttgaaacgcattggtatgacagtacatcaccaaacatgaactggatataaatgatgcaactatata

SEQ ID NO: 20651 - DNA, 373 bp, Oryza sativa
  unsure (1)..(373): unsure at all n locations
agctngcatgggactgcagaagagactgggcagcatgcttatcgccctttgctctgattgtcaggatctctctactgagactctcgacagcgtcctcaacctttcatggcacaaagttctaatgagaattgacagcatgacaataataatgttaacgaataaaaagagagaaatacctttgtgaaatcaactgagaattttccatcagaatgcaagacaaaagcccctttctcatacaaccagttaaactgcaaagcttgcccttttctgcacacatagtaacagtgatttatataaagagctcacgacagtacagattctatgagaatngagaagtacttgccgtcccttcttttccagaaacataattcag

SEQ ID NO: 20652 - DNA, 418 bp, Oryza sativa
tgaaggctgatgacatgcttgactcttatagccatctgatctatatgattcgctgggtttattcaatgaactgatcactgtgctgttcacattacaattgcctaaaccttatccggaacactagcggcagcgatcagtggaacgtacagtagtcagagtagtgatcagtagtcttcagtttatatatctatatatagctatatatagctagggcttatttctaccacacaccatgcattttgactaggagtaatattaattgtttagccgataaattaaaaatattactattttctagttcatctcaactcaaaacgagaaataaataaatctatctgatagggatggggagatgcgtgtctgaagatatatcgaaagagaagcatgcgaggcacatgcagatgatcgcgatatatac

SEQ ID NO: 20653 - DNA, 512 bp, Oryza sativa
  unsure (1)..(512): unsure at all n locations
atcctctgagtcacctgccgcatgcangcttatgtctctttgacccatagctatctgacttattgagctagtaagttagttctgcccatgccaagtaaaattgacttgtgcctttctggattgtaacatcataaataatcttaataggtctatgagaggtcaatgaagatggaggcagagctgcgagcagtataggaaatgagggcagagcttgcacaggttcgcctcgacattcagaaagtgggtgcagcaaggcaggaactcatgggtcaagtccaggggttcacccatgacttggctcgatcagcagtggacctgcagcaggtggctgcgttaaaagctgagatccatgagataacgcatgaaacacaacatttgaggtagagccttgtaatctcatatgcactttcagtgttctgaaagagagcgatgtgtatttctagtcttcttgctaaaatataatctgtatatgcaaaacttgtggtggtatctatcttccactgaatcatctt

SEQ ID NO: 20654 - DNA, 465 bp, Oryza sativa
  unsure (1)..(465): unsure at all n locations
tagactggaggaacaatccattaggggtacctaaatggtcctagcgtccaaagagtgggtgcagagatcgctggcaggtggctacatcctttgctgaacaaacattttgaaggagatattttgtctgccccaatgtagacaacgatttcgctgtatgtctaaccatatacaaaatccgctatgatttgcacaaaantactaccccaactgaataacattactatttttacagggcaatcccaggatgggtggatttactcgatggatcgacaatgtcactccatcatatcatggccagaagataacagagtcagaaacacaagttgagtatcaacgattgaaggaccacgagaatgcaatgtattctgaccgacctataaagggccgatagggtaccgcatgcttgaatcgtccgaatcgacaaattgtaccgcgtattgatggcacttcttatctatcttatca

SEQ ID NO: 20655 - DNA, 451 bp, Oryza sativa
  unsure (1)..(451): unsure at all n locations
agcttacctctcttgtaatgagaggctcctctctgttgtggaaaaatttgaacaagatacaatatttgcatcatactcctctgtgcttccatttcgagataaatggggaacagaattcagatcattgccatgcaagataatagaataatgtgattcaccaggagttgttcgtgggccttcgattacgtaagaaacatgatgatctctgagcttataagctgctgattcaatgagtgaataataccttgcttcaatgccttgcaaaagtgacacaatacataatatacaatttggaaacatttgaataaacatttgccagaattaaaaccatacaggngaagtatgcacatctccaactttgacaacacatgaagcaatttgtgtcttgcattgttatagttactcaggtcttcattcatatcatcatggaagattccattttgttattaat

SEQ ID NO: 20656 - DNA, 267 bp, Oryza sativa
  unsure (1)..(267): unsure at all n locations
naagcttgcaaagctacttactccatcccgtatgtctattctacacggagatacttcgcggcctatgtcgagagacacaatttgaaatctccattgagatcctccaatcatcatacgcatcagacacccaaacccatatccgctcacagtcacgtatcaccgttgggtcgtcgatacaagntgagcgagagctgcttcccaactcctccgatgcccacaatagggactacagttcttccgtaaaactgcatctggataatctccatg

SEQ ID NO: 20657 - DNA, 240 bp, Oryza sativa
cgagggttttacgcgcgaaattatccttagaattcccgatttgtacatgtgtagaggaataaatatataggcctttggttatttacaaatttggcgtaacttttatccaactctctaattcttacacattctttcggtaacaggtgtaaaatttaaattaagaaattattaaatatggttgggttcttaattataagagacttaagatcttttaaggtgcttggaacgcctaacgttgta

SEQ ID NO: 20658 - DNA, 278 bp, Oryza sativa
  unsure (1)..(278): unsure at all n locations
agctntcttattcatatataggacctccttctcgtagtggcgaatcgcttcccatggttatcctctaatgggtcattggagttattatcttctatagattttcagagactgatgaacttgtaaattctaccaaggatcttctggattgcacggatttcatatgactctattcaattcactacaaaccttctccactatatgtggccgtaggcagcanaacaaatattattatctcatctgtcatcgatagcacacatgcaaacacgcatcactaatgc

SEQ ID NO: 20659 - DNA, 457 bp, Oryza sativa
  unsure (1)..(457): unsure at all n locations
tgcccgtcagatctggcgccgctctgctgggaatgagcttctccaaatcagatagcccttaagcttgtccgtcggatctggcgtcgctctgctcgtgagagaggaagaatatattgtcgccgctcttgctcacggtatctgctcgcgggtgaataaggaaaagataattttcaaattgattgccacctataattaatttcatttaaggtgctggttaaaaaaaatacacatatagtatttgtgcttttnttttctaaaaccgacacctatagtttattaaaggtactggctatacatctttttaattcgtggagatgagaaatgttttaatagggatcgattttagaattgttggtatttatagcggtgttcattcatgatgtcctgccatagtgatggtactagattgtaccatctcggcctagatcggtatatgatagaatgaaagaatatattc

SEQ ID NO: 20660 - DNA, 339 bp, Oryza sativa
caagctagctatgtaccctaccacctgcgtcatgcttttgtcatgggtggccttgaaaggcatgtcgtaccggataatgcctctgcctctgcttataaggcctacgatcttttcttagctctagacactgtccatatggatattatcttcaaccataacatcattattcgtcatagtggcctaatataggtctatggccagattcatatcagacctatcaatatataagataatgctcgcaacaataccgacaatagtgttaacttgctaccaccaatacttcggatggactattgtggctacaatatcgacatgacccaagttcctcaagttgatcaa

SEQ ID NO: 20661 - DNA, 322 bp, Oryza sativa
ggtgtaaagggcgacgaggaagtagccacacatgaattggctatcggacgcagctctagcatccacgaaatatctgggaaagaggacgagagatctaccctaacagatcacagaccaacagcctatcatgaacacaaccacgtgctctccacgaagactatggtatattatcgataattactcttacacaatcaaccatctacaggaggacatgtggaacagcatgcccacaccagaatgagatagggattgcatccagcgcgctaaggcgagatcgagctacctacctcttcctgccgatagtccacttgcctgtttacct

SEQ ID NO: 20662 - DNA, 459 bp, Oryza sativa
tgttccaaaaacttgaagtgaactgactgcctcgatcggacactattttcttagggacgccatgcaaacacacaatgctggtcatatacaattccgccaaccgacttccggaataagttgtgtttactgggatgaaacgagccactttggtaagtgtgtcaactatcacccacatagagtcatggcctgatgacattctgggtaaaccagtgatgaaaaccataccgatttgctcccatttccattcacgaatcttcaaaggctgtaacaaaccggcaggcttttgatgttctgccttgactcgctgacaaacatcacatactgctacgtactctgcgatatcacgcttcatacgtgcccaccaaaatcatttcttgagatcctggtacatcgttggactaccaaggagaatggaatataaagtatcatgagcttctttcacaattgatcttttatatc

SEQ ID NO: 20663 - DNA, 466 bp, Oryza sativa
ttctgaccatcgttaacatttgagggctgccactgtaacacgtgaaccttcttctcatatatcacaaacatggttgcaagagtccattctaatatgcatgatggccacaaagattgtttgctccaaggccacatacagtgtcttaaaatgtagtataaatttgtatgatcttccctctaaattctaaacacggcttttgacaactgacaagtatggataaaaaactctatgcctataaatatgcaggagcctctagtgatatctttataagggatgagtttattgtaataaacatgaatatatgatgtaggcttatacattatctctagattgacaatttaacttctatataatacatgattcatgagtttgaaatgtatatgtagctatatatattacgtctttgtctcatgtgacatccacttcatgcataggcatattctttgattcatcctatgctattaca

SEQ ID NO: 20664 - DNA, 107 bp, Oryza sativa
  unsure (1)..(107): unsure at all n locations
cggacctctaancgactgcagcatgcaagcttagcacactcacatagatagctgcacgtgggattattttactatctcatctactcagcagacatcgctgcgactgc

SEQ ID NO: 20665 - DNA, 334 bp, Oryza sativa
actcaagctggacgactcgcgtgccaccgtgctccacaaatgggtatatacttagcgtggtaagaggcctatccgaggcctggtcccgtgctacatgggttacccctgcatgaggcaggggcgctaccatgggacagccgtggacgtagggcccagaaggctgccctacattggtgtctccatttgtcggacttccattagtatgtgagagagacaacttatcctgcaccatcatttattatgtgtgtgagagttgtctctccctggagcgcgcaaactcctactagatgctataaacatggacacctatagagcatgacgcaacaagttcatg

SEQ ID NO: 20666 - DNA, 422 bp, Oryza sativa
  unsure (1)..(422): unsure at all n locations
agcttaaatatagccatatactcttgttcagtagtagataaggcaacagttgcttgcatatatgccttccaactaacagcacattctccaatagtgaaaacataacccgcgagcgatcttcttctatccatatctccagcaaaatctgaatccacataaccaacaagtccatctctagatctctcaaactgcaaacaagcactagatgtaccacataggtatctgaaaatccattgaacagctntccaatgctctttgccacgattagccatgtatctactgacaacactcaatgcatgtgataagtcaggacgagaacataccatggcatacataagtgaaccaactacactcgaataaggaactctagacatgtactcantatcataatctgactgtggacataaatctgaagataatct

SEQ ID NO: 20667 - DNA, 429 bp, Oryza sativa
  unsure (1)..(429): unsure at all n locations
tcatcgtctatggtgccttctgccccagccatcgtgagagggcttttacatgccaattattacaagcacatgcacacatagtttttttattctcaccgagagggaaaggttcgatgtgtgattagatttttttctccttttggtctataatttcctaagctaaggcaaaatgctcctgtcactgcccttctaaagaaacactgacctcgatagtatttcttgtcacgtatggcaacctgccgtggatacactcgaagagggggaggagctccagttcgatcctcacgcttacaattatctccgaagagttaacattggctggccatgcttgaggtaaaaattatccaccgcagcctttgggcgctccttatatgaaggccatatgagcatcgctcgatgnctattttatcctccatgattataatctgt

SEQ ID NO: 20668 - DNA, 482 bp, Oryza sativa
  unsure (1)..(482): unsure at all n locations
agcttgttcactcttgctggtgcgtccttgtgaacatgacactgatgctacacaccatggtaggagtaataaatacacttttgtgcataatgggaagaaaattactgctacctttgacccctgctgaaattgtagaagctgataaagaatgagctgctagtttgaaacttgatgaatctgaaaatcagcaagtggctaaatctggttttccacctaaaaaggataagctttcacctagttctaaggttgagggaattaagttgaagggtggcgttatgctagcaacgaaatgtgacattgctgatatttcaaatgatgatatgtgctatttcttgatatgcaaacaagccttggtttctttagatgatattgctagttcgataccttctgttgtactaaccttttgangagtatgggatgtcttccagctgaatactccaggatgcacgcttgaaggataacatcaataattgatccagaca

SEQ ID NO: 20669 - DNA, 451 bp, Oryza sativa
  unsure (1)..(451): unsure at all n locations
agctntagtggatttcccttatatattcagaatttaagttcatggggtccacatgccatcctctgctaatatacaaaaaggcccctatggttccgaggaatagaacccgcagtccaacatgtgtctatgccacagtttataaagagtccccattnttctcttgtattttcgctttagtcctttacctacatgtcagtgagtgaaatgtctcacactntagtccttacactttatcgaattcgtgaaagagatccctggcttattcctgtacaggaagcaatacagggcagcggcttggccgagctcgccggcggcgatcgactgcgatttacgcgtgttagagtttgtgtcgaatatgtgtacgtagtcggttatagtttagaacttgaagttgtactaggtgtacgactagagtaagagtcggactctatcctaagatctcttataaata

SEQ ID NO: 20670 - DNA, 386 bp, Oryza sativa
tggtctttgctgataaaatctaatgcagaggagaaatcacattggcactcatgatggatcggctgctaaatatacctggaccacctctgggcactattgatcagatcaagctaaggatgttgaggagcacaacctttgaccgatggtggattgaatggaagaaacacttgtttcaccaatcggcttcgatgtaccttatagatctgttccccaaagctgtccctcaagtaagtatcttatttttgtcaattttatcaattgcaagtcgatgcatcaattctaattttgagctttatatatttttcaggcaacagaatcttctcctccccatcacagcaaaagtggtgtagaaattaaatatgcaccaggttttcttgcaaacagcg

SEQ ID NO: 20671 - DNA, 277 bp, Oryza sativa
  unsure (1)..(277): unsure at all n locations
atgcaagctcggcnaanaattactacttcaacaaatatttgtatttaaagtttggcaggggcctgacgaacgcgtacctcttctaccacatattacgacgtacactctcccacttggggagatggccgaccaacgctcctaccaagcgcaatgtatgccattgatccaagccatggatcttcttgatcacccatcgaccccgtgcaggtatgtgccctggaacggagccatcaccctgcgtatatacccagtgacccaccctaatctgctcaaactt

SEQ ID NO: 20672 - DNA, 397 bp, Oryza sativa
  unsure (1)..(397): unsure at all n locations
tatgttccatgattggaaaagattacctttctctttgctgtttgtntctgaatcgcatccatcatccatggatttcactgtgactgagggttgcggaattaaaatgtgtacattatgggctataggccttttaattagtcccctgtcccctgcctgggtgaagatgctgtgcttggattttaaatgacatggtagtagtagtacgagtacatagtacgtagtattcatctgtaggctagccaactctcctggtgaaagctctttttatgaagatgtgagtagtagctgtaactgcatgcatagacaacgagttttactgcagtacagtaacatnggcttccaactcgcaatgctgtaattgtgttgctgcgtgtaacaacgctcttggatctgcaca

SEQ ID NO: 20673 - DNA, 240 bp, Oryza sativa
  unsure (1)..(240): unsure at all n locations
gcatgcaagctntatataactgccccgcagactgtatatatagtcatcgcatcgtgcggccacataaagcaattgactggctatatatatcgttgccttctagccacgtaagtgagcatttgtattgaccaatattatggtctaagctgattatgttctgtggacaatttccaagcggctggaaatacattatgagtatatttactcagattttacaccacatatgccatatattttcat

SEQ ID NO: 20674 - DNA, 444 bp, Oryza sativa
tgggctatcccatactagcacatgtggttgtactgtatactatatgaactgacattgagtgaaatccttatgtcgagttgggcacactctccccctatcagtacacaactaatcacaatatgtgcaccacttttggcccacacctaaaatccatgttttacatcattttatttattaaaatcacaagtattaaagttttgtccaaattatatcaaaatcatatttcatgtttgtaatgagcccataatgacaaggaagatcattctaagcatggctaaacattatagtaacctataatctactaacatcaaaactcatatataaagtggtatagtcatatttgttctaacgttacgaaggagagatatggatatatgtggcgttaagaagataatgccaaaatacgagattgcttacaagttaacaaaatttatattattagtg

SEQ ID NO: 20675 - DNA, 474 bp, Oryza sativa
  unsure (1)..(474): unsure at all n locations
agcttaagccaactntcatcgaagggaacaacatacagttgatcttatttccatcatttcaacagtaaactcagtgaatgcttataaggtagccatgtcattccatacatgagaatcaacagatatgtgataacagagtgacaaacaaaaagttatattccttgtccaaatacaaggaagaacaataactgcggaagttntcagtatatcggaatgcaatgccatgttaagaacaaacagtgaatgcatttctagcttccacaaattactatcaaatgcataataaattacaacaagaatgtagagtagagataaccgcgacatttttccgatttgtacttttggtggatactatcgctaataaaaagcctcttatctcaccaattatctgggaaagtctattgatgtcaatggaacaacatctactacattntatttgacatatncaacannattgcaattataccttatact

SEQ ID NO: 20676 - DNA, 386 bp, Oryza sativa
  unsure (1)..(386): unsure at all n locations
tggcatgaatggtggngcatcttgatctactcctctcaacatcatatgcatggaatgggcaatatccatgaactggtcaggatccacaatggtttcttctccacgtgttggtgctgtttcctgctgctcgtcttgtgcctggcaagcagtangctgctgctgcatgttcttcctccttgcggcctttttattgcgtttgatgacattcttctgctcctcccgggccttctcttctctctcgtaggtctgcttcagctgtatcgcgcacaatacatactgacccatctgcaagtacattgatcgatcatacaccaacatgtagtactcccttcattcactntattttttatcagatactcactttgattcatattaatatcaatttc

SEQ ID NO: 20677 - DNA, 468 bp, Oryza sativa
  unsure (1)..(468): unsure at all n locations
attttgataattattcgtcaccgtattcgcttcgattcgtattcactccatatctgtatgcgacaatatatgattatggtctcgtatccgggtttctgattccgatttcgaatccaagaaaaaatatgagaacaaatatgatagagctagtttccgaccgtattcgatccgctttcattcctactggtatgtttgcttaanatatacttcaacaatattaaataaataattttagcttctgcaaaattactaaataaaaagtactccctccatcatgtactcatgtttagctcattccatttgtcccacaataaggctattnttagagtaatcattgtattagaacttgtgaaaaatagattattcttatatcgggagtcgataaattgagaaatattgtattgaaattgataaagaatggattatagcgtttgttctgattggatgattggtgatgaaatataacta

SEQ ID NO: 20678 - DNA, 398 bp, Oryza sativa
  unsure (1)..(398): unsure at all n locations
tacggacctatgaaactcagcttcttatagttgntntgctatgtgaactatcaaagatggtgtcaactttaggttgtacgcatcatattttacaaagcagctggtatatcactcggatcatgttatttggaggattcacaccgcatatgctatatattgatatcaagtcacttggttgattacgattatcaaaaccactcggttggttggattatttattccttgactatatgcttggcttgttcaattaaccacattgtcgggggctacacctattaagtgcatctagtcggtgcacctgactttattttccagccctccacagtcttcagatttggtaaaagtactcgggagaccatgacaaagatgattgaagcactcggctttggagtaatctg

SEQ ID NO: 20679 - DNA, 189 bp, Oryza sativa
  unsure (1)..(189): unsure at all n locations
gctgctttgcctattggcttgtcaagttggaactttagggtntgactcatcanaatacagctggcagtggcactcttttttcctcaacaagattaagttcaatcctttagtacaaatcgtcttggactcttgtggccttcggggggtgggccatgctgggcccaattcaaagnttgtatgcctatctgt

SEQ ID NO: 20680 - DNA, 398 bp, Oryza sativa
  unsure (1)..(398): unsure at all n locations
ntcctgttgatacagctgcccttcgttcagacactcaatatattccctaggccctcacattgaggagagagtggtagatagacaaagagggagagagctgagtgaaaagcagtgactgctttcagttcggtttcaaccatgaagagaaagcagttgatcatgcacagccttttgattctgggatggttcatatgtgggtaactgcactgctcttgttctttgcccgtgtcttctccacaaatatgtctcatactaagtatttgaatgagcttgctttgatctgttagtagtaccactgcaaactttatatgcataatctcagaactagctgtatctatgaacagactggtttgtttgttcacgtttaacttgtaatgttcagtcaattccatcatcac

SEQ ID NO: 20681 - DNA, 265 bp, Oryza sativa
  unsure (1)..(265): unsure at all n locations
tacatacaaattggaggtggcttaaangcttgcaacttcatccttcaatggtntttttgtcatactacattagcccctatgtattgcacacttttttttgtctccataatttaactgtcaattgacgagagagaaaatgtgtgtggggaagaaagaacatatagaaatttagttcatttgcttaacaacggtttataaaatagctgagaaggaaaactctagtgaaagctatcttaaacaatataatacaactaaaatggaatta

SEQ ID NO: 20682 - DNA, 366 bp, Oryza sativa
  unsure (1)..(366): unsure at all n locations
gacttgcgtctcgattcgactnttaggagaatgtttttcaacagctcacttggtaatgtaccgacctctcatgtcagatcattatctctcggcttccacagtcattccacttgattaatcggctcccatagccttctcattttctcggactgccagagtccagctgcccatcagcacaacaataccgcttcacttgggaagcctagtctatgatgtccgtagacatcccgaatcacacagactncgttcttgaccactcaggtcatccatatgccacatatgctgattctagtaacgattcccacaccacaacaacttttcacaaagcacagggcgacaaatctacgctatatgaaacacctcaca

SEQ ID NO: 20683 - DNA, 427 bp, Oryza sativa
tgtctacatggtaatgtattgtgtgagcttgagagttaagactgtcaaaacatatgatcggcatcttcagaatttaattgattagtaattctgaattaactggtgacatatatatagtttgcaagggagactttgcaacggacaagatatatctgtcaagagactgtcacgtaaatcgacgcaaggtctccgcgaattcaagaatgaagtcaagctgatagctaagcttcagcacaggaatcttgtcaggctactttggtgctgcattgacggttcagagaggatgctaatctacgagtacatgcacaatcgtagcctcaacactttcctgttcagtgagttgttgccatttcaacttctgatcttaatgcctattgtattcctttactgacatgacatgtaatcttgacgtcagctttgtgaatga

SEQ ID NO: 20684 - DNA, 478 bp, Oryza sativa
  unsure (1)..(478): unsure at all n locations
ttggagattactacgagttcagagactgggatgctattttcctaanactcaagagttnttctgaaaataaataattattgaatctttgactgagatggttcagtttatggtgtgatatctataagcaccatgtgttgacgttngatgtcgtgattccggtatttgcatagtatgaggatcgttggtaacagggtatacgtgagactgtggtaaaacagatgggtacgaggatttttatataggtttagacccttgaattgtcaagtaataaccctactcctgttggcctaagccggtcgttgctcttattcatcataatcacaccagtacaatatttatatttgaggtagcctatctaactgttgttgacttggcggcatgtcttggcgtatattggcttgtatgttgatcttgtgtcttgatctattgttctctgtttcctctcctcctangnggcccttgatttatacccataggt

SEQ ID NO: 20685 - DNA, 65 bp, Oryza sativa
cggatatcacgaaagagtgtgcatgtgtgcacagtttccaaccgctcctaaagagtgtcacttag

SEQ ID NO: 20686 - DNA, 447 bp, Oryza sativa
tgccatgacacttgcattatgattgatctatgagaagatcctgatgatgctgactttctcggacctggccgagggagcacacttgggggtggtgctcatgtcgctcatccgctctccgcgcaacgactgcgctgctcgagctcacagctgcggcagcgacctgcgctgcatgcagcgatgaccatcacttggcgaggcacctcacgtcgtctgccaattcagacaaatcagaggctaacttcgacaagatctacaccgaataggaaaccgcaagttgctctctgggttgatagggatcgggcatgacctccatggaccgatcgagaaatctaataattaatcgcgatggttgagcggagtggagaggagacacacaccaggtgaccatcggaaatgaacgtgcgagcaacggctgaacatcggcatgcgcgcgcagtcatcgatccg

SEQ ID NO: 20687 - DNA, 413 bp, Oryza sativa
ccatgcctatcctttcttgtgtccgcgagagggcacgaccggcggcggtagcttaagcaaccctgttcagaatttatgcccatccattacccgtgatattattatgggccgatatttgggccttcatgagcaagtgataagagggcattgtatggaagtggcctatgagagatatctaatgtgagcctttccttctctatggtccatattatagatgcgggtggcccgctgatttaagtgttgcccataactcagccttatccctgtctttttttaagtgtatgcaggcgtgtaatttaatgtataaaattagtcatatgggagactatgtagtcttaatacctatagacccatataacgatcttacacgtctatagtaacagactatacatcttatgcactgttactattta

SEQ ID NO: 20688 - DNA, 86 bp, Oryza sativa
ttaagtcacctgcagcatgcaagctttagaccgtcatcgcctcattacgtgagatctttttctttctgacctatagccctgacaat

SEQ ID NO: 20689 - DNA, 369 bp, Oryza sativa
tctgtgggtcatgggctctgaccgaggcattgatgctctctcttgtaacatatcagctattgagcggatgcgcccacccaccaaacttatggatgtgcaatgcgtaagacgttgcatggccagtcctaaggagccgcatatcaaggctgggagagaatgcgctacccttgctaagctcctcaagcgctcgggcgcgttacttggacggaggaagctgaacatgcccttgctcagatcatggcatatctcacctctcccccggatatatgtcgccccggcacccaatgagtgcctgcttctttacttagcacccaccccacctgtaactaatgccacagtgggtgtggaacgcgaggaggacgatactca

SEQ ID NO: 20690 - DNA, 189 bp, Oryza sativa
  unsure (1)..(189): unsure at all n locations
agctctggtctatctgacactcggccacagcttaattgtntgtttcgactctggcgatggaagcacaggctctacctaggtgaatagttgctcgcaatatatcagcacaccgcgtgttcccatctgtttaaaaaaataaattctcggggcgaccttacagcgctaaggaacactgcattgttatctgac

SEQ ID NO: 20691 - DNA, 359 bp, Oryza sativa
  unsure (1)..(359): unsure at all n locations
tggaggctctcaattngctttagatctagatggattccatcggaaaggccttaaagcatcatattcttatggctagtgtttctatgtgccgagcttactgatgtccatgtgtgaaccatcttcatcatcattgcggatatattatttatttgtcgcttcaccaaaagtggagtgtaactgaggactcttggattacattgaatcttgacaatgtactacctccgtcacaatatataagaagctttgaggttggacactgttattatgaaagtatgcataattatatggatggaggtgagatcgcttgaacagtggatgtantgggcgaaatttgataatggaggattgaatttggtgat

SEQ ID NO: 20692 - DNA, 326 bp, Oryza sativa
  unsure (1)..(326): unsure at all n locations
gagcttctgtttctgtcgccatctgatcgttcttgctttgtttgtgtgcaccgccgcctgcccgtacgcctgaatcgttggtgctggtttcaactttcaagtgcacatgaacaatcggcaacataaagaagcttaatctgctaggtagtctaatctcctctcacatggaaaatcgataatggcattcttttgcagccagcaaattatcaatctgaacagcaattatattctggtgcangaaggaaattaacatttcacaaaagagnttggtgatcgatggtgtgctagctatcaagaggtgcacgctgtcgactgacggatgatgt

SEQ ID NO: 20693 - DNA, 285 bp, Oryza sativa
  unsure (1)..(285): unsure at all n locations
tggagatatacattaagatttgagaaatccaatcccaagcgagaaaacacacacacaaacaaaaggcaattaggctgtgtttagttccacgccaaaattgaaagtttgaagaaattagaacgatgtgacggaaaagttagaagtttgtgtacgtaagaaagttcgatgtgacggaaaagtttgaagnttgaagaaaaaagttggaatctaagcaaggccttatcctaaaactcggggctgctggtaaaccatattgggctgtgtttanatncacgccanaaaaaa

SEQ ID NO: 20694 - DNA, 459 bp, Oryza sativa
  unsure (1)..(459): unsure at all n locations
cagcaatcttagcagcttgttctgtcatgcacacaatgattatttcactattagatcaagtcaaaggatagtngagcagaaataggattaccttttgaagatccacttagctcataattggcgtcttggagttctgcaactcggtccctgagagcatgttctatctttttggcttcctcctaggtttcataaagcttagctctggttgcttctagagttccgagatgaggaaccagtttctcgagggttgcggtttttgcctcattccgaagaacttcttcttcatcgccaatcattgggcctttatatatatgcgaaagcaatgaaacaacggaggaagattatctaaacacaaatgtactaggaagattattacctggttatgattttggtggtggacgagcaggcccctctaccttgtcaaaagtgcttggttctggaccagcgtcagtatcattc

SEQ ID NO: 20695 - DNA, 345 bp, Oryza sativa
attgcagtgcgatgagtaccatattatgtgacgatgatggcttactagtgacgacttttggccgagataagctgcagcaacttggtggaggaggtgctctatggcagccaccacatgacgcgatggactcatctaagctacatgattgtgggttgctcgagtggtaaggtgggctatctccacgcatctctacaaaggttgaagccttgatgcgaagagaagctagaaacttgtctgttactcttttcttttcacatggagatctccttgtctctcaggtacgagattcggaatggatacacttgttatactaacattcggctatgtatatctacttctggatat

SEQ ID NO: 20696 - DNA, 380 bp, Oryza sativa
  unsure (1)..(380): unsure at all n locations
cgcaagctcaagtgcggcacctcctcatcctcatgggtttgttgatcctaatgccttctttaatcctcaatatgcttactttgggatgcaaccaaatgactacttcaacccggtgcttatggctataaataccctaagtgaaagcattcaaaggctatccaccangcatgatgccatgcatgangatgtgaggggcattcggtttgaggttgaaaggatttcatctcaagtctcttctttggatcggtgcatgacgaccatggaaaactctcatgcatatgtgtactctcgtcgncgtgaccctttctctacgtcacactaatcctattctcgtcctccttctcctncacaagagtgaagccttcttggtccttgatgtc

SEQ ID NO: 20697 - DNA, 361 bp, Oryza sativa
  unsure (1)..(361): unsure at all n locations
atggccttcacatgaactttgctttggaacacactgtgataggtggtttgctcttcacactactctctagcactaaatgctagcatgacaattaagctacgatactgatctaacaactctggatgcgaatggacattcctgatgacatatcataacttgacctcctgcatgagcagtggcagctaaagcatatgcatcataacaatcactatcaaaagtatactcaccacaatcattcatcaatagagctcgccgatctggacagacacgatcaatgtgtccgatgtcatgggacctatgacatgttatncactgtgacatctagtggaagctatagatgatgcactcttgtgctgagtgt

SEQ ID NO: 20698 - DNA, 252 bp, Oryza sativa
tggatgctcacgtaactttgatattatggataaataggctaaaaaatcgatcgcggattaccctctttacgaattaacgtcttagtaggcacgctaatactcaaatagcggtcacctacgatgtagtgggagcaagtttggcccattgaactccctaatagctcaaaattccctccgatttctgtgatcgacatcagtaccttttatgtatattaaccccatgcatggacaaaaaccggtatgtttataaaa

SEQ ID NO: 20699 - DNA, 389 bp, Oryza sativa
agcttcactccatataccagcgttcagagactatatttttttatttgttttatcacaaaagtgtgtacagcgtgggactacggatgtatgtgggtcacccacgaacccacttatatatcaaaatatacggggttgccgcgtatctcatcctatatacgggtttcgaaagtaaccacttacaccccatcggacaaatatatgtgcatgggtgacgaactgtgcaacctttgtgcaatagatacctggacattacattaccgggggaaaatgttattgaaaacattaatgacccaatagtgatattcatcgacctttgatcaatatggaactccttcactccatttattgacgtttggatatgcacggctatacatatattttacttactt

SEQ ID NO: 20700 - DNA, 411 bp, Oryza sativa
ctcatccatgggatatgcatcaagtgtctaaagatggcattgtcttggagaagaattctggtgggggtaaccgattgcatttccccctccagctttgaaattatagatttgctatcacctatttactactttctttatttttgtcttcagtgctaattttataatcaatgtaagtattttattgcaaaattgaaagatccgatcatcggaggaatgttccgctttggtgtatgaacaggttacaactgtatttgacaagccatcaggtgagcaaagcgaaattagagtgaagaacaacctgttggcaccatggctaaaggcctccttcacttggaaatctgagcatgcattggctgagaacagtcgaaatctatatgtatccctaccttcccggcatatgcaatgccctac

SEQ ID NO: 20701 - DNA, 306 bp, Oryza sativa
atcacactggcatacctaattctaacaaactaaaggtatgaatgatacaaggggccctaagaatcacattatctgtcaaggaaacatacatggataattctcttctttatttaatgaacaatgaatgccctagcacaattgtttgcttgcaaatacctgtgacctgaagatggctttttgtgtcattgcaaatccgacttgcttacaacctttcctttatatctactatggaaacgatagatatataaaaattgtacttaaaaaaacagctgtactacatactgtttacatgacaagtgaaaatgt

SEQ ID NO: 20702 - DNA, 390 bp, Oryza sativa
  unsure (1)..(390): unsure at all n locations
gctacgngcaatcatttacaggtcttgaattaacggatatccaagcttacagaagcctggatggccttactataaagaataatggcacaactattaaaatccacctcaccttctttaagcattgacggccctgctcaagacctacaccatcaccaacccaaaggaagacaaaagatggagtatctgctatagcctgtatgatcgtaaaatgcactgaagcacattaattgtatgcataaattgaacaccaaaagaagacttcagatcccaaaccgaaagaatgaaacatcttaacaaagagagcaacctcaatctttaaattcataatctcctcagcattccaatactctatgtgatctgtgattcctggtgcccgtgaacatactcctc

SEQ ID NO: 20703 - DNA, 103 bp, Oryza sativa
taagtcacctgagctgcaactgggggaaatcctccacaacgaggatttttttcatgctagaaactacgaggcaatggcttccttgctcctctgaaaaagaccc

SEQ ID NO: 20704 - DNA, 463 bp, Oryza sativa
  unsure (1)..(463): unsure at all n locations
agcttttgtcccaagcttcaccaaagtcaagagcgctagttcttatcatatcttccaaaatttgactgactcgctcggtctgaccatctgtctacagatggttggcggtactgaaatttaaacgggtccccaattcttcctgcagtttctgccaaaattttgaggtgaactgactccctcgatcagatacaatcttcttgggtaccccatgcaaacacatgatccttgccaggtacaactctgccaatttctttcccgtataggtggtatgcactggtatgaagtgagctaccttagtgagtcggtccacgactacccagattgaatcgtgacccgatgatgtccggngcagtcttgttataataatcattcccaattgctcccatttccattccgggattttaagaggttggagtaagcctgctggcctttggtgctctgccttcactcgctggcanacatc

SEQ ID NO: 20705 - DNA, 488 bp, Oryza sativa
  unsure (1)..(488): unsure at all n locations
cattacatgatatatcaagcaacgatgcatgttttataaagaaagataacacaccgacctgatgttgccaatagattgttgcggatgcatatctcaatagccaattccataagcagcatcagtatcactgctgaagttagatgggccacagcatgaagaataccaagcaaggcacgtcttctacgcgatagttntgtgggtacaaagaacaaagataccatcaatagagtaacaacaccagccagggatacataggaatgctccagaatctcaaaaacaacattccacattgcagtgaagaaactattgacacggtcagcccaagagtcttcacgtaagatacgaaaggaatcacactgaatataatatatacttatgtcangccacaaaagaacagtaattgagaaacttctagcactgctctaatatatatttgaactctagtgcccaaattgaaatgtgggtcttgttgcttatgctctatatat

SEQ ID NO: 20706 - DNA, 441 bp, Oryza sativa
agcttcagtaactagtattacaggagtctgccctatctattttgtattaactagcgcacctctagacaatggctctcattctctaacaccggtgtagattgagatgtttggttaagtatttggttttgaaacgcctatagttatctttgctcatttgaaacatgatgtgtctgctttaatttaagtcaccatgtttattgtttacatgttaaaagaaatgtacataattgaagcctgctgctgatgaagagcttccttcagcatacattgaagatttcatgtaccataattatgctattcttttgcccatatttcttgaactccacattgccttgctagtcaattcatgttctgcaccttttgttatgggtgcaggagtgccctgtatgtagaattatccacatatgttggtgaagcttatccaaaaggtgtgtgtgctgt

SEQ ID NO: 20707 - DNA, 440 bp, Oryza sativa
  unsure (1)..(440): unsure at all n locations
taacagtcatagcagaaaccctatatttcacaagattgcctgttctaattctgctgcattatataatacagcggaattagggnggcatgtgttaacagcagaattttgcatcagattcggagaatgaagaagaagatagaagcgggtttggtgtgaaatcaagtttaatttggagtcggactacgtatcggctggacatcgtatcggctggaaataagatatgagttgatgaagccgatggctgatccagcccatatggtatgatttgggctcgacatgggtctagattgagataacagtcattgacaattagagatagagctaaaataaggcaattgtatctattaattangttagttatgtcggtttggtagagaatttggtaagagaacgtggtatatggttntggttgattntatatntagaaagggttaagtcgt

SEQ ID NO: 20708 - DNA, 239 bp, Oryza sativa
  unsure (1)..(239): unsure at all n locations
atcttaagtcgaccgccgctgcagctcaaattctttaaaagagagagtttgttttattttangaattatttgggatgattacaatccgaggcctacaggttacaacttcttctcaatgttttatgtatatacattcgagctatgtttgacactttttagttcataatcaattgaagttgtgaaaaagaacattgtccgcgaaaaagatatctagaagttattctttcgctaaaaaggtt

SEQ ID NO: 20709 - DNA, 388 bp, Oryza sativa
tattatcctataactagagcaagcttttgttctagatcattctacatctattcttgatagaacatgataaattgtcttaccatggtactacccaataatttcacatgtggtttttactcatgcgatacaacttcattaaaatacgttcaacttcaacttaatactacgcgctcaattttactaccaccaactaagcacaaagtcacatacgtgctaacaaaaacctttttcactataataataaattaatactaactaataaagatatgtactcaccaagtactaacttcaaatttaactactctaactaatctagtaaaactaatttaaacctgagctaacatcaaacatgtaacttagggattgggaatttaatatcacttgagga

SEQ ID NO: 20710 - DNA, 509 bp, Oryza sativa
  unsure (1)..(509): unsure at all n locations
acacatagatactcagctnttatcattctggcatcgagctattttgccgcatgttcttcttacagtatcgtcaccgcagtagagtttaaccaccaaattcgggatggattggtgtggttcctctacgcctatgacaccagaatatcgaaccatgaacgaggaaaggcatgagagaaatattggctagtaattgtgaagccccaattcttgactggaagggacaccaaaggcctctgccctccctctctatctatccaagagatggaagggcagagctnttttttggttntttcatcttttcatcaaagagttgaacaatgaagatagatggcaagtgcctgatcgatttgatcaggtcgtgtaggaacaaggttcanatcgttcgttcgttatgatgcctcagctgcatacatcactgcacttccacttgacacctatntatacggctcgtctcgccgctaccttatactatttccatgcttctgtcgcttcatccccgtatgggtgga

SEQ ID NO: 20711 - DNA, 276 bp, Oryza sativa
  unsure (1)..(276): unsure at all n locations
aaaaaaaaaaaaaggttgtgctctgacacganaaaacaacagngcaccaggcaacgtttcaaacacggaaacagacgggcacaagccgacaacaaaaaaaaggaaaaggaaaaagcggcaaaaactaaaaagggaaaaaaccaccaacaaacaaacaacgagcgaaagtaaggaaaaacaaagagcgaagcccaggcagacaacggacgcccacgcagcaacacacaacccgcaaaacgaacaaaaaacacgaacgcagacaacaaccaacggaaa

SEQ ID NO: 20712 - DNA, 237 bp, Oryza sativa
atacatgaatgatgccatcaccaagctgatttcatcatttatatttgcagttaccaatcctgatgatacagcagagcagtgcagatctctcttcatgtcgaagtgaccctgataccgtgcattttaattattttacatagcattcctcacatttcctgtatttcctttttattataccatacaagtgctgcttcttacagaatggacttctccgtattcacaacgttcagaatatat

SEQ ID NO: 20713 - DNA, 442 bp, Oryza sativa
  unsure (1)..(442): unsure at all n locations
tatatntctagtgtggtccaaatctgattagntattaagacatgtgcttaataccatgacttgcaagtgaccacctttcttcccttgtactctagactgattgtagaataacgacatacattcttcagtttgcttgttgctgtctatatagggaataagatctagttttgggttcattgttttagtacaggaaataagtcctctgttttcttcaatgacgatgcatgttgtggttaattnttgaagtacccttcctcctttgcaagctgagttacagtttgaagtgaaacagtgcttatgatctccttggtgttgtacttggttgtgatatgtgtcctatatgagcttcatctactgattgagccgcttagcatggagccaacttcacaggagtaagtgagcggagaaataagtttgtggctatggacgtcacggaaactct

SEQ ID NO: 20714 - DNA, 466 bp, Oryza sativa
  unsure (1)..(466): unsure at all n locations
gctaccgagatttgagatgggggtttcctataatatctaatgttctgttatngatgctattnncgctgatgctggtgttgttcatttgattttgccaggctatcctgttctcagatatccttacaccgcttcctcggatgaacataccttttgacattgtgaaaggaaaaggttcagagatatttgatcccttgagaacagcagctgctgtgaatgaggtcagagaatttgttccagaggagtgggtcccgtatgttgggcaggctctaaacattctgcgagaagaggttagtacgactctcagcatccaaatatggagattggaaatagatggtctgtttgagagcattgaatcgtataagtagctgatcagttattttcactctctgtgtcagcctacactctaatngatgtaataccttacaatgctgattttgtgtgctggtttctcacaacggcatcactt

SEQ ID NO: 20715 - DNA, 440 bp, Oryza sativa
gaaatttccaaagtattgtgtattctccatgcgcacactgtgttaacagatgtgcttaagtccctaaaagacacatggttccaccacacctagaaatatatggcatatgtggtataaaatccgagttaaataactcataaaggatttactaaccgcctataaaatgaccacaatatattatcagcctaagccataatattggtcaataaaagtgcacacttacctggcacaaagcaatgatattgtattcaatcaattgctttatgaatccaaacaacgccttgacttatataaaaaaattcagcgggcagctatataaagcattactgtttggcaccttttaaaatgcattgaccaactcctaaaagttgagaactgtggataaaggatttaaggattgggccataataccgcacttttgctaagcaaagatcctaagt

SEQ ID NO: 20716 - DNA, 457 bp, Oryza sativa
tagtggcgctgtcacacctagtttcgatgttgactctgaatttgttatgtactggagcttcagttttacattttgagctgatgatgaatatctcgcagaactttgcaagatgaagtggtgaattgctactgaaagcttccaagctggaagctggaagatgttggtttcatgaggaaaattgcagatgatgcatacatgctcttgtgagaagaacatacatatagagtcagtgagattgtggaagtagtggcatgctttattcaaagatgttgcttgtcaaattcttctatttgatgtaaacaatgcccatccatattctattatggtgatcttcttttttttggcgctcgcgatatggtgcattgttcaatgttacattgcaatatgggtattgacttatgcctgttacctcttttacctattggttgattgttcttccttttgtcatacttatatg

SEQ ID NO: 20717 - DNA, 300 bp, Oryza sativa
tgaagtgccaatcagcgagacacaatgctgaattgctcacatttattttattgacccactctcgacacgagtccattacagaattattgccatatcgccaagaacgagtatgtacggcagactaccttcaagacataaggatcctggaaaaagtggggcctggtgtgaccaaggttgctgggggtgttgaaacgaaaccagattatctggatggatctgaaccctagcaaccgtcccgcttgttaaaccgtaccccatctcctgttcttgaatactcacttgtactagcctcttcaggcc

SEQ ID NO: 20718 - DNA, 297 bp, Oryza sativa
aagatgaacggcagtataggtcgatgacgctgatatgcccgacggctcgagagaaactctcccagtctcattggacctcccttcatattcccctccctactttgatcctcttcatgtagatgacgatcgatgctagcagtccactgtcacaccgcatctagacaaagcttatgcaaggcggtcctaccggcgatggagcctcggagggttgcacggcatgttaactcctacgtgcagcgctttctcatctatgtcggacgcctgccccacttgctctacacccctcatcttcgtatc

SEQ ID NO: 20719 - DNA, 469 bp, Oryza sativa
  unsure (1)..(469): unsure at all n locations
agctntgcctttatgttntgtgcatcagcaattatgctatgttaatacatgtgtattgcctgtgttgcatacttgcatcttgtaaaatctgtaacaatatgattattagcactatggcagtaatatgatgttntactggaactggattttcctgttctttttggtggaattacggaattatattcttgtgggcttgtaggtgttccaatgcgcaagatgggaaatccgttcgcataattntgttgctggtcttaaagtggaattaatccaacggccttggaaatgagggcaagtttgtggtgatacatattgcgacgtgatgagaatggtgccctatccttttttcagcaacttaaatggtatatatgctagtttggatttaagacaaacaattggtagcagtgccaatgcctccgttagtcactcgagaagtttcttcaccgtaacactacattttgagtcccatgtg

SEQ ID NO: 20720 - DNA, 479 bp, Oryza sativa
  unsure (1)..(479): unsure at all n locations
tgatcaactctctggtgggccaatccaatcgaactgatctttttctcaacttgaagaatgtagtgccaagctagatcttgaaatgcanaagctagccaatcttccaagtgctgttgaagaacataaatctagattgagatcggctataaaaaatgtggctgacatgaccaagtccctcatagtcatctctggaaccgacgcccaagatatccaagccatcgaagaagtagatcaaattagacaacgagctatgtcggctatccagcgttacttgtctggatgattggtcttgtaataggataacctatttttgtaatcggctaagaatcttgatactccttntgtcattgaactgttgtgccgattaatatatacttctcaattgctcaatntgctactcanaaattngcaacttttgcatatatgtgcccccctaantttgcaatgacgaanggcattgataaaataataattggact

SEQ ID NO: 20721 - DNA, 165 bp, Oryza sativa
aggatagttaggacacctctatgattggacatgaggcacatcaacttcttattgcgtggccgattttgaatgcacaactagatggccacggatgtagacgtctctattgtttaagaagaagcaatttgaattgactgttgcagactagacaaagacaaaccatgg

SEQ ID NO: 20722 - DNA, 456 bp, Oryza sativa
  unsure (1)..(456): unsure at all n locations
agcttgntgagcctaatacccatagaagctatttttatctntcagtcctcgcagactaagtagaatataccaaacaaggcaatgataaaccgagcaagcaaattgaattgataaaaaatcacactccattattatgatgatagcccccgactgacaacggcaagaagaaaacttgatgttgtcagtcaagatagggaagtacaatgataaacttaagcgtaaaaacgacgaagatgctcaatgttccaagagttgtcgacgagagtaccgtcttcgcgcttgagtcgataagaacctggtcgagtaacttcagagatgataaatggcccctcccataaaggagataacttgtgccgatctcgtgtagtttgaattttcctcanaaccaggtcgccgactagaaaggcacgggatcgaacattgcgattatgataacgccgcaacccttgtagtatc

SEQ ID NO: 20723 - DNA, 462 bp, Oryza sativa
  unsure (1)..(462): unsure at all n locations
agctttgccgaggttaagcagtgcgtacctttcttgttcttgcaatgctggagtccactaattattgcaaatggaataacgtaattagcaccctaacagatatagattnttgctactgtatgctagttggtgtttggatttccagcttatttttcttgtcaaaagaaaatgtagcaaccttacttcaaaatcatgatattntgcttagattcttcaatacacgtaccccccttatcgattacactacactattatacggtcctttagaagttgattgactaggccgggaattatggacaaaatcattgtgccataagcaccggtctcccncagtactgttcccaatcctaatcgagcatctcaccgagctaccaacggccgagggacagtagggcctgatgctcaccggtttgatggacgcctcatcagcatgtatgtacatatactgctgcagactctgat

SEQ ID NO: 20724 - DNA, 472 bp, Oryza sativa
  unsure (1)..(472): unsure at all n locations
gccaagcgtgtctgaaggtagcgggccaaagagcccttcttctgttatgcgtagtggttgcacgcggctattgtctggtgtgcaagtcaccccaacccatgaagtgcagactggggctgcagagctccagttgagcttcctgccatgtggcagtgaggcagcatatgcaagaagagcctgcttgtcggagttcagatcagcactcttggcatgaggaatgcatgcaaagaggagagaaacaaccagaaaagctgtaagtatatgatcttgcatggttgatgcttgttggaaacaaactggtccaacactagaaaccaatctttcccatcagctcttcactcctctagcatgagaaaaagataaagatagtaaatcaatgtggtgcgtaacagcaagaatatagtaaagtgcatgtagaaagaaggaataaaaggttaggaaacatgaagcatanactcttgccttatatata

SEQ ID NO: 20725 - DNA, 463 bp, Oryza sativa
  unsure (1)..(463): unsure at all n locations
agcttataagatacatgcatgattaggttcttctatatattctctattcctaanaaatttatgtcatgaacactatttgattttattaaaaaattataactacacacacttattggtactattcagatttcttctatgataatctatatatgtcaggaattaaagacatgaacttatctttaactatatcatcaactcttgttacttttattcattataattgctaacgttttagggcacgatggatagtatatatctgcatgaaactctagctctaacaaatgctgttactataaatgcaggatctactctcctccgctaatttagttgttgcgtacctctgatgattctacagtgattgaaaaatgtgtggttcaactcctccttcagatatccaagtcttctcttctactggtgttctattagatctaatgtgattctgctagaactgagcttctccacc

SEQ ID NO: 20726 - DNA, 74 bp, Oryza sativa
  unsure (1)..(74): unsure at all n locations
aacctctctgagacggatcaactgaaagaacncaactctggtgtgtggaaatgaacaaactgatactaccactg

SEQ ID NO: 20727 - DNA, 409 bp, Oryza sativa
ctctcatgcattagagaatatctaatgaaaatgttgtgggacggtgcacatatgaagcacatgcattaagtttgtgtctagttaattatgcctgagttacgacatttacattattcaacctttcattcgatagagaaaatatttcgtcgcatggaaaatgagactatgagaggtgtggctgccataaagacataaaaagcgaaaaaagtttaaagattcaataaacaagccacttactcacgcgatgcggattttattccgtatagaacttgttacggctattagtcacagaatgttctacacgagttaattgattacagagaatatatggtctagctactatagattagtgatcgatatactatacaccctaagtctggtttctccgtatctttgcctgttatgacca

SEQ ID NO: 20728 - DNA, 412 bp, Oryza sativa
  unsure (1)..(412): unsure at all n locations
cgcgcacacaaacacacaacangatggatgtctgtgtctattagtagntagatacaataaagatccaatcatacttctatattcctttngatcaacggcttcaccatcttcatcaggatccaacacagctgtagaaccaattggtgttgaaattggcttgcaattctccatcttgaaccgtctcaaaagatccttcgtatacttcgtttgatgcacataagtaccttaaggtgtttgcttaatttacaatcccaaaaagtacgataactcactcatcatgctcatctcanattccctgcgcatagtctcagcaaaatctacaaccaaagcgtgagttgaacaaccaaagatgatatcatccacataaatccgaacgaacagttgattatcaccatgcttataaacaaaaagc

SEQ ID NO: 20729 - DNA, 170 bp, Oryza sativa
agcttgaatcaaagtgggaaggaccattccttatcttttctttccaggacgggatattttcgcctatctgacacttcaaggcgaagagttcgaccattcctggaacgccgtctctctcaagtgcttctatgtctataatgggtgggaccctaaattcccacttgttaaaa

SEQ ID NO: 20730 - DNA, 430 bp, Oryza sativa
gctcggtatgaacaccattggttgaggaccgcttcttgtttcacataagagaaacttttctaaccacattaacaggaaagccacatggttctcgggggtaactggaccctatcccatatatgctgctacatagcctaaccagctgcctatgctcttggtcttgaagtcatattggttctttgtattcaaactcatagggttggccgatgaggtgacatccagacccgtgatcatgctgatatctatgagagttggggtcatcagcccttgattaaacaaaaatgcattgatggtgttcgaccagaagtaagatacagctgccatcaagggttcatctttggccgagtttgctatagtgaggtcaagtgcttggccgattccaatttcatcccagtgaacccttttgctcgctgatacatgtttgaaccat

SEQ ID NO: 20731 - DNA, 397 bp, Oryza sativa
agcttggtagccttccaatccaatgtggtagcatcctcttttaaactgtggccagccaaatgaactttcttcagtttgctgggtgaacactgtggcaaactctgaaatatatccataatatttccatattctagcctacaatcgaggtctagaacttccaaattgcatagattcttcaaggttgctttcatggtgcccatcttgccattattcgacacgcttatgcccatgctatccttatgatcatcaaatgagaaatcaagaacttggagggacagcatgtttcctagcgcttgccgaatatcaccgtacaaactagtcgagctaatattgagatgcttgagagatgtcatgttccaaatccaactagactcagctgggtggttaaaatcattgg

SEQ ID NO: 20732 - DNA, 329 bp, Oryza sativa
  unsure (1)..(329): unsure at all n locations
catatacccatggacaattcatggcatattgtccctgttctctacaatcgtgacaaaatgggacatcctcttctggcattggaagctcattgacctgtgtggcaaatgctcgatcaaacacatactgatnttggtcttgacttccaaccaatggtagctgngaactaagcagcatgcttggaatggaccaatggtgtgcccttgttaactctcttgatgacagtggtggattgagttgaatacttgagttacttgatgcataaccgctgacattctttcctttctctcttgtaaacatctgtgacagggattgacgtgagagaggaaac

SEQ ID NO: 20733 - DNA, 494 bp, Oryza sativa
  unsure (1)..(494): unsure at all n locations
acctgcggcatgcaagcttctggaactattactatatcaaagcggggtacaactttattaatttatcaatgtcttatgggtcatcgaatgaaaagctggtctggtttaggaaactccatgagaagtacgtaaatactaggttctgatgaagtctttttggtttttaagacaatgaattgtgataattatttgagagtaaaaaaggaataaattattacaaagttcaaagattatctcaaaaagtatttaaaattaatatggtaggntttatataaaatcaaaactctaccagcttagaaagagtgcgcattcaccaaaggagaagcctgtacatntcatggngcttccaaagcaaacaagtccgtgggctggatnacgctcacactgcagccctatatatcatctcctatcttggacggagcnataactaattatcactttntagaattgatgtttaatatctatcattcatatggcattgggtcttatgtact

SEQ ID NO: 20734 - DNA, 494 bp, Oryza sativa
  unsure (1)..(494): unsure at all n locations
tactacctgcacttttatcttataagggagaagacaccattaccacaactagaaaggtagcccgcgcattcgcacaggcatgcgtcatacgttaagtttgagacacttataagagcgaaatattaaacggagaatatctgtcacgatttctccataaattatattcgtcggcattaattgcttttataattttctaacctattagctntatattatatcatatttaagtaatatctataagcaattatatataatctactttatcatttgaaaagaaggtagacttattttctttagaaaacatgtcaacgaaagtaaaagtaagtgtaaagcagaagtaacgcgtctttcgtttttaagtgcatatatattatcatattcgacctacttttttctttctgtgtagaatgactgatttagtatgaatggttgcaaacaatatatgatggcgcaatggatgttgctgaattattnttatcagttcttatgggaat

SEQ ID NO: 20735 - DNA, 421 bp, Oryza sativa
aagcttgcatatagctcaatgaggagagatgagcgagttgtgctcttgattttaataaccaacatacacgtgaacttgcctatctctattaagtgacatgcttaataccagagatatgctggatagaagacattgtgcgaatgatgatgatgatctaacatgtcttgtgtaatggtgggcacagggaaactagacttcatcttgtctttacttgccctcttagtgtcagatgttcggcacacctgagaattgtttggaacctggaaatttgggagatagtaatatgcaaaatcaattgctgtattcgtctcatttgtcatcgaagattcttgcatcaatgatgattccattaatttgccagctttcctacttgatgatactacaattggtccccgatagatataaacatatctaacatcta

SEQ ID NO: 20736 - DNA, 473 bp, Oryza sativa
  unsure (1)..(473): unsure at all n locations
agcttcaacccgaaaattaaaattgtaacccttattaacaaattattctttctaccacctataaaagatatcctttcaaccaccgagagaattaaatgatgcttcaagagaggataactctgcaatgacaacgttgattttatcatgattccagaaactagtcgaagcagacatatctcatcatatccatgtaatgatcaataatacttcttcccgtccccaaatacttcctattctanataggttagcataaattaagatctaagaanaacactataatgtctcttatttaataatgtacggttagaagtgaaataataattgacgggtataatcagaagaaatttgaactgacaacaagtattctatgacaaaatgtgatattagtanagacaactatctcgaaagcaatgtagtataatagtaagaagacatcattcatgttatcattacttagtaattactccattact

SEQ ID NO: 20737 - DNA, 375 bp, Oryza sativa
  unsure (1)..(375): unsure at all n locations
cccagtgtctcaacaactggcaacttcctcacaagtgcattctctngtgccatactcctggtgccgagcgccaagcatgtggtgataacagcaagcaagccctctggaattgctgcaacagccagtgccactgcaatctcaaagtaatacgtgcacttctcaaatgagaacttataattcctgggccacccatccacatactcccaggtgaggaaatacttaacgttgataagccaaaccaaggcacagatcaccccaattatggctgtcagagcctccccaaactcattgagcttctttttcagtggcgagtcatcttcctcttgtgaggcttnctggatctgggcatggatctagcctattttagaggcattc

SEQ ID NO: 20738 - DNA, 458 bp, Oryza sativa
  unsure (1)..(458): unsure at all n locations
agctntggtgggggagtcctcttctgtctcataaaaattatttttgattgtcaaaaagaacatattggctaaggcctgcaagaataattgaaagagagttacacgctaaatagatatggccgatctaagttcttgtgtcaaagggaaacttactgggatggcacgagcggctaattggttcttcttttcgacacggtgacttcctgcagccgatggagtttgatcacttgatgaatgcttgtcangggaagaatgatgaggaggatgctgtaaaagagaccagtgttagataagatcggttatgatcgattagtgaaagagtttatatgggaacatcttactggtggagcccgtttgagagttgtgcagctgatctcttcttacattaatttctttttttgaactatgaagcctatagaatcngtataaataacgtagtataaagggataaggagagt

SEQ ID NO: 20739 - DNA, 428 bp, Oryza sativa
  unsure (1)..(428): unsure at all n locations
ctccagcatttgagcaacaactntgtttcttttctgatgctacagtctactccatatgtctcaagtatcaagttttagatctaatctacatgttcggaagtttggagttcaatcaatcaactcagattcaatgagttggacaacatcatctattttcccccaagtgaagcttctgcaatagctataacaccaagttctactgccatctttataaatcaaggggcattgcatcaatctttgctatgcacacgctcgcaccaaggaaactgctcgagcttcgatatcttctcagcagtttggtggattnttatcaccgacatcatcaccagcacctctacttcatcggcctcgacatctccgtcgatgctaatgcgtgcctacatcttcgctttctggtgcttctgtcatcaccgactttcatcagcaac

SEQ ID NO: 20740 - DNA, 496 bp, Oryza sativa
tctcacacctcggcaatctggtttttctctctctccgagagaacttccttgatggcaaggaggtcatcgagcagctaggcaagctccctagcctcctctccctcaagctctactaccagtcatatatggtgagagagctccacttccgggagaagctattcccgaggctcaagcagctgatcgtggacaatatgcccaaccttgatgagcttagcttccaaggaggcgcccccgagcttgagaggctcacgctcgccgtcctcaaggagcctgcagatggcatctccggcattgacaagctcccaaggctcaaggagggtgagttcttcggccatgtcatcgtcgactccgtggtggagagcatggtagctgtgtgcaagaagcatcctaacaagccgagagttacaggtgagatcgaccaatggagatggactctgaattgtccagctgatacattgctagcgactgggtatgtacataactgaccctctttatg

SEQ ID NO: 20741 - DNA, 218 bp, Oryza sativa
  unsure (1)..(218): unsure at all n locations
agcttgcggaaaccgcagagaaatcgccgacatgtctatatttttcngctcaacctactactactagtattcgaatcaatgaaacacaggggaaaatgcttactctatccatggttggagcggatcctcgccgctgtattcgtcgattgcctcgatcattntccttgaatcagagaacaatcaaacgtatgacgataaaaaaatgattaccagagacc

SEQ ID NO: 20742 - DNA, 375 bp, Oryza sativa
atttcactaccgacagcctccttctatgatactgcatcaggagaagcatatgcttcctgaaatgacttatgagtgcatccacgaagacatagtgaaatcatcaccaaaggacttagccggtctttgtctcttactccttcgaggagcttcactggcatcctcctcagagacatgttcatgatgatgatcaatttggtctgggggtgagattgaactgggaaatacttcagaagggtggctcgaactactatgtgatacctcattgggaaaaagctctcaaagaggtagcatcacgagactccataattgaccaacatgcatgtcaggacctcggattaactatataaatctataggcaatgctggatagcatatc

SEQ ID NO: 20743 - DNA, 414 bp, Oryza sativa
  unsure (1)..(414): unsure at all n locations
agcttatttattattcatttctgagaaaaaaaaacgtattgatatgagcagcaatctcttgcgtatcaaccttcctaatattgctcatttgcacaatttatggcccacacatgtatctcatgagaggaatgggttctactcgaatttataagtacctgctaccaatgttcaactcggcacatggtctcactaaattntcacccaaaacatgttagtttgtctacactattttattntntcaaacaatggtacgtctacactcctaatttattccgatgagctacaacttatactccttctgtcccttattcgaaaaaaatactcctttgttccaaatataaatattctatattgttagactccttcgttgatattttaagtgtttgactttaagcaacttttaagtacagttgc

SEQ ID NO: 20744 - DNA, 488 bp, Oryza sativa
  unsure (1)..(488): unsure at all n locations
taatgaaattggtcggtcgtccttttggccgacccggctaatatgcactatctcatacaggaatgttcaacccacataaataatgaaataaataaataaatcaaactctcattntgtgccagtgtattttgatcacttgaacctttatattgcattatttcttttatctgttggcattttcctcgtgaattcccagattggttgttttaatttcatcgttcttttcagttttcaccgtagtgtttcaattatttatctccaaatgttagaagctggtggcagtaacaaagctacggttgcaaacttttctgttgctntttttgcttcaggtttcgatgaatacgaaaatgaggtccaatgcgtttgcagtttatggtgctttaagtgcctatggtgtaggttcacagcagtttcttgagcatgtagtagcatgcaaagtcagcttttagtgtgntatatcagtgcgctgtatcttgcagccatcttat

SEQ ID NO: 20745 - DNA, 473 bp, Oryza sativa
  unsure (1)..(473): unsure at all n locations
agcttaaggcttcttttaccttcttttcaatagttgtttatttgcttatgcngtgcaaggtgtcattgtttcttgctctgaacctaagccaattacctctaaagtggtgatgtaggtcttccaatagtcgcgtgctttaggtgcacaccagtaatctagcatgaaattttcagtgcatgaaatgtgtttgaggtactcacgtagaaactggaaaattaagtaatgtaaaaccattggcgtactagttatgggtcatctntncacattttaaggttctgggttcagacatcagaaagcattactaaactgggaagcagtgggaagggtgtaaaggacgagggtcactgtggtntacatggtgaatcggaaatcagctccatcatccaacttctgtagtttctatgcatctganatgctcttcatttacgcttataggcatcttctttcacagcattggatttagtagcaccata

SEQ ID NO: 20746 - DNA, 430 bp, Oryza sativa
  unsure (1)..(430): unsure at all n locations
agcttctcaagtactttcttgaacgcaccatggctcatctttctgcctgcgattcgtgcaccacggcgcttcgtactcattggcagtgggtacgttgagatggtggntgtgcagcacgcaaattgccaaccacctgcaccccaccgatagcactgttgtggtgcgcccgtgcaaaaacaaatgggcgttggtatccttgagaggtccaaatcaataccattaattaccatccctatattcttcctgggaccccttctncgtggtgctggtgcattgggtggtgcgccatcctcacgaggagcagcagacttcttgggcttcttagcccttggtaccttgngttggcggccctgctgccgcttcttgggaggtggtggctcatcaataacaggtaccatttcctcgatcaatggcgaggaaatgcattcct

SEQ ID NO: 20747 - DNA, 467 bp, Oryza sativa
  unsure (1)..(467): unsure at all n locations
ntctcccaactggttcaacactccggtagtgcttttcctatcattcatgtccncagccatgtcactgtcactgaacccaacgtggtgagcagcagatgacatgtcgctaagccagagctaatatcaccgaacgtggtgactgtcgcttagcgactcgctcgcatccttttcttccgctnttctttcccccaccgccgcgatctccttccccgtctatccggatcgtctcgatctcctcggcgtcgtcggctagccgataatcccctccgtctctcgcctgctaccgtcgtcgccgcgcgcctcccccctggctacgggcgccgttggtgacggcggcgacggctgggtctgctaaggcaagcacgatgcgtgttcccctctacctccctcctggccagnggcactgggcgtgtagaatgagatntggatcaaccgaactttcattgtcaatggagcctacattatac

SEQ ID NO: 20748 - DNA, 185 bp, Oryza sativa
ctaagcaccgcggctgcagcttaaggcagaaggacttatgggttttttttcctttatagaaaatcgccattgcacaaacttatggactatccccgggccatgtgattctagaattagttggaacattgtagtccatatcctggaggcactcaaattcttttttccttatgctcatgctacttaaa

SEQ ID NO: 20749 - DNA, 380 bp, Oryza sativa
  unsure (1)..(380): unsure at all n locations
agcttaactcagtnactgtatgtaattaattactcttttttttaagnacataataacgctgaatctttacttatgacatttactccctttgtccaaaagtactacgaaggattttattccctgtgtatgtccagggacaatagtggattcgtctcctaccgaagcaaacaagcacagtctgtcagactccaccaatccatcactcaagccctatttaggctgtgttttgtacagcgcaaagtttgcatttcggctgatattggatatgatgtgactgaaaagttatgtgtatgacacggtgatgtgattgaaaaggactgaagtttggatccaaactntggatctaacacagccttagacatggactaaatttagccctg

SEQ ID NO: 20750 - DNA, 478 bp, Oryza sativa
  unsure (1)..(478): unsure at all n locations
tacggacctatgaaactcagctaatatacttaaatgcaataagatcctgacataattggctgttttatcatgtcattgaagcatatagatcgaatatgggtaaatcagataagatcggctgaaactccgatactaccctaatcggtaaccagaggacaggctagagattgatattctaagcacgacttaatagatcaaactcaactgatgcagcattaagtatganaagaagaacaatatctagacaatcaagccgctgggtgtttcataaagtggtagatatcttatataatttaggacaacgtcgctatttaacctaatcggttgccttctattaacagatgttagccgattgtaggttagatgatgatattgccaaagattatgtaagatatatgataacttgacgaatatatagacaagattatagtgtcatanagatggaagcactaatctcgagaacataagtcgtcataac

SEQ ID NO: 20751 - DNA, 409 bp, Oryza sativa
  unsure (1)..(409): unsure at all n locations
agcttgaagtgattcccttgcatttcttatgtccatcttgctggtcangccagctnttacttcaattctaggacttgcttggtcagtcactcagttggcatataattcatgattnttgcctctcaaatgttactgggcatactatattactatcatgtgtattcttaattctgatatgagtataggtattccgcaatgcaaaccaatataagcttctgaaaataaagatgtcagatcaaaatcttacttcctccgttccaaaatgtcagggtttctgggttggcaaatgctaagaataggtcaaaagaaacctctttagtcatttcagttgtcaatttttgaattttgaattgcttagattccctttccaagcatgtgattggcaatgctntggaatcattgaaatgat

SEQ ID NO: 20752 - DNA, 395 bp, Oryza sativa
actcagcttgctggtgaaattgagtgtttaatcattttgttatgttcagatagaacttctgatgtctattgggtttagctcttaattgtgctttatctgagaattcactgctgactgctagcttaaccatctcaataaagctgatgaagacaaggtgctcgatattcagacgatattgcgcaagtataacatatttcatattgaccactgagaagcatccggaagaagtaaacgaatgagcattgagttccagaaaatggtgtatagtatagatggaattatgataagcaatccacctcatgttttatgtataagttttattatcttgtgaaaggatggtagtgtcaatacgtacagttttattaatttgtgaaaggatggtagcgccaatattt

SEQ ID NO: 20753 - DNA, 432 bp, Oryza sativa
  unsure (1)..(432): unsure at all n locations
gcttattccggattctaatagcctaatttggtgatgaaaggctgaatagagattggnggtagcgaggtccttcacatgggtcacgcacacgacaatcatcggtcgtcgtcgccgggcatgtggccaggcgcgacatcacgcaggtccatccatcatttgtgaaggagaggccaggatgatggtggcataattggattacgctttgtgcattattggtcccctacaatgatctccgggacgtctcctctgcgtgccttcccctaaccccattactggtatactagcttttcagttgcaaagctcgattaactcttccatttgctgctaagatattttttctgccttttaaataggtccggatcangatcactagctagtggttcgtgttcaccgcgcgtggtgggtgtgctgaagctgggaagttgtatacct

SEQ ID NO: 20754 - DNA, 483 bp, Oryza sativa
  unsure (1)..(483): unsure at all n locations
gaagtttgaagcagattacgatggggatggtatgacccanaagaaactactttatctttgttctcaaacttcgatcatgatctaccagaagacgaaatttggtcagagctgaaaaatatatcttggtgtccagtccatgttgcaccattgctaaaaggacttccatggttcatatctgaagatcatgtggctcctccaatcacaacaaggccaaaatcacaaatgtggcttgtttcatcaaaaatgcggattcttagtgctgattcttgctccatgtatctgcaaagaaaacttggttggttagacccaccaaatgcaaacattntatcttcccagttagttgagatctccaagtcttatgatgaactcaagatgttntctgaagacagtaccaatgatgccgttccgcanaaggaaattcaactgatctactcanaattgcaagatattattgacacagccgatacaacattctataacgga

SEQ ID NO: 20755 - DNA, 127 bp, Oryza sativa
agcttgtgattgaatgcctgatgggtgagggaggagtatgttttttctgtagccgagagcacggaacgatggcggcgagaggatcgagcgtcaaatccacagggaccagggagattcaattgcttat

SEQ ID NO: 20756 - DNA, 458 bp, Oryza sativa
  unsure (1)..(458): unsure at all n locations
agcttggcttatgctaaatatagtggtggatatgactaaccatttcataaatatctgagaagtcagcatgggcagtgatgggaacaaaggctgttttgctgagaagcacggatataacagtagagcacggcctggagcatgttgcaacatggaacgccgcaatgctgagatctaatgacctggaggaggctatccaagcctttctagagaagcggaagccagtcttcttcaaactgtaatgatcatacaccatacttgacagaagaaagtatatttgaatcctagtacttcagaataagggaaaggctataaatctatgattgcagttggcacatatgtgaagagcttacacttagtacagtggaccagaaatgcttccaatcaatgcatcaaagatctccaacatgttgctgctntgttgatttgttcaactgtggaaatgtgttctataatgacct

SEQ ID NO: 20757 - DNA, 429 bp, Oryza sativa
  unsure (1)..(429): unsure at all n locations
gcttattgcttaaatctttntactgttacttgtatttctaactctgcgataaaatcgttaagcataaaaggcactgaattttgtatcatgggtttcttgctcaatttcaacctagtacggntgttccttctattcaaaggaaattgtagattaaaatagacaataacatatagttctccttctgctatcaagacttttatggagtttaactgtagtctgtactgtcgtcttggaagtatgctactagttattgttgtccacatacgtccacatacgcttatggattcaacttactatttccctccattatntttgtccagcaagtactaacatgctgttctgctaaactgatgacgttgaattcttgacatgaaagatnntgtnttcttgtgctcgagtgcaactggctntaaatatttctttacatgc

SEQ ID NO: 20758 - DNA, 468 bp, Oryza sativa
  unsure (1)..(468): unsure at all n locations
agctggaacaataaaagctgtttcccagctttgacaaccattatacacctgtcatgaagaaatattatccagttccattagtaaaataaagcaatgtttagaaataacttaaattgaacacctgccattntatacagtatatgcatgcattttaattgaagctttctcatcaaagacgagcatagaacaaacagttaaatcaacacaacattccaaacatatggatagtaataaatggaacaaattattataaaaaaatgcagcatctgcaataaaactgtaggaaatattcaatcagctgcgtgaaaaactgcctctntggttacagagactcatgtgcaaaaactgtaaacaatagtaccggcaaaattcgaagaatgctcatagaatctagtactccctccatnttaaaacaaaaggtacatntttagtgggcacaaggatataggagggcataaatcatttcgt

SEQ ID NO: 20759 - DNA, 441 bp, Oryza sativa
  unsure (1)..(441): unsure at all n locations
acatacttcttcttatacttcttctcccccagtaccagatgggatgtcttgatgtccctgttgaatatgcccctcgatgccaacaagttcagcaccgtgcaccttggcaagattcgcttatcgtagctgaaggagagaaccatcgggctccttgcgacataatcggtggtccacctgagcttcttcgcgagaaactgccagatgagcttcaccttgtcattcgacacggacatgcagtacgggtgcctcacaaacgcctcaatcacttgctcctttgtccatcccaagctcaagaaattgtccatcctgcccttccatttccttggatgcaatctggcanagagcccgaatgaatatgggaacattccagaggaaggtctgaccccgagctccttcatggcagccaagctctcctcgaagcgggagggcctatgcatgagt

SEQ ID NO: 20760 - DNA, 332 bp, Oryza sativa
agcttgctcgggcagctggaggaggaagaagacatatttatttgggtgagactttagtcccgggtggtagcaccaaccggggctaaagatcaccgggatcattagtcccggttggtattaccaaccgggacttaagtttagatctctagtctcggttggtagcaccaaccggggctaaagatcacctggatctttaggcccggatggtaatatcccgggtggtattaccaaccgtgacaccgggatctttagtcccggttgatagttaagatctttagtcccggttggtctaccaaccgggcttaagatcccgggcggcctggacagtctga

SEQ ID NO: 20761 - DNA, 448 bp, Oryza sativa
actaacaaagtattctgattaatagataacttggcatgccgcattctctttgaactcggtctattctggataagctttctttagtagatcaatttccttaaccgaatatagcaagaatccgataactgacgacttgacaactctcatcggctaatcccaggacttcgaagccgatgctgactctaagccgatgacaactccgggcttaccaaatttcactgttaacaaagaaatagggagtatatgattttggagttcggaggtgtatttttaaacatagtgaaaggtttgggaggttaaatagacatctcaaatacaaatactcctagttgttctaaagattgctagtcataggtctagtccgtacatgagctaacatatgtattttagatggaattcaactatgtatgcccaactataatgtaattacctgatgtatatatatact

SEQ ID NO: 20762 - DNA, 453 bp, Oryza sativa
agcttggcttctcgcaacaagtgctgcatctctattgttctttgtgattgagagagacacccttggccttggcgttggtggtgtaactccacccttcaagcattcatccatgcttacataagtcagacagggagggatgaccggaaggaagaggagagaaaaagccaagctttggttctttctttgcaccaaccggtgcctccgttgatctccttgtcgaacgccggaagcaaaccgttgttggtgatgggcaactgcggcgtgggctgctgcatgaacggcgctgtgaagcagtacatcatgtccaaggtgccgaggctgaagttgaccggtgagcttcactgcaacttcgtccaagccatcgaattcctcgtggcaagacagtgcgtttttcttcttgtcctgctacgttctcttatgcacggcggtcatcgtgatttgttttcttttctt

SEQ ID NO: 20763 - DNA, 396 bp, Oryza sativa
  unsure (1)..(396): unsure at all n locations
actcagctatataggttgcatgctactctaagaaacacaatatttgcacatttgnnttgagaaactgcgagatcattctattcatggattcccaggactttgttgcagactgtgggcaagagttacatactattggaacatgtgaagtgttattcctagctcatagcaaggtatctactgtactatggaagagtggaaggccatgatggcatgggtaatgagggagatgtttggngtgggagtntgactatgaactgggaggaaaaaccttcangagaatctgcattaattctttcatatattnttaacttanacaggcaacaatgctgtgcctataataacctggcgataatagacagtctaaacctcccaagttccaacagatacagctttgat

SEQ ID NO: 20764 - DNA, 472 bp, Oryza sativa
  unsure (1)..(472): unsure at all n locations
agcttcanataaaanttcatttaaatcacttatccaatcttctattggaatatatcattatattcggtgtaaataaatttttatagcaatatgttatacgataatgttctgatgaaaaaatatatattggaattaattttattgtatatttaaattaattgtatcatatatatatatattacttttagatttgatttaaattacttcttatacattcataatatttngagcttctcttgttggttttagtttgttcataattatacaaatgaatttttgaattactttttttaatgatgttgtgatccctattcgagggtaacacgaatgaattatgaataatttcttaagaaaattatatagatagaaactttctactctccaagtagcatattttgtgttcgcaaagaaagaaaaagttacanaatttcaatagggccccaatatttttctaaattattatacacttacg

SEQ ID NO: 20765 - DNA, 472 bp, Oryza sativa
  unsure (1)..(472): unsure at all n locations
tgtcagtgactacatggcgatgccgacgcagcacacgtctttctatgccaacccggccaccatggcggtgtacaagtacatcgttctcggngaggagaagctgaagcagcagataaaggtcgaaccacccagcttcacacagacgcaacttgcgcaggaggaggtcatcactgtggagaaggtctggagccaagggagcagcgatgccctgctcggtgaggccggcgacagcagcaaccggttcaaggacgtgtgcctctccttcgccctgtacaagctgctgcgccgtcggttcttcaacttccccatacatgatgccagccatgcatgcacccggcagctcgttgtggacgccatcctatatgacaagaagggctacgagagggcgttccgtgtgacggatgtagagctgtccttccttcatgacttcttctacagcaagcacgctgatgtcttcgccagtggcttccct

SEQ ID NO: 20766 - DNA, 445 bp, Oryza sativa
  unsure (1)..(445): unsure at all n locations
agcttatgatgagctgttatctcggtcagatacaatattctgatatttgatctttnggggataatgatagttgggcttatatttggggaaaccttaagtatgcttctcagaaatactatgctcttgaatttagagctatgcagcctccccaatgttttgtttggttatgaaaaagtaaagtctcttctaagattaaaagtgtttggctggcttttcctcttggacaggttgaatactataagtttatgttggaccataagcattgtgctcctccaaactgtgatctctattgtgtgctctgtcagcaagggagccctganatttacttcatttgttctatttgtgccccttatcgatagcctgctggaacaaaatgggattatcatgggacacttccttgagcatacagaatatggttatggtggcttgcagcttttactctggg

SEQ ID NO: 20767 - DNA, 383 bp, Oryza sativa
  unsure (1)..(383): unsure at all n locations
agtaaagttgtggcaggaatcaaacactatctactaaaagtgtggcttgtctaaggttaaggtgtagcaaatntaattgccaaccaaacagccccttagtatactttattgcactactctggttntggaattcattgggagaattgggtactgtcatggagaaattattctatttagagtactattgactactcctaagttacaagggttttagctggtatttgttatagcttttgtttgtgattcctcagggtcgcatcttattagtcattcaaatttatgctaatcgctgaatcatggtgttttcgtacatttattaatgcagcttatcagcacatattntgtctgcaatatctttttttgtgcacatgatagtatatcta

SEQ ID NO: 20768 - DNA, 402 bp, Oryza sativa
  unsure (1)..(402): unsure at all n locations
agcttggctngagatgcactgccctaaaatgcagagttatattctgccttgagtcaaaggttctccccaagctccaagagaatctgcataagattacttccactgttaacttaagaagtccaaagttaaatgtgccaaagccctttatctgccctataatgcaggtaaatccactgctacctgactgttattttcattcatcttcactatacatcgctcgaaaagaatactttataccttgtgaatctgaataactataaaaatatcttttaaagaagtcaattatacaaattttatacaagaggtaatgaatgatccttatgttgctgctgatgggcacacgtatgagcaacaagcaatcaaagcttggctcaagaaacacatagtattccctgtcacacg

SEQ ID NO: 20769 - DNA, 499 bp, Oryza sativa
  unsure (1)..(499): unsure at all n locations
ctgtggagatgtattcgcagtctctgcatgcacgatggatgttcatgtgcgaangttctatgcatcctgttgtgaaataaaaaatgtgacaaaactctctctgaagccgtgcaaaggcgctgctggagaaagcaatagtgtgttagttccaagtgaagaaatgtggtgcaacacgaagtgctctgtgccatcgtaaataatttgttcagttctggaatttggaacggtgattctgagaatcagaatttaaccacaaagataggatcttggttttcgttcttttttgtcttgcttcataattggaaaaaggagaaaaggtcaggttaaaaaaaatggaaaagggaaaacgaaatcaaaagttttgtggcgtctgaaaaagttgcggcccggtattaaccagatcaaatcttgatatcattatacagagtttactctgatcgacttgatatgcatctaatatcttttacctttggcctcttttctataatatgatggtact

SEQ ID NO: 20770 - DNA, 462 bp, Oryza sativa
  unsure (1)..(462): unsure at all n locations
agcttttaatccggtctcaatttaagttgctaccatcttttcaagatagctatgctcttattggacttcttgtcttaaaggaggatacaacttacttttgtgggagatcctgattaataaaggcgttgtcttttacaaggcgtggaattatgccgttagcacaacttcttttctgtgaagaagactcgaacagaagtggcaaatagcacctactcctacatatgccatggcccatgcgacaaatgaatntcatcgggaagtttttcacgctcatcttgtctaaaagcataggaattttaccgaaatcacgaaatgtcacaccagctgggacagaaaacactatactagctactccagctggttcagaacggcacttgcaccttgacatggcataaccccgtcgatcagctcaagttgcanaagtgtagctcaaggtgcaaaagcgagctttcggcttgaata

SEQ ID NO: 20771 - DNA, 514 bp, Oryza sativa
  unsure (1)..(514): unsure at all n locations
ggggcttgcgtgcgatgagcactgcttgaatctttgctagttactcnttcgccaaccttactcgccgtgcagtgagagatccatcagggaagtcaaacagtactctttcagttccagagatcaattaacgtagcatagtgagatatacagctcggtgcagtactagtatggcatattggcatgtatagcgaagccctatactatgaccctcaaatttgtttgacaagaagcaaatctgaattttaagttgtgtactgtacgtgtatatagctgtagcaaggtcggcagcataataagataacagtttaccgagatctaaggcttccctacctttgacataagagacaaatcttagttcagttctccatctagctaggtaccccctgatcctcctcaacctcagtataatctatcgtgcttccatgtgcacagatcgatcaaactcgcatgatgagacgacctgcacttgtaaatgcttatatacgtatatacggagactaacaccaatgatcac

SEQ ID NO: 20772 - DNA, 353 bp, Oryza sativa
  unsure (1)..(353): unsure at all n locations
aattccaggtatgataccaagagagatattccaaattccatcattgcttcaaattgatttatctttcaacaacctagatggaagtatcccaaaagaagtatgtgatgcccagcaactcatgtatttgaaggtttcgtctaataagctatctggggatattcctaactctttatgtnattctgaaagcatggaaataataatgtttgatcggaatatatttagtggaagcatccncacttcattagacaacatactcagcctaaaagttctgaacttgtctcagaacaacttgtcaggatctataccaccatctcttggcaacctcaatttcttgagagctagatcttcattca

SEQ ID NO: 20773 - DNA, 426 bp, Oryza sativa
  unsure (1)..(426): unsure at all n locations
ntcaagccagccaggccttgcctagttgcatttttcttttcatataaactcttctgctccctctgttcaaacactcgcagatgggcgaaaaatatcaacttgaaagcatgtgaggttgcattgcaaaaacataagtatggaaggttgcaataggagagattaagataaacaggttgtatcagtttaggcatttgaaactggttgatgtacctgacaatcattcctactaatcaaacagagctgttaaacactgagaaaccagagcctatggcacttgctctttgctgtacaatgctgctgttgaacactgaaaatagatgaattttttcagagaacgaggcaggctaggggttgcctcttgttggacgacagaacatggtgagcttcttatcatggtcaggccggtggtgctgggttcggcacatg

SEQ ID NO: 20774 - DNA, 471 bp, Oryza sativa
  unsure (1)..(471): unsure at all n locations
gctttcttacaagtaccgnactgaattctccgctagctgctatatggggtacgtattatatattttttagcacattgaactccatctatatatatatcgagcacgcagctataatttagaaaaaaaaaggtcatctgattaattttcagtcatctaaaaaaaataccatataatttccgttgattttatacgggccatgcatgtcacactatataattagtgctgctaatagcctttaattatctccttacagaacacgggctaattacacgtcaaactagctaaacgtagctcagctttttggtggtggttggngttgtgacgtccactgccgctagctgatggataatgcgcacgatctccaaagcaacatattaattatattagtagtagtttaataagcatatgcgtattaagtatattccgctttctgctttagaaagagataattctctgagtagtttcttgttt

SEQ ID NO: 20775 - DNA, 432 bp, Oryza sativa
  unsure (1)..(432): unsure at all n locations
cttctggaatgccntncgctagagcctatcctttgtttcatttctatatgngaaccatttctgcattgtcgatcaagctcgctctttctcggcttctgtgaccttgccgatatctttatggaggatcccgaagttctcacgtgccaccagcccgcagcagttagaccatcttccaatgacagacctgtgcgccgcgggcctaccactagcgttaacctcttttataacttgcactgtgatcagccatatattttgtgaccggtgatttctactcgacctactcgcacttgtcccacccgacatcgacgtatgttgttcctgcggcaattctacagcacaaacagaaggcaacatatgctaatgggtgctagctaaaatttatatgggcatgtggcgaaaacttatcctatatatgaccatgaatatcaggtt

SEQ ID NO: 20776 - DNA, 477 bp, Oryza sativa
  unsure (1)..(477): unsure at all n locations
gcttatgtgattttggactgatagcttaattgagtatttttctttggaggagaagactagaaatttattttactgtgctgcggttagtattctagataacaattctttcttagtgcaccttttcttaatatgggcacatgcagttaaagagtggctgtctgtgcttctacccttagccttggatagaggaagttgcataataactaacatgggcgcttgtaagacattgcaaactataggtttggtattgcctaatttgggtcttttgctttggttagatanatgtatgtgcctttggaatttatcagtggatccacttggagctcaagaagagttctggagctggcatctaatttgngatnggaaataacagtcgctgtagcttatgaaacatcttcaggtacctttggtttcttcttgtgctagtaaggcctagcatgngttacatgattcagtcgttcaagctggattcaagct

SEQ ID NO: 20777 - DNA, 426 bp, Oryza sativa
tgcatgtagagttagttagtgctagtgattggaagatgcatgtgtttcatcataactagcaactgaacaagtctagggaataagaggattagtggcgaattatttagctgcatgcaagattagtggagcatgtttgtggcgtggtttattcagctcggaggagcgattcttgcgcgtgagacgcatagatcgtgtgagtgagtggctcatggtcgtgcgggcgacccggtcgggctggtagctactccctccgtttcataatgtaagtcattctagcatttctcatattcatattgatattaatgaatctaaatataaatgtggaaaatgctagaatgacttatattgtgaaacggaggaagtagctatatgtgcatgtacgcgaggctacataagccgtgtaatcatcagtttgtaagtgagtga

SEQ ID NO: 20778 - DNA, 326 bp, Oryza sativa
  unsure (1)..(326): unsure at all n locations
tctagctctgccgagatcgcggcggcacagnattttttttgtgtgnnggtgtggacatgatatgactaaccatgtgatgactaaggtcaagcttgttttgggcaacaggggagtcttggcccctgtttatccaacctaaggccgtctaacacatctcaggataaggcctgtaggagtggaacacataggcaattttatcaactacccttggggacgaaggacttattccatacaggtcggttggaaaagaaaaaagcacatggtcggacacgttaccgactaccttacaaaacatgctagggaaatgagaagataaacattatcgt

SEQ ID NO: 20779 - DNA, 433 bp, Oryza sativa
  unsure (1)..(433): unsure at all n locations
tgaacccaccctgctgacagcgctgtgtatttattgtggtcgccgtctcttctttcatttcttcacctggggtgtgtctagttcacgctaaaatcgaaagtttgattgaaattgaaataatgtgaaggaaaagctggaagtttggaaagttttgatgtgataaaaaagttaaaagtttgaagaataaattaggaactaaaccagaccctaatggcattgggaatgctagctaccttagctctcctctcatgcatggatggacctagtagcgtgactagtgtctagtgataaactctcacacacatggcccccgtntaaaacagaatatttactggattattccgaagggatatctacttaagaccttgttcggttaatccctctgagagaggggagggattggagggtgattatccacgccaatcctctttca

SEQ ID NO: 20780 - DNA, 473 bp, Oryza sativa
  unsure (1)..(473): unsure at all n locations
cagagcattaaccttagtacttacaagtattttgtttgatttccacccccaaaagtatggtgattcaactggattgaacccccatgtccggatccgcccctgtgagagggtaatttcgtcggtttattatgctnttcggtgcttcgcggtgagggaattggtattttggatttgggtgggcacgcccatgtgcatttatcgtggagcaagattggtaggaaggttggctcgaggtttaccatgaaatttgggactatttttctatttgtaatttcttggtagcgcgatgtacgatggcaacaatttattttatattttgcctccttcctctggttnngataaaatgagggtggtggcggaaggaaacctccatttcatcaatcctgaggcaagaagggtacccttttttctggaaacctcatattaattngtcatggatnatgctttcatgtaaccttatactgagttatctt

SEQ ID NO: 20781 - DNA, 507 bp, Oryza sativa
  unsure (1)..(507): unsure at all n locations
gagccacaaaatggacaatgcatactaagagtgttttctatgaattntacaaaagagagaaccaaacaattcaacaggtagattctcaatccattgcactaatcaaatcttgttggaaaactagaaatatgcctccaaaagttaaggtttttgcttggagattggttangggtgctcttccttcggctctcagacttcaccaaagagtaaatgacatctctgttgcctgttgtagatgtggtatgcctgaaagtgattttcatcttttcttctcttgtcctttcagtagaataacatggatgatttcgtgttgcagatataatattgataacttctctgataattctctcttatctctgatcatatcctgcatcacttctaatgctgctaacaattctgatcttaacacatttttcaatgttatgtggcagctttggaaagccagaaatgatcttaaatttcanggtataatgaaagaaccttcccaggtcnntgtacctggctgat

SEQ ID NO: 20782 - DNA, 473 bp, Oryza sativa
  unsure (1)..(473): unsure at all n locations
agctncaccaggagcaaacctcctagtaagacctttatttataactgccgacgactatacaattctcaacctcatcaaatgggagagatgctacgcaagttgcatcgcaggcgccaatagacctgtgagtgtcacaggggactccaggtatgcgaaatgcaaaacacaaaggcgtggttcgctcggagaaatcatggcggctgtacctggctagacagccccagactgacctgcgctatcccggagaatatcacgatgatataagcaaatcgattcttggaaggagccagaagctcctgaagggtatatcataagatcccaatcaatactctctgggtagaatcatactgccgagtacgccatgcatccatgctgctactgataagtgaaagcaccaaagacacgcattgctgcaaccataccaagatagcattagaactggaaaaccccctctgcaacgacgagcacaagac

SEQ ID NO: 20783 - DNA, 525 bp, Oryza sativa
  unsure (1)..(525): unsure at all n locations
ctcaagcttaataaactggtgcatctcgatttctcaaatggctcttgttctttaagtttatcacagtgcctggggttgctaacggaactgcatcaatttgaacctatctagcagcagggttcactctatcggtccaggtgtttctatcggtggtcaccgatatccctaaatttcggaaatttcggtccgaaatttctgaaattttgaacaaaacttagttgaatgtgaacaaatattatccaaattcatgaaaaaattgaaaaattcaaaaatttcggccgaattgatatcgtatcgggggtcaccgaaatgatttcggaaatttcggtccgaaatttccaaccctgtctagcagttcagatctgaaactaccagatgtggagtttcttggcaacctcaccaaactggaatatttgaacctttcatgcaattcaaatctatctctacctagcgtggaatttnttggatcctcaccaaacttaaatatttgaactatcatcacagcaatccgatcttcatagtctg

SEQ ID NO: 20784 - DNA, 475 bp, Oryza sativa
  unsure (1)..(475): unsure at all n locations
agcttggaagtgtgtgtgaaagtgaagaaagtgatatttatttatatgatangtatgacgggtggaatgatgcgaattgtctgaactgcccctcaaccgtcattaggagagcatctagagcgttcacaccaaaacctagatccaacgccgttcaccatggttcggccgaaccagggctgggccagatggccttcaaacctggtctaggcctcctcctcatcctgccttatccaattcttgcaattttgggccgtttctttggtaattaaaagcccattcttgcatggatagatttctncttcacttttagtctggatctcctcccaacttatgtgtttatcacctgcatacaaatatacgacttgtgaaatatgtgagatttagacctatcactatgatngtttattatctagactntatgcanatgttagcggtataaaactgggacttaacagccgccaacaattagtatctt

SEQ ID NO: 20785 - DNA, 252 bp, Oryza sativa
tactcagcttgcatatatctgatcaggactaacgtgccatctctgggtgtatctcgctagctccagctggggacgagcgcctagaagccctcgtcctgacgggatggggcgaggcgtgcgtcagaccgcctgtcgccacctaacccgcgatctgaccggtctgtgactggtcacagaccggataaatgagtgcactgcactgcgttacatgcggcgtgacacgctcagccaaaccgcaataaatgtggttag

SEQ ID NO: 20786 - DNA, 470 bp, Oryza sativa
  unsure (1)..(470): unsure at all n locations
agcttaanattggaataacgtagggttgcaaactttgtattctatatanatatagaaagatcgagtcgcgttcgacttttatttgaatttatttggattctatttgaatgctaattaaattcaaatcgtttctccgcacgtacttttagaccccgagggagttgcggatccgagcgaggatcaagacccgcatgactacgagcaaggcaagtcatcactattccttgaacatgtngatcccaattgagaaaatattttgtttataaataaaattgcatgcaatgataaacatactacttgtgattatgccatgccttgattattggttaccccttattccttcgtaaccatatttacgtacgagtccctagtcaattatgacaaatgcttagaaatgctattctagaatcatgcatacttatatntatcanatgctatatgctngngcaattacctttggaaaggtaatt

SEQ ID NO: 20787 - DNA, 361 bp, Oryza sativa
  unsure (1)..(361): unsure at all n locations
catcatacatggatgggttggttggatagagggtgtcacagtgatgtccctgtggtattcttccaacaagattgtgacacgataagtctaaggagcttaaaaatgtcaagtctgacaggctcattgtgatntcaccgganataccgntcattgacaggtcaagtgattgcaatgatttcattgctccgatatcatctggaattntctgttgagattatagacatataatgatttaatctattccataaataaatcatgacattacagatganaactagcatgaacgcatcattagatctacacatgtatactacacagtataacatgaacagatcaaatatgcgcaacatattgaacacgt

SEQ ID NO: 20788 - DNA, 474 bp, Oryza sativa
  unsure (1)..(474): unsure at all n locations
nnagctgggggttntgttgacgggcgntatcgatcattttctaccgtcaatattaccaaaatagaggagaactattgatgcttgcaatgcatatatctgttagaataataatattctactagtattagaataaccttcttgcagagaatgaccataaagtgttggagaatcgacatcaactcagacgatacatcaatccgacgatgtcgataaccagacttatgtatgaatgggccaagaactcaaaattgacacgatgaattgggccaaaattcataagtctatgaagtgaagcagcggacgagaccaccagccaaaatgtgggctggttgggccggcccctggttcggctgaacctgtgggttcggccgaacctgccgtgaagccgctggatgcagggtttggatgggcggtgtggatagctcccctatggcggttggagtgtattaccgacctttccaatcgccatacccg

SEQ ID NO: 20789 - DNA, 404 bp, Oryza sativa
  unsure (1)..(404): unsure at all n locations
tattctgattattgtgtgcaaagtttgttctgccatttcgttacctaatctaaactaatctagctaacccatgcatatggtagttntgttgttctttttgcagtgtgcagagatcagtgcatgtgtcaatccatggatcggaagaatagtctattgagaccagtacaataaaattgcaatgattagattaattaattatagcaagtgtactccctgttctgcagtgtgcagactcaatgcatgtgtcaatgtggatcagaataatattatattgagcagtacatgaagaagtaacgtaaccctacaattaacaaaatgtactgacgcaacacctgtgcaggcaacatagtttggaataaagccataattntagataaaatatttcaagtgtatgtgctacatga

SEQ ID NO: 20790 - DNA, 432 bp, Oryza sativa
agctttatgttcggcgcagtactaatactggatcttatgagctagaattgctctatcaatcaccatctactttagacatatcttctgaaacttttttcaaatccaaaagtccagtatcttcctacaaattatggaattaggaggagctctttgtgccgaaaaagaaagagcatggcaatatttcaaacttgcattcgaactgcgaaatatttattccaaggacgagagatccagataatgcagcagggttggttatctaaattgctagtcaaacatgaagtggttcatagatctttgggcttcgatcatcgaggaatagagacattgcaaataaaagcagaggattgggattccattgctgtcatttatatgtatatgggtacaattatttacgttcccaatgtgcttatgacgttgcacccggtggatctt

SEQ ID NO: 20791 - DNA, 178 bp, Oryza sativa
ctctctagatgtatatgacgttctctcgtcagatggatcatatatgactcgtatgatgagaggccacatgagtggatatataggaaacgaatccacatctgtcgaagcgctcatgccatgatcttctacatacatagctctccgcgctgcgagaatctgcttatgttgctcatgcagc

SEQ ID NO: 20792 - DNA, 418 bp, Oryza sativa
  unsure (1)..(418): unsure at all n locations
agcttggccgacgggaagcatattgcgaaattgntgttattagaaggtgaaaggtcttatgtgtaaacttatttaccgtcagaattgtacagttcttttccttttctttaagccttcggctgggtggcttgacccctatatcaatataacaccaaaccaatctgtttaggtgtttgaaaaaatcatccaagaagatggcaagcaagaaacggcggtggtggcaccggcgcgccatctgctcgatgccggtcgcgcgcctcgaaactgcgcgcgaggcggtcaaaattactcgccacttgcgtntgctactcatggccggatggtcggcatggctcacgtggctgattatccttttgctgctttgcggaatgcgtgattgcttatcgccggagattgatgagactgcatcggtttcggt

SEQ ID NO: 20793 - DNA, 509 bp, Oryza sativa
  unsure (1)..(509): unsure at all n locations
tgtatgaacagaatctaaagtgaatttctcacactatcatttcatggtgagactgaccatgaggctcccatatcaattgtgcatccgaaagagtaatcggtatggacacgaccgcctacgcgatctctggactccaaaacagtcacctcaaacgaagcattggagagagcacgggctgctgcaacccctgtaattcccccaccgatcacgatgacggatggaggcgaagcacattgcctctcaatggtcggaagcaagaggcctgaacaaaaaatgttttttactgtcaggtatgtgaatcataagagagagaaatcacgttgaacatcaagctcactaatctacataatactgtagatacccaagttaccaactaactaaccaatttgtacccaactagaagtataaattctaataatcttgtgaaatctaaagtgtgatgatcaccttccctatgtggaaaatntaattctatagtacaatagatagatttctaaaaatactatgat

SEQ ID NO: 20794 - DNA, 388 bp, Oryza sativa
ctgcagcatgcaagctgactaactacaaagagaaaagatttattattttaaccactccaccaagcatggacggatgttttaaaataaatttatctgggtagaaaatgtactacttttttcacaaacctggacaaagtttaagctatctaactttaaccaaagataatgaagattgactttcgaccaaaggaatgagtatacaaccccatcatcatatatcccgcagatgtcaacttaccagtatgccaagaaaaatacaagtcagagaaactgatgtgcaaaggacgatgatacactggctgcgtcggactacaaacaagacatttattctcagactacggatgtgcttagttgcctggcgcaaattattaagatacggatactatgt

SEQ ID NO: 20795 - DNA, 481 bp, Oryza sativa
  unsure (1)..(481): unsure at all n locations
agcttgcaatatgctacttgggcaggtcatcttgaaacctggaaatatgaatcttcagtgattgataatgctttctttcagaaatcaaatccataataaattataggcctttctcctgtgatccatcgaatattgaaacttcgcacagctactgtgtatgctgatcgaatcaactgagtatgatgtggtttgctcgtgtttcctggntccatctccatggaacagaactacacccacaacttgcaatagtgcaaactgtaagcattcatggcgatggttttntggaaccgtagtttatggatcaacaatctgggagcatctggagctntctgaggatcccaggtggtagtctgtagtatggaaacagnntatacagtgaanaagctggcaaatatgaaatgcaatcttgtcagaaatatgatatatgatngcattgtgctcactgttcaaaactgagtagnggtatcctttcattctctcg

SEQ ID NO: 20796 - DNA, 512 bp, Oryza sativa
  unsure (1)..(512): unsure at all n locations
tcattccagattctcatcagccgctcctcatatctattatgctcccccaataatgcanagtatgtgcatgcatgcttggatatgatcttcatatcatagttccaaacaaataataaaaccaacctctgcttaactgcaaccagtcaagagggtgtcggcccaatgggctggaaaatatcacggccctacacaacacatgttgtggttagctagcccagcccaggcagaattacatgctcttgggaggcggcaggatccatgagtcgccgtagacgaagtgtgatccggtgaagggcttggcctggatgtcgctcagcaccagcgaccacccgatcctcttgctatgcagcgccccgggcccactgcacttgtactctccgtagtatatcccgctactgcagcaagtaataaaaattattatcaaattagacgggcattagtggcatactcccctcatcctataatgtaaataattntaaggggtgacactggtattaatcaagaaagtatat

SEQ ID NO: 20797 - DNA, 468 bp, Oryza sativa
  unsure (1)..(468): unsure at all n locations
agaatgatagaaatcaacactttcacagcatgacaatcattggccagnaatagtggcaaatgtttttactctgaacataaattgtattgttaatatccaaatttgactcctagagtatgaaaaagaaactacagccaaattcaaaaacaacccaaacttgccacgcgaaggccggtctgatcgcaatcattgggctggtcagaccgatgacagggggacgatctgatcggcggcatgtaactagtcagaccggcagagtccgactcgagtccgatttgttggttctcgggtttctgctaatgcctgagaatttagaagtttgattgatttctacacctaattggatgtgaanaagaccctgggaagtangtccaccccttctatataaatataagggggttaaggtcgattgaaataacaatcaatcaatcgtcaaaatcaatttatttatccaaaccctctatattc

SEQ ID NO: 20798 - DNA, 374 bp, Oryza sativa
  unsure (1)..(374): unsure at all n locations
ctaatggttcaaaattatccatcaccggagtttcaacgcttcccacggntgagtggtccagaggaatattaagaatcggggttctcgatgattctgatgatcccttcggtattgatgagccttctgatcagctgataacgctagacgacaaagtattgtcattccataacctgaggttcctaactgaattggtaatagcaggttgccaaaatctcacgtccatttcattgcaaggtttgaggcaactcatatattcgaggactttggagatacgcggctgcccaaaacttttctcttccaatatgccaccagagcttgtacgtgagaacatggcagctacatatcacaatgccctcccatctctngaatatctc

SEQ ID NO: 20799 - DNA, 468 bp, Oryza sativa
agcttgaaagcatgcacacaaacacacagcatattgtatgtcttttctataaacagttagatacaacagagatgcaatcatactcctatactccttttgatcaatagtttcaccctcttcatcaggatccaacacctgtagaaccaattggtgttgaaatatggttgcaattctccatcttgaaccgcctcaaaagatcctttctgtacttcgtttgatgcacaaatgtaccctgaggtgtttgcctaatttgcatcccaataagtacgataactcacccatcatgctcattctaaatttcatacgcatagtctcagcaaactctactaccaaagcgtgagttaaacaaccaaagatgatatcatccacataaatctgaatgaacagttgattatcaccatgcttaagaacaaaaagcgtttatcaatcttcccatagtaaacctttcgaagcaaaagttctaagcta

SEQ ID NO: 20800 - DNA, 396 bp, Oryza sativa
  unsure (1)..(396): unsure at all n locations
ctcttcgctgcaccncgaggcacgcgagcactcatacggccttctgatggttgactaccactnaccttctcctgctgggtaccctccacatccctatccacgtgcccctgctgggtcccctccgcatacctctgcacgttccctttctcgatcaagtactggtttggatcctcgttcccctcttcttcattccagtactggctgctttcctccgcgattgtatcgaacaatatctgttcctcatcgcggtcagccatctgttgatacaagaaacatctgctaagtcacgagacatttatagtttaacaatctaagtcatgtatgctaagtgaaatgtcgtacattagaaccctacacaaccttacgtgcctagtctaattacacttcgtgatataa

SEQ ID NO: 20801 - DNA, 465 bp, Oryza sativa
  unsure (1)..(465): unsure at all n locations
agcttatggataagatggaccccaagctagtgttactgttctggaaaccgctttaactaccacaaccgtcataaggacccaccagtcagtgacccagagaagtgtggaggccttctgggccagcccaggttcggccaaaccctggctgcgtctgctcaaggtggctctgcacgtggacgatcgggatggcttgctgatggcggntgcaaaggcaaaatggacaattcgcatggctacaaccatcataccgaccctataaaaggaggagctcacttcattctcaacatactcaagcaagttcaagattcctcttcatactttatntttagtagtttagtgctaagtggagtagaatagaatagtcctcggagtcttcggaagaagttcggtatggctctagtagcttttatattctcttccgtaatactgggtggaataatgaaatacttcttatattctcagtac

SEQ ID NO: 20802 - DNA, 497 bp, Oryza sativa
  unsure (1)..(497): unsure at all n locations
ntactgttngacaccttntaagatgcatagtaccgactcctattatgtcgagtaactgcggtataaaaggagtttaaggtattgggcacttgatcacgcgccacttggcctaagcaaaaagtgcctaagtccctaatagaacgtgacaggccacacctgataatatgggctgcagacatattangcctatgccaaataatatgccttcgacaccctttaaaggatgacgcatataacatgctcccgagtaataaatcttccgggtaatatagaccaagcgtagctcatatgaatagcttctgatctgagtgattatcccttatgggatactccataatagatgtaacaattgaatcccaactggcgcaagtattcagttgataacccctacggggaataataaatagtccagtctttgagcatantaaatagacccatgatcatgaattcatgttgcatgtatccagagcaagtccaaaatgaagatataatacttg

SEQ ID NO: 20803 - DNA, 443 bp, Oryza sativa
  unsure (1)..(443): unsure at all n locations
agcttagacactgcgtgacagtacattgtaacccttatttgctttttggccatatcttggattgcttgctctcgaaaactcaaaagatgggacactaatatctgtagtgtggttcacaaaatgatcatgattatgcaatggtacttaactaattcgtgagtacacagctcattgaattaatgataccaacacaacatctatttatggtgcctgaatcagaaggctaacaacataatattcacctgcaagttgaatcccgctatgatagtaatgtacagtttgccttaaacttaaaacaggaaatatttcttactttgaaactgaggccaanaatccgcatcattatgatgaataaaaatacagatcctagagaataattaatagtcatgtttgactttatgatgataaatatctatatttgagctaatgaataattatatgca

SEQ ID NO: 20804 - DNA, 398 bp, Oryza sativa
  unsure (1)..(398): unsure at all n locations
attatgattagccttacttctggaggcttgtgtttatgatttagncgataattctgaggaattagtcgttgattcagaggaacttcctatttaccccgacgtggtagtttatgtgactaagtctgtccaatacaacggtattgtgccacgtgggtgggttcccgttgcgtccgccaccacagcgttaagtttaatgcgtgggcccgccacttaacggttctaggtcatatatcgagtatggcttatgatggagtaacacgtatcgtgctggtgtaaggctaaatcatgaatcttggaagggctctgttgtgagtaataaatcgggtacttatgtatcgcgtgccatgctcttgcatgattattatttcgcatcatgtgggtaaagtgtacgtactctg

SEQ ID NO: 20805 - DNA, 475 bp, Oryza sativa
  unsure (1)..(475): unsure at all n locations
agctncatactgcgaatcaacttgattcactgattattgacagctacctgtgagaacctatccttttccagattatgtgtcaagatgtatcctccactgctcaaacatgctntttctgtcaaccagcttatgttcaagctagttgntatcaccgaaaagtatttttagcattntcttttaccctaaaattgctcttgactcagtgctaatcagttgtgaggcaacacgttatccagaaaatgaggatccctgagttcttccacctcccaaccaaccccattcaacacagacaaggacagaggagtacaaaacctagttatcgagaaaagacattttgaaaataggggtgctttgaaaaactccgatgagctctctgttactaatgcatttctttctcctttctatggacanactttnggtagcatgtccgtccgaatctaaactagtgtcattcgaagcacagtacaattgttat

SEQ ID NO: 20806 - DNA, 434 bp, Oryza sativa
  unsure (1)..(434): unsure at all n locations
tgctcttgctgcatcttccatcttcttggctgcaagacacctcacctcagcggttgcaatgcttgcctttgtctgctcaatttcggcagccaacatcgtagcttcagatttcgatgcatttgatgcgctcttgagctgctctatctctgatgtcaccttcttgatctccatcagaatgtgtgacgaatcctcgcgccttctttgcctatcattcagcgtttgcagcttatgtgtagtgcgatccaattcaccctccagcgaagagatcaaggatgtgttggagcaaaccttctctcgacttctctccaccaagattttctcttttgctatctcattgcacagcgactcaacggaggctcttatctcggctagatcagctgtggttctggtcaagtacgctnttgcctgctcaagctgcattagcacttgaactt

SEQ ID NO: 20807 - DNA, 336 bp, Oryza sativa
  unsure (1)..(336): unsure at all n locations
catgtgggctaaatgtaaacttggtagccatggctaaagctctatatctaataaaattccaagaaaataacaaggatctgattccatttgtacgaacggacaacaagaacctaacaaaccacaagggggaggggtgaatgggtgaagttgaaaatcaaagtgttttgatagtttctgcgagaacaattncatctgtgatatcggtttgatattgaattattcgcaagtggtttggagatgattgatttacaagtgttgataggactgctgtttgttggaccggataaccggcaagggctgcagtcgaccggactatgtgtcagcagaccgccagct

SEQ ID NO: 20808 - DNA, 425 bp, Oryza sativa
tactcagctatacactaatcctttctgctccacagtcaccgcctgagtttattgatatggctttgaagtactatgatgaagttgctcttcctaagctggtatgtgataaatgaataattccccatgtgcatttattgtagttaagaagcatagtaattaacccataagatgttcaggttgcagattttggttccctggaactttcacctgttgatggtaggaccttgacagatttcatgcataccagaggcctacagatgcgttcccttggacaagttgtaagtttccgattattcttctatttgaatagaatgaataccaatgccattgatttccagttacttggtctatgctgaactgctaagcatctgtttatgtcaagctatcggagaagctttcacatgtacaggccctctgtgtacatg

SEQ ID NO: 20809 - DNA, 474 bp, Oryza sativa
  unsure (1)..(474): unsure at all n locations
agcttnctagaagattcacccacaatcttcatatactgttttcaacagncaagctcacaaaggtgagttctttcaagaatgctctgcaagacacacatcttgcttattaaagccaacagaactcattaaggcatagccaacctgccttgcagctcacgagagtatatgcatcttcacttggagagggtatatatattggtactcttctatagtttattaatggttngttctttccaagatctaattcacgggatctccgatcacatagactgggttaccaccatagtataactcacatgggtctcatacccatctccttcgatgcattgtctatcacatttcgtgatagtcccttcgtgaagggatctgccaggtttctcgctgttnggatgtaatccaacgttataactccggagtttcttaaatttctgacagaacttcatcgtctnttcacatgtctagacgatttcatat

SEQ ID NO: 20810 - DNA, 476 bp, Oryza sativa
  unsure (1)..(476): unsure at all n locations
ggctaggtgagaccaatgtaccacgttgtagcagtgttgtatcatatgggtgttgngctgcatgccaacctcaaaccttgtgagatcgctaaacactctntagaattgaaatttgtggagaccaaactaaatgaaatgtaacctaccctttttacttgggtatatgggcccatattctttacatggcttggaactgtaactctgtaagatgtttttagtcaaacttctctaaaatttatatttataacactaaattagtttcattaaatatattatgatattatgtttgctttggtttgaaagtgttactagatctttctaaaagcttaattaaatttaaataaatttaactataaaaggataaactctattataatatagagtaaagtgtacgggcagtacttaaacttatagtggtatgttatctaggtctctaaacttttaaatacatatccaagtcnanaacttatcacagt

SEQ ID NO: 20811 - DNA, 193 bp, Oryza sativa
  unsure (1)..(193): unsure at all n locations
agctngggcacagagggtgagagggaggggtatatgttcgtcttaaacacctctaccgccggatccattcaccggagatgacatcatcggcgtcttcgccggatccgccagtgggagctgccgatgccaccattaacgtcaccgccaccggcggatccgcgggagaaccttgcgggcggatggggaggggtat

SEQ ID NO: 20812 - DNA, 459 bp, Oryza sativa
  unsure (1)..(459): unsure at all n locations
nggaagtgtgtgttgaagtgagtgagatgatgtccttatatatgtgtaggtatgacggttggcgaagggaaaatgtccgaagtgccctctaaccgccatcatggaatgatctggagcgtccacgccaaaccccaacctgaacgactgtggttcggccaaacctgggctgggcccatctggcctggtcttcggcccatctcttcccctaatcctcctttatccatttcttggcattttgggttgatttactggatgtttgatgaagttcacaacccatccttgtatggacacagaattctcctcactttagtctagatttcctcccaacatcggggtttatcacctgcatataaatatacaccaacactgtggaatatgtgagatntatgcacctatcactatgttggatgtttattatccgaacttatacagatgttggcggatataatcgacatttaa

SEQ ID NO: 20813 - DNA, 424 bp, Oryza sativa
ttccaaaattcatgatttagccttacaccagcatcttacttgttcctccatcctagtcatactggatatatgacctagaaccgttaagtggcgggcccacgccttgaacttaacgccgtggtggcggacacaacgggaactcacccacgtggcacaataccattgtattggacagacttagtcacctatactaccacgtcggggtaaataggaagatcctctgagttatccgaactcatacacaccggcctaccagaatgtaaggctaaaccataaataatttactaagcttgggctatcccatactagcacatgtggttgtactgtatacgaaatgaactgacattgagtgaagtccttatgtcgtgttgggcgcactcttcccctatcggtacacaactaatcaccatatgtgcaccacttg

SEQ ID NO: 20814 - DNA, 432 bp, Oryza sativa
  unsure (1)..(432): unsure at all n locations
agcttattnntgaatttagacccgactttatgattatttttatggagtttcttcaacacttttattggctgattctctttcatgatctaagaaggcgaagttaaaaaaatccacctacaattattcttaaagaaaccaaacttaaaattcaaaattgagttggattataatataaaggaatgctaagcacacccatgaacaactttttgaaacctacctttgttgctaacaagggtgaaagcgacaaaatcactttaagtttgtccactaaatcattgttggacatattgaaatggtcaagaaaatgttaatgaaatttatcatatatcgacttctgagattttaagatatccaaaatatatcaatttgctccatgagatttgcaacttgattaaagcgacatctatatattggcaatctataccaagacca

SEQ ID NO: 20815 - DNA, 452 bp, Oryza sativa
  unsure (1)..(452): unsure at all n locations
tggccttctcttcatgaacgagctgccgattgacctggattgtggcctcgatgtctntgcattctcgacgctcagctaatctcagcttagcctttntcagcttgaattgatgctgctcaagatagacagctggagtaaggacatcggctagctcatctgggatcagagcttgaacttcgtgtagcctagtcctaattgatccacagtcaactaccaagctgtctagcgatgatgcctctagccgatgagagatatcttcaagaattttcttcacatcatcggataagggagctatggctttacttgtagtatcctcttctgtctcatcaaggtagtctccaatgttaaaagagaaaagatcggctaagacctgcaataatgattaaagaaagttagaggctaaatagacatagccgatctcagtatttgtgccaagaatactactgggatac

SEQ ID NO: 20816 - DNA, 462 bp, Oryza sativa
  unsure (1)..(462): unsure at all n locations
agctntnttctgttcagagggaggaatttgattagatataatgtctatagnacgctctactccaagggacaaatcaaacttgatttcactgtgcatcttgaacaatcaactcataacataatgtgtagcaacaattaagaatgactacagatgtatctgttggccttaccattgtgcgagtaattgcacgccccacagtagtcagactgaagctactcaaggaaaaccggcttggatcaagggcatgtaccaaggaaccggggaatcttcagcaaggtctttatcccatataaccttcacagaaaaaaaaattatgcccatgggaaaggaataacaaataacagaagtgttcatgatactgtgctagcttgaagaaaactgctgtaactggcagagtttctaaactacaatagagggggctactcttccaccatgggtttcctangtaaacncaacacacat

SEQ ID NO: 20817 - DNA, 387 bp, Oryza sativa
  unsure (1)..(387): unsure at all n locations
ctttattaatctcagacgattacatccaattgtgtacataatttcttgntaagttcattntacatgatatggttccacatgtaacaacttgtcagaaccgtgaagcaatcttctgtaagatggaattaagtcttgtttgtaacggtggaacctaacaatggataaccagaacttaagaagaaatctgctcccatatttttttccattcgaatganagtgggtatccactcaacacccaccatatgccacataacctaagaccaaacaccatctgaagtgcgcggcatatcctcaacaccttttctctatccaaattgcgccagcaactagctagagcttggcctttttttcatttgccactatctgagaaaaaggtgaacgatagtg

SEQ ID NO: 20818 - DNA, 446 bp, Oryza sativa
  unsure (1)..(446): unsure at all n locations
tctttgtggcgagtcttcggaatgtcttatggtccccaaagctccagccctgcctcaccgagaaatacgacgatggcaccgaccccttcgagtcccttcagatctgcacgacgatcatagaggcggcgtggggtgacgaccgggtcaaggcgaagttcttccccattccctccagggccaagcgcggagatcgctcatgaacctgccacttgcctcggtctactcctgggaggactcttgcagttgagctcccggtgccgtcgaagcccagaaccccctgtgctggctcttccgtagcggctagctttggtcctgctggctggctacggtgcccggcccggctcaactaatcgtcctttcaagcttcaagtattntcagtttttcaattcatcagcttaatatagcttgaggtcttatatctatttgtcccctgttcttttctcat

SEQ ID NO: 20819 - DNA, 462 bp, Oryza sativa
  unsure (1)..(462): unsure at all n locations
agcttaactcagtaactggatgtaaataattactctattttttttgttcataatattggtgactctttacttatgacagttactccctctgtccagaaatactacgagggattttattcctgggtatgtccagggacaatagtggatttgtctcctcccgaagcaagcaagcacaggctgtcagcctccaccatccatcactcaagccctatttaagctgtgttttgttcagcgcaaagtttggattttggttgacattggatatgatgtgactgataagttatgtgtatgacaggttgatgtgattgaaaaggactgaagtttggatccaaactttggatctaaacacagccttagatcatggactaaactttagtccctgcacatctgatatanaacactaattagaagattaaacgttactaatgacaaacccattcataccctggataattacgaatg

SEQ ID NO: 20820 - DNA, 465 bp, Oryza sativa
tacttaaatgcaataagatcctgacatatagggcggatttattatgtcattgaagcatatagatcgaatatggttaaatcagattagatcggctgaaactccgatactaccctaatcggtaaccagaggacaggctagagattgatattctaagcacgacttaatagatcaaactcaactgatgcagcattaagtatgataagaagaacaatatctagacaatcaagccgctgggtgtttcataaagtggtagatatcttatataatttaggacaacgtcgctatttaacctaatcggttgccttctattaacagatgttagccgattgtaggctagatgatgatattgccacagattatgtgagatatatgataacttgacgaattatatagacaagattatagcgtcatatagatggaagcactaatctcgagaacatatgtcgtcataacaagtgttacctc

SEQ ID NO: 20821 - DNA, 400 bp, Oryza sativa
agcacacacagggcataatggttaagttgtatgcatgaacaaagtcaacaaaaaaaatgatgacaatattggagccaattgtgcacctagaaatgttactaatcacaacgcatggcagatgccatagctagctgagatgtagctagtgaggagagagagagagagagagagagcaggccatgcgggctggacattaacatttgaacggatcacgtattagtcattgatgtaacagttaaaaaccaggccaattagagagaagaactcatctctaatgtgtcatatttataagccattatagatgaagaccctcatctataaacgattcataatatatgacacattacgtgtgtcattcaccgtatctcgtaataacacatcattccagatgttttgctat

SEQ ID NO: 20822 - DNA, 390 bp, Oryza sativa
  unsure (1)..(390): unsure at all n locations
tgcagcttgccgangtacaccgaacacgcacttatcggtgttcagttttatgcgggcggagcggagactctcaaaagtttccgctagatccgagagtaaggtctcttggttgtgcgtctttacaaccaagtcatcgacataagcctcaacattacgtcctatttggctacccaaagaaattcgagtagtacgttgaaaagtaagacctgcattctttaacccgaagggcattgtcgtataacaataaattcctatggnggtaattgaatgcagtttttcctcatcctccctagccatgcgaatctgatggtaaccagagtatgcatctagaanacacaaaaggtcgcaccccgctgtggagtcgacaatctgatctatgcgaggcagggg

SEQ ID NO: 20823 - DNA, 476 bp, Oryza sativa
  unsure (1)..(476): unsure at all n locations
gctacctaccttnttatgtcatattattctccgaattattaaaatagactatttgttccacgttttaaaataataagttttctcgaagttctttttacaatttaaaccacttgctgtaagctatatattttaagtttgtttntaaaatatttaatttatctcaataataaagtagataattcaccgtaataatctaaataaaaataagcagggattgccttgattcagactcattatccacaacgagcattcctatgtgtcaacccattcaactgaaatcttgcaaatccaaatggaggtgtgtaaattatgctaatggatgacaaattattacgtaagcacgcgggaatgcctccccaagcttctatacggtataattggttntaaaaagaactctcttaatagcatttcttaatttcagcttctcaatacgctagctagtatttcatacatttcaatggccttctcgaataata

SEQ ID NO: 20824 - DNA, 466 bp, Oryza sativa
  unsure (1)..(466): unsure at all n locations
agcttgaatcaacaatcaaaattcatgatttctaacgatttgtaatgcaacatcttaacaaacacatagattgagaaataaacactcaacacatatacctattgtatttatcactctttctcaaatagcctttagcacaaaataacaaggagaatttttaactntttattttcttgagccttcttgctcatatttntctcttttttatattccgagtacgtccctgtcgtcaagacttgttccagggatttgacacccattattttgctcacatcgaatacgtcctcgtcgtcaagactggttncaagggattcggattcattcttttaatattttattctctntttcacaatgagcaaaataaagctattgaggaataacatgtcaataaagcatatatatagagcatttataaatcaaaccatatgctagcttcaacattgcatattttcttaattctagtata

SEQ ID NO: 20825 - DNA, 316 bp, Oryza sativa
  unsure (1)..(316): unsure at all n locations
tataaaactcagcttcaccggagcgttcgacgcctggccgngcctgctctttggctaagtgggatcgcaactggatgtagaagtggntctacatcgacaacccataccccgccgaggacgacaaggcgaactggctctgtttttagcgccttgctgtctccatcgtcgctaaaccgaatatggaggtcgactgtacactcgattcccagcttatacttcttcgcaaggttgcgcggcggccaagtacccgcgacctctgcgaggagttntgcctacttcagatctccccccttgcccgcgactggtgggggggtct

SEQ ID NO: 20826 - DNA, 471 bp, Oryza sativa
  unsure (1)..(471): unsure at all n locations
agcttaaggagatagnggaggataactttatagtattatatgattagtgtacagtgaatgatattgtgtaaatggttcatctttacatgagctatattgtgtgtgtttttaaatgcatgcagtgtcttgtctcttcttgtacaatggtgaccacaaggttatatgttagtataggtccccacatgttcaatgtgaaaactcaagcgaaatttatagacccaactgcaattaatcaatgaaccgaggtcaatacgagtcatatcatgctgatatcagcggtgttaacgggacagaaaacacgatcgaagatgattatgtccgtctgcctaatgaaattgtcattggttatgcagacattgaagattcagtgaacgcactgattgaatatgtgaatatgtgttcccctcactcaatgatgagagatatacaacctccgcagaatatatgagcacacgggccattctctcaaca

SEQ ID NO: 20827 - DNA, 486 bp, Oryza sativa
  unsure (1)..(486): unsure at all n locations
tactcagcttacaagcactctgtcccgctcaactatggtgtgacatcatttttgcaaggtacttatccttcaatcatgtctttcatgcaagaactaaacatatatcaactgattaccatcttgttcgagagagagtagcacaaaaattattgcaagttggttatgtactaaagatcaagttgcaaatgagtntactaaaccattgtcagaacgacttccagaatacttcaaatacaatctcaacctaagaaggttgtgattgagagatggtgttagataaagtagttcccgatgtataggagataagtcattagagtttgttcctatcctttctcctgtacacggtttctctccggttgattagcaacaactgagattgagatcgatctattgtaaacgccacaatggaggcttgttccatctatattaacacaagtgtggcctcgagagacgttcaacgctttccacgcatctcattttacatct

SEQ ID NO: 20828 - DNA, 456 bp, Oryza sativa
  unsure (1)..(456): unsure at all n locations
agcttgctcagtttaaatgtcattggttgatatagtgtttcattaagactacagtaagcanaccaagcgacatatatgtttgacacaaaccttttgtttgagctgaaccttgatgtctgtggattggcggaaccattgctggacaaatttgattctatattacctgatcaatgcagaagataatcagttctgaatgcaaagcaatcataacattnttctttcgttaagttggtgctacttntctgtaattattacgcccactggaatggaaggggaaacgtatgcttgtacctgtaacatgggaaaggaaccttataccctgtgactggctcttagcagtcactctatctgcattactgcaaaactaaataagaattaatacataaactatttagcatggtaattctaagctgccattcatttgaggattcttctaggaatctaggtgtcacaagc

SEQ ID NO: 20829 - DNA, 469 bp, Oryza sativa
  unsure (1)..(469): unsure at all n locations
agcttagctaagcaaccacagcgggtcagagtccgtttgttctctttccactctgtcctctcaaagtgcttcaactccctgtactctttacatgagcatacgaattgcctccatattatctcaccgtcctttcgcttcaagttggtttttctcacactgaaacccttaccctctgcatagtctaaatagaatttggaactttccttctcgctttaaaaaaccacaggacccatcattgtatactccttctgatcctctaggctcacatagctcgaagtcattatgtcagacctcacctacggaatagtaaaaaaaacaaacagaacatgcacccaaatataaccttacgtcctttatacctcataagaataaaaaaaaagaacaaccgtcgcctgcataaatacattgccaatccaaagaaacacgggaaatcacattangaattcagttactgaggactgatataaat

SEQ ID NO: 20830 - DNA, 453 bp, Oryza sativa
  unsure (1)..(453): unsure at all n locations
ntggatgactatctntctaggtttaacacaattntgagtgatcttatatctgttgattcttcttatgatgcanattattcacaatctgaggtttctcgtcactttntgaatggtcttgatatgtctatttggtagatgaaagttacatcaattcangagtctgttgatatgtctactttgactttggattcgctntacacaaaactcaaaactcatgagatgaatattcttgctcgtaaagttgattctaggtctagtgctttggtttcttcttcgacttctttgaatgttggtgcttcttcatcatcttcttctgtacttgctttatttaatgccatgtccgatgagcaactcgaacagtttgaggaggagggactggctttgntatcntaacaaagttctcgagctattaacaaagtttctcgagctatgaacaatgtcaggaacagaaaa

SEQ ID NO: 20831 - DNA, 468 bp, Oryza sativa
agcttctcggcggcctgttggctgacggattctactaggggtcatgccacagcaggtaccaattcgccatgtaccgtcgaaacaacgccggcaaggagccctcgccgcacctcgtgtccaggctgcggcggcacgaggagctgcagcggcggtgcggcccgggcaccgccgcgtacagcaacgccgtggagagcctgaggtcgggcaagagcggcgggatcgggtcgccgccgcagacggagtgcaggtacctggtgtccatatcctaccgcggcctcggcaaccggatgctcgccgccgcgtcggcgttcctgtacgcgatgctcaccgaccgcgtgctcctcgtcgaccccagcaacgagatgggcgagctcttctgcgagcccttccccggcacgacgtggctgctgccgcgggcttccgctgacaacttaccagctcagcgtcacaccaccgagagtacgggac

SEQ ID NO: 20832 - DNA, 192 bp, Oryza sativa
ctcagctgatgcaaccccgcgcaccatgacaataatttgaagcaaggaacgttgttagcgctgacaccgccaggctgtcaaccctaaaccgacgttgtcatcgtggcatttcgaggcggtgtcatcatgatcgtgaatatcctcggcctgtctgcctaatcacctgatggtggcggacactggagcaatata

SEQ ID NO: 20833 - DNA, 468 bp, Oryza sativa
  unsure (1)..(468): unsure at all n locations
agcttaatgattgatttagctgctgtgtgattgctcaatttcttttggagagtgtgttcttaaatttatgcctgaaattctataagaaatgaacatgtgatagtgtatatgcaaacagattntgatacatatatatttatggtactctgtagagaactaatgacgacactaatttgtgaaggtccctagatctgttgaaatcgacatattgcatagccaatcttaggtatgatgatatacattngcaaagtaatgatntatattacattgtcatgactcacaaacacacatttgcttaactagttgcacgttgtgtgctctttctgctggttactttgacgattatgtgatgatgcatgttatctccagattgatcatgatccagacattggatcttgattnggacaccccatagcaactggcagcctgcatttggatccatgtggatgacatgatcagcattcacca

SEQ ID NO: 20834 - DNA, 428 bp, Oryza sativa
tagcaagtgtgagcactggttgtccgaagtcacattcttgtttcacgtgatatctgctaaaggagttgctgtggaccccgacacagtgaccgccgtcactgaatggaagcaacccatgacagtcacccatatccgcagtttcttgcgttaggcaggatactaccggaggttcatcgagaacttctccataatcgctcgacccatgacacatttgttgaagaaagaagagaagtttgtgtggagcccgcaatgcgagaaggcgttccacactctcaaggaaaagctggcttcctcgccagtgttaatcttgccagatactcgcaaggacttcatggtgtactgtgatgcttcgcgccaaggattgggctgcgtgctcatgcatgacggtcatgtggtagcctatgcttcacgtcagctacgacctcatg

SEQ ID NO: 20835 - DNA, 470 bp, Oryza sativa
  unsure (1)..(470): unsure at all n locations
agcttaatgattgatttagttgctgagtgattgttctatttcttttggagagtgtgttcttaaatctatgcctgaaattctataagaaatgaacatgtgatagtgtatatgcaaacagatattgatacatatatatttatggcactctgtagagaactaatgacgacactaatttgtgaagttccctagatctgttgaaatcgacatattgcatagccaatcttaggtatgatgatatacatttgcaaagtaatgatttatattacattgtcatgactcacaaacacacatttgcttaactagttgcacgttgtgtgctctttntgctggttactttgacgattatgtgatgatgcatgttatctccagattgatcaggatccaaacattggatcttgatntggacaccccatagcaactggcagcctgcattnggatccatgtggatgacatgatcagcattcaccatt

SEQ ID NO: 20836 - DNA, 479 bp, Oryza sativa
  unsure (1)..(479): unsure at all n locations
tagcaagtgtgagttctggttgtccgaancaaattcttggtctcgtgatatctgctaaaggagttgctgtggaccccgacacagtgaccgccgtcactgaatggaagcaacccaagacagtcacccaaatccgcagtttcttgggtttggcatgatactaccggatggtcatcgagaacttctccaaaatcgctcgacccatgacacagttgttgaagatagaagagaagtttgtgtggagcccgcaatgcgagaaggcgttccaaactctcaaggaaaagctggtttcctcgccagtgctaatcttgccagatactcgcaaggacttcatggtgtactgtgatgcttcgcgccaatgattgggctgcgtgctcatgcangacggtcatgtggtagcctatgcttcacgtctgctacgacctcatgaaggcgactaccctacgcatgacctggaattatcacagtggttcatgctctaa

SEQ ID NO: 20837 - DNA, 245 bp, Oryza sativa
  unsure (1)..(245): unsure at all n locations
cgagcactgctaatatcctgcatgaatgtgacaggcattaaaagatgaacagtctcaacctgcgtcaattaagaagctatttttcaaatacattcaattatgaagaaatattgtgtcgcgtgcctaattttgttttcaccggagcatttatgaagaattacatgaggcaactagctcttcacattccangtacagattaattatgcagctgatattaaatttttcaagtaatgatgaagcattca

SEQ ID NO: 20838 - DNA, 363 bp, Oryza sativa
tgtcttaaccatgcttttcactggtgcaccggttggacacctcttgtatggaaaggagctgcgctgctacatcccttaacatgagccggatagctctaaactaatggataattcacttgtcgacatgtactccaaatgtagacaaatggtagttgcacagagagtgtttgaactgatgcaatttcgagacatgcatgcctacacatcactggttttgggttatggattgcaaagagaaggacatgtatcactgaagctctttgatgaaatgattgtgaacagtatatagcccgaccatgtatacttcgttgcaattctatcaacatgtagccactctggcctgtaactcatggcagctactat

SEQ ID NO: 20839 - DNA, 270 bp, Oryza sativa
tctcgtcgacactatgctcgtgtagagcattgttataggataggcaactaatagctgccatgtatctattgtcgatcaattcatacaatagttgtctactatactattaggataaggtcacactgtcatacacacattgcatctgggactctgtgctgcagctggctacagatcttgagactgctgctcttctctatcatcctttacctcaataaaatatgtatgtagctgccaataatctactataggaactgctcttatggccctacc

SEQ ID NO: 20840 - DNA, 414 bp, Oryza sativa
tatatctcctcacgctcttcatcgtaatacaaaactgtgatgttccccaatgcctctgaatgtgtctttggaacttaaacaacccttgcttgttaaggttccctgcctttattttggccaagcatttttcggttaagatctcactgatatgtatggagcaagctgcacaagaaccaaagtgaatatcatgttatgtggggacaatatatgcatcagccttcataacctactgcagtatgtctgaaaaggacaaatttcttatcaactgcagcatgtctgaaaagcatacattttacgagcattaaaaattatttagtacgatacagtatattataagtgcatcagtatgtcaacctttcgatgactcttatattttattgatattcatagctgatattactcacttcgtactca

SEQ ID NO: 20841 - DNA, 258 bp, Oryza sativa
gcttgtccacagcttggtggcgccatcgttcgtggttttcggtccctacgaggtggagcccccctcggcacctcttgagccacgcgccaccgactcgctcattaccgtcggcggtcgcgagcacgacctcaattgctcctctcgttgagctgcttcgatccgtcacctgatgcgccacctcgccccgttcaccccattctgtcgtggtggcaaaggatgaagtgggaatgcgttgcactcagaggaggatggggaggc

SEQ ID NO: 20842 - DNA, 398 bp, Oryza sativa
  unsure (1)..(398): unsure at all n locations
atatctttgagtggatggaaggatctctgactccagccacaggtaagacatgacctggcatataccttcctcaatctccgcctttatgttccggtaacctgtatgtgccattgtcagacaggatacaaagaaattaattaatgttcagataggatttcagaaaatgggagaaatggatgttcagatgattacctttgaggcgcaaccacccatgcatcaattcatgggcaagaatggagcccgttagcagcctgcaattgtatggaatgtttatgacttcacacaaatgatacancgaatgtagcatttgatgtacatgaaaatgganatacttgtgaagaatgcactgacctgnggaggccaaacaatacaagaatngcagtgactttcgcatctct

SEQ ID NO: 20843 - DNA, 365 bp, Oryza sativa
  unsure (1)..(365): unsure at all n locations
atccttagagtcacctgcngctgcagcttacagcctattctnggccaggtgcttcgccctctactcgtacanagaanaaaaagggagaaagatggggataaagaataagaaaaataggaagatgcacgccaggaacaatacacgaataaccaccaccaccaccctttgctgcttaatcgatcggcaacaaatctttctgggtggtctggggctcaactcccccatcgccattttatgcccgaacctgtttctccagccaatttgatgaggattaatntccaaacgggctccgatcgatctccatgattaaccatcccgcgtggtgatgagccgccgccgccgcatcatcctcgtctcccgatgca

SEQ ID NO: 20844 - DNA, 398 bp, Oryza sativa
  unsure (1)..(398): unsure at all n locations
tactcagcttgtgaactctcaatttaagatgcctgtatccgagcgcttattgcttntaatttctttctgtgctgctctaactatgaaggaccaagctaagttcactgtacaatggcatattaagggcccctttgaatcgcacggtagaaaaaacggaggaatacgaaaaacatatgattctgacaggaattgaagtgtaaaacagaggattgcaaaacacatgataaacacaggaatggtcgtttgattggagcgcatgaaaaacgcatgaatcggatgagagagatagactcaaaggaaattttccaagaggttggagctcttgctaaatttcctccaaaatctacatgcaatgtgtcattccataagaatttcataggatttggaaagcttcaatc

SEQ ID NO: 20845 - DNA, 476 bp, Oryza sativa
  unsure (1)..(476): unsure at all n locations
agcttaggacantgtgagcgatgatgatcaagtgctctacactcacaacgacgattcggtcctgctctgttcctggtcctaatatttgcatacctcgagataattgttagatagcacaaccaagtcctcctcctcgaattgttcgagttgatcatctgacatggcattaaataaagcaaggacagaagacttcgatgaagaagcaccaacatccaaagaagtcgaggaagataccaaagccctagacttagaatcaactttacgagaaagaatattcatctcatgagttgtcagttttgtgaaagccaatctaaagtcaaagtagacatggtaacagacttctgaatagatgtaactttcatcgtccaaatagacatatcaagaccattcataaagtggcgagagatctcagattgtggataattagcatcataagaagaatcaacagatctaagatcacctcaatatttattaag

SEQ ID NO: 20846 - DNA, 451 bp, Oryza sativa
atcagcttgaccttcttgtaactctagcataagtttcccaacgtttcaactggaagcaagatcttcgttcagctacagcttcagaagcttcaatgccaaaactgacagcaacaagcaactcttttccccctttatctatactgcaaatcaactaacataatcaggtgtcaattgcaatagcaagctttctgggtaaacaacaaagttcattgtttgattcatgctatacctgacaatgacagctgccagtaactggctgccctcaattcttatgactggatgccccattcttatagaactgtactttgagggcataacatcttgtatgtagttctcatcttccgaagaacttgatgggtacgatgtactttgtcctatcttgttactcgtgccacttctgtagtaaactgttgctctcctatacagccagtgagcagcgagtccatattct

SEQ ID NO: 20847 - DNA, 473 bp, Oryza sativa
  unsure (1)..(473): unsure at all n locations
tactaagcttttagattcaaataagctgtggcaaatcgtgtaaccccagttcgttccaagtctctggtaagaaactttctcatcaaatccaacaccctattatgagcatacaagaaaacagtcacttgtcttgcattagcaatggtttcctcaactggtccaagcttcccaatatcctcgagcatgagatccaagcaatgagcagcacatccattccaaaatattgatggtctttntgctgtcaatagacttgctgcagttgtgttgacgctagcattatcagtcaccacttggacaacatgttgttcccctatctcttctatgtacctgtccacaagttcaaagatatatttgccatctttcctgtcacctgagcattccactgaatctaagaagagtaccccatgagcactatgcacaactaaattcatcactcccctaccccttctatctgtccatgcatctgtcatgat

SEQ ID NO: 20848 - DNA, 369 bp, Oryza sativa
cgttcttctcaacttgtggatcgatccatacattttgcatgggattaatctatccttttctgcgtcaatttgtgccgataccaacacggttattaattaggcgatacaacttgtcggatgaagggagccaagtggggaaacaatttcctatttttctgttctatcctaaatggagcgtgaatttctcaatcgaaaggattatggacagtataaagccacgcctaattctaattggatagattgatccctgaccactgcacaattttctaagagagctcgaggagatgcccgcgatacatctctcacactcatgccatatgcacatgcgtgccttgtgcttgtgtgtgcaatgcacaccggcctatatgc

SEQ ID NO: 20849 - DNA, 152 bp, Oryza sativa
gacctcagagtcgcctgcagcatgcagcttcgactcgaatagaaggcgaataagcaatgttcataatgttggccatatcagcaattacagttcataacagggtcatataagcaaatgtcccatgtctaaaagacagtggtcgacacactggg

SEQ ID NO: 20850 - DNA, 250 bp, Oryza sativa
  unsure (1)..(250): unsure at all n locations
ttttttagccgcagtattaatagcttcaggaatcacataatgatgagaaacttttctgccaagatcataattctcagccataatgtaagattgcatcctactacaccaatgagaaaaatccgttccatcgaanatatgaggcttagttgtatacttattagaaatagccatggcaaaaactcaagatcgggtaagatcaaaaagagcatacgtggctctgattccacttgtatgatcgaatcacaagaac

SEQ ID NO: 20851 - DNA, 167 bp, Oryza sativa
  unsure (1)..(167): unsure at all n locations
agcttggcattcgagtgaacccatagacactattgcatctctctgtttccatcactcgatctactctggtgttatgtctagcctttcaccttgataactatactaagcacatggattctggngatgacttcttgcacggtcaatccggattaatacacacatgacta

SEQ ID NO: 20852 - DNA, 453 bp, Oryza sativa
  unsure (1)..(453): unsure at all n locations
gctgtctgtctgaagcctatttcttggcaattactttcttctaactactttgtcaacatgaaatgagcaaccctataatatgtttgatgctaaccctataatatgtttgatgctatcatggatggaaatcattggttcatggtctggaattgtgtgcttgatgctttcaccttttctcaccttgcaaaactgacctggttgatgatgtttggaaaatttgcattcggtagcagtgtagcatcaacttatctcaccttctaaaattgtgctagctgttattcttgggtgatgtccccagtcacagtgagcgtatggtcttacttgtccgatgggaatacaaagaatatgatctcactcgtnctanatttcttctatctaattaaaccctaattggcttgatatactnctatgggttgatgtgtactgaatggacattagtctatgctatggcat

SEQ ID NO: 20853 - DNA, 275 bp, Oryza sativa
agtgatgatgtctctagccgacgagaaatatcttcaagtgtgttcttcacatcatcagacaggtgagctagagccatgctagcggtatctacttctcgtgtcttcatcaaggacatcaagatagtccttgatgtcaaagagaacagatcggctaaacctgcagaatatttaagaatagtcggagccatatagaatagccgatctaagtcctggatcaaaagaacctacttggaagcaagacagctggtattctcttcctaacatatgactcctat

SEQ ID NO: 20854 - DNA, 367 bp, Oryza sativa
tacacttgaggcaatattatgacatggaatgaatcacacttactgactaatggttgataagggattccatttaattcgagtgcatagagatgtaattgatgagccaaatttggcaatattaattagcatggttcaacacccagaagtgaaacacaataccaacaaattaaaaagaaatgcataaattttcatgagtcttatctacagcatataatacaataccttctgaagaagccaacttgcatataattctatattgttcttatcacacaacttgccacaactaatagtttttgaaagccaacttgtcacaactaatttttttatgcactattataaaatcacatactcatggaattatgttcat

SEQ ID NO: 20855 - DNA, 398 bp, Oryza sativa
  unsure (1)..(398): unsure at all n locations
ttacactcattagaattctctcaccaattcttctgttagtacttttcttgaatccaccttttgcgccaagcttattttttgagaggccaagaaagtgtcgcggngatatattgcttaacagttgtacttcagactcactgctttctgatgaaacccttgcagttgaagaactttcactctgttgagattttgttttctgcccactataaccaagctgtgtcttatttgaccctatctgatcctttagattgtccgatgttggctcctcaacatcaacaagcaaatgagaatcaatctccatgatagcatctgtgttagagacctgacaaaaagattataaatgatgtaaagatcagcaaaacggcatatgcctatgtttcggatatctaaatcatcat

SEQ ID NO: 20856 - DNA, 90 bp, Oryza sativa
cagctttcaagcggacaaactggtttatacaccattccaaacaggtgcgaaagaaaggccgcaatcaggcaaggtaaaacacacagcaag

SEQ ID NO: 20857 - DNA, 348 bp, Oryza sativa
cctcatcggccgccacctttgcaacctcaatccatgatcattggtggtggttgaacacccggttattcctttccttccagatagatcatgctaccaggatgattaccatgtcgaacccacgctgtcgatgccggtgaactcttcctcgagcaaccagccaccaattgatgaaggatgtctcagccaccgggagacaatccatgcaaccaatggcattaaggataagccacgaaaattgaagggactctggacatgcaactatgatgtggtcgatggactagtagtgctggtcacagagaacacagcgggctatgtggtggagtcctcttgcagtcaaccgatccgtca

SEQ ID NO: 20858 - DNA, 230 bp, Oryza sativa
catgtgcgcaccaacccatgcgccttcggcatatactcaaagaacaatggctggtcttggcagtattcgaataggtgttcaaccaaacatcgtggctcattcacatgacattagcttcgccatgtgcacaaccatacctaggcctcacatcgcattaccatcaatgcatggcgctgcggcagatggtgaaaggtatggcgctgcgagaatcatctgaatcccccaccctc

SEQ ID NO: 20859 - DNA, 347 bp, Oryza sativa
  unsure (1)..(347): unsure at all n locations
actatagcattnaaatcataatagtattctaatatgtttatgttggtagattaaaactctatgtaaacacatatacgcaactatagcatctaaaacatagaagtatgctaatatgcttatgtcgatcgattatctatatgggaactaaattatacatatatggttcaatcagattagtaaaaaaggcacatagagatcggtgttataggtgccgaaagtgataaaatcggcacctatanaccatgtttcacctctacaggtcgaaaacacaataaaagccgcacctctaatagactacaggcatcggttaattaatagacccgatcgcttaatctattatataccaa

SEQ ID NO: 20860 - DNA, 499 bp, Oryza sativa
  unsure (1)..(499): unsure at all n locations
tccctgcattaatntgtgcctagctggagagcagacttatttatatctggattggtcatttgactgtacgacggcatcatgatccatgcaattggacgctcaattatatagttgacctcggccacaggagagtgtgaagtgaacccctgcgatgaacaccgtgccatttgttattttcttttgcactgatcgaagtggaaacacatggtcggtcgtccagagtgacgattgacagtgtcatcatgatgcataaaccactgagtagcttcgttggttacttgctggaacgtacggactatacccttcatccccgtttacttgtcatcagttagtagtatcatctttaaacattattaacactaactgttaaatgtctaatttatgattaatgaaaattatctgtgggcattatcaatgtatatggtaaaagtagtccatatagatgggacccacataaataaattttatccatgacantcctcacaatgtatatggatac

SEQ ID NO: 20861 - DNA, 82 bp, Oryza sativa
acacagagcggctccttttggtactggtaacaaacaaaaaaaaaaaagccattggacaacgaatgaccacgggaaaccaaaa

SEQ ID NO: 20862 - DNA, 301 bp, Oryza sativa
  unsure (1)..(301): unsure at all n locations
tatatgaaacaccactcatgtacccacggcaacattntgatcacacacgccanatatcaagacatatggggtgaaacatcggacaatcacgaaatattccggtctacacattgattcttcctcctcttcaatgggtggatgtccaaattctgctttcaagctgaccacccaatgatgaagatgggtcagccttattccgatgacgaaactcatggtcattactacagacatgacgagcagaccattttcctcgtgacttgattctcaatacaattgttgctgctacttgttcctcctcttg

SEQ ID NO: 20863 - DNA, 401 bp, Oryza sativa
  unsure (1)..(401): unsure at all n locations
tatcaagtctactttcaaatggatgcagcctcatgttcatatcttatctggagcgagcgcaattggcattttactaccgactattatctgtccatggtgctgcagcacctcttttggcccaatgggctgtgtatccatgttgggcccattatgggcgcgtcctatggttggagcacgaccctatggtcgtcttcccctctttttatacctctagtcgccgccaagaacaagcgggttttgatgatagagttagcttcttgctaccggctcgcatcgcgcgtgttggctaataccgccgtctgcctgtatatcggaaccccaccatattgtgttngatagtgaaactatcatctntatctatcaatttcagtgcatgtcactactgttcttgcttgttcttc

SEQ ID NO: 20864 - DNA, 391 bp, Oryza sativa
taattatcaaaattcggcaaatctaagacaaaataagtggtcaaacctttgtcaaaatcgggtaaataaataaaaacttctgataaaggatggtcaaatgagcaagggcataaacgatatttttattacaaggtaacaccattatagcgccttctcgtaatacggtcaagtgtgatcttcatttctaaaaaagaagggcaaatgagcaaacttaataaaacatggttaaattgggagttaggctttataacagggtcaaaaacgcaattgccccaaaattttatgcataatgaatgtatatgttgacaatgatggctatgaatttatggtctagcactctacatacttacctacaaatgggagtagcatatttggtgcgataacactcatc

SEQ ID NO: 20865 - DNA, 322 bp, Oryza sativa
tgatcattatgttgcaatgtagttacatagactggccaagttttgttcttcattaatcatccttgattgtgttcttgcaaggcccacaataattgtggactgaaatactttggcgctctgaaatgtaaaatcctgctcttgatagcttcatgttggacaactagccaacttggaagtgttacaacaaaaggagcagataaaccatcaacagataccaccagttctcccttgaatttcgtgtttttgacgttgtgatctctatctgtttaaattactttcttattaagatcacatatatgatggttttggcaccttctaaatc

SEQ ID NO: 20866 - DNA, 484 bp, Oryza sativa
  unsure (1)..(484): unsure at all n locations
cacccactgtctctctttatacggctgaccttctctttcacctaactccttcgtgctaaataataatccaatcttaaggatgtacctgtatatacatgtcatccaagtacaccttctgaatgaggtttctttatgacatggagtatcatgcagcaggcaagtcgctatggtgttgtgacagcctgtgtcgatgatgctagcaatgctcctgttgctctgcgccgcgttcctctacaatgcacctttctgtgagttctcacggcgacagaatgctcgcgacacaatctgttgccgctgcctagagacatatnggagagatttgctccggttcaacagaaagtaccttgaggtaccaatacctcacgaaaccaaatcctttccgatcgttagatctagctagctgagcatgatgggcatttgtagaattaacgatcagaaatgtgagctccggaacctcgtgtaatgaacaaaccaatacaataat

SEQ ID NO: 20867 - DNA, 291 bp, Oryza sativa
caatttttaatttttctaaaatagataattattagttgtgcgaatcttttgtgttaaaattatttcgttaatctaaactacgctgtattttaattctggttgcatacagattttttctattttgttagactggggatgaggttaatttttttcttggtgataaaaataaatgaaataaatattattttcatcttttatgaacggagggtagaattactggtactcgacagaaatgcagaattagatgcatactctgatgcttctatttgccggagcatagattacttctct

SEQ ID NO: 20868 - DNA, 196 bp, Oryza sativa
ctttgaggtttgaccgcccccttgtaccttgctgaccatatcaccgtgcttccccctcacttctttgggaagggggacagtcgaccccccctactgacggcttgggctgatgttgagtgtcccggcgtccgtcggttgcacagcatttcagggcttttagctaatctcggatcccacatctaccctctctcgtcgc

SEQ ID NO: 20869 - DNA, 408 bp, Oryza sativa
ctaagcttggatggcgctcgtgtgcataattctggcgaacaggcagtctgcttttttgtttatgaaagggaaatcaagtacactatcgagctggagaggaatgtgcaaacactgcataccgatgccaccacgctgtctgcacagctcacgcatctacaagtatggaactttgtttattccgagcgccagattaacctcctatattgtcttatctaatcagcttaacttcggtagtcaaattgttttgtttgacatgtattaattgtgcaaagttagagtaggttacacgaaactttaatgttttgactcaatgattgtcatgcatgtgaagaactgctgttagaaagctactgcttgaacacttttatgttcttagaaacataataggatgttgctgtatcttggccc

SEQ ID NO: 20870 - DNA, 207 bp, Oryza sativa
  unsure (1)..(207): unsure at all n locations
tgcagcatgcaagctagnatagcggctgagtctagggctagtgctacattaaaacacccatcccgctatgaaaccgccgagtatcatatatgctataaaatctagttcgagctatcattatgatctcatcggcaagcctctatcatcgaaaacagccgatgaggtaaatagctgcgacgaactagaatgatataagtatatcctacc

SEQ ID NO: 20871 - DNA, 395 bp, Oryza sativa
  unsure (1)..(395): unsure at all n locations
agctngacaacatanacagcagcagcatagacaatatttactatatcagcgataaaaagggacgagacggatagaattacctaccatgatcaccacaccattccattccatgccatgccatgccaagaagtttaattgcggataggggaacctgagctgctgctactacngctgtagctagaggcacttctttctcttaaaggcctaccaccattgaaaagaaaccatatgaatgctcaatgttctattttacgatgccacacattaagctgttgagagggaaaggacataatgttanaccttcaggactggactctgacaccttctggtcctgccagaaaaaatgttgtctgtcaagagaaaaaaccagacaaaacatttttcttcttcaaaaa

SEQ ID NO: 20872 - DNA, 482 bp, Oryza sativa
atatcacacatctatagagtgtgagatttcacattctttttggacaaatctccaagaattttatccgtgtggtgtggtgtggtgtggcgttgctaactccacccggaactgaattaaatatggtatctgcctatcataataatgattaaataacccgaaaggtactggcagcatatacgtagcatctgaacaaactgaactcagctgctcggtccatcttaatcagagtttcagctgaagaaagttaatcgatttgttaatcatgttgttagattctaaccaaaaactaaatgctcaagcctgctactgccagccgctttgcttgacctctgcagtatgcttacgcggattacaagttagagggaaaacaacaggttggagaaacgttagtgaattatgcatgcgatcgatccagacgaatagtggcctgagattatcacactgacacgacatctcggctgattgatgcgtactgagctgac

SEQ ID NO: 20873 - DNA, 227 bp, Oryza sativa
ataatgctacctgaatcttggccctagtgaaagcatgacctgatagacaaaatgcaaataagccaaaatgccttcatcaagataaagaagaacaggtgtcactgaggagtaagacactacttaatatatacctcatcaatagcaacacgaccaaggagacctctatcggagagctgttgtagcttagccttgagcccagatgttgcaacaactcaggagtacatata

SEQ ID NO: 20874 - DNA, 386 bp, Oryza sativa
  unsure (1)..(386): unsure at all n locations
aaaaaaagatttggaatgctagacatccctctaaacacttttaataagatagtgtgaaagtgtggagattgaacacgacatttccaaattgaaatcacacggccatcactgcactatcatataacctaaccatatgtgtgcttctcatttattggcaattcaccgcgtgagatgagaagtccttctctaactattctcagtggtttgtttacataggcttggtcgcgaaaaaggagagagaggggttgggaaaaaaagtgtcgaacaaaggtgatacagaaatgtaaatgtatgaatatcactgacgcttcggacatatgattaatccgttgtggacatatgtaaatcatactgatcccatgaaggaatnataattatctgatcat

SEQ ID NO: 20875 - DNA, 292 bp, Oryza sativa
atctgcgagtccgcgacgcgagatggcgcaagccgctgctggtggaaccttccataatgttctcgcgcggtggtgggtgcgaccgcgatatgcgccgatgcgatgtgatattgatcgatcccgtctctattcgtggcgcttctgctgctgttgttgctgcaggatgggaggcggtgtctatcgatggcagtagctgcggcggcctgcgtgtgtggtggttgggtattgtgtgctgagtgttgtatggtgcggagattttgcgtgtgcaaggggtggtcggtgtcatctctcc

SEQ ID NO: 20876 - DNA, 77 bp, Oryza sativa
ccacaccgcgacaggggggcgcaacacctatggcagaaatggcgaccaggagtggtaaaccaagggcaaggccgcaa

SEQ ID NO: 20877 - DNA, 470 bp, Oryza sativa
actttcgtgctgcgttctgatacacttaatgttgcttttattattgccctcaattcgactggtaagtttggggaaattgctgcttacttgtgctacgctgctagcatcactttggcgaacctaataactcttctagacgatggatttctcactaaatttgcgatcaattcggtttgccgagtggaacttgcggtgagtggaggctcctgaagtatgtggaggaagcggagtttggcccatatgctgggctcaacacggtgctcatcatcggttcattggagtcaaaactggaggcgttgcaaggtcaaattcctaagttctcagacttcgtgcatatagcatttcgcttaaccatcctatattgctcgatgcagactcctggatgtggatgtccaaggaatgtgcttcgggattgctctctggagcaaggtccggggtactcgcatatgtgcctatgcgtatattggact

SEQ ID NO: 20878 - DNA, 293 bp, Oryza sativa
gaagtgatccttggggcacgcctaattgatgtcagtgaagtcgacgcacatactgcacttactgttggcctttcacaccatgaatgggttggctagccactctggatggagtacctctctgatgaaaccagcccttaaaagtttatcgagctcttctcgtatggcatgtttccgatctggtgcaaatatccgcagtttttgctttactaacttggcatcgggtcgcaccataagtttgtgctcaatcaccttcctggggacccccggcatgtcggacggctgccaagcgaata

SEQ ID NO: 20879 - DNA, 365 bp, Oryza sativa
  unsure (1)..(365): unsure at all n locations
acgacgcggcctgttccacgtttctcaagtggaagaagaagagccggctctgctcctggctcacgcatacatcgagctacctccagcggcaccggccgcagcggcttttctccaccttgatgagccgaaggtactcgtctccctttgcaacggcttcaacaacgacaaggctgatgagtggtacctcgacaccggcgccacccatcacatgaccagccgacgggagttcttcaccgagttcgactccggcgtccgaggctccgtcaagttcggggacgcctccggcgtggagatcaatggtgttggctncgtcaccttcaccgccaagtccggtgagcacatgctgctcaccggaatctactaca

SEQ ID NO: 20880 - DNA, 400 bp, Oryza sativa
  unsure (1)..(400): unsure at all n locations
agcttttgcatcnagtactctctcttctctgctcattgtttctgcagccaagcgtctccataggccatagcctacccaagcaccggagctgccaatgcgaacccatcattggcgggacttgccagacatcatatttcttcctcaggtggtctctctgctctatcatactaaaaccctgatgttggctgccacaacatgccattgtcacctacaaactgcactgttacagcaaatgactaatggcttcaccgttcaccccaggcagtaccattcaagacgacaccatcgaccactgtgtgactttgacaaatgacagatctanatgcatgagattgtccaggtgaatcagagttgcatttgtccccatactttttgaaagtttggactggaagtctcatgt

SEQ ID NO: 20881 - DNA, 151 bp, Oryza sativa
ccttatctactgaccagtttaaatctacggttttttttgtaaatggggtccataagcatctttgaacagtgctcaacattttgtgaaaatgtgctggaaaaaacaatggttatggaaatgttaagtcggtactgttctgaaattgctattt

SEQ ID NO: 20882 - DNA, 295 bp, Oryza sativa
ctgcagctcaaattctttaaaagatgagagcatctttaattctaataattaattaggagatatatacaaatctacgtgcctaacaggtagcaactccattcttcaatattatcttgttcatatcacatgtggagctatgttttgcgcactttctttgcttcaaaattttgttggtagctgatgatagagaatatttgtgtggagaacatagaatatttagaattctggttatttgctaagaacgttgtataaaaatcttaaaggaaatattgtgaagttttcttgtattttgaaa

SEQ ID NO: 20883 - DNA, 373 bp, Oryza sativa
  unsure (1)..(373): unsure at all n locations
tcgagatagtgctacttgaagtttgatggaacaataaagaatttttggtgtcaaaagaatgtagaggacaattgtattcattcaaagttaagaatgggagattcattntcctaactctgtatgttgatgagattctactggctagtagtgatgtcagtctactacaggaaacaaagaaattcttgtcctcaaactttgacatgaaagacctcggtgaggcatcatatgttttgggcatatagattcaccgagatagaacaaagtatgcattgggactttctcaaaaggtatatatatagaaaaggtgttaaagaaattcaatatgtacagatgcagtgctacacctgctcctatagtcaaaggcgaaaagtat

SEQ ID NO: 20884 - DNA, 363 bp, Oryza sativa
atctacatggtctaacacgggatacatttggagaacacataatacacccaatgaatcgccgtttttgttcatgttcgctaaagacccaaacagaagacaatccacaccctatagaaagtaagtattctctattgttcgcagatcagtcgcaagcaatctctcatagaacagggcccatataaatttagcctgatgttatgcatatggagaacacaaattacactgtatatagagatgtgcaatattatagcagcatgaacattattacatcagctacatcaaactgcaatcttatatcctaacaccacagtgtaccattgacttataagtagtcgtctaacatcactaacatcattctattga

SEQ ID NO: 20885 - DNA, 374 bp, Oryza sativa
  unsure (1)..(374): unsure at all n locations
cggagtactagccgatacatgctagatctatctgatcggctatgctatgaatgcttataatcttcttgctaatatatatattttgatctaagtgatttatacagtctcagcatggcgaccgatctatcctaatcacttgatttaagtatatattgatggaagtattatataccattaatatctacagccgatcgaaaagatttagttctttcttgcttatttatgattgccgatcgattctaatatgacatcggctcaaagataaatgatacgtcatcagcgactagctgatcggctatcttttatagatttaactgctattttcctgctntatttcttggtgattggaggatcaaatcaactggcacactcac

SEQ ID NO: 20886 - DNA, 489 bp, Oryza sativa
gcttaaagaagctcgagagaagagtgttgttgatataagaataactctgatttcttagtctttaaagatccagtgctatttgtaggccacctatcagacaactctgctctaatggtagagaagagatggatggatgtagctgaacgttctggcgcaccatttcatagacatatatacggtacatgatccatgccgtccttgcacatctcaacttgtggcacttgcgacaggcatcccattcttttgtctgcactcaagatgtgaaatgccatacatcgaatgttgttaatagatccaaacagctagcatcatagaaatgtccgctgatatggagtgatagcaactaatatgggttaatgctgtcaaatggctattgtccttggtagcctagctgatctgtattctatagcgtcgacattagtgactatccctcacgagcttgtctcttgtgctgccatatttgcgaccgcaactatgttcagtatgtat

SEQ ID NO: 20887 - DNA, 429 bp, Oryza sativa
aatttcagcacaaaacattgaatgcatgcttaaatatatcacctacacactttgtgtttcaacatccttaaattgatgcaaaacagcataacttaagcatttctggtataccattgaatttgcagaactagattcatccaccattactctttatcaaatggttggacagccatcaatgaagtctaaataaaattaccaaaaaattagctcttttacttcttgttgcgtggcaaaattagtattaacaactagctaagcatctaaaatattgtcaatcctgtgcagctaccttcatctgtgagttcaagggtaaacacaacaaaaaagctcatggtgattctgattccaaggattgcgtatagaatggatataactggatgtagcggctggaatttcagaatattatggaatatcatacagatgaacatg

SEQ ID NO: 20888 - DNA, 310 bp, Oryza sativa
  unsure (1)..(310): unsure at all n locations
agctctgaaacaatagaagaactatgatcttgcgtgtcattgctacaattttgaatggccactgaactagattatgccttgatcatacgaatcaacattgtcatttcaccctaatatacaccatgatatccccatctagaatttctatgagttttcatgatntttttgtttgtcaaccctgaagcatcggctatcctatgcaatgctcatagcctcataatatttgttcaatccactaatcctgcctactcatagggtagagcagatattcatctggtaggagcattatttaccccaacaatgacacatg

SEQ ID NO: 20889 - DNA, 388 bp, Oryza sativa
  unsure (1)..(388): unsure at all n locations
ctattaatactcaagcttcngtggagtcgccgccacacagtgaaatggtctcgcccattcctgctggcacattgcccgtatgcatgcacgatgcgagcatgactcctaccttcgtctcgccgccgggaggtggttcggagaacatcgactacgaccacaatgactgcccacagcggtttcgcaagctggacgaaattcttggtgagtgcgatcctccccgtccaatcatgcataatcttgtggaaggcgagctgcacctgcatgtgttatatgagccggtagcactcaaggatgcagaattagatgagccggtagcactcaatgaggcagaatcttatccgcagtgacgcgttgccaagtatgcagagatggactccatcattcataa

SEQ ID NO: 20890 - DNA, 150 bp, Oryza sativa
agcttgtgtgaaaaaatccgtgtctcttatctctattatcttatcattacatacatacaatgtactctcatacagactacttgaacccttatcagcctagaatggcacaacttaatctagttgcttaggtagtttcatccttcaccataa

SEQ ID NO: 20891 - DNA, 476 bp, Oryza sativa
  unsure (1)..(476): unsure at all n locations
tggttactggtgacatgtcttatggtctggtactttatgatatctgtattcangntactgattatgagctcaaacctggtgggagaaacatcatggtcactgaagaaacaaaacatgagtatgtcgatcttgtggctgaacatatattgaccacagcaattcgccctcaaattaatgctttccttgaaggattcacagaattagttccaagggagctcatttccctatttcatgataaagaacttgaactcttgatcagtggacttcctgaaatcgactgtaagagcttcatctcagttaaaaatccttacatttatttcttacattcgtcttattattattgttattattatttgtcagttgatgacctgaaagcaaatgcggagtatattgtgtattcgcctgcatcttcggtcatcctgtggttctgggaagtagtaatggttcagcaaggtgacatgcaagattctcaattt

SEQ ID NO: 20892 - DNA, 493 bp, Oryza sativa
tcagcagcataccacaccctgaacatcaagaattgttgtgcttcttatcaatgtgcctttttgcagcaagagagcatgctgggaacttgatcaagaagctccgttcaaattccttcacatggtatcttacatatcggtccattgttgttacatgcataagcttattggggtcaacctttccaagcctttcaatataaacaggtctcccgtctttgtcaactccatgataaccgtgaggataatattgcagaacagcgtctaactcattgtaatcaaaatcctacagagaaatgtagttacaggcattatttatagccaaacaaaatccaaattgttttatatgcacaagcaagaacactaacctcaacaattgtatctgtaccgctactattcctacatttaagcatgtcagtccacatttgctttgctttctcaatgtcaaatctacttgcttttagaaatctacaccaatcaattagtcaagtcatcaaca

SEQ ID NO: 20893 - DNA, 366 bp, Oryza sativa
ttgcatacttgggccctgtctagttcacaccatattttcccccaactcccaactttccatcacatcacatcatatgcaaaactttcctacacacataaactcctaactttgttttaaactaccaactttcttcaaacttcctcttaatttcagaaactaaacacagcctgttcgattctctctcttgaacagaagagatgactttatgcggtcgctgatggaggcccttctcggcataagaagcctggcatgtgacaaacatttattaaatcatcatttggtgaagaaagcccagatggaaggtaaaaagtcatggagctatgcttagcgtggaaccactgaccttctcaggctctcagcgtacat

SEQ ID NO: 20894 - DNA, 219 bp, Oryza sativa
aagatggagtactggactatgcattctgacgggtcaaagagactttcgggcacttgggccggagttgtttaatttccccaactggagaaagattgaactatgtgctatggatacatttttctgcatctcacaatgtcgcggagtacgatgcgctcctccacgggctacggatcgcaatctctttgggcatcagacgtctgatagttcgcggagattcac

SEQ ID NO: 20895 - DNA, 416 bp, Oryza sativa
  unsure (1)..(416): unsure at all n locations
agcttaagataagatgtgcccacatgtcatgtgtnactcgtctgtaaaccgccataatgacccacctgtcagtgaccctgccaaatctggaagcctgctgggctagccctggttcggccgaaccacaaccctggtcacgccgacttctgctagcctgacattaacacatatntagctatcacattgagtgtctagtagacggtacataggccaccgctcatgttagcaatatgagtagatcgcagatggtaagattacattaagatatccaccatactcttcagttcactaatatataacaaactgtcacgaccggaattaacccgacgggcggtccttacttgcgtgtatattccttgcccaggaggctagtacaccaataggtgatacaatcagaggctaacaagcggaagcgt

SEQ ID NO: 20896 - DNA, 404 bp, Oryza sativa
  unsure (1)..(404): unsure at all n locations
taagcttgagtntatgtggatactatagcgaactgtatgtcttggtgtctctttgtctcataatgatggngaaaacacatcgcttgtggagctattttatttgatatactcgtcagctagtctcaaaatcaaagggagaatgttggttaattttatcggctaatgccggttagttaggattatgataaaatcccaccgatttttctatcctaacaagaaatatactaagagataaatctgttttgtgtgatcggtacaaaatatattcgaattttagattgagaaaacccccgagccccaccagtgtcgcttatatatagaaagagaatgagggaggctgagtgactacttaactctctccaatcataaacccttattcaatcgtccgatcgattatacactat

SEQ ID NO: 20897 - DNA, 311 bp, Oryza sativa
gctagctgctaagctctcaacaagcgattttttttctataagccctcactgttctctttcaaatgtctcacataccaatagcctacactatccgattaacttattcggaaggtaggattggtgatctgactagacactgccaatgataataaaactggttcttcagaccaaaagccccccgcctaaggtacacagtccaaaaaatctaatgtctaacttcacttcctatggagcgaatttacagaactaacggtctgagctttcaatggaggcgatgtcccgctacagcgatgcgcacatattcatcttct

SEQ ID NO: 20898 - DNA, 425 bp, Oryza sativa
aactaacagcacatcctccaatagtgaaaacataacctgtgagcgatcttctcctatccaaatctctagcaaaatctgaatccacataatcaacaagtccatctctagatctccaaactgcaaacaagcagtagatgtaccacgtaggtatctgaaaatccattgaacagctttccaatgctctttgccaggattagccatgtatctactgacaacactcaatgcatgtgataagtcatgacgagaacatactatggcatacataagtgaaccaactacacttgaataaggaactctagacatgtactcaacatcataatctgactgtggacatatatctgaagataatctgaaatggcagcttatggagactcactggtcttgcatatgcatatgaaacgacaacaacttttaatataaccttc

SEQ ID NO: 20899 - DNA, 440 bp, Oryza sativa
  unsure (1)..(440): unsure at all n locations
atccttgagtcacctgcggctgcagctgcttggagatgtaagaccgagtgctatctcatagaagcaactccgaaagacatagatgagtttaggatgcttatagaagagctgttgaacctacgagccttaatagagagcagatagccacacaggtctgcagcattcatagtaagaaactctgcagatgatgttagaggtaattctaggatggtcataaattatagaagactaattgataatactatagaagatgcctatatatcccaaataagcaagagtggattaatagaatacaaggtagtatatatttctcaaaatttgacttgatagctggattctggcatgtaaagatggcagatgaatctatagaatggactgcatntacatgtcctcaaaggacattatgaatgcgcggttaacataaaaaattcctataaaat

SEQ ID NO: 20900 - DNA, 373 bp, Oryza sativa
tcatatctggtctggacataataccatagagcaatgttgccccaataccgatcctgaacttggtaagggcggagaggtgctggatgccgaaatcataagcaccattcaggcaatccattccatgtaaacggaattccactgtggaagttatcaacctttggcattgattctggttcaaactctagcaagggcccacatttctggattcgtaatgagaaatatgtcagacttctgaatcctttgttgctacatatgatgatccttccattgatgccacacatagttttaagtttgagaaaacacaagctgggtattgcgccaaggatctcaatatcattcggtcccattctatggatccagagttgtaattcag

SEQ ID NO: 20901 - DNA, 408 bp, Oryza sativa
gcatatggcaagcttttgtcccaagctccaccaaaatcaatagcgcaagctctcaacatatcttccaagatttgattgactcgctcggtctgaccatcaatttgcgggtgatatgccgtgctgaaatttatacgggtgcccaaattttgctgcagtttctgccaaaactttgaagtgaactgactacctcggtcggatactatcttcttgggtaccccatgcaaacacatgatccttgcgagatacaattctgccaatctctttcccgtataggtggtatgtactggtataaagtgagccaccttggtgagtctatccacgactacccagattgaatcatgtcccgatgatgttcggggcagtcccgttataaagtccattccaatctacttccatttccattccggg

SEQ ID NO: 20902 - DNA, 438 bp, Oryza sativa
  unsure (1)..(438): unsure at all n locations
tcatcaggagggtctatatgtgagaaatatgtcaacaagggttttactgtttaacgacaccgattntggccatttgcttgggtcgccgagtccaaatagtcagtcttcccctttgtcctctcctccctcgcttatcccttataggcgccgcctcactccaccggcgggcgccgacgcgaccctagatggggcgcctcgcttctgcttaccgaggtaaaggactgagctgccgtacacttgcaaccaatgtcgatttgatctgaaattggcacacggcttagctcatccttagttcttgttgggtttgtttccgttccgaacaacgatgataaaaatcggtttcttggtggtgtttatggtgccaataaaaaccgaagggtttagtttccaactagatccgtggatctagtgtctcataatctcccaatattccctata

SEQ ID NO: 20903 - DNA, 388 bp, Oryza sativa
cttccaagtgcaatctgcctatctatctagctactactcctatattgttagaccagtgatcaagtagtcgatcaaactgttgatctgtttgaaatcctcatacttaaactggcaacttgtgcttgattttgctttccatgcatggacctagtcatgcatcactgatcgctaagtcaaaagatcaaaatctcgataccaagttaggaatattcttggagattgtacatatagaaaaatggagaagatatgaacaggtactgaatagtgatttctttgatcaatgtgcctggcaattatgaatgaaaaaggagtcacgctaacatgtcaaatggccatacatatattcagctcacaattaattaatttattacaagaatacttactctga

SEQ ID NO: 20904 - DNA, 457 bp, Oryza sativa
  unsure (1)..(457): unsure at all n locations
agcttcttatcctattccaatccacanaagatgcttatagcatggatggctgcctggtcgtgcaaacattgaatggctgtacctactgtggaaaatataactcacataataatctctttacaaagcagtcttgatcgaacagtcagaacatctaaccaaatagaatgaacataaaagaagaatatatggaaatttgtaagaacaggcaatgatattggtacgcatcaccatcgtgttgccatgctcctgtggcatactaaaccctaataaatgattgtgctctagaataacacaagaccaaggccgttgtgatcttgtaatgtacgatgtgatctgtaatgtttataaagaatcatattattatctagtgcgcaaccagattatattaacctctaaatacatcatgtatggtattgttacaatgatctcataatgcatatggacaccatcaacccta

SEQ ID NO: 20905 - DNA, 491 bp, Oryza sativa
tatctcctatgcatatccgcaccatggtacatggaccttatattctattcaattgaggtatactatattctgagtcaaaaactacagtactaatgaaggtatttatctttgttggtagagccatcctattgtgtcttccccatgcagcccaaagtcattgattgtaagatgctcaaaacctaactctcgttaaagatgtatggtcatctcagttactcttatacaaatctcctttcaggaatcttcacctgtaaagatcgtgcctctcccgcacaacccgacagagttaagaagatcaagaatgaactcagaaagacatgaggtagactctgtttttctctctggtacgtcccgatgtcatgatgggacaaccgccgctgggaggatatgtagtcggtgtcgactcctggaaaagggatgtagacttacgtaggggagaagaacatcggatggagagattggactaattgatatttattgcttaattctaa

SEQ ID NO: 20906 - DNA, 394 bp, Oryza sativa
gagaagaaacaaaactttaggtactactttgtaaaactacctcacacagagaacagtcacaggatcgcgggttgatttctaaaaccaccaggacctttctgcatattggtctctcactgacacgtggaccccatcctttaaaatctgggaaatgataaaagaaatactcatactaatatatgtttaacagaaaaatgcacaagcttgtaaaatccatataaaatcaaatataactctttgtgagatgattcaaatttctgtgaactcaccaagttatgaaattagggtatgaaataaaaacttgcactcacagtacacatttcacctctaaatttatctaagaaaattatacataaagcatgcataaagttataaaatgcttacaaaattcatt

SEQ ID NO: 20907 - DNA, 352 bp, Oryza sativa
  unsure (1)..(352): unsure at all n locations
tgagctgctctgcatcactgcatgcattggcacatgttcgtttctttattatctgaaaacaaacgattcaagacaattctggatcaccatatgaacagaaatactaatagtaatatagctagacgatgatgtggtagtacaggaaacatatcttctttaacagcgcaatacatcaacatctagcatggtacccatggtacttncttcgcgttttaatatatcacatctcgatcattcaactcatttgaaaacttggtgcaagacatataaaaaataagttatgtccaaaatacatttaataaaacaaatcagatagattataattatattaccttctgattagatgaaaaat

SEQ ID NO: 20908 - DNA, 204 bp, Oryza sativa
tatcactgcgtcgctggaacacacggtcgcaccactcctgttgtttacttcactgatgaatcccgcctccataagcctcgccacctcctcgcggatgaaggctcgacgtttcggagcctggcggcacactttctgccggaccggacttgcgcccggacgcacagcgagacggtgctcatcacactcctggggaccccgggcatg

SEQ ID NO: 20909 - DNA, 185 bp, Oryza sativa
  unsure (1)..(185): unsure at all n locations
agaaaatcagtttaatttgctaatctaacatttttttgttctatataaaaatctgttaaatactttgcttaattctataattcttagatttttctgggatttatttgagctaaggaagtattnttaataaatggaattgcatttaaaaaataatttaaatttgaaaaagttttaaaagtcttctt

SEQ ID NO: 20910 - DNA, 356 bp, Oryza sativa
cattccagtcatctaccatgttctgtcaatcaaatcctgatggatcgaagagccaagtgataaccaagagctatattgatgatgtcagaagtatatatgcagatgaatgcgtagcaacatcaccttaaaactgatagactactagcagcaacatcagctcaagtccttttacaaagtggcttctgaagtacattctgtatttctcagtcaaccttacatggcgaacaaaaaaacatctgccagttgctctatattctgcaccaccatggagaattgtgtgtcgaaaataatgtgacttggtcccaaggtagaaagtgaagaacactgaacagagctgaagcgtcatgattatgaaa

SEQ ID NO: 20911 - DNA, 485 bp, Oryza sativa
  unsure (1)..(485): unsure at all n locations
agcttcgcggccggagggtcttctcaatagaatggacttttggcgataagcttgtgcctgtntggagagatcatcataaattattaaagtatgccgttcgcggtacataaaatactcagccagggctgctcccgtataggagcgatgtattgtaatgtatcacgggaatccgccatttcagctactacaatagtgtattccatggccctctcttcatggaaagtaagtactactcgagctacggaggatgctctttgaccgatagctacataaacacatattacatcttgcccttttcgattgagaattgtatctgtagctactgctgtattgccgtttgtctgccccaataataactctcgctgaccgcgccaatggatatatcgtatcatagcaataacctcgttgatgagtcatatcagacgcctgaaatatacccgagcagagatcaattaaccagattcgagctcaattcgccttccatc

SEQ ID NO: 20912 - DNA, 426 bp, Oryza sativa
  unsure (1)..(426): unsure at all n locations
agctttgacttcttctcgtngaataactcaagagaagaagaatagggaatgaaagaaatggtgaaattgatcaactgccttgtattggccaaaggaaagttccagatcttccaatcccccagtcggtctaatctgtgggcggctatgtaccaatctcaatgtcgatttgagtgcactactaccaaggctttccaaaccaatttccgaataatacactgaacgaataatataaccacacaactacctcttgtctggtactctctgtaatgaattttatccttggcggcctctctctctgagtgagttaagagaaaaagtagacggagacgacatcaatcccgagaagtgtgtttgctctatcaaagcatgaatttaactattctacttacaaatgagntcttggaaaagaaatgtacatgggaaatg

SEQ ID NO: 20913 - DNA, 511 bp, Oryza sativa
  unsure (1)..(511): unsure at all n locations
tagcttctcaatatgagtcctgttgataattcatattgatataaataactcaaaagttatcaacggggttaaagctgcccgatatcttcttcttcttcttcttcttctttgaaggttccaactattattggttaaaactctaacgaaagataagaggtgaactctaaatggttcaaattttacagaagcaacttggaaaaaatcaccaatcatgcgatgaaagaaccaatcaattccaggaatgattctggaagtgtgcttgtattttaacgccacaagctcttgcttttcccncatccactactgatcctaatgggagtggaaggtatgttcaagaaaatgttgttcgaggagaacatatgaacaaccatttataattaacagttatcaataccatattagcatcatccatacattgatatgacgcaatgacaacaagtgaggtgacatgctaaacctataagagtaagcaatattacttattcacgaaattactcttacaatagtcaat

SEQ ID NO: 20914 - DNA, 473 bp, Oryza sativa
attgcattggagggatgatattaaaattatcgttttttgttgggcggaagaggacttattccgcttcagtttgcaagagcagtggcctaattgtgctttcaaattgaatacgtacggcacagttcagatttacagcatatttgactattatgcccaggatatgtactgggccaatttatgggagtcacttgagcaatataagggcccataaccttgcaagcgaactagtttgttgtttttttctcgctacacaccgatctgtttctgtttcttcaaaccacaccgatctgtgactgtgatggtctatatactttacaagttcatattgctgattattgtgatttgctaggtactatgacagaataaacaggaagactgtcaacgttgagataaaatactgataccaagctactacaattgaaggaaggcgtacgtaaaaattctactgctaattgctagcactcaaaaactac

SEQ ID NO: 20915 - DNA, 386 bp, Oryza sativa
gaatgatcattctttacccttgatgcctgatgcaaggctctgttccaccaacatctgaagaattttcatccgccgaacatacaggttatccccccatctgccacacagaagtggctaagcatactattcaatatgggctgcagttagagcatacttctttttcagttcgtttgaaaccatgcagcatgtaacatggatgtctagagaacttagggacaaatcatgtgatgacctacaagatacatacggtgatgaatttacatcaccattgtgttctcggtgtgtggctcaccattcataagatgtcgcgataacagaaatttgtaatggagtcatatactggacaagttgtgagtgagctattctgccttttatacttctcctga

SEQ ID NO: 20916 - DNA, 413 bp, Oryza sativa
  unsure (1)..(413): unsure at all n locations
ccaattgggccctctagctgaagaggtctaaatgtacgtggaccttcgttgctgggctggatcagatcgaagtcaattgtatgcatgattattaattgtatgcatggtctgatctggccatatatactatgtaggagcaccaaaatgtattcatgcacacggtggtagatacatgaaaaaataacacggatatctaaacaagctggagaaaactataacccctcttctcatatatgtatggcaaaaaagntttagtgaagccttcgtgtggtacttctcatgatcctagcgctaacagtagatgctcgagcccctgcatctcatggtatatccgcacctgcatacacattgtcacatactgattttcgtcttaggatttantaaatatttaataaattattattggaattata

SEQ ID NO: 20917 - DNA, 474 bp, Oryza sativa
  unsure (1)..(474): unsure at all n locations
ctgactgcctcgatcagactctattttttatggacgccatgcaaacacacaatccttgccataaacaattccgccaaccgacttacggaatatgttgtctttactgggatgaaatgagccactgtggtaagtctgtcaactatcacccaaatagagtcatggcctgatgacgttctgggtagaccagtgatgaaatccataccgatttcctccctctttcattcaggaatcttcaaaggctgcagcatacctgcaggtttctgatgttctgccttgactcgctaacaaacatcacatactgctacgtattctgcgatttcacgcttcatacttgcccaccaaaatctttccttgagatcctgntacatcttggtactaccanggtgaatggagtataaagtatcatgagcttctgtcngaattgcatctcttaaatacttgttgtcggggacacagattctctctgccaaccat

SEQ ID NO: 20918 - DNA, 324 bp, Oryza sativa
gagtgggctccgcattcttcttttgtatatcggcaagaagcacaacgccttgttcccgaggaatgcacttcatgaggattccattatccgcgcgccgatatatggtcccttctaccaacacgtatcgtttggagatgcgatggacgcgttcactcccttcgcggtcctcgggtagagtcttatctgtgaggtatgcttggatctcggcgatccaagcaatcgatcttatggagttgggagcactcccctcgggtcccgatgcctggactccgacatgcctctggggccggtcatgcgcatctgtctcccctaatgggtcgggtc

SEQ ID NO: 20919 - DNA, 380 bp, Oryza sativa
  unsure (1)..(380): unsure at all n locations
ctgcagctacaanatgtatacaccttctgtcggcaccttatatgtgatcataataatgcaaagaatcattaaccgcgttataaggatatatcagccttggccataccattgttaaacaaattgccatagtaaaagtgctaagttcctagaatacaacaggtcacactgactatgtattggtctaagtactgacaggccatgcctttataactccatactctatatcaccgagcgaataactctttcgttttcccgcgagacttctccatattccatttctgtacagacaactgtgagcagctaggtcacattcccttcaccttcttaaactcacaaattttccggctcacgatcattccatcttttaccgtttggacaaa

SEQ ID NO: 20920 - DNA, 318 bp, Oryza sativa
  unsure (1)..(318): unsure at all n locations
cgtggatggtggtggtgatggtttttgtccttggctatagganangggaaagcgtataaacggattcacctcgtcgatgcatagccgatggcacgatggtttgggttgtggaactattgtgaaggatatcgtgcgacggctatgacggccggacatggtgtgagagatagagagagatagagctcgtggagctcggcttgtgtgggggaaaagatatggcctcgccgtttattatcggcttaaggcggtggtcaatggcggttccggaggcagtctacggattggccacggtgacggttgcttataagangacaaaac

SEQ ID NO: 20921 - DNA, 379 bp, Oryza sativa
agcttcttgaagccagctaccgaagccgtattgcttgatcttttgcttgcacagcagtacatgaatattatccaacggtttatatcacttgctgcatgcatcggacggatgttaaattgacactcatgtggctcaatcagtgtctgagaaaggttactactttcaattctactggtgcgccctatattctgcacatttgtggataggcccattttattcatatctcacccaatcacatcttatgggccggaataccgcctgccaacatatcaaggcttaggggtaggacagttatacagcaactcctatgaaagaaaatattacatatacatcaaactagataaggaacatgtaaaacctgtaggatacatgccattta

SEQ ID NO: 20922 - DNA, 434 bp, Oryza sativa
aagcttgcaggctatctttcgtactggtatgtgccttatgtgccctttcttatgttcttgtgtacatcttttttcttctataaatttattcatcaatgcatgcctaatttgtatgttatcaagcaattcagatcaacgatttcacgtcgtgtttatactctaccctacagctatattactaccagtcatgcaccttgtcatggtcatgtttatggaacgcccttttgcttatgtcttcagtagtgcaattgcagatatccctgtacatatgctatgtgcaagcaacgatagatatgctctgaaggctatatcaatactatgttatgtaatccttttagtgctggcaaagtccagtatccatctccatcgaaccaactatttatgtactatgataccactactatatgctaatcagctgtagaccctataacatc

SEQ ID NO: 20923 - DNA, 439 bp, Oryza sativa
agaaataatagaaagttattaaatcaacttgcttaatttatttaattacattatgattaaataaaaaaacattgtaaaacttttgctggaatatgagccattagtacagtaatagatgtacagtactaataacactggaataaatttttgaatgagaaccactaaaaaaaattatgaagtgcatgtgccattattttgtgttaattaaaagagaaagggaggagaacagttctacttttccaatacttttatagggcttctaatggtaaccatttggcataacctatggtcaaagaggctctgataccaacttgtcacgcctggaatttctatccaaaattacaaacgcttacatgtgtgtgaaccctcgtgcaggaatcattcgatgcacacaataacatattgataatagaagacaattattactctaactaataag

SEQ ID NO: 20924 - DNA, 299 bp, Oryza sativa
taaatggagcaagatcttcttgtccgtccgacaggacaagttctatggagagacaaatatgattagcttatatataagtacacttcaatttgttacttaataactctctcttttttggggggttgggaaggaaaaacgccagcagatgcctcgatgagtgcttcgaagctactataagtggtatccttttgcgacaaaagcctcaatatttgttaaaaaggttgaaggttcagttataagcagatcatatcgatatcaagacagcacacaagaaagagcagtttactaatatgtccttt

SEQ ID NO: 20925 - DNA, 467 bp, Oryza sativa
  unsure (1)..(467): unsure at all n locations
tgggagtatattttatgtttgcttgangccgatcttgcataattaaacaagcagacgtgtcacataataatttgtgatgttgtgtgtatataaaagaaacagtgataaactcgatgttctgttccccaacggggattttgaatggctacaataacccatacttgaaanttgtacagtttttgcaaacgtatgtttatttgatgggagagatgtgggtgtatctatcagctggggttaaattttgaatgtggaaattatgcatatctgagcgtccgtcgatgttttattcaccattttcaggaacaatttttgaagtgattttacagtaagggattacaatatttnttttgtgatatctactgatactttacactgcggatctttataaatcagcactaaagaatatgctatctctgatatcttcatcaagacagtaacatttctgttttataaatagacaccattga

SEQ ID NO: 20926 - DNA, 508 bp, Oryza sativa
gatcctctgagtcacctgctgcatgcaagcttattaatatctgaacaatggattacatttatgatctatcaagtctaaaatttttacgggagcacaaaacctccactctccataaatctagtactcattaccattttaaccacgactattattatgactctagcaaggtgataaatagcattcgtagcggctgctatagcggaaacgaacctctactgctaccgctacaagggagtggactttatctagcgcattgaaacttagtgtccgctatagcgcttcacgaccttaatagcaacccattattaactgtgtggaatcactatatataatgctaaacagtgttattcacatatggataaaataatttagcactgtgtgccttctttctcttatatatttatatgctacttcataatatctatggtattaaatgtagaagtaataagcatgcagttacatttatttgtaagtgaacttgtgctatattgaatacatatagattatg

SEQ ID NO: 20927 - DNA, 402 bp, Oryza sativa
tcctgaagctctgactatacctttgcaggatatgaagatattactaaaagaacaagtgacattatctatatatgaggtcatttaataattaaaacccttcaaaattacatgtgcatgttagtgagactaccaatatttaggctcctcaatcctcaccaacccatctgagttacagctttcaagtaaaagacctgacactttcaagtccgtaccatgattctccaatggttgagctagtcaatgttatagataagatcacatagaagtaaccactgagctaccatctcgtgtttgtgcagtaaccactaaccaacaggctcatgattccattaatatgcatggtttagacagatacatggatttggatacattcgatggatatggtaagtgattactgctcat

SEQ ID NO: 20928 - DNA, 529 bp, Oryza sativa
gtcacctgatgctgcagctacctgatagcaaaaacaaacaacaaaagtatttgtgctatagagactgcatacctctggattatcaagacgactgagctcatggccatcaggcaggctcccagatatgtactgccaaccaagaatatcactttccagatcagcatccaatagcacatcccaaaaatacttcatactccaagtccatggtataagttgatgattcacagctaaacttgaaatgataactcatatccgatgatgtgtccatccagtagcccaaagttccctcatgccagcatctaccaaggggtatcctgtcattccctgcctccaggactggaaccgctcctcatctactctccaagggtagtgtttcaagttcctcatcaatgacgtttcatgtgtgattggaagtaaaacacaagaccgagaatatctcaacaccagttgacgcatgaagaacgaatgctctctcagcttaaatgtacctcatttgccactgattggtgcatctacaggtaaaactttc

SEQ ID NO: 20929 - DNA, 469 bp, Oryza sativa
  unsure (1)..(469): unsure at all n locations
ttgttcgaccattacaccattctctcaaagcacgcactctcacaccaacacacgtgttacctaatacatattcanggagatggagatgaggtgtccctaactatgcttaataggataaatgcaatcaacaaatttgtgtgtgtaataattatggacatactctcttcgtacaaaataactcaacctaactactacgggatgtgatgtattctaatactatgaatccggacagattcgtagtatactatgatatgacacatgacacatcatatactatattccgttattttgagatggagggagatgatctcaaagcaaccctaacttctactaatagtggttgagactattacttatttaaaaccaaatgattgacatatagccggtcccaatatatgtgtgcatacacacccaatcatgtcaagatataattcatccgtctgttctccacatttgtatattcatgtgc

SEQ ID NO: 20930 - DNA, 426 bp, Oryza sativa
  unsure (1)..(426): unsure at all n locations
ngcttctgaatacaactataatgaactggtattacgatgtgtaactatcaactgcgtacacacatggcagtggtgccttgaataattctatactgtataggtatcctggtgtgtattatgatatatcaagcaataataacacgaaaggttntatccaaccaagtccatgtcgagcatagcctttgttgtgcaatgtgagcctgctataccagagtggtttcccctattcttctctgaatggctttgcctgtgtcatatcattcgatatatcatgcccgttccttccgcctcaaatatccagaactctacaccagatcaatctgctcggctactgctattttagccactgttcacctatcaactcattcacacctgccaatggccatcatgtccatcccactatgctaccatttatcttctatcagt

SEQ ID NO: 20931 - DNA, 106 bp, Oryza sativa
aaagagatgcagctgcagcggcagcaacagcaccagcagtcagcagcagcgatcgagtgctactactgacagtacactgcatcttgatgcacgacatgtaccctac

SEQ ID NO: 20932 - DNA, 292 bp, Oryza sativa
acataatgtcttcgagctatgtgagcctttatgatcacgaagagtataaaatgataggtacctggggtttttcaagcgaagaggaaagttacaaattctatttatactatgcaaaggggaagagtttcagtgtgagaaaaaacaacttgaatcggaaggacgctgagattatatggaggcaattcgtatgctcatgtgaagagagttgaagcactttgagaggacagaccataaaatggagccacgggcactgatccgctgtgggtacttaactaagaatgagattgactgg

SEQ ID NO: 20933 - DNA, 367 bp, Oryza sativa
  unsure (1)..(367): unsure at all n locations
agctntagtaaacccatcagctactagatcattggttgacacataatcaacctgcagaagttctctagcaactctctctctgacaaaatgataatcaacatctatgtgcttaatccttgcatggaacacaggattaaaagatagatatttcgctcccatatgtatcacaccataactgtgccatatctggactaacaatatttaatccctgcaacaaagtctgcacccacataattacagctgtatcagtaactaaagcactcgagtctgcctatgtacttgaccttgaaacagtggcttgtttctctgattccaggaaacaagattgtccgccaaatatacatcatgaccaccagttgaccttcta

SEQ ID NO: 20934 - DNA, 334 bp, Oryza sativa
  unsure (1)..(334): unsure at all n locations
atgtttctaataatgttttcttaatcttttcccggtcttggtgtttggtgtataccggatttgctagatatgggccgtactatcaagaggggtctatgaagcgagcttgtggatgatcttgtgccatattagttcatatgcatgtangtgcattttgtgggcttgtctaaccaagtgtgatgagttttctcaagtcctaaaccaagagagaagtgggcatgtccaatatgagtgagtgacatcttgtgggtatgtccggtggatatcctttggagtgtgagccctttatccttgacttaagttgtgtttcttggaatggattttcatgggttgg

SEQ ID NO: 20935 - DNA, 227 bp, Oryza sativa
tacgctccgcgacgacgggtggttcggcttgctctctgtcgatagcgagagcgacttgatgatgtgcaggaacacgcctccggccctcgcggtggtgctgggcatggccggcgagatgaacgcctcgctgatggtgagcccataggacagccccagcgtgctgcccccgagccacttgacgaaggatgatgcgatacggtcggcgagaccggtcttgacgaacctcc

SEQ ID NO: 20936 - DNA, 251 bp, Oryza sativa
catatatatgaaacactaaatatagatcaaaataaaaaactaatggcgataattggtgggaagcgcaagaagaatattttgagcctaactaggacatgatgaatcacacgtgattcagttatccacatgtgctaatggcggataattttggtacaagattcgttcgcgggttcagacgagtagaaattagttcttcggtcgggcgaaacaccttccgacatgtggtcaacgtctacgtgcaaaaaaaatta

SEQ ID NO: 20937 - DNA, 380 bp, Oryza sativa
  unsure (1)..(380): unsure at all n locations
atgcaactcctccaacatcaatgcaagacattgtaccttttgagcatttcgcttttcaaatnttcttatgctatattctcagcataagaactctaccaagatggtaaactgatactactcagtatactgtttaatgaatagctattgctgttcagtgtaaaaatccactcttaagcatggatactgaagtcaatacctggatatctgcaggagcctcactcctttcggaacagctaagtacatgcttgacatgattccaaaagatgcttcaagcaaggtcaagatcaatcatgacctgtatacgcaagagaggtactaagagtttgtggtgtaatatgcatacaacagaatntcttggcacatatatagtactacatcta

SEQ ID NO: 20938 - DNA, 127 bp, Oryza sativa
agaagaagagaagcaagaggagcagagaaagagaaggaaaagagggaaaagggggaagggagaggaagaagaagaaagaagggagagaaacgaggagaaggaacgaaaagggggaaggggggaaaag

SEQ ID NO: 20939 - DNA, 187 bp, Oryza sativa
tgcatcgacgccacgatatggaacaaatcttaacatcacaatagcatgaaacacttaatttgcggcttaaaaaactcaccgagaaagtggatacatggtcaacgtatgcagctacaaacaatcactggacgaaatggatcggcaacactgactaacatacaactagcaagaaaaccttatggtgtgt

SEQ ID NO: 20940 - DNA, 447 bp, Oryza sativa
  unsure (1)..(447): unsure at all n locations
catatgacaacattgcatcaggaatacatgaacttattcaacactaaacatatagtgtgctctgtacgatattggtttctattattatacataactcaagagatgttacatcacagggacatgcataagagaaaggttatgagagtgattgaactatatgacatcacaacatagatttcgttggtattttcttaaccacaacatttttggtacactagaatttattggaaaaacatttatgtaaagaataaaggctgacaggtgaataaaaagttcatggataactcacacctaccactggaagacaagaacagcaatagtactaacaatcaacgctccaacaacagtggaacttgatgcatacacaactacaccctgatgataataattctcacaattacgagaaaagtngttccacagacatctaaaatgttccactaatcgcac

SEQ ID NO: 20941 - DNA, 362 bp, Oryza sativa
tttactaaggagaatatacaatccaaaatttgtgtcacgaacacacatatatgttctggatattgaacatagacaaatgtccttaattatgcatgccaggtagtatacccattgaaacaatgtaataacccgttcttggctgcgagcttgcgattttccgatagtcaaagattggaacttcatgtacattacaagtttatctcctagtgtaatttcagagagttattaactgaaattgttaaataacataaaatagcttctctctctgaatatgtacttcacactattatttcaggcgaacataagctgcacggatggctgtgcctgctctctgacgggtagctgcaacactgacaagattc

SEQ ID NO: 20942 - DNA, 314 bp, Oryza sativa
  unsure (1)..(314): unsure at all n locations
aagtttctctttcacggtattgtgatcgttcgatttattttcttgatcgctacttatgggcgtgcgctcatatgatacaaacagggattcgcacacaaaaatgggaattcgtagtcactgtttcctgtcgcgtaaaaaaaacgctctactcgagagcaactataggtgggatacatctatctcttctgagcaacctcttttggatcctaagaccactctcgcagnacgataccgtctgctttgggtctctattatattatctacttccagggattctaggatcgtcacgctatatttagctattcggctttact

SEQ ID NO: 20943 - DNA, 297 bp, Oryza sativa
  unsure (1)..(297): unsure at all n locations
tagaccattttatttatcatatgccttttcnaagcaacttttaacacaatacatggtttcttttacgatgaagatattcggaaaactgagtactctaccccccatatatatcttgcttcaaaagcacttaatttgcattaaaggatacttcgcagcctgtgatcaaatttatgatatcttgactgacattaaaagataatgttaaatgggttgatacctcctacattggccaagagcatcatattatccatatatcataagcaatggaatattccatttttcagctttataaaccaa

SEQ ID NO: 20944 - DNA, 315 bp, Oryza sativa
  unsure (1)..(315): unsure at all n locations
cacacacttatcgggggtcagnnttatgctgtcgtgttcggataatctcaaaagtttccgctagatctgaaagtaaggtctcttggatgcgccgttttacaaccaagtcatcgacatacgcctcaacattacgttctatttgactacccaaagaaattcgagtagttcgcttaaaagtacgacctgcaattcttaaccccgaaaggcattgatgtatcacaatacgttcctacgggggtaatgaacggcagatttttctcatcctncctagccatgcgaatctgatggaaccagagattgatctagaaaacacaa

SEQ ID NO: 20945 - DNA, 432 bp, Oryza sativa
  unsure (1)..(432): unsure at all n locations
tcggagtgaggaggagatcgccgggccgtcatntgtagcgggcgcgggtttgttttatactagcgcggcggccgtggccggggcgcgcgcgttcgcacgttcgcgcgcgcgccgcgctgtgtgtctcgccgccgccattggcgctccaccgatcacctgcttgaccatccagcgatgcccgtgggccgtggcacagaggcagcgcctctgggcttgcatagttcggcccaacttcatacaaatcagacggtggtgtccaagacgggccacatggcctatantatatgtccttctgatcacgtgtgcacgcaacataatcatcctcatcatccaactcagtaaatctagtcacagtgtgttgctntagcattggttaacttacacgcatctgacagtatatccaaatgaacattctacatatttatatactac

SEQ ID NO: 20946 - DNA, 391 bp, Oryza sativa
  unsure (1)..(391): unsure at all n locations
tcgctacaagcacaacagtggatacttnttggaggttggagcggcaagttgacatgtagtaccaagcanaacgggagcacaacacagttgagtgctccgtacttgcttagcggcggggtntgggtccagttaaaaaaaatcagtgtattttatattcttttctatacaatgacagagccaaaataataccaaagactaaataccacggctagcttaagactcaactaatgaagttattattttcattataagtacatggcganttatcatttaagataatttatacatgatttttgaggaagcctaagactcacaccttagttgctccatgcttgcatcatccgctatcttggagagaaacgaatcacacgcacgagcaattatgcaaata

SEQ ID NO: 20947 - DNA, 255 bp, Oryza sativa
  unsure (1)..(255): unsure at all n locations
ttctagcaagacaacatagcattaccaacataaccttaccattatataatttggaggccttaaaccaaataccacctaatgttactatatactcnctccatntctaaatatatgacgccgctgactatntcaaacatatttgaccattcgtcttattaaaaaaattaagtaattattatatcttttcctatcatttgattcatcggtgaatatactttcatgtatacatataggtttacatatttcatattaaaa

SEQ ID NO: 20948 - DNA, 69 bp, Oryza sativa
gagagggttggatcggattgcgcttgatcaacaagccggagagactggtgcatatagagagagggaatg

SEQ ID NO: 20949 - DNA, 413 bp, Oryza sativa
  unsure (1)..(413): unsure at all n locations
taacatgcaaccatgccacattatcactcactaacaataattacatattctatctcgtgcaagcatgcaagatcatctacaatctatntagttctataaattaacatgcaagcatattcaatcgctacctttcacatcatttccacaatagttttacaattatctctatcatttttataatatttaatataaagcgctttcatgattaaaaaaaactgataagccctgagatatgattatatttnttctttttactgctagctgaaatggaacgaaaaataatatggagaatacttagtaattcccgtagcaaaggggaatcctctagtgtcagaaggattaaaggactgngttaagatatgccctttggatctctataatcttcacttgaattatgctatggaatctggata

SEQ ID NO: 20950 - DNA, 341 bp, Oryza sativa
ctcagctctgccgtctaatctgaacccgcgtgggtttatccaacctgtgaacacagatctcctctgtagaacctgcagagggtgtgggggatgctttgacatggcgcagcagaatcggttacaccgactgagatcgaggtaatcgtggtcctgcgaccgggcgctttctgacactactgatgaacttgctgacatatgtgactctgtcaacgcactaatatttaaatatttctaaaaaatactgccttcatgtctcatatatgacaccgtagactttcccatcacgttcaccatttggtctattcaacaggatatttgatcacgaatctattctgctatac

SEQ ID NO: 20951 - DNA, 371 bp, Oryza sativa
  unsure (1)..(371): unsure at all n locations
gaacaaacaaatattaatctaatgagagctcattacaattcttttagtacataacaatatctgcttgtntagaaaagttgcatcccataaattgacatggcaaattatcattcagcctgaaaattgaataaatgagccacatgaacagaacttgaatactgtatttcaagacatgaagcaattactcaacatgagaatacaataatcataggttaatgtataaatgacaaaaaatgacagcttgccagcattnggcaggctaagttattcttatactacagatgcagattagttgatccacaaccttttaatggaaaggaatacttgacgtaattctcacatgaaaacttacattggtaagtctaactctg

SEQ ID NO: 20952 - DNA, 361 bp, Oryza sativa
  unsure (1)..(361): unsure at all n locations
tacacatcttgtactgtatatgatatgacactaccatggaaatgtctattgatatgatatgaaccactaatttcaggggttcttgccaaatgtatgtgaaatacctgtgaataggctngacaggacatctggacatagccttgaacagctgaggaatgaactcttgttggtggcaaactctggcacacaaccttgccaagcttttatgtggttgcatcaaggagatgaaaagtactcgtgttgaattctgccaatcgaagctcgacatattcttttggtagacctataacatactataatacattactatacaatattattctacgctgaagaatatcattagttgacactatactatagc

SEQ ID NO: 20953 - DNA, 431 bp, Oryza sativa
  unsure (1)..(431): unsure at all n locations
ctcaagcttatgatgctganatctggcttggtgtagcgcatgcgactgangaggatctcatgcctacctggaagagctgtagcatcttccactttgtggagcanagaccacctgaagatagagtacaacactctataatatggacgcaaccctcgagtagtccccaaacaatccttgggagcatccttctcatacataaaggtagtgctggtcggtgacagagcattctctacaaagatatgtggacgactcaggtcatcatcatctaacctcaaggctgtacaaactgtgccatagaaaccctatactgctgccctgatggtcacttacaaaatcaaccccttttggtggtgcaaaaaagcagggagtaaactgccaatacttctcattcggaatactgagggaacatattgcacgtgctggctacaccc

SEQ ID NO: 20954 - DNA, 396 bp, Oryza sativa
  unsure (1)..(396): unsure at all n locations
ccactaaanancaacaattcaacaataatatatatcattctaattttatcttatactgtgcattactctgagaaggcaatcgaagagatcgccattttctcaagcggcgtgcactgttcgaaaggcctctctattgaaatattgcggctacgctgagtttgtctattactactgcacgattgtatttggaatattataccataacccagctatctttacctggatggctttaattatgtctccatggttgacctccctcagtatatcaacattgactattcgtcttataaaaaatattataaaatcaatacttatcttgttgtgacttgctctatatcaaagaattctactatgactactccttcttttcacatgaagattttaatattccctcta

SEQ ID NO: 20955 - DNA, 110 bp, Oryza sativa
  unsure (1)..(110): unsure at all n locations
tatgcanatacagatgaaatatagtcgtaaccgactaagtctcatggtggtctccttgatacacaagttacgaaacanacccgagatacagataaggattctatctacat

SEQ ID NO: 20956 - DNA, 505 bp, Oryza sativa
  unsure (1)..(505): unsure at all n locations
ctaagcttagtgctgcagcaagntcaacataaatatgaagccctatatgatatcttngntcttgcttctcttacagcaaaagagagcctcacatatataattagtctaatgcagcaactgtaaataaactgtaattcagtatgtgtaactagacctcaacatttgagataaagtgatggagcttctctatcattggactgtacatagcatctgtatgacatattactgcttccaccctactctttgagagagtgaatgaattcattgcagacttcatggacgtatcaaaccatgggagaatattctccagatgaatgatgtgacgagatgcatgagcatctcctccagtgtcagacagattacacgattctataagcttcatgagcactcgaaggtgttgccagtgcgcagaagatgccacataatcttttagaaacatggtgagaacatgattgcttctgtgacaatcacttataacggattcagtctatcatagtagtagata

SEQ ID NO: 20957 - DNA, 195 bp, Oryza sativa
  unsure (1)..(195): unsure at all n locations
cagcagtccctgatgttaactgttttctcaatgcangttccacatattatagacaatgcatatgttatatgagaattcgataatggctctcgaggcatgctcgacctctgcatgtctgctgaacgtagttggaatgagcacgacacttctgtatgtcgcgacattgggaaagttcaactaacacgatgcttttca

SEQ ID NO: 20958 - DNA, 314 bp, Oryza sativa
tctcaggactcgggcacctccatttggtttagcgaatagatatatcatccaaaaatatagatgggttttgtttaaaaatatctaagacgcctctttaaaggactactgaagatagttatttcttacatcatagctaagtttttagagcgataactcacttgacattccttacacaagaaatatccattattatccaaaaccctttcaatgacataaaacacctatgatgctaatatgccattttctaaatgactgatcgcttgagtcttgccctgaagcttcgcagaatatcagataaggttgatcaaacaaat

SEQ ID NO: 20959 - DNA, 284 bp, Oryza sativa
  unsure (1)..(284): unsure at all n locations
ttccttcatcactttgacgcactgncataccgagaaaatagtggagcaagcccagatcactcatttcatatggatgcatcatatcttttttaaagtcttgcataaactctcactattgccagatattcaaatcatcaccctaagcgaaccatatgaatccgacctgtttcttgacttagatatgctacttatgctcttggaatccttctgaaaaagacttgcatttgactatacacctctggcgctgcttatccaataagctctagattgaaacctattctccc

SEQ ID NO: 20960 - DNA, 368 bp, Oryza sativa
  unsure (1)..(368): unsure at all n locations
tatacaatgtgcaattggacaggacttatttatacttactgtgctngngtaatattcgctatgcacatgttttggattctttgcccacccttccttagcctcgatgagtaacattagtgggcatttgtccagtttgatattatgcaacgaagtccaccctaccaagtctaggctagcatatgaaccaaacatgctttacatataaatgaaccctgtgagaatgttcaaaatctatattccagttccacagcactgagcaatgctgattgttctgctttctctgtcatattcatgctttcaggttctcataagaatatttggtgttcttaaaatagagaaacaagtccacatattccgtctagtatatc

SEQ ID NO: 20961 - DNA, 333 bp, Oryza sativa
  unsure (1)..(333): unsure at all n locations
ctgatcctgagtatattcctctcggactagtntcaagtgaatcaagaatactcatggatctaactattcgggccccggtcattgaaccttctggagaggcacgctttacacaatcgacagggcttatgtccgacattttggttccacgaatggtacttaccatggtatgtacacgtttatatggatccacatccatgaggcgaggaacatgcacactcccaggttcacataccttaccaagatcgcttcttatgaggtcaacaatcatcaagttctcagctcgaatcttctcactggtgaaacacataagagaatatcagtattgcgaggact

SEQ ID NO: 20962 - DNA, 430 bp, Oryza sativa
  unsure (1)..(430): unsure at all n locations
cgataacccagtgcttgctaagcgggtagcgttagtgattacctatcttgagcgaggcatggagagcctgatagacatggcanatgttcttcatccnctacttggccacatccctgcagaagaaatttatcaagggtgtaccagcacagctagcagagcactgcagccgggtcacacgtggtggctggtcatggtggacaaacggaggcatatactacctctcgtttttaacagatgacactgttgactttatctcacgtgtttgaccacttgtctttattcaaaaaattacgtaattantaattattntgttatgagttgtttattactcatagtactttaagtgtgatttatatcttatacatctacataanatttttgctcaatgngagtngaatacctcggagtatatcaatccgagctcgcattc

SEQ ID NO: 20963 - DNA, 373 bp, Oryza sativa
  unsure (1)..(373): unsure at all n locations
caatggatatgcatctcacatagcgtttatatattatctcttacatctcatggacgcttgtgtattgatgttggacgctgggtatatatgtaattacatatgatcaggagcaaactgtgtatatgtaatttctatatgagtgactctgtgttcgatcaaagccgattctgcgagtaatactatatgttaggagcatgatgctgcagagtgcgtgtgtaataagtaataatcctgtacagattcctgtggttttgggatttgctacacattggacgtccgggacatantatcacgctgcaacaagatcagcaaatacacaacttgccctcgcgatccttctgattactgtaccacttgcattataacttaattg

SEQ ID NO: 20964 - DNA, 405 bp, Oryza sativa
  unsure (1)..(405): unsure at all n locations
acgtctttctgatttagcccatagcaaccatgctttatgccatttgaatagcaggcgctttgattgaaggaaatgcaatactcaatttatagaaattttccttttgatcggattgaaaatatngaaccctacaaattcctgagtttggaggattttaaaagagggcaaatctatggaaagttcctaatgatattctctattcaattttatgtttataattttttttggttgacatatattctgctaaatttatatttttctcttttccggttctaacatgcgttgaagaaccctaggcccctctgattaaggaattatagaaattaaaaatcattctatggattttctatatagccttaataaggatgatctatgatcctgaatctttgagctctgctgcagttg

SEQ ID NO: 20965 - DNA, 412 bp, Oryza sativa
  unsure (1)..(412): unsure at all n locations
accaagatctcagcttctttctcgctgatggacgatggttgttattttatttgtganaaatggctcgacggggagcgggaaaatttggaatttttaggatggattggagcggatcgatgaaccctaacttcatcggcgcggttctgtactgtatcacggagtgtggaatggctagagtctcggcggtgaagacgaagcgacgtatggacttccgtatttttatggtatcgngagtactaatgggcctaagcctgtcagtacttatcccattatgtttcagcgtggcccgctgtgatccctatggacttatgcgctctttgctatggcaatatgtgctcacaatgacaccgcccgatgctgttataatcttatttacgcgatcaataattcttgtaattatattatgccatga

SEQ ID NO: 20966 - DNA, 399 bp, Oryza sativa
ctaagcttggttatatggtcatggagttgatcaagatagtacgatacctcttggctttcttacttatattgtctccaagagatctccggtaaaattggtggtgctgatcctgagaaatacaacagatgggctgaagagttggcgttcatgatcgactctagtctgcatgacagatgcatgaacatcactttacaatgcgtgaggcagatgtttgatttcaacgaagataagagtatcctgacacatgaagaacaaaggagattcgaacaacacgagatccttgaggatgacttctaccaacaatatgacgactatattcatgactctggggagcaagaagcgaaacagctataaatttctaacttcctttctttggtgatattctttaacctcttttac

SEQ ID NO: 20967 - DNA, 372 bp, Oryza sativa
attctgtctccaaacataacttgccctctgaatatgtttaatgattatatctctactggaggagcaactcacacactgatttatattatctgtcttttcaagaagtatttatattattgtaagctgtggttgctgttaaatctcatgatttcatattgtttacgttgtcatggagcacttttgtgttcacgtgaatatagcatattaatgcgtgaggacagtaactggaattcgacttctattgttcacagacatgcctgcctgcaacacgcccttttcctctggtgtttctgacgcagcttctgttgctctcatcgaagacgactaggcaaactgcagcctcccagatgaagcaaaatctgtgcccagtgc

SEQ ID NO: 20968 - DNA, 382 bp, Oryza sativa
caatatcttctttctacgagtagaagatatccccatgttgactccaaacagtgtctactgtacagatgatacagctcattatatttatcattcaacgggttggctctcgagaggctagcgccttccatttggaagatagtaggttcaccgatctgctacctattggttcgcgggtgaattggcctcctcctgtgtggtgtaggccatcatattcttaaggttaatcaaaccatatgcttcgagtggtacataattatgtttagttacatctctatctattcatattctcttgtgagtaggaatattactcttttgcaagttatatagagtcgttctgaacatagaactttagattaaacagtgaacctcggctatacatcac

SEQ ID NO: 20969 - DNA, 473 bp, Oryza sativa
  unsure (1)..(473): unsure at all n locations
cattatntctcttcatttctatcacaataagatggactntactcttgatgataatggatcagttattaaatcttggatgggaatttcttttacctattttcctgngcaatctcttattaacaacttcttcccaacttggttcactataaaataagataatacaataacagtatgaatattntcaacacataagtcctctcaaacaagagaaagaaacatacctttttcatatatatctcgaatatgttccctatggacactcgcgttcatgagttatggtcaacaaacaatacgcgcagcacggtacattggtcaaagtttcataattaccttatcccacacaaatcgnttacctataacgattcactacccctatgaaaaatcaattacatcagagcgtttccgggggaattcactttgatttataatgtattgctggaagatgtgtcgcgttgcctattaactactcttgt

SEQ ID NO: 20970 - DNA, 339 bp, Oryza sativa
  unsure (1)..(339): unsure at all n locations
gtatatctaantgtgtgccattaacagngtattttcgtcttatgtttgcaggttggcatataggcatgctaaanaactatcaggaactgtacaagcttacacgctgtaaatgaacggaatgaagatcaatagatcatccgttaggtcgccttcggttttgaacaagccctacaaggtggtcaaagaaattctattcctttatataccattgagtggcattttgttgatgcttttattattcaaccaaactggtggaggagccaaggtcacagtaatcttattatacgtgggacttatagaacttccatctttatcggtacatgtgagtgtgagctaatg

SEQ ID NO: 20971 - DNA, 341 bp, Oryza sativa
  unsure (1)..(341): unsure at all n locations
gctggttacttattacattacctttactnntgatttctaactttattctattaatccanaaacttgtgctattaatnggataaaatgtcttaactccctcctttcacttgtcttttgatgccgcgcttcaagcctgagtacttgtctggtgttgagggatttgtccaggagttgcatacgatgtcctttgccatatgatttgngactgcccctttgtatgcccagattcctcatgatcgtgatgaagagaagtgccgagtcatagtcaccatgaacagtaatagtgaagatatcccatcagtgatgttcgaagctggaggaggaaactacattcatgcatg

SEQ ID NO: 20972 - DNA, 347 bp, Oryza sativa
  unsure (1)..(347): unsure at all n locations
cgcggcgcgagtgcctgatggccgcggtctncatccncgctactctctacccttcaggttcggggccagcagcagctccgccgattaattaatctgttctttgttgaagagttgacctaatttgatctgttcgtcttggcgacaacggtggtggtgagtgctatactcgctgtggctcgtcgcagctgatcctgtggtcatcgtcggtggccaggaagcacatcctcaccgagatggggctcgagttcgaatcatggtgggttgcggcgctcttctacgttctgcattttccacncttttttgggggattgctagctttcgggaatgttctctcggggatgaaatga

SEQ ID NO: 20973 - DNA, 194 bp, Oryza sativa
gcacggagacggctaatacctccaggacccgctatcgcgctctcaaactacgtgcccagagaacacgcttctttgcatcaaacacatcgggtacgcggcagcatctacgacttccgaatctctgggggagggcactttcctggtgccagaggccccgctccaccatttgcgcaagccggcgttatgggtagccc

SEQ ID NO: 20974 - DNA, 283 bp, Oryza sativa
  unsure (1)..(283): unsure at all n locations
atgtcatgataatgggccaaatacagtattggtctaataaaaattactcaccttatatgccccttggtattctccaacctcctctcccatcaagaaaacagaaaggtcagcagacatctcctcatcaagggcagaattcaatgcttcacgcacagtcatctgatgagcaagaaaaagtgcaagtcatatctcacggtatgtataacggagaactgtactcaagagaacgtcatgtctatgtattcaagatcacgtgtatattntaaagctatgttagactttc

SEQ ID NO: 20975 - DNA, 404 bp, Oryza sativa
  unsure (1)..(404): unsure at all n locations
caagcagtntgagctgatttatggtcctgactacaacaaggttgctgccctttctggatgcatgcgtcatacacatcagagtaatattactttttattcactgttctgaatttagtattggaatttggaaatcgaatatgtcatttatttattctggaatgtcaaatttctcgctgatacatagtacatagatctaattctagtgccatgacccgttccttgtagggaaagtttgtgagtactggtccgaaatctgaactggcaaccaagcgaaactggtgtggacaagttctgatctggcaaccaagctatactactgtgagtataatagtttcgagttcgtaagaagtgatacttcgtattacacataccgacacacctacacgcaccaattacatgaccat

SEQ ID NO: 20976 - DNA, 332 bp, Oryza sativa
gatcatccgccccgctagtgcctgatctattatgtttggtactatgctcaccggggaacgctctgcctcattgatggctccttggtcttcagcgatcagatacgcgaggctgtgaatcgactatcggacgcaatggaagcctcttcttatgacacgttccgacccgaccgagagaatgacgagctatcactcgccctacagactctcgagcttccagtacgaacacgagggagaggcgtgattccctgaaaatatggatcaaggaggacatcacacgtataggagtctgatgaggagcaagagagataccgaggcgaacattgcagatcttg

SEQ ID NO: 20977 - DNA, 230 bp, Oryza sativa
  unsure (1)..(230): unsure at all n locations
tgaactaccacaccggtgggagccattgtgtgcttgataatggatgcactctacacatgactggtgatanggctatgttcaccacattgaagtaggacggaatgaacaagaaaaagtgacatttggagaccatagcanatgaaaggtaattatgttaggtccaatcgctatctccaatgatttgcaaatgacaatgttctctttgaaatctctagatttattttctttcg

SEQ ID NO: 20978 - DNA, 439 bp, Oryza sativa
  unsure (1)..(439): unsure at all n locations
agcaattctggtataatcctgcagaaagagtattctttgtatccaagaaacctgcangcatctatctagccatggccgccgcgagagcgggcaacgccgtccggataacctttgccgaggaggcggcgccgccggaggcaactacttcgccgggcccgcgctcgctggctcgaccccattggccgggagaccgacggcgacgacgacgtgccttgcagccggtccaactgcgtcttctgcagctggtgtatcgtctgaagacagatcagttctctcgggcgtctcttgatatgttctnttcaagtgtaatcagcgaatcttatgggatgttgatgagtataaaaaagaggcggcttaattagcgtgttctatggcttgaataactaatactcnatccaaattcttcatctaccaactcttcttaatcatcataattttc

SEQ ID NO: 20979 - DNA, 354 bp, Oryza sativa
  unsure (1)..(354): unsure at all n locations
tcacggcggtgcacanagcacgcgtcggtgttggcggtgtctttgtcgtggccgactatgacanacggtgctgctccaaggacgccatgttcgagccccactgccttgcaactgctgtcgtcctattgtcttcagggtgccactcctcacaagtgtggtcagcggcagtcaaaagccgtccttcgtgacgtaagatacggccatagactgaataatctatctctaggtggacgagcttttcgatgtcacgagagtgtgtcagggagctcccgcctagcgcgctcccccaatagcactgtttcatcgcatcgacttggactcctaacggctgttcctggtgcgcccctcacgata

SEQ ID NO: 20980 - DNA, 344 bp, Oryza sativa
ctttgagtgtccacattgtctgatgtttgaactgctacacctgatgagtgttactcttattgagaacaaaatgatgctaaatataagaagccacgtgcataatgccaaatggcaactctgttatttggctgatagggtaagtggctttaacattatattgctatgtatctgacacctcaatttcttatatgatatgaatgacttgacggcccaagtctcttcagagaatgatccgatttccttctcccaaaagtgatgtctactcttcttcacggttgttgatgtgctactctattatttctgtcttcgtcaatactttgattgacctgcaacacatatatatc

SEQ ID NO: 20981 - DNA, 389 bp, Oryza sativa
  unsure (1)..(389): unsure at all n locations
acactatataanactcaacgctcgagcagctcatagaagagctgacctctgcacctattttattcttttctcatcacgaaagactgtggtatatcttgtgatgcgtcaaagcaaagactatgacgagtactgatgccagacaggaaagttgtggcctatgcatctcgacaatcgcgaccacatgaggaacactaccctacccatgacttataactcacagctgtggttcatgcgctaaagatttgaagacattatcttgatgggaacccattgcgatatctacactgaccacaagagtctaaagtatattttcctccagtcagatcctcaacttgaggcaaatggcgtggttagaattaatcaaggactatgatatagagggttactat

SEQ ID NO: 20982 - DNA, 221 bp, Oryza sativa
  unsure (1)..(221): unsure at all n locations
actcctccagttcctgagcagaccttacaaaagaaagcaagaaagtctagtgcagctaatttgtggaagcagtatatatgaaacgaccaagcctctccattctcagagaacanatcaacatgggacccggattcagagcttaaccactacctcgtcaccaatcatactaagcatgatccgacgcttggttgcgacgatgtcgatctccttgggtggtggaa

SEQ ID NO: 20983 - DNA, 271 bp, Oryza sativa
  unsure (1)..(271): unsure at all n locations
ctactagattggggggtggttcagattcatatctaggttggtataggagtaatgtgggtagacaaaatggctggtctattttatgttgggtctggggggtaagangtggtgaagatggtgatacgcaactgtggtggggactataacgtggattaactacaagggtcgctaagttgtgatctatcatctgacatacactaattgggtcttataccggcacaacacatatgctaaggatagagggggcagtatagcgaatgactcacaccta

SEQ ID NO: 20984 - DNA, 402 bp, Oryza sativa
  unsure (1)..(402): unsure at all n locations
acttagctgcatagctgagctccanaaggctcacaggacctgaacatacttctcatgcactgtcggccggncagtcggccactgtgctttatataaacacattgcaacgaagtgttcacttcaaagctagcgcaatcggcgcatgcctagctttgtgccatatntggactgggacagtttaattaattgctagcattactgcaattntccccaataaatatcagccatctgttgcacatggtctgctaatcatcaaacaaattaacaattgtgacgcgaaccaccaataacaatatactcctactcttacctccaaatatttaatatctaacgtaattgactcttttttctcaaattttaaccaataatgtacactcactagaatttatgaagatgacccac

SEQ ID NO: 20985 - DNA, 362 bp, Oryza sativa
ctcatctgataaggcatgtaataattactttataatggtagactcaatatattaatgatgttcttatgcctattatctaaatgatcacatcccctttaatttgtacttgacaactcatagctagttgccttgtttgtgcaatattcattaccctgtatgtgttcatgttggacttcagacttcagagtctagacagtagatagacatgccaccttctgaaagtgatcccttccaactttagttgggacaatatacaatatgatactgtcataactggcatcaagtatatgacatatgtgagagtaaccacttgtttgcttgtggctgtactctgtacgttaggatgctagctgtaatatctg

SEQ ID NO: 20986 - DNA, 381 bp, Oryza sativa
  unsure (1)..(381): unsure at all n locations
tgactctgtccatcacttnctncactggtccagccgagagatggatagattgagcgagccgacgcgtggccgcaacgtgtcgtcgatctcggtttcccttttctcgctctctactcctnccagacgcgtcgtcattctccacacatcactttggagctgaagaagccgagggagaggttctctgcctctccgtcatcctcaacctcgccgccggtcgtagtgacgacgaccttcgccatctccgtttgagtcaaggtcacctccatctctttcgcgttcccatctcttcacacaatgccgagcatttcctcttttgacctaaacccctctcgtgcagtgcatcgccgggaacgcaagccacgtcgacaacgccctggagca

SEQ ID NO: 20987 - DNA, 483 bp, Oryza sativa
  unsure (1)..(483): unsure at all n locations
cacatctacgtcatcaagatgaatattatcactacagtgtggtattctttatcttgtgtctganaggacaattctatgtgtgctatntttaagtcaagagaatagtgttagtaatgctaggacattcaacaatgatgaatgttaagagatgttgatctagaagacaanaatagcaagaagattcaatttccacgtcttcaatgtgaaataaatgaaagttgaagtttgcatggctatggaaaaagtaaaacgcattaagtggacccattatcctattactatggngaaggtatatcaaatacaagatttgcctctcgatttaaggaatggatcangagataatgactgccagctcaattcaataatagtcacgttgtgaacgatggcatatgttgtaacagatcatcggacgggcttctgtngatggccgttatcatgacattatttcttgtaataggtaccacgcatatactgtcaaatgtg

SEQ ID NO: 20988 - DNA, 307 bp, Oryza sativa
ggaaagagacaagactgatactaccactgactcgctgtcttaccttggaagatgacgcaaacaaaccagtgagctcccgttcatcgcataacaggcattaaacctgtgttgaaacagtaaacattgctttattagcaattaccattactgtcacgctcatccgtgattagccaccaacaccgacacccagttctagctcactggggaacttcagtgatacggcaccgtcatacgggccggtatcaatattactctctcaagtgtcatgtccaaaaacgccccaactttgtgcgctcccacaatccga

SEQ ID NO: 20989 - DNA, 396 bp, Oryza sativa
  unsure (1)..(396): unsure at all n locations
gtggctagtctcttctgcatggtttggagagtcttgactaagaagatctatgaatttttggttggatgaatccatctcctgatgaaatgaagagatacaaactgacatctcttgttggtctcgtttatatgagcatagagaaggagagccaacacccagcaccaaaggctacttcaacggacacttgctcggctgccacgccccagcaccaactgctttagaatttattattcattatacacagtgaactcaaaaattactgtattttatttccttgtggcctgcctattctaagaactactttagcaattaatgtcatatggactacctccactgngtatattgcctgcccttagagctgcatttatttgataatgcctactttagtgatacatt

SEQ ID NO: 20990 - DNA, 330 bp, Oryza sativa
  unsure (1)..(330): unsure at all n locations
ttcatacnncttacctaccatcactcttactatttttattaatgattaacggcatcttaaacattctcactctccactattttcaccctgggatgctaagacatggtttcctggacggacggaatataatgtctgaacattgagatgtgatatagtaaaatgttggactacgcacgtgcctgggatgcgcacaaacacattgagaccaatccacgtgcacccgactttacccatgctcattctctttcgtgtttaatcacaatcatcgtacgatttccatccgagtcactgcagctattatggtctaatactagaaccaaatctattata

SEQ ID NO: 20991 - DNA, 371 bp, Oryza sativa
  unsure (1)..(371): unsure at all n locations
ataaacgaatcccaatactaacttttttttggttaaaaaccgnccgcgtatacacaaactacgcaaccgcatacgttctgaatgtaccaccccccctgggtttataccattatactaaaagcttttggccttacaaccggactaaaggtgaatccaaagctaaatagatacgctgctttttaaatgccaaaaatatattctgaacaaactaatgtctccttaagtggaaagcggactgattatcattcagcacattgcattatcaaaatcttttttctcgtaacaagatcgtttttaacaaaggttattaacttgttcttttgcctctcttaaatcatcatgaatccacccttctttgatcttttttagat

SEQ ID NO: 20992 - DNA, 303 bp, Oryza sativa
  unsure (1)..(303): unsure at all n locations
taagctccagctcttangttaagcccgaactgttccctcattacgtcagctatcacatcggcccacggncgntgctgagctgctccctgtagcctgtgttggatgggctcgaactgaccatactgagaagcanactgatgttgagttggccccctgaggctgatattgataattcaagttgcccccttggtaattatgacggttcggctggatggtacgtactaagtgctcaggaacgacttgaggcattactgtgccatccggccgtacgtggtgaaccaagtgttctgggacaacttgatt

SEQ ID NO: 20993 - DNA, 391 bp, Oryza sativa
  unsure (1)..(391): unsure at all n locations
taagctcgctgaagcataatctgacagtgaatctagtggtgatattggcaatgcttctggtgcgtgtttctggaanatgccaagagatgtctaaaataaggttaacaggttggtattccgatccatgttgctatttattanggtgaagttaagttntggatatataagttatttcgttgaaatgaacaggtggtctgtgcccaagccacgctggtgccgtcctgaagatgctgaatctgatgatgatgataagttagcttttgatgatactggnccagcttcatacaggtatatttggggacggaaagtcaagctccttcgtctcacaatccccatatctgtttcgattgttgaagctaaatncactgatggttagtaatttggcttcatg

SEQ ID NO: 20994 - DNA, 442 bp, Oryza sativa
  unsure (1)..(442): unsure at all n locations
ctaagctccatatganttgtnttaatganatatactctaattattggctaatattcncacgtacacttacctttagttgcagctagaaaagggtatgttntactagcatattatattatacctcagttattgtcccatgcatcttacaccatagtttacttactaattagtaattattacttcatacctttttctaaatagatcactccattgacattcggactttctttgtaccattactcctnattctntcanatatgataaatacaagtcgtgcttaatacaactttgactgacaaagcacagtacaataaaataataatatataatttctaattcagatgatgattaacgctatgttcataattagagaacaccatctattgagagggcacataaagcggaattctactaagtgtcgctgaatcctgctactgttggc

SEQ ID NO: 20995 - DNA, 134 bp, Oryza sativa
gctccccacgcacactctctacattaccaatacaaatggcacacattctagatatatatacacacatactcctaatataatgatacacatatctgcacaatctcatattcaaactcattatgtttcagtcacta

SEQ ID NO: 20996 - DNA, 161 bp, Oryza sativa
tttgtattacatgattcacgaaagatataatattgtcttgataggcaggcgagaaccaatttgagtgtcggggagatactcggctaacctcagggttttaattcagaaaaatcttagaaactgttatgcacacttatgaggtcattactagcagtggcgtc

SEQ ID NO: 20997 - DNA, 394 bp, Oryza sativa
  unsure (1)..(394): unsure at all n locations
gatttatctacatatgacctgcgtacatgaacgagatngcatcaagtgtgtgacaggtngagttatcatatcagcgcatcatgatttcatgacataagacatatccatagaggcaactaatatagtgctgntatgaagtgtcaagaagcatactgcgctttagatttcactctttcaaattgataccaaaattaagatgcatggatatgctaagatagaggggaatatgtaagataacaaatcatacctcgcccagataatagaactccaaatttttacaccacaaagtgcccatagatattggcgcanacccctagcatccaattcatcaatatactcactaggtgtaactgatgcacgcactactgatgccatgtncttcagtacaactatg

SEQ ID NO: 20998 - DNA, 335 bp, Oryza sativa
cagctaatcacattatattatgcaggatcatcaccaaactataatagatgcctcaaataactaatttgaccttactttactcaagatatataaagtacttaaaaacaaatatggtggtcgaaatacagggatcgtactgcggtgcaccaacgcacctactaagtacgacataacatggatggcgcgcttcaacccatttaaataagctaggttacttctctagcacgactgtcgccaattctattgggtgaaaaatatcccccctttcaaaaaatttttttggcccttgtgggccccccaaaaatttttttttgggtcccgccctttttaaaaaa

SEQ ID NO: 20999 - DNA, 263 bp, Oryza sativa
tctccagacatgtattctcttctttcgaacggccaatctacgcttcggcgtcgactaccacaggattctctcttagacgttagtacgccgcgtctcgggttcgcgcgctcctgcatagtacacttctgactcgcatggcagcgtacccatactgtctacacttgcgaactgtgtttggaacgtgccggcctggcctgcaccctttcaggggcccctctccgagtacggctatcgccatcctataagagtgtccgccctagatc

SEQ ID NO: 21000 - DNA, 254 bp, Oryza sativa
actagctataggtatgccctgactcctgcatatctgctgaacatttgctttgtgattttttcctcgacgagagatcttgccgaattgaaccggttgttctctctcttggcctgatcaacacgaatgggtacttgccacagcggatccttcatctgtctcaatgagataacaacagccccgctttcaggataagagagatcaaacttttttaagagaaacagacgctcctgtatctaatctatgtaatgctaacc

SEQ ID NO: 21001 - DNA, 292 bp, Oryza sativa
  unsure (1)..(292): unsure at all n locations
cttgaactagctgacagaatataagctgcacagtagtttcggctgtgtgtagttatcacgcttnttgctactgctaatgagcttaatgcacctgatttgctgaggattcattcagctcagaacaactatcttagggaaggtagattggacccagtgcccgcctgtactgtggacttaggttgtagggtgactgataagaatttcttgagagcttactttattaaattgcccttgtgagaacaacagcaataatactgagctgagaatgtatcaggacacactcgctatgaat

SEQ ID NO: 21002 - DNA, 154 bp, Oryza sativa
  unsure (1)..(154): unsure at all n locations
tagctacttgctattgagggttgcngtgtttggacaacatgctcagtaacaaattcacctccattgctgcattattaacctatctaaggacattgccggctattacagagtgtgttatacaacattccttgtggagtgcagttgattataataa

SEQ ID NO: 21003 - DNA, 280 bp, Oryza sativa
  unsure (1)..(280): unsure at all n locations
tctagctttgaccgtgaacatcatttctcgttctgctaagaatctgctgcttattntaagactattctgagacataatacgctttaattactagatggcatctatactctctttacataaagaatgaggtacatttactttttgtaaattaaattgctgcgatattacgacctctttgtatccgatagcaacggtattgaaaaagtattgaataatttattcggtctacatataacaagctaaatactcataaactaatagtcaataactaaatcaattg

SEQ ID NO: 21004 - DNA, 219 bp, Oryza sativa
  unsure (1)..(219): unsure at all n locations
tctttcttgctatatcgcaatcatgtcaaatactatctcgaagattccagagccncaaataagtgtgcacatccttgttgatgtgaagataatcatcatgtactgatatctcatgatatatgagccataagcaaactactcactngatatatgtactagtgtctccatcatgactacagtctgacagtgctatgtggagtacatgcttatcagttaact

SEQ ID NO: 21005 - DNA, 212 bp, Oryza sativa
atatacctgttatcaacttctatatgatatgggaaactgcttgacaacttagcatattgccacttcctgtaaactcatgaccactctaggcttaattgattctacaaatatccgaaaaaaatccaattcaatttaaatatccaatcaaaaggggcccctcttttttggtatgtgaaacaatgtgttttaaaattgccgcccccccccccccc

SEQ ID NO: 21006 - DNA, 227 bp, Oryza sativa
  unsure (1)..(227): unsure at all n locations
gtgcagaatgcgcgcttctgcagtcaacttgtctctcggtcatcttagaccattgccaccccactctacgtgagactattaaacccacgaaaccctacttaattntttatactatgtagactggagggngactcctcactactagtgtgaaaactactccacgaagacccactaactttcttaccatatgtgtgatgggaggcggactgtactctatctattttctc

SEQ ID NO: 21007 - DNA, 415 bp, Oryza sativa
  unsure (1)..(415): unsure at all n locations
cagcttacaactgattgctcatantgtctatatgccatcatggatggcagcatggtactgtataccttctcagctatggcagactcatgtatgatgcaatgactccatcattatcactttacaatttgatttattcatttagacatatagcactgtatgttgtcttgtgttacggacgtgagtatctgacactcttcctttgtgtgataattgataatggcgattgttgtaacaaacttacgatattttcatctgtcaatctctctaacgaattatggtacacatggattgtttacactagataacacgattgattcttctttattcatacatctgcattaatatgtgtggctttataaaagggattttggaattttgccaaaaaaaaccctataacttttttctttcccccccc

SEQ ID NO: 21008 - DNA, 101 bp, Oryza sativa
ctggaagatttgtagtgtatcaatcattctcggcactcattggtgtctggcatttgtatgctgactctgatgactgcgtcagtgtcatggtaggtacaata

SEQ ID NO: 21009 - DNA, 126 bp, Oryza sativa
tacttcctcttctcgattaccactatggctcacaccggtgcgaatgtgacttttcacgctactccgctccaccaatcacatgggaaaatgacaggagaaacacattcatcacccgtcgagattctg

SEQ ID NO: 21010 - DNA, 248 bp, Oryza sativa
cttaaccacttaattaagtggctctattatagcctcatagtgctgttttattactccatatcgatataatcaactgaaaatagcttaaggtgtatggtagccatgtttttatgtttctactgagtatgaaatatgaggcagttgaatatcaatggcgatgcacctctattggacattagtttctttatatattttgtctcctatgtgtagagaatttcgtgtatgagctattttaaaaagttaaacct

SEQ ID NO: 21011 - DNA, 345 bp, Oryza sativa
accaatctaaaatatatatgttcacgtcagaccatgcggctctttaagacaatagagtcggcacaagtcattattcttcacttacagtctctcgtggcaacatttccatagtcccaaaaactgtgaagttatgtagatgcaggtaaaaattcatcatttggctctcacaagctacgcacaaatgaattatatgtctcatccaacacacaggccacgcaaggcatcggaattccaaatgcattatgcgattccgactaattgtattctgatgtcactacattttctgaaatacactttacaccccaatttaacccgggaaattaaaaaatgggggaattgaaaaaa

SEQ ID NO: 21012 - DNA, 157 bp, Oryza sativa
ggtatgcaagcgctggtctacggatgcatcgtattcatactgacaccatgataccggacttttgttggcgatgaacgggacacaaatgctttttgaatgaatatcacgcaatgtgctgacgtgaaaataactttttgcaaaataaaattcctttcaa

SEQ ID NO: 21013 - DNA, 250 bp, Oryza sativa
aactcgctcatgcattctcgctgagtcgagagtcacatgtgtggcttgagatcatgaattggatacttaatgctctaggacaccacgtctgagcaaatgatattgataagctgaaattgtatgtacacgaacctcagaatgttataatgatatctgcacaattaagcttgtgcataacttcggattggcaaaatcccctgttatgatcgaagaaacttcaaatacccaggcatttgaaatggttataatc

SEQ ID NO: 21014 - DNA, 234 bp, Oryza sativa
  unsure (1)..(234): unsure at all n locations
ctgaaactacgctgaagatatctcaatctctcggtcgattttaccacccgatgttatcccttcaaccgaatgaatggattacagatctaactcatctgtacttgccacacacacacaggatgaactgaataactatgaatgctcctgatattgctgttagctgccangcaagccattcatcaccaatatgatgggaacaattcatgctctctctgtcccttctctctccggtct

SEQ ID NO: 21015 - DNA, 354 bp, Oryza sativa
ctatcctaaccctgaacaggcctacactggagggaggagtcgatcttcagtgggagagtatatttacgatcatctatcggttccaaatgtcttatgcctaagtcgctttggatagctttatggcgagaggaggtgttaatgttaggccacaactagtgtatggcgagcataagtttgggactcatatgctcaaagaaggtgttgtccatgatttggcacatgtagatgttatatcaagatgcaatgcaattgacatcaaacccactgcatataatacacttgcgtcaagtggatgatacgcaatatcactaccagactagaattgtcaccatttacaatgggtggatttcattt

SEQ ID NO: 21016 - DNA, 193 bp, Oryza sativa
atcacagtcactcatactgaggtattacttatcttgcgagaaaatctgatggcaagatactatacggctgactgtcagctaaactatcatgtctcatatatataactggtgtagaaagactacatcctttcttttagagtagacacatgctattaagagagctgctttgtaatgtatgttcaagcatgatcat

SEQ ID NO: 21017 - DNA, 424 bp, Oryza sativa
tcagctgcaccgtctggtcgcttttctagacagagacagcttactccgggtcgtcttttgtgaactgcgaatgctgtgcgtcttggctatgctcagccttcaccctacaccttcagagtcgacgatcctccaccctttccctaaaactacctgggataccctctcgtggctgcttgctaaactatactactgtggttggggctcaaggccaagacatacatctttgcattgctcccccctcagttctttgcttgacgctgcgcgcgcatatgggtgcacacactgttcgtacctcaattttacttaagaatgtgcggcgaactttgctcgacgaaaagtttctcaactttgttactggcggggcccgtaaaattgtaattttgtgcccccccccaaaaaaggggggggggggtttttttttttt

SEQ ID NO: 21018 - DNA, 262 bp, Oryza sativa
  unsure (1)..(262): unsure at all n locations
ctgtgccatgctgtcattaaccgatacatgtgtctacactgtccatgaagcttgaggcaacgagctcttctatggatagcaatacgaactaacatcatcattttgcagttactatcctaatctcacagattctgtgttcaccagcttatcttgtgtgtcaaatctctcaaggcaatggataatgcatntcatgtctatactcttaagagtaagtcctgcttagcctctctaacatttgtgcccaaagtctcatctcatctct

SEQ ID NO: 21019 - DNA, 420 bp, Oryza sativa
  unsure (1)..(420): unsure at all n locations
actagctgcgattgacaggaaacatctaacacacactcgatcgatgtggctaactacngnggatggcattcaattaagtgacatgccctaactaagtgcataagctcaactataacacgctatctgtgtctatactccatataagccaggcgtgctaatacaaactcaacttatcttaagtgattagaagtttacgtatttattacttaagcataatggtctattagagcatggtctaaaatatggtacatggtttgccctggcccatacctgcgtcagctccagtgactttggcattggttacatttacacagaggatgtgtagcttagataagctatattagacgacaaaatcttttatactaaacatattaaattacttaaagagttttttttaaatttaaatttgggaattggggg

SEQ ID NO: 21020 - DNA, 417 bp, Oryza sativa
taactagcttggtatctcataagctgtgctctgtcaatgacttatgttcatcgttcatcatgctagatattgtttgggcctctgacatgctaacagatagaacatcagtcttgcatgcatgcttctattacactttttgaagtatgcgaagataatctatttttcttatacatactacaatgtacctctgacgagattgaaccatgctcagatctttgattttaaaacttatcacgattactactttgcatcactgctacggaactgcgaattacctctgtgatatgaagagtgtatcaaaattcatgatactgtatgtactgataataattgcgagtatataatgggctgattctgactattgactaataattagccacaatttcataaaaaaaaaaagggttttctttaaaaaaa

SEQ ID NO: 21021 - DNA, 428 bp, Oryza sativa
  unsure (1)..(428): unsure at all n locations
tcacactagtctttgattgtctgacgctacaatcttgtgatgctctggaatggagctagaccattttgaggagttcctcccacccaatacggctattgcaaaatgatgcactatgcactgaatgtgcacttatgggcgaatgataccacttggatcaatatgcacttatggcatgacacacggttctattaacatgtcacgagtacttanaagaatacacattatcatcttaatgaagtatcaacaaaaaaacacattggctgactcagttaccttttaatcttctgcaataaattgactagaccaagaacactattcgctctttaagtaccacataatattgaggtgatcacaggagcattttgttaattatgttggggggcccagaaaccagggggaaaacacaaaaattttgggtgggaataaaa

SEQ ID NO: 21022 - DNA, 379 bp, Oryza sativa
caaacactactactatctagttgtctgcaggacactaatactaaatgagcgccatggtgctgagagaagaaacccgcccacccatacccaggctccatcttaaaggaacaagttctcccccttggacacaaacgacagcagacagagtgtgatgatacacggaattgccacgcatcatggagagagccaacgcccactgacaacgattaaacactttttcagagcgcatcgtgatctcctctactttacaggcggaaacggtactaatggtgcggtaactactgaacttacaaaactttgtgaccccttcgggggaatggcccccttcccagagggaaattaagggccaaatccccacaaaaggggtgggggggggggg

SEQ ID NO: 21023 - DNA, 444 bp, Oryza sativa
  unsure (1)..(444): unsure at all n locations
actagcttctgattggagntatttacagatggatcgtgatcatttctgatcctcttatgcgtcctcaagatcaacggattccaacaaaggatctatcctttctgccgaaaaaagcttaccaagcataagttggatcattatcttttgacacctctttgatttaaacaccttagagaaccctgttggtcttattatattctcaggattagacgtcagctattagcatttgctttactgctcttctcaggagggtaagactccagatagagaaccctgccgaattcgatactctcgggatgtcttatgcatctcgatagcctgaagctaactccctctaccaatttatctctgtaccttacctcagctctaaggatatatcatgatataattctatttttaaatgggggaataatcctttgggaaaaaagggttgtgaaaaaaatt

SEQ ID NO: 21024 - DNA, 205 bp, Oryza sativa
ctggactgttcttcatagtcgcgcaagagataatatcctctttatggcttgggtgcatcgcgagatcaatgagtctctcaaggatttgcaccctttgctctactctgcagattacatgtgcctctcagatttctctgcgttgatcatggtcttcgtgccagtctcatgtgatacagttcttactgaagtgttgtgtcattcatag

SEQ ID NO: 21025 - DNA, 223 bp, Oryza sativa
gctacttggtactggtagtgaattttgaactgaacatatttatggattgcttgaggctaggttcttctgactctgctgggaacacgagaactgaaccaaccttaagctctcgatggaagatgaccttggactgactccgaaaaaattctggcccttgttgcattgtcctctgcatttgctatatacctgtgggtgtattgttgctcctgcttatgaatatgtc

SEQ ID NO: 21026 - DNA, 218 bp, Oryza sativa
ttgcgactggtgttgacggtttaaaaagaaaatacttgttgtgcgacacaataatacatcgctaataatagatgaactattacccagtgttgtggtgaatcatcatgtatcacctactgactttgcatctttctatatcgatgatgatccaactctggttttcatatgaagacttgcttcaaatgacgaagtgctaaagtgctctaatatgttcttta

SEQ ID NO: 21027 - DNA, 121 bp, Oryza sativa
atgcagacaaatgcaagcacactgcagccagtcacggggagatgtactgttctgtctactaacaacaagagtactcacgcacgacgacaagtctctcactatatgcgaagcctctatcctt

SEQ ID NO: 21028 - DNA, 201 bp, Oryza sativa
  unsure (1)..(201): unsure at all n locations
acttactactttcttgatttaacttatcaatatcatactgtgcttatggataagctactcctcttcactgcttaatgcggctcagcctgatcttgttgggtgatggttgccagagtgctacatgccttgcatggattggactgccttnatgccaattctatgacgcatgataaagtgccatcaagcacctgacagtatagt

SEQ ID NO: 21029 - DNA, 80 bp, Oryza sativa
cagcgacaccatacagcggtctaaaagtcaaaacttctggcttacgccttcctacaaacatgcaaacatagacgtgcacc

SEQ ID NO: 21030 - DNA, 309 bp, Oryza sativa
acaaaatgaaaaaatacccgcgtccgtgcggactgcatgccgcctcgcccgcgtcaattggtggaggagcctccgccgtgtcaccgtgctacgaccgcattgcccgtcacttccgcgcagatctggtggaaggagcccgcgcttccatcgccactgctgcgacaggggatggcgctgcaccgatccggaggagagcctgctccgcctcacattgtgtaactgtgttcacgttgtcttgcatacagagccgtgtgacaccgtcggtgcaatcggcagagagctacgcacatatcgtgtgcactcgtcgca

SEQ ID NO: 21031 - DNA, 354 bp, Oryza sativa
ctgcaatccctgtatccactatggatgtatgtaaagcgacgcttatgcctatgtgaaagaaggactcatatgatgcttctaaatacataataggatagactatagcaggagacaataacattcaaatagtgcccctgtccgtacagctgtgggccggtacacgatatgcctgccgcgctgccttcacacatggcgagtcgcgaacgcgcaccgtccgcgtgcgtgtgcagcgcgataacgtacgatcgtgaccggactcgcgtggtcaaaacagaaaggagaaagggtccacatcattgcaattctttcctcgtttctatggattatttttgatgtgttttttttggacatatg

SEQ ID NO: 21032 - DNA, 361 bp, Oryza sativa
ttctctctgctgcaatgatctgatcatctaaaatcttatatggtaaaccaagctattataacctcatcaaatcaatctctcttgagttactcacattattgacagctttactcctgttcgtgacggttcttagaccgcatactactatattgtaaggcttaaacatctgacttttcaaatgtttgtttagtgcaatacaaccatcttgattgggaagaaacgtatcttcttaaaatctgaaatgatgtacttactttgtatcagggaattttgtcctcttatttgatctattaaatggaagtcccaaggaaccgtataattcacctttgggggcccggcgttggaaaaccccccaaaaaaa

SEQ ID NO: 21033 - DNA, 85 bp, Oryza sativa
ttcaactgaagtgtaatacttttgttcgtgtgcaatgaacatatgcagtttttactcttatcaggaattgccttgggacatttca

SEQ ID NO: 21034 - DNA, 434 bp, Oryza sativa
  unsure (1)..(434): unsure at all n locations
actagctatggtcctctgcaggcngagtcgatctacaacagtattaccatctttcgaaaggccaacgtccctcggcggcgactaccacaggattcgtcctagacgttagtacgcgcgtcaccggttggcgcggcttctgcataatcacaactctgacttcggactggcaagcgagcccatacatgctacacttgcgaactggtttggaacagcgccggctggactgcaccctttgcagggcacctctccgagtactggctattgcgagtctaagaagtgctgcccctagatcttactacactggcgtcgtcaggcccttgtaagcgtcacttctggaatgaggacactacccgacctgatacctggaaacatggttattccaacggggggcttcaattacctttttaaaaagccgggcttttgggcccaaaaaa

SEQ ID NO: 21035 - DNA, 468 bp, Oryza sativa
agcttccagctgatgtgaccgatgacaagaccatttattaagatgacctcaacgaagttgagaaattatctgccgttgagataccacaggctgatctaacaggtgataaaaccagtgaggaagaggatctgaatgaagtgaaggaagggtcggcctatgagaatccgcaggctgatcggatagacgctgagagcagtgaggaagatgatcttgatggggattacagtgaagaatctgatattgatgaggagtccaatgaggaaagtatgcttgatgaggaattcgccgctgaggaatatgcctccagtgaggagactgatgatgagagtgacccctctgaagtggccactgattctgatgaagtggaagtagaaaagctgcaggtcgcaatggaggatggattgactgccgaggccaatcaggttgatgatgaagaagatgaattcagcggtgacctaccatcggatt

SEQ ID NO: 21036 - DNA, 451 bp, Oryza sativa
  unsure (1)..(451): unsure at all n locations
agcttatgcttcatggtgtctatagactcttaaacattattgatgagaatggcctataaaaaacatatcgtattttaaaagtgttactaaataagtactctgaatccacaactgattttacatatgtcatgaaatctcactggaagaaccaaatgcattccaatttttgtcatgaaaccacactggcagtacaaaatgcatntttaaattttaagtatattaggcattaataacctcaaacaacacattacagaatatgccaataacaaatatatatctctaaaaaaattaaacatatgaaaaagaaacttcaggccaagaaaaagtaaaaacatcaaggtactatgcaatggtagtataaatacaactattagtngtgtagatcaactgcaaaagtattgttttgaagcaagattcagaagcacacctttttcaatttcatatccaaatc

SEQ ID NO: 21037 - DNA, 233 bp, Oryza sativa
  unsure (1)..(233): unsure at all n locations
tctgatcgctgcagcacatacttagtattgtgcaagtttatgggatgttaggggcgtagcctaacctgagaacgatgagacgcgttccangaactgtgtggccctcttgtatatgcgccgaccatcggagccaaacccaaattatgttgngtcgacttcgatcgtagtggcttgacttgtgagtattgcgccatcagtctttacttcacgttcttccatgcatgatggtgatg

SEQ ID NO: 21038 - DNA, 424 bp, Oryza sativa
  unsure (1)..(424): unsure at all n locations
agcttcagttntccaatgtgaaatttttttcaactatgatcttctttgcaatttacaatacggtgaagaatgaaatgaacgacaccggagacccgacacagatgcggaaaaccttttccagacgctaagaggaacacgagcttttccaataacaaagctcggggacctgaccagggaggggcntncggnnccctccatnacaatatanatctgatccctcataaaaaaaggtgagataattggacaaagaaccaatcaaatcaaaccgaagtcctaaataataaataacaaataggcctaacgattactgaccagactagaccatgtgattttggtaaagggcaaagggcacgagtagttgtacatgattatgcacacgttggagatgagtgtacaaaaggaaataggataattttggattgaa

SEQ ID NO: 21039 - DNA, 282 bp, Oryza sativa
  unsure (1)..(282): unsure at all n locations
tgatgatgtgcagtgtgctccacacttcactgattttctgtggatgggtctntgcacgcgagggtgaacctttctatggttgtagaacataattgcatcgtgtacacatgtgtatatatggatgaatagtccatatgggtgtatttagtttacatataaagataactatttgggcgatttttgaatgagaatgcatgacatttatatgataaccagtgcaacgtatggtactacactatcacaagctgtaaataagacgtatgataatattgtagaggaaca

SEQ ID NO: 21040 - DNA, 443 bp, Oryza sativa
  unsure (1)..(443): unsure at all n locations
agcttattatagttttcttcccaggtaaatgaatatgttgagtgtttaagaaaatattatatttttgttatgtttgtgcatgcacactggaagtttacatgttgtatggtttaacttgtgatgggattgcaaattgtcgacaaagaaaatgaattcatgtgcagataactgctcgagaaagaaaagcaagagcgtatgcaggggcaagaggggtcaggggggcaagaaaataaccagaacaaaggtaaattgctcctaaatagttatctagaaaaaacaatggaaagaaacaaaagtctaaaccaatgtaaacacaaagtagggaagtgaagacatacccatctcacggtgatcctttctctagcagctctcctgacctcaataggacgacgaccagaaagaatttcaggagcaaactccataagnaatacatcactctgact

SEQ ID NO: 21041 - DNA, 395 bp, Oryza sativa
cttgggtatacccatatctgtgcatatcacagtgtctgcacgcaggccgatccatgtctctcataaacacaagaatgcattaattcatatacttgtgagttgtataagaaacatgtgttatgtacaaaacgggatgaaattatgcccatgatggtggaatcatatttcatctgtcttgccaatttataagactgacattgaacttgagcgagacaaggtcaagtcctcctctattcatcttttcttggttactgaatatattttatggactaaggacttgtgtataacaaattttctaacgacctatgccaagtaatctctatattgttatcaaactgatcctatgtagcatatattttcatatcttaacacatgagcactcattgcttacaagt

SEQ ID NO: 21042 - DNA, 469 bp, Oryza sativa
agcttatctagaagagaccgagttcaaagagaatgcgttatggcaagttatatattaattaggaatagtttgttagtttccttttatctctaggaaagtgtgtttagtgtcctataaagactttatcttttctttttatctttaggaaagtttctttcttatccgacaaggacttatatcaacccatgggtataaatatgtacacccggggtctatgtaatctatcttcatgatcaatacaattcggcgcatcgccaccttttaccttttctactttattttatcgtctggcgggacttggcacctgacgcggagctgcatcggtgttcgatctccgactaaagggtaagtccaatgttccgccggcccatgcaattgtatcgtttacgtcggcgtcgatcaaagctgcatcaatacattcgacctctaggactgctctgggttggatgatatatttgcctacctattt

SEQ ID NO: 21043 - DNA, 260 bp, Oryza sativa
  unsure (1)..(260): unsure at all n locations
cactggatcacgcgcactntggcctaagcaaanagtgcctaagtccctaaaagaacgtgacatgccacacctgataatatgggctgcagacatattatgcctatgccaaaaaatatgccttcgacaccctttaaaggatgacgcatgtaacatactcccgagtaataaatctttcgggtaatatagaccacgtgtagctcatatgaatagcntcttgatctgatgattattccctatggatactccaaataaaataataa

SEQ ID NO: 21044 - DNA, 441 bp, Oryza sativa
agcttctttgctttccaggcagaagaatatgttttctctccagctctcttctttggctagtttttagtaggctcttgagctgagacagtgacagttgccttgccagatgtgagcctcacagacgcagtagtagagctgtttgaatggggaactattgcttgaagatctactctagcagatccaccctgagctgttgaaaccttggcctttgcagcaaccctgaccacttcctggctatccattgctgcctgtagtgggaaagtatggcaattaggtaaagttagcgaaagtgaaaatagtgaaaaattgttgccatttaccttgcttcttgattggttgctcttggaatgttctgtggtgctagttgtagtaaggctgacagctctcctcttcctgctttgagcagaactgcctggtgtgtttgataacaccatctgttga

SEQ ID NO: 21045 - DNA, 172 bp, Oryza sativa
tattttaccgagctaatcattatattgacttagtaacaactggacgagatatacaaatacgccatcaaagaatgtcggtgagcagattgcacaccaattatacttagaatatttctgtgagaacaccatctagcaggatgtatataagacgctcaaatgctatattatatcg

SEQ ID NO: 21046 - DNA, 468 bp, Oryza sativa
  unsure (1)..(468): unsure at all n locations
agctntaagaaaaaggattcaaggattcgtctattgtatataattntaaanntaattattatatatatttttatcaaataacacaaaatagttggtaaagcagtagaaatatatatatatggtagcacggatcagctgcaacttggactcccatagatatgtaccgtacctagtcagatacagttaaaaagaaaaccagctcgcttgtcccagtaacactatgaatagtacagcatgaacattgaaaacataccaagcacagctgtgcaaaaaggaagagactcatatataagataacataaaaaaagtacttgaaagaagccattccacataacaaagtgaagcaaaacaagaagaaacattagcatagttaggaaaggccagtaataccacagtggtataaactggctacacattgagccatttgataaatgatatcctactcagaaatgcatcatgcatgatact

SEQ ID NO: 21047 - DNA, 390 bp, Oryza sativa
  unsure (1)..(390): unsure at all n locations
atggtagatactgatgagcgttatgttgtattntcctnctattgatttacagctaggatgcttatgtacgtgtgtacttatatgagtatgttttcccttttagtagatataaggcaaaggatgttcttggccgtgtttagttgttntgctaanaaaattgatgtatacggacacacatttagaatattaaacgtaaactaatagcacaacaaattataaatttcgcctgtaaactgcgagacgaatctattaagcctaattaatccatcattagcanatgtacatagcgtaattaggctcaaaaagaatcgtctcacaatttacatgcaaactgtgtaattggttnttttttcacatttaatgctctatacatatgccctagacattaat

SEQ ID NO: 21048 - DNA, 420 bp, Oryza sativa
  unsure (1)..(420): unsure at all n locations
agctngcatagatacaaaatcatccataatgttatcaattatcatacggatggaatgcatagacactacaggcatatttcacagccaacagccagaagaataaaagaaaaaacacacaaacatggcatttgcttttgtgagacataagcttaaagtccaaatcttttcatttttagtgcatttgtgttgccacttcagcttagcccctttgaactttcatgttaaatgcattttctacttactcaaaatatggacaataaacagaagcatgaacagaagtgaacaacatgttagctgtaataaaaaaaaattgaagcagaatgaaatatgcacgaagcagattgacagatttgaggatctatgcaaccacaggaacagcacatagacaaagacagactgaggacaggtataccaaaggga

SEQ ID NO: 21049 - DNA, 281 bp, Oryza sativa
  unsure (1)..(281): unsure at all n locations
tacatcgagttgcaatttgcacagataaatacaattctcttataacaggaatgaataataagaaatgtcagtggtagcatatggtgcaactgtggaggcacaaatggacgcgccaagaaaatgtaaaaatgtgctatcaattgcaacttacggtgtgtntgangagaangggattgaggagattatgaagatacgcacaacgaggtgagccattagctcatgattaattgagtattaactattttaaatttcacaaatggattaatattgatttttaaagc

SEQ ID NO: 21050 - DNA, 465 bp, Oryza sativa
  unsure (1)..(465): unsure at all n locations
agctngacaagatatatgatgctccaaattgtagtctatcttattagnagagtacttacgctggttcatctagaattccctatcggggaagaggagtggggcgacaaaggaccaaatgtacagacctgccgttgcccactgggttgcaatcctgacccaaacggatggccacccaacgtcaacaagcttgtcactctcaccaactgaggttgaccagccagtcaagagcatcgcggagtacatgcttgccaatgagaagatgatgtggaagaacgagtaggagtatgtcactggccttggcacattcttcttttccgcttcctcatctgccttactgataggaagcagtggcttgtcggcacctgaaaaagggcaatgtgataagccacacaccttgcanatatggaacattgacttagtagatagagcacgcaatctaaccagcacgtggtgagtctggagctg

SEQ ID NO: 21051 - DNA, 217 bp, Oryza sativa
  unsure (1)..(217): unsure at all n locations
agctntctccctcttctagtttgttcgattnntttttcttcctattntttttccttttgggggaggagtgcgtgtgcgtttgtgttttcgttgtgtgtggtcacggagggagggtgggggatgggggcggctcttctctctatatcctccactataccttgtcctacgtactcagcctttcaatatgtattttgcatccattttatccttcttcttc

SEQ ID NO: 21052 - DNA, 87 bp, Oryza sativa
tcatgcgcatctgtcgaatatatgccggctaagtatatgttctggagatgatgatatgctatactaactactagtatactaactccc

SEQ ID NO: 21053 - DNA, 442 bp, Oryza sativa
  unsure (1)..(442): unsure at all n locations
agcttgatatggagttcagttcatactaaaatgtttatttgaaggcaccgagcctgttctcaaaagaggcagaanattatattttaaaaaaatgaaaggataaaaatagaaattcgggatggaaaggtgaacagctgcagaaagttgaatgaggaattggacgcaaaaaccaaaatggttatgaataggagatgcgcatataaaatagtgaagcatcaaacacttgagtaagacttaaccatgaaattcgtacaaaaatacaaacaaaattatattacatagtgtgtgtgaggatggaaggctgaaacgctcgttgcggagaactgcaatgtcaaagacaaatccaaaaattccagctagagaaacacagaattctaaatccgacccaaccacaaatccaaaaaaatccaccaggttagaattctcaaatcaaccgaaaccc

SEQ ID NO: 21054 - DNA, 465 bp, Oryza sativa
  unsure (1)..(465): unsure at all n locations
agccttgaagagctnttntatatctgatggcatttttttaaaaatttcaaactcattntaatcttcttattgtgaagaaaanttgaatttatcttgttcacctgattctttttcttctatttccatagaactcttgctttgtttctccttttgtatgacacctgcatagaaagaataaattaagattgcaaagaacttttgtatttctaaaccagcaagttctgaaacatagagtgtatttaccattctttttcataagtccatttacagtaaacatatatttgtattacagtgaaattatactgtaattccagtaaacagaaactgtaactacttaaaaatccaactacaatcaatttgataattgattatagacactgaagtgaacaaatgaatcagtttgtataattctttcaaaataatnttaatattacactaagtatgtatttcaattacagtgtaatg

SEQ ID NO: 21055 - DNA, 352 bp, Oryza sativa
  unsure (1)..(352): unsure at all n locations
tcctctcagtcacctgcggcatgcaagctngacattacggaccactgggtctagtaccattgtgtaccgtctccgggtggaccactcggtcaggatgatccgagcggtcaaacttgattgcaatctctgaccatcgaagatactgnggcgtgtcgggctgaacagcattgatctcccgttcagtcaacttctgcttccgtttagactcataagccagggggccgccgaagatatggttgagctccttgcggtgatcttganaacctagccgggtgtcgccgtcatccttcttcctcgacgtgctttgttcttcgtcagagttctttcgtgcagtcttggtgtattgatccgc

SEQ ID NO: 21056 - DNA, 407 bp, Oryza sativa
  unsure (1)..(407): unsure at all n locations
gtcacagagggaggataatgacatggatgcgaaacctcatgttgctgagtccccacatattaggtcaaggtgttcaaatttgcgcagtacaagctctacaggcagtcatatgtcattggattcgtctgatagaaatgcaactaaatcttctagtctgacacattcaaccctcacagatccaaatttgtggagaactatctcaaggtattgtcgctcaggcgtaagccccttgatttatatctactaaagagtgatggcaaatcttttttggtgtttgaacgactatggatntgcaagcatgttaatattacactctctctgtactgtcgttcttatatatctgaatcctttctaatgctctatacagtttatgccactgttaattatatctctactgatcctagatt

SEQ ID NO: 21057 - DNA, 476 bp, Oryza sativa
  unsure (1)..(476): unsure at all n locations
gtcacctgangcatgcaagcttatgtggaagccactcgcctccactcctctctttttatgctgtgncnggnactctattttcctaactctcctctctcattntttgcgcgcacgtttttcaaactactaaatggtgagtntttttcaaaaagtttatatacgaaagttgcttagaaaaatcatattgatccgtttttgaaagaaatagttaatactcaattaatcacgtgctaatgaaccgctccgttttccgtgcataggagatgggttcccaacccccacctccgaacacatcattaactacttaagtgcactgtgaatgttttcagtacttcatttctttgggatgagcccacaagcctagataatgttcaagttaggtagtttatcattggcctacatttacttcatttttagctgttctgtatcccaagaataaatctttattattctctataaagatctaaatacttttt

SEQ ID NO: 21058 - DNA, 470 bp, Oryza sativa
  unsure (1)..(470): unsure at all n locations
agcttgccatgcaagaaaatgccagactcttattatattgctggatttcgctaaagcatttgattcagtaaactggcaaagcctgttccagatnttgtcggtcaaggggtttcctgataattggatttcttggatcaaaaacttacttcaaacctcaaagtcggcagtgcttctccatggtattccaggaaaatggatcactngcaaaaaaggacttcgacaaggggaccctttatctccttacctttttattctcgtcgcagatgtgctacaacgattgcttgagagaaacctgcaaatcagacaccctatttatcatgatagaccctgtgcaactatccagtacgctgacgacacgttggtgatatgccgagcagttgaagatgacgtcttggctctcaagtctgccttgcttcaattctccaaggccacaggtttgcaaatcaactttgccaaaagtactatgatct

SEQ ID NO: 21059 - DNA, 203 bp, Oryza sativa
cctcgtacctctccatcctcactctccacgacaacttctccgtacgcggaagcgattcttgagaccgtccaaaccgctcggcctcagcacaccagcctgaaagcccaaagacaatggcagagcaagaagcacagcagctgctgctaatccagcagagcacagaagccaagaattggagagaccagcgagtggactgcgagaga

SEQ ID NO: 21060 - DNA, 454 bp, Oryza sativa
  unsure (1)..(454): unsure at all n locations
agcttaatttcctcttgttaaagattnttagtattgttttattgctgtgctgangacttcacattctttgaaggaattgagttgcttggtgcacttatgttctgctgaatcagatttccctcttcttcctctagagctttcctaatcattcttagactagttgctacttcaaccatttcaggacgcacttcaacctccctcctcaagcatttaactgctaacttgccaatatcttcgaggaagttcatgttttttgtattgttgatgtcctcgtcaaacaaatgcatcaccttcttcccttgttcaacagcctcagtgaaacgctgagcaagggtgatggtcccatccactgctttttttctggtgatgatttccagcacaaccactccaaagctgttaacatcactctttggggttatgaatccattcatgcagaatgcacgatcaacataac

SEQ ID NO: 21061 - DNA, 158 bp, Oryza sativa
taacacaaagagagaggagagatcacgagaaacaagaaatagacacggaaagggtggaagaacgggtcactaataagtgagtcccactcttatcttccttggttcaactgcatacagtttcagtggataaaaaccactctagttcggttcacggatgt

SEQ ID NO: 21062 - DNA, 469 bp, Oryza sativa
  unsure (1)..(469): unsure at all n locations
agcttgcgacacgccgcacggacggtgtattcttagtcattgctgcactaggcacaagaattgcttcatctgagaggctacagtttgtccantcgtcttcgacgagagcagcatcagcagcagcagaagctgcgtctgatacacctgaagaaacgggcatgctgcttgcaggcatttcagatgtagtgaacaattgaagtcctattccagttactctcctcaccgcttcttcagctatattcacctgaacacaaagcacttcgttacaacgtaaacgatatgaaaccataagaatattagcaaccacaagctacattaatataaattattttgagaagaacaatagtataaatcagtgtctcagttgtagctccacaacagatctattacagtaaacattttacagaatttaagttatacccgagctgatgttttgggaaacacatttactttattataaaggacagac

SEQ ID NO: 21063 - DNA, 447 bp, Oryza sativa
  unsure (1)..(447): unsure at all n locations
agcttgcaagaaaccctgaggacatagagtattgtgtaagattcacaatgcaatacatttgcacggtcaagctcttccatcgaactcaagagattataagaacataatacacactattacatagaatttagccccacattgaagccttacatcagatatgctatatattccttactataaaggaactgtgttgaacacaaatagcacaacttanacaggtattttgcatcttcaggctaacagtcttgtcgaaccatgatttaaccctattttgcaagtacaaaatatgtgcacctcgaatcggtgaatggacggtctaatacctaaagaactaatcgacacgatgataaaaatcgtggaaaaggttccccanaccctaagctactcggaagttttttttttgagggaatactcggaagaatttcgtcccaataaccacatacgcga

SEQ ID NO: 21064 - DNA, 423 bp, Oryza sativa
  unsure (1)..(423): unsure at all n locations
tctaccagcacgtacgtcaacagcttaacattgtcatccnncgtccgtgatcattcatgcagaacttactttnnttntcttcttcattcctggcgtaaacgaaactgggattatgatgacacatttgtatttttgctaagtaagagtactgaagttcctattacatatgaagcctattgcaaagcctgaaaaaataaactgctactggttgatcatcatcgagtaaatctttttaccgagagcaacccaacaaacgatgcatgaaagaaaaactatgcttacattgtccttctctgtcagatgcgcacaatgctcgctagctgttggccatggcctacaaactttgtccaccttctcctgacagccaactttgtcagaaagaagactatctactactccagcttacactttcagataacatca

SEQ ID NO: 21065 - DNA, 391 bp, Oryza sativa
  unsure (1)..(391): unsure at all n locations
agcttgcgcgctacaggagtataccagtttcattcgttatcccacgccacactctatgcgagctctgaagaatgcatgccactgctacaanggccaatgccctcatatacaacacaccagatctaccatcgacaacatcagcatagaaggaagacgaacttatattaactggccgtgcacactgctttgctgcatgccgtgagacgccgtgtgcgagctgcgcactactgtacctgtcgtggcgagggaatgactcgatagatttagccggcgaagtgctgccgcttgctcgccgagcaggtgcagctggaacggctgtcgactaccacctccacatgaatctagaacaaggacaccgtcagtcactcggatgatacagtactaccagact

SEQ ID NO: 21066 - DNA, 417 bp, Oryza sativa
  unsure (1)..(417): unsure at all n locations
ttatgcaaataaaacttgctttatgctaaaaagaaccatattatgccttccttgattatatgtcttgcaagtaaggtgttaagcttgtcttggtgcttgccagtacattattgactcttgctgttgaattaatcttttgcttgcaggttttagatttagtctttgagtgatgcgggtaatcgtctgcttcttctaggacttgaacttaatgggggtaaacccctagtcggtgtgcttgtggattgggtaaacaagcttccgctgttctaatatttaattggccggtccgtcagtgtaactataagtaaatgtagtttataatccgtttcatcttatttgtgtttgctatgtataatcacgctngagatgaaaatgtgaatctagtgtacatcatgggaactagaatctcatgagtat

SEQ ID NO: 21067 - DNA, 385 bp, Oryza sativa
  unsure (1)..(385): unsure at all n locations
acagatgtctcttgtacagaagaacgatcttgaggtaatgatgtatcttacacagagccaattcttgaactcatctatgtatactctccaaggaacaatcgttcagaggtacaagatgaaacttgttgctgatgttcctgggacaaggtctttcaaggatggagaagtacaacaggtctcagatagcatgactcaatccngtgatataggtgctgtagatggttctcaaagaattcaatgtgattgttctcaanaactcaatgtgtggttctatggatttaatgtggaatctaatcagatggaacatggccagctacagttacaacttcaggatcggatgactatgcctgcacatgcttaataatcatctgggggtagtcaatac

SEQ ID NO: 21068 - DNA, 402 bp, Oryza sativa
  unsure (1)..(402): unsure at all n locations
agctaggganaagctgcaagaatgcgtcttcgttcgtcctcatcatgggatggacgagtggctcatcctgcagaatttcttcaacggattaacaacggattaacactctcgtcctgtgatcaactggacgctgctgctggaggagcacccttctcaaagatggtcagagataccactgatctgattgagaagaggctctcaaatatgggttggagcgagaaacaacataaacccgtcaatgcggtatgcacaccgtcaatgagacggaaatgcttgccgcccagttggatctccttatgaagagactggacaacaatgagaaggacgccaagcagggtaccattaaggccctgtgctctcacatggcatgtgaggtctgtggcaatgacggccactttggga

SEQ ID NO: 21069 - DNA, 230 bp, Oryza sativa
cacatgccaacctggaggaccacggtagaccgagtacacagagacggttcacgggtcgactgaagcgtgacccgtgtgtctatcgaggcgagtggtcgacaaacggactccactagacaccacactggttgcacacgtggaaaccacgcggctaccgagcggacacactaacacggtcaccacgcgcacacatggaccactaccgacaccggtgcacgggtactcgggtc

SEQ ID NO: 21070 - DNA, 467 bp, Oryza sativa
agcttgccaggcgaaggaaaggtattttccctgtatatagaagagtctgttcatcgtctgatccatgaataccaccatgaaaaatgcaagccaactgttgatatgaactccaacacagtgaattctcagctctcaccaagagatgaacaccaaatgttaactagaaacgctttaacacacagcaggaatgtgttgcctgacttgttttgtagtcggcaccaccatcccaaccttcgtgacctcatttgagaaccctttcgcaacaatatctgccagatgataaataacagcacgacactgtgttgcactcagtttcctcctgtcatttctctcgagggtttattcacttactgcctgctatatctaagcaatcctttttttttcgaatcggagaaatgttttctgctttctttgaacatcattgcaatagaaaactggttactgctttctttgaacatcatcgcaat

SEQ ID NO: 21071 - DNA, 166 bp, Oryza sativa
  unsure (1)..(166): unsure at all n locations
gacactcctggcacaacctgccatacatttatgataaacaggactgagaaatgaggagaaacatataacctcaacgaagtgatctagcatatcaatcatgcaagagcataagaaaatgtagagataaaaatattntagcttacttgtctatatctatgaagatctc

SEQ ID NO: 21072 - DNA, 454 bp, Oryza sativa
  unsure (1)..(454): unsure at all n locations
agcttgcactatgtcagatntatgtttatcagtattcccccgcacttcctaagaatagaattcgaggataccataagaaaaggctcaagcatgcaaaggtaatgtaatatggtaattagaataaatgaaattaattttagataccttgctgaagtaccgctgcagtaagccctccttcaccagtccacacatcccatagtaatataacaaattggatgccacctaaaaagaattagtcagtataaccccctattattaaattaacttggtaggtcatttaccaacagctaccttattataaaaccactcagtccacgtgggaggtttacataggggagaaacaagaataagacctagtacacgatccctatacttcgcctggcataaaaaatacatagttcaataatagtttcgataaatagcaatgacaaaatgttgcttgagaaacactact

SEQ ID NO: 21073 - DNA, 425 bp, Oryza sativa
  unsure (1)..(425): unsure at all n locations
atattactttattgtgcaccacagagaacaacatctcaagatgaggagctggaacttctttatgcaagcctcttcaattaaacactatcggactatcctgtatcctccatatgttacatatggtaggtaagctgcaacataatactgaactttntcagtttggcagctgtggtcgtaatcactgctggtattatccatncacttgctcttttattcagatggatcctatattntgacttattttttacagcaacctatattgtgacattngattntgatattaccatttatttgcagctgggtgctccgatttggcatttctgctggtcgtcgaacatgatttcagtacgggtttctgaaggtattggaaatcacccttctatattgtagaacttatgagtggatggggtgaaactatgatgtat

SEQ ID NO: 21074 - DNA, 472 bp, Oryza sativa
  unsure (1)..(472): unsure at all n locations
agctngaacagcccatcacgcctctagctgatgttgtatctgcgatctctatcctcttcgaggtacctcacgcctttccttctacccctcctcaccatacttgactagtaaatagagagagaatactgtatagtatacggtgtagcttgctggctacatatatatagcgagaagggcatcctcaaatagaaatcaaattaatacgataccaacaatatctaattatagttttatggtgagagacanttttggatgttgaatggcctaaaaacgaaagcgattaactacataccatgtagctaggttgatttatatggtatgaaatgcatcctccaatggataatgggaactaccgcgtgtaagttgcaaatagttcctacaaatctacagcgagaaagccattttccaatggaggatgggaactactaatcgattatagcttggtggagaacctatttgagaaaaccatact

SEQ ID NO: 21075 - DNA, 350 bp, Oryza sativa
agcttcggctatctgcctccgaagtcgccgcgcatgattcgcactctccgccgccgccgccgccgcccccgtccgacacgccgacgacctacttcgaggtggaccggccgcaccgcccgccgccgggcagcttctgcccgtgctccacgctgctcctctcccactccttcggtttcacctacacgctcccccccgtcacggcaccgtactccccgccgccctgcctcgccgccgcggggggccgtgcgtcagcgatctccctcgccgtcctcgagtggcgcgccacctgccgcggcgttcaattcgaccgcatcttcagcgtctggctcggcggcgtcaagctccttcgc

SEQ ID NO: 21076 - DNA, 337 bp, Oryza sativa
ttactgtgaggctgaccctttttgttaggactctcatacagatatgacgctctcctgtgggtgataaacaagctttgcaataattggggtccatgcccaaactgaattcacgtctgtacccgcctgacacttttgaggcacgatcccgctcaacctaccaaagtaactaatattgatcaactacaaaatgcataccggacagcttcctaaccactctcccgaccatccatgacattcaactgtcccttacaatgtgactagaaaaaatctgaaccccaattcaatgcgttatgggtcaatcactagcactaataagactatacctacccgaacatat

SEQ ID NO: 21077 - DNA, 437 bp, Oryza sativa
agctagtactgtaccaaatccatttagatcctgttgttactacaaaatctaaaaagcttcctcatttttggaaaataataaaagcatttttcgtcaacagtttaacaaactatttgaagaattttgcaggaattatttcgccaccgtttccggatgattgatatactctctgtccaatcacttagcttgcactgtaatataatgcgttgttgcaacattcaggggtaagctataggacaggttaattatagtactgtggttagtactacccattaagagtaagtcttctatctgacagcaacaaatactctgcactctactactctatgactgttttgattgccaaattaaattgaccctgtattatccagaagctaacacattacttagcttaataataattccacgggtacgagacacgtctcttgactagactg

SEQ ID NO: 21078 - DNA, 418 bp, Oryza sativa
  unsure (1)..(418): unsure at all n locations
caggatagtgatccacatgcgtcagcactctcactacttganagctctttanggtgatcaatgctttgggaaggaaataagtcatcaaatagtgacttgccagccactggttcagttctatcagcatgatgattcaccaatcattgtggtgtcagatacccaagacctcttggcaaatgcattcctcatactggtataggagtacattgtcggtgaatcttgttgatgtccctcagtaattgcataactcacaaactactaggggttataccaatccagtatttcctcagaatcatctactgattcaaagtggagctgatgtctatattttatgggtaacatttgctctctggaaactctcctcattgaaaacttgttaaaattgtctggtctgtgggtacctataggcatttactgt

SEQ ID NO: 21079 - DNA, 401 bp, Oryza sativa
  unsure (1)..(401): unsure at all n locations
agctntgagctatatctgccaagtccatatcatctctatcgggagaatgaggtactgacaatgccggtccacggagagcctcaattgatagcttagacttgggaggtgtaagctccgtcggtcgacttggacgaagagtcatcttcacaactatgtcttctttgggccattgtatgaacgtcttgcgcgcatcgcccaaagtcatgatttcatcatttgggggcacgggcagcggatagcctgaccaggtgtcctttactgtatcgatggacaccttggcatacccagctagcangtctgcgccgtggaccttgtctgtaaccgaaggcttgaaagccatgccctcagcgacttcaagaagcgaaagtgggtggactctcgctagtaagacacactgtgct

SEQ ID NO: 21080 - DNA, 465 bp, Oryza sativa
  unsure (1)..(465): unsure at all n locations
agcttatagcctatgcgccagctgnagtatttattttaagcgttaaagaaatatgtttacaatgcatatgaaagttcctttgttctaccagcacctccaaaagcaagttccttgttttttcgagcaaacaaacgagtctgcgaagagtggttttctagaatttgtgatccaatgctgaatgcaagattagctttgcactgtaatgatgcggtcatccactactgttcatcgcgtcttctagatatcagaaaccttgctgcatcatccctcaaggacaacagtcgcatgggaggagctactgaaagtcaccatgctnttagagagaggttagaggcagattttctgaaagtcttgcgacatgcttcactggcattatgcangtgtcatgaaacagatgccttagttgggcttcagagatgggccatatcaacgttctatacatactttgagcacgacaaacaacta

SEQ ID NO: 21081 - DNA, 176 bp, Oryza sativa
  unsure (1)..(176): unsure at all n locations
taataccatctgaagactaactgtctactaccaacaattaatacatggcatcttcactgcaagtggtgaatcatatacaatattaatgcagtacctagcttatggaaatattaccntcacanacatggccttagctccacanagaactacaataagctaccctgaattgcattata

SEQ ID NO: 21082 - DNA, 465 bp, Oryza sativa
  unsure (1)..(465): unsure at all n locations
agctntattacagtacgatcaatctcatctagttctnnttgtttggaagttatctccattttcaatntggcagctgactcatcaaccaaatcaattgctgtaaagaaacacagctactggttaggaagagccataaaagttcttgatagagattataaatagttatccttcataatgcttgatcatcttattagcttctagggaaaacggataataactggaggggagaaaaggcacctttgtccggcagaaatcgtccactaatgtaacggtctgagagaagagctgctgccacaagtgcactgtctgatatgcgtaccccatggtgcaattcatatctctcccgtaatccacggagtattgagatagtatcttcaactgaaagttgatcaacataaacttgttggaagcgacgctccaatgcaagatccttctcaatatatttgcggtactccgcaagggttg

SEQ ID NO: 21083 - DNA, 419 bp, Oryza sativa
agcttgtccagcgcgtcgtcatcaacgattattttatgcgttcttccggccacggcaagaacccccgcctcatctcctcctacatggcggccaccacccccatccccaccgacatggccggcgccgccgcgttggagcggtgcatgtacgccgtgatgggagaagagaacatggtcgtcaaggccgggccgcgcggctacgagctcgacctcgacgtcgccgaaaccgacgaggtcctcaccgtcggcaagatctggcggacgcgagagcacccgaagctcaagaggctctgcctctccttcgcgctcttcaagctgctgcgccgccgcctcgaggacgtgccgtccatgaccaagcgagaggcccaagagtgccgcaccatcatcttcgatggcctcagcagcaacgccaccgtcgcc

SEQ ID NO: 21084 - DNA, 294 bp, Oryza sativa
  unsure (1)..(294): unsure at all n locations
atcttattgcaacaagaataaataggacaacattgttaaacttttgctggaaaaatgagccattagtacagttatagatgtacagtactaataacactagaataaattttgaatgagaaccactaaaagagattatgaagtgcatgtgccattattctggctaacttatagagaaatggaggagaacagatctacttttccaatattnntagaaagcttctataggtacccatttggcataacctatgggcaaaagtagctctgataccaacttgtcacgcctggaatttctat

SEQ ID NO: 21085 - DNA, 271 bp, Oryza sativa
ccccccccaggcctgtgcactgactcgaaccaagcccgcgagcactggcggcaaacagaatatttgtttaaaaagccccacaacagcagcaccctcgcctggaacacaaaaaaacaagcggaaacccgcgaaacaacaaggataagccacaacccaccaaacgcagaggccacacgacacatgcctgcgccagagagcaggacacaccaatgcgcggccagacgaccaccgtaactacaaaacgacgcctcaaaacaccagcaaaacaccc

SEQ ID NO: 21086 - DNA, 112 bp, Oryza sativa
agccccaatccagtgccacactatccggctgcgaacaagacccctttctttaaacccacccccaccgagcgagataacaacgcacagcgcctctgtccaccgcacgaggaag

SEQ ID NO: 21087 - DNA, 420 bp, Oryza sativa
  unsure (1)..(420): unsure at all n locations
agctntaacatatacctacccggcaatgtattttatttatcatcaacacatttgtcacaactccgacaatgtttactatttttccgcacctatatcaatgtacaaggaaagggtactgagtatgaaccaaaactttggattattagcatatacagtgaataaaaactgctgtaaacaaatatgttaaatggtctctactcacgatccactaatattttagaagcaccaaaatagttaagaagcacaaaatgttgatggcactaacaataactgatataatgtctcaacaggggaatttttctttagttatttcatacttggatcctaaattcctaataatccttagtacgaggtttttttattaactgttaaaccatgctaactaattctgtttgatctgggcatccagggaaaatatgt

SEQ ID NO: 21088 - DNA, 403 bp, Oryza sativa
  unsure (1)..(403): unsure at all n locations
agctngaatnnatggananatatatatatataatttactcangnaaagccaaatatatgtttttatagtttaatgtttccgtatttgttaccggtttccgatctgtaccgacatgtttctgtctgtattgttccgtttccggttttccgatatttccgatatcgttttcatttccgactttaccgtttccgatttcgtttccgagaaaaatatggttacggaaatggttgaggctgttttccgatcgcttccgactgtgttcatccctagttgaccatcataccctctattcagtatgggccaacatatatgtagcccactccgccatacaaagcccaaattcaaagtgatgtggcctattgaagcccagcccaacactgctgatatactgtcgatgcaagta

SEQ ID NO: 21089 - DNA, 453 bp, Oryza sativa
  unsure (1)..(453): unsure at all n locations
agctntcaaaaaagaataacttatcttaagaattactataaaagaattccattgaattgtatttttattgatcaattagaactgccttctagaacgtataattgtctcaaaagggccaatatccatacactattggaccttttgagtaagacggaagaagatctgatgagaattgacagttttcgtatgcaagatggaaaacagatatgggacactctagagaagcatctcccaatggatttacctaagaataagttctagttttaaatccattgcaattttttcctcttcttctttttcgagttagaataaaaagaaaaaataaaacaattttgcatctttgggacaatctatattttcgcgaaatggatcataataaaatagattatatgtatctatggaagaatcacttggaagtaactattttctagatacctatgcacggtactttac

SEQ ID NO: 21090 - DNA, 412 bp, Oryza sativa
  unsure (1)..(412): unsure at all n locations
atctgtcttggnttatcgcttgctgttttgtctggntcaataatacagcttatccgagtgagttttatggacctactgtgccagaagcttctcaagctcaagcatttacttttctagttagagatcagcgtcttggagctaatgtgggatctgcccaacgacccacaggtttatgtaaatatctaatgcgttccccaacgggagaggttatttttggaggggaaactatgcgtntttgggaccttcgtgctccatggttagaacctctaaagngccccaacgttggacttgagtaggtgaaaaaacatacaacctggcagaacacgtcggcaaaatatgaccatgctctttaagctcttaattctggggggcgactaccgaatcaagagtaattatgtttctaaagtggtac

SEQ ID NO: 21091 - DNA, 457 bp, Oryza sativa
  unsure (1)..(457): unsure at all n locations
agctagtgtgagtgactcaagatctgtcctagtttcttatgatatcactgaagtccaactggccgtggatggggtcgacatccgtcctatcggtgatgcggagtggggtagtttccagcagtcggaagcattgatcgccgatgtgcgggaggtctccccagaatcagaaggcggcagcttggatatccctgtggtcaaccccccaccagtgagcgatcatatccagggaggcgcaacccacccctgaaggcctggagccaaatacattctgggattgttgtgattattgaggataaccgactgggatttgaatcctttcgagaattgctgtggcaggagttcgcaccggtgcctggttgtatgttcattgtattaaaactatacgactcanataaaagatagcggtggcttgtgtgtgtaaattgttcggttcaagctctcttttgtacattctgac

SEQ ID NO: 21092 - DNA, 243 bp, Oryza sativa
  unsure (1)..(243): unsure at all n locations
ctcaaggtagcacttgcatagatcactttgagcaccgagacataaacaaacatatcactatgaattcctatactcaaatgcaaatataaaaactataccactaggaatgccttcttgccatcttcttgcttcgcctcgaggggtgccaacgtcatcattcatttacccttgngactattcttatctacaactagttaagcacattagtcccagatcatcaccatttcaccatcttttatttta

SEQ ID NO: 21093 - DNA, 420 bp, Oryza sativa
  unsure (1)..(420): unsure at all n locations
agcttctccaacaggccctatagcaaccagtgtttttcttcatcccatgttggcacgtggcttgacctcctcccatgccggcacagacatggcctgattgccttcgcctttcctttggatatgaggccgctgctaacctgagattctcctatcgaccacgctccaccaccggcgccctgagggaccagttgtaacgccccgattttcgttcgggattaaaaatcattaaataatatattttctagaaattaaataaaagttaaatcaatttaatcaactgaattattgaggggattaaaaatttcctttaaaaatcattggccgggaatattttgtaatattctttatgccttaatatactcaccggatntttttgtaattttcggagctcaagaagtatttataaacacacaaagaaca

SEQ ID NO: 21094 - DNA, 300 bp, Oryza sativa
  unsure (1)..(300): unsure at all n locations
cagcacgcagcagcactnncaaactactgaaaaagcctattggaatttnnaacnccgcaacacccatgagaaaaccacaccacaaaaaactaccagataaagtgctgacctcccaacactggagccacaagcctaggcaaaactttgtaaaagtttgaaacaaacattgagccaacaaaaggagccaaacgctttgatatagaaggcatctccaatcttggggactagagacattaccccatagtttaatctccacaactcccaactcccctcaaataaagaatcaagcatttcttaaaa

SEQ ID NO: 21095 - DNA, 433 bp, Oryza sativa
  unsure (1)..(433): unsure at all n locations
ctgcagcttaacctctggaaatttccctgatcttctttttatctgattcctacgtttttcctgcgcaacaatcaaacaaccattcctatgtttttcatgtgttttgtaatcctctattttacgcttcaattcctgtcagaatcctgtgttttttctatctctccattttttcaaccctgcgatttaaaggggcccttaaagtagttntaaagctgaattttttttataataattaataatccacgaattaaatatctagtaaatcttgggcacgatttgtaaaaataggaaggacgctatccatcttagtgtccaggcgtggacgctctcgtaaatagcgtccacctaaggacgtggtggtgcacagcgtccaggctggtacagcccatcgtattcgtggcccattcatgattcatctcctcatccatgggaa

SEQ ID NO: 21096 - DNA, 380 bp, Oryza sativa
  unsure (1)..(380): unsure at all n locations
atgtgttaaatcagcaaccaaacttgacttgcagcgtctttgccgtgtcttccccgtaagtgtcgtgcatatgccatcggcgttatcattgatagatacagctctgcatctactctcaacctcaatctttggacactgctgtatattacatggngtatatatatatcctctctgccttccttctcccagttgcagaccacaggagccagagcagcacaaatattgagaatataaggagacacggcactgatgagcatgcctttctctacatattccttgggcttcttctctactccctgcaggctcctccatgtcctgctgaactgatactctgaaggaggacaagtgtctctgccgtgacaagctcgctcgaggaatgg

SEQ ID NO: 21097 - DNA, 432 bp, Oryza sativa
  unsure (1)..(432): unsure at all n locations
agcttcattctcgaatatggaacatctgggcagttgtatgtaatttaaggctcactntccaagtaatagccatcaaactccactaagcaactcagtgtattgtatatacgggaattcggatgatttgccaatagctcattttgagaatgaagtgtgttgaaaatgcagcttactacatcagatgttaaacatttattcagaagttcagtgtcactttgctttgcagtagaatcattagcttttcctagtaaacatgtcatgagatcagtgtactcaatgatgttctgtccatacatgggtagatacttgaccttctgcagtatagttgttaacatgttctccttaaatgagctctttgcatggtaccacagtccatatagaacacttctggcctcatggcgcacactcgttgagttcctttccaacaagaat

SEQ ID NO: 21098 - DNA, 467 bp, Oryza sativa
  unsure (1)..(467): unsure at all n locations
taagcttttaaatttgtgagatagcctatttgtttggcattgaactgtatgtattgcagtttgacatatccaagctttgcaagtccacgagatcaccaattgcagacattattggcctagtgaggttacagccaaacaaccacaagcttctcaaattcttgaagttactaatggatgaaggctttgtgctatagaagtcaaactcagatagtatcaagcatgtcaagttcttgtgggcccctatccatgacaacaaattggatcctgaatctcctaacaattccgaattaaggagttctagatggcataaagaccagatcaaaccaaacgacgtgagaaaatccttagaaattaatttcccttcaagacccaactccttcagcatattgaaattgctagaagaaattcgtttagcataggaaaagttggtcccctctagtctcaatgtctncaaagaggttggaact

SEQ ID NO: 21099 - DNA, 442 bp, Oryza sativa
  unsure (1)..(442): unsure at all n locations
agcttcctctgttggaaccactgattcttattttaatggatcagncattcagactaatgccaaaatgcccaggacagtacccatatagaacttcaaaaggagttttgttcaacgcagagtggtaggttgtattgtaccagaactctgctaagtaaagccaggatgaccacttggtgggagtagcatgaacaaagcaccccaaataaatttccagacattgtttaaccctctcggtctgacaatcagtttgtgggtgataggccgagctcatatgcaattttgtaccagatctcacaaagagttgctcctagaattggctagtaaaaatcttgtctcgatcagaaatgatgatttggggcagaccatgaagtttgtacacatgtttcataaattcaagtgctacactgctagcagtgaaagggtgagacaatgggaagaaatg

SEQ ID NO: 21100 - DNA, 430 bp, Oryza sativa
  unsure (1)..(430): unsure at all n locations
agctnntgcagaatagcagcatttataagtcacttatttgcccaaagctattttataaagacgatcctagagctacacagtattattaaacaaggccgtgaaccctcacgaacctgccttaacccaaggcctacgatgattcagaccgaactggcaacccgaccctgggtcccagctcgtcccaagccaacccaggccaaccattccatattttagttgttgagcanaatttaagaattaaaacactgacttgggtacattgctaggcttgcccatatccgagggctcggctattcgaatagatttactctgatcagaggtgtacatctttacccacaagacacatctttactccgcattccatggccttggaacccgtcgtaaagatgtgacatagttttcaacccatcctatccttagacaagagtac

SEQ ID NO: 21101 - DNA, 456 bp, Oryza sativa
  unsure (1)..(456): unsure at all n locations
agctntctggtatggtgctgaatggctctcntttcttccttctatccaaacggctagcagtgaagacaatgtatgagctactacttgagcacaagtagttattgtcttgctttcccctaatatatgtccttcatttcttaacttacagggacttgagtagcaacaacttgcatgattcaattccttatcagctgtcaccaaatctcgcctatctgtaatgcttcctggcttgcacaagtttattcaagtagtctttgatgcctgcatcttcaataacagttgcgatgcacgaatttggcaggaaataactttttcggtaaccttccatactcgatatccaacatgggttcactcaactatctgtaagtgctggccattgcaatgtgcaattcataatggagattgtattttggttgcatattctactgtaaaaaacacattacctgcactatctca

SEQ ID NO: 21102 - DNA, 390 bp, Oryza sativa
agctaggaagacctatctagtgagaattcatttattttgtgcatcctcacctcacatatgtccaccctgctaagttaccatcacctctattgctgccataaaaaataaaaataaaactttaaaaatataaaaaaaataaaaataaaaacaaaataaaagtgaaataaaataaaagtaaatttaggcacttcatgcgcctagagttacttaaataacatttggtgcaccggtattttacccctgtagaagcccattgtgcttttcttctttttcttgaataaagacaaggtacaaaacaagtgtgggggagtcttttcgaaactcccgatgcgaaacaacatcgactcaacaagacaatgtaatgaataccagcccacggccgcacacaaa

SEQ ID NO: 21103 - DNA, 458 bp, Oryza sativa
  unsure (1)..(458): unsure at all n locations
agcttcctagaagattcacccataatcttcatttattgcgaccaacagtcaagctcacaaaggtgagttctttcaaaaatgctctgcaagacaacatcttcgctaattaaagccaacagaactcattaaggcatagccaacctgccttgcagctcacgagagtatatgcatcttcacttggagagggtatatatattggtactctcctttagtttattaatggtttgttcttcccaggatctaattcacgggatctccgatcacataaactgggttaccaccatagtataactcacatgggtctcanacccatctccttcgatgcattgtctatcacatttcgtgatagtcccttcgtgaaaggatctgccaggtttctcgctgtttggatgtaatccaacgttataactccggagtntctaanttcctgacagacttcaatcgtctttcacatgtct

SEQ ID NO: 21104 - DNA, 401 bp, Oryza sativa
ctcatttgacatgtataacctaacattcggagttcacccatgtgtttctatttcgggagacatctctctttattttacagctttttttcccccctcccctattattttcatgtcagattcaaatttgacaagattctgataattctgaacctttggacgatgttacagagattctctgtcgctgtactagagtaaaatctggtatttgacttgctcgttctgtctgttcgggttcacattgttgactaagaatggaaaaacgcttctaccttatactgatttattctgcaaagaacagcttcaagatatgtttgctgagatcctctggagatgacgactgtaggcatggtcaatttttgatgttcgcaagcttatctgcttttctcgctatctttttgtgc

SEQ ID NO: 21105 - DNA, 469 bp, Oryza sativa
ttaagcactgggctgcacttacgtgaacactactggactttcttacttaatgtatacatgaacaaaggtgatttcctttacaggaaccactttgttggttatacatgttacctatcaaaagatgatttccctcaaaagaaaaaaaaaagctatcaaaagacggcatgacttacaagtccaaattcttgatcagaagactcttgtaaccttgcttcaaaaacctctacagcgctcctggaataaataaaaattaagttatggactggcttaccttatgatggaacaacatgttagtgcaaaaacgtaatagttgtcactgcaagagaagtgggttacctgcaaacaccaagagcttttctcatgtctccagaggctgcagcgactttctggtataagaatattaagcaaacattggtaataagtgaacacgtcaatttcatgctaactgcaccatgatagttctcttaac

SEQ ID NO: 21106 - DNA, 206 bp, Oryza sativa
  unsure (1)..(206): unsure at all n locations
ttatattccttccaagggaatgtactatcattggtacacgcanatcttgggttntccaaccatttcttttcacataagcttgcgatatgaaagaatgggaagctcccgaatcgaacagaactattgcgggtactgagatgacagagaacatacccatcacaacgtctggagcatcctgagcgggttctgcttgaatgtgaatcaca

SEQ ID NO: 21107 - DNA, 474 bp, Oryza sativa
  unsure (1)..(474): unsure at all n locations
agcttaagggcatccatgaggttctatctgaggaagatattagcactnntttaggcgagtcttatcccgatatgaaccacacaatagagttcgagtcattcctcagggtacagtggattatcttgacttatctaatacttttagttatgatttttcatttatatttgggaaataaattcgttgatggttgcactntattaggagtacttaaatcttcaagcaaaggggagcagcaaaacaggaggcaaaaagaaattgaagggatctgtgtcttttttgaaggcctcaacaactactctcttgcacgtcattaatgagtctgagaaaacatcttatgtcaaccacatcaacaatttcctgtgagaggattctttcctgaagaatttcttacctttggatccatccacaaatgatatatntaatcttgtccgggatgggtgtctactttggttaagttggtcttgtcagtgtcca

SEQ ID NO: 21108 - DNA, 447 bp, Oryza sativa
  unsure (1)..(447): unsure at all n locations
agcttcatctccgaccactgattaagttagtatattgttatggtgagtaccaatcgtactcaacaagccaccacagcaacaatgcacatgacggtgacgcgacggcaggcggcgatggtgacgtcggcacggctcggggcggctagggacaggcgatggaggaggggcagggctacagaaccacatcgagcacctagagtgcaatgaacagggtctttttcctatttttctcattntagtctatttcttaatataaattggttccacaatttctaatttttgcatatatgaatttttctcaatattggtgttatctcaactaatgaattcaccctagattaatattactcatattntatttatataatttatctgaatttttaattagggttaattcttattccatcgcatttaaaattaattgatacaaatatgatcgcgataata

SEQ ID NO: 21109 - DNA, 395 bp, Oryza sativa
  unsure (1)..(395): unsure at all n locations
actgattccgattactgaacacaatggtcaattattgattcgaacaaaagatagagacagcacgtacaattacatgcaccgtncaaattcttatttgttcgcttcgctctcaatattctgtgagttctctcctggccgatggagacaaaccatattgccatgttcctggttatgctctaatctatatcanaagattctcaaatacaatactcacttcgttgagaaatagtatatgccatattagttcttgacacggactttaattatgacctttgaccatttatttcttttanatacatgcacaccttatattcnttcaaatgagagaagtacaaattacatttataataatcaatggttataaactcgagaaattgttcttttaaagtaaggtg

SEQ ID NO: 21110 - DNA, 408 bp, Oryza sativa
  unsure (1)..(408): unsure at all n locations
agctagatcaaccattaacaagtaatcctaatgtggttatggtttggtcagggggatgcagaaatagtgcttcaggatccattacgcgttcaagggcctttgttcttcttcgcatccgttattttggcacaagtttttttggttctcaaaaagaaacagtttgaaaaggttcaattgtacgaaatgaatttctaggtcccgggatttcttaccatcaagttggtaaaaagccgcgatttattggcgattgctagaattctctatgatccattntggaaatcttttttttgtttagactattttttgtttgcgagatgtcttgtctgcaattccttatttctatcatctcatgcaaaacgaggagaatgcaaggcaagggcgagaacaataaaaggaacaaatcctttt

SEQ ID NO: 21111 - DNA, 448 bp, Oryza sativa
  unsure (1)..(448): unsure at all n locations
gtaccgcgtattttaccttctgcttctggctgtctcgcaataccttctacagcttgtcctgcagcagtaccttgaccaactccaggcccaatagaagcaagacctacggccaatccagcagcaataacggaagcagcagcaattagtggattcatgatgagttcctcgtgtcaaaaaaaagaaatggttaaggatacaatcaaccaagagattcatatttctaagctctattggacagaagtaactaaaaagtacaaattgaaacgataatctgaattcttcgaactgcttcgagatctcctttttagnttctaatcattagaggtttgcgtactcattattctatttctctttctttccaaccaactgatcnttcattccatccttctttctttcctcttcgatatccttgagtctctattntgtcccctatcatctaactcataat

SEQ ID NO: 21112 - DNA, 385 bp, Oryza sativa
  unsure (1)..(385): unsure at all n locations
aagtcacctgccgctgcagcttcaaggcggatggtactgtcccagttgcttatcttttgncggacgaggacagagagggagctcgtggtgagagcgattccggtgatggcggaggacgggacttgagaggataggtttaggactactaaggggtcatttatatagccatgggagcccgggatcgagtccacatcgacgggaaaaactcttggaaagttgggatctttgccggaaaaaggaaagattgaaccgtgaaattggaaaggattttcatagaaacttttggggatttcttggggaaattgtagaggagattgagaggattccgttctctcaactcatttggaaaaaggagcaacggtgaggccagattcggaaggagatc

SEQ ID NO: 21113 - DNA, 489 bp, Oryza sativa
  unsure (1)..(489): unsure at all n locations
gaattatgctcattgcgaccatgtaaatatatatgttagcaagttaactataccatgtagagtgcagagttgactaagaatcacgaaacaactctaacttaagcaaatcatcactatcggccttaccacattgttcaatatatngaccgatatgctccattgttattctagcatcctcacctgngaattntgngaaggtgggcacttcatatccttgcgggtacgggaccgaatctatatgttcaggatacggggcttgatatgtatgtatagctactttggattctatttcaccactatcctgcacgacattgacatcatcttttccacatccacatgacganttggactcgtctaggagacaatgtattaccttcgttggaataatcgacagcacttagtcgtatattcatgagcatgctaactaaacacatcacctacttgtggtattctctgctaacaataccatcaaccgcctgtcgcctatgt

SEQ ID NO: 21114 - DNA, 451 bp, Oryza sativa
  unsure (1)..(451): unsure at all n locations
agcttctgatgcatggagttgcgcggactgtctttctggcagctatgtctctcnggtttgggcacttgtcggtgaaatgacccattccttgacaattgaagcaacagatatcttcccggactcggcattttcttttctcattntgattcctctgtcctggcactggagttaggctgaaactgtaatcttggcgaggatttgtgttgccttgatgcttctctccgttggaactggcgggttggttggccatcttcttcgtcagcagaaaactggattgacaatcttttggtacatgatcagttccttcacagaagaaacaggtgatcctgctcgttggacacctgtcgggtggatggtcttcctcacaatgaacgcatgtagtggcacacgagctggcaacatgaccgatttctccacaacgagagcatgccttacgttccattttattctg

SEQ ID NO: 21115 - DNA, 462 bp, Oryza sativa
  unsure (1)..(462): unsure at all n locations
agcttaattataataatccgcanatctccatattacagctttattactttggatgatcatatcttggtcatacgagctccgaatcgatccgttcaagtctcctaatgtttgttataacctaaagaaccatgtgctttctttntatgtattgttattgcttctttataggcttgcagcattgcttgtgtgcttcgcgtagctttcgtcgttccagaggttcccgaagcgtggttcgtggtcgtcgccgtaagttcggaaggccgttctctctgagcaaggcaagtcacatcatccttgagcatattgaatcccagtttataaaattatnttgatttaaattaatgcattaccgctntatttaaattcccgcgttatcactagtttatttagccatagcctattacctttgttaagacattattattgctatggttattattaccctgttcaccctagaataaa

SEQ ID NO: 21116 - DNA, 429 bp, Oryza sativa
  unsure (1)..(429): unsure at all n locations
ggcagcaagcttntctaattcttcttcatcacttttcttctttattagatagctcatacattacctaaactactcagacgcagacgatacatatagcggataaaacaaggaatatctgcttgaaagcaaagcctcaatatcattcataatacatcatctataccaaatctctcagtcatgtgacacagcgacttgtgagtgtgcatttcaagttttacttcgccattcctgctgccactgccactgccactgtaactgccatcgtgcacatacggctntacctccacaccggtcaaggccgtaacatcctgccaaagatatacatcgtcttcgtcataacagccctctcgcttagtttggaagaaccttgcgatgcataacctgccagagcccagattgacaagttgagaatcatacgtttcccgccat

SEQ ID NO: 21117 - DNA, 447 bp, Oryza sativa
  unsure (1)..(447): unsure at all n locations
agcttgcagaatataaattctctaaaaagttttttgctgtacttctcanaaatctgaaatctgaagtgatcagccaaccttgaagaggactgacaatcatgtgcagttctcaatacctgaacattcctaagacaactcagtatgagagagcctaccagtgccgaatatataaagcatatcatctgcagtttgtcagtgactcctacttctaggctgtgtttagttcagcgcaaagtttggatcttggttgaaattgaagatgatgtgactgaaaagttgtgtgtgtatgacatgttgatgtgatggaaaaggacacgaattttgatctaaactttggatctaaacacagccctaagttctaccctaagttccaacagactttacactgttggacatgacagattcagaaattcacaagacagaattcagatattcagaggactatgg

SEQ ID NO: 21118 - DNA, 409 bp, Oryza sativa
  unsure (1)..(409): unsure at all n locations
gcaagctttaaccaagctcttacaacgtcttactttatcatgtggaatggngacatacaccgactcaaccaagcaccccaatggaggttgcatgtattgatgccttggcaaccacttgctgtacggctgcaatcaaatttgtggagctttgggtaggcttaaatatgtagcaaaggtatagcaaatgctcaaatcaaataatgcaagttgaataatggttcaaagtcaagtatcgtgctagtcctaggctagaacgtgccagagacgtgaacctagacacaagcgataccacgagatagcaccataaaaaactcaagtacactctgatatactaaagcaaactcaaagataagagctcattttccctctnttttttcttctttcttactctctttttttctttcctttc

SEQ ID NO: 21119 - DNA, 339 bp, Oryza sativa
  unsure (1)..(339): unsure at all n locations
agcttggactcgtgagctcggctcgggctnnggttctagctcgagaagctcggctcggctcgaggactaaacgagccgagcccgacctccctccacagctcgtttgcaaatcgagccgagcccgagctagctcgcaagccgctcggtaggctcgtcgagcctatgaaaaacatgacctgacctggcccattaacaaatggtctccgtctggcccataaaaaacagagaaccctaccttaactgctccgtccgaccctccccatttcccatcccacgcaggcgcaggcacgccgccgcacgcgcgcacgattggcgtctggcggcgactagcgagaggag

SEQ ID NO: 21120 - DNA, 409 bp, Oryza sativa
  unsure (1)..(409): unsure at all n locations
cgctggcatgctgaagaacggaaagtctatactatgctgaggcacccagcagattcagtgcagtggaggacaatcgataggatttaccaggaattctcaaatgacccaagaaacatgcgtttcgcaatgtgtacggacgacattaatcctttcggtgatttgagcagtcgtcacagtacatggccagttctgcttgttaactataaccttcctctctggttgtgtttcaaaagaaagtacattatgcttgccatgctcattcaaggaccgagacaacctgncaacgatatcgatgtgttccttgaaccgataatcgatgacttcgaaaggctatggaatgagggcacacgaacatgggacgcatatgcacaagagtatttcaacctccatgcgatagctgtttgtacca

SEQ ID NO: 21121 - DNA, 279 bp, Oryza sativa
  unsure (1)..(279): unsure at all n locations
agtaactgaagagatggcaggctgttcttcttctttctctggcccnaagccagagggagctccccanactctggagcccattgtcgtggcacctggaattccacaaattgatggagttcctctattggaggtttgtctgaatttaccagcagacaacagacagataattagacttgtaacctgagtaatttagctatgtcagtacttgagatacgatgtgatccttgaactggcatggttttgnttgtcaccagcagtaactaacaaagtgcttacatc

SEQ ID NO: 21122 - DNA, 463 bp, Oryza sativa
  unsure (1)..(463): unsure at all n locations
agcttcttgcttgaagtattagttgaaatggagtatatgatgcctttaaatgacggntgtgatggttggaatggtcggaaataccctccaaccgtcattgggggttaatccacactgtccaggcaaagccttggatcggatggcgctgaggagggaaccaggggcccgcccaatccagcccatttttggctggtggtctctttgacttcttctctccatagacttgtgaattttgtgctattttggtcatgtcaacttggcgttttcagcccacttgtccgcaagtctggttctcgacagcgtccgatttattgatcgtccgtattgctgtcgattcttctccattttgtatntattctctgcaagaaggtagtaatcctagtgctagtggaatatatattatcttgacttacatatgcattgcangcataactagttctcctttatttagggtacattgaca

SEQ ID NO: 21123 - DNA, 377 bp, Oryza sativa
  unsure (1)..(377): unsure at all n locations
agctagnttgcttataaatgtatgtaataaacttgtattttgttttaatcatccatctggcacagtaggtcagcacttatatctgcttgtaatttctataaaattagcagtattttgatgctaatcccctaaatattattatcccatattcctattttttatatggtatgttatttttatgcaagactcccctgaagtgcatgccaatgctgccgaaattctctgtgccgagactcgatgtgctcctccatctcttgctgcaaagatatgcagcccaaggtttccattttataaccttggtacaaagtcacagtttaatccttatcttgtgaattcgggaaacccttttaaaatgaactttggcatggatatttttt

SEQ ID NO: 21124 - DNA, 377 bp, Oryza sativa
agctttccacgtgttccaaaaagtaaggattgaatgcttcttgtactagaaaaatccaacgtggaaagtggtacggcaccctaaggaacatttttattggagtatttcatttacaaactaatgcagagtaatttagctcttaaataatcattgattaggcatacttggttatttcatttcctttgcacacaagccacgaagcaatccaatcatattgttgcaacttgcttgaacaaaaaatatatatactgcattataaagttaatctcaacagtaaaaattgggagtacatgcagagttgcccatcgaacaacaacaaaaaaaaacacacacgcagagggagagttcatccagagttgaagattgacgaacactta

SEQ ID NO: 21125 - DNA, 473 bp, Oryza sativa
  unsure (1)..(473): unsure at all n locations
agctnggtggcagccatcaactacaatctaacttgctctttgtgatgaatcggcaaagaagtgaagcttgacaggtggcgatggagggggtcatcgggcgccaacaagcgagaggacacgcggcggaggatcgatgggcgctgctgtgtagccccaatgggtgcagtaccataccgaaagattgatgggcaccggagtgtggtcgagcagcggaggatcgacaggcgcgacagcggagggtgtcaatgattaaattcactgtggccctgtttagttcacaccaaacttttcccaaactcccaactttccatcacatcacatcacatctaaaacttttctactcacataaactcttaactgtttttccaactaccaactttccccaaacttctctccgattttagaaactaaacacaaccttgtgataccacatgtaggctggatgtgccactagaaaacatcagcgtacattg

SEQ ID NO: 21126 - DNA, 439 bp, Oryza sativa
  unsure (1)..(439): unsure at all n locations
agctngtggacaatgctatccatcaggatgatttttgtcacaaaatgaaccgtaaaaggaaagcatcttatttcagaactctccaggggaacagttagaagcctcgcttcatgacgggacatcagggtggaccttccaccatgattatccggcagcactgtccctaccacccgggtagcttcaacaagaactacaagagtggcagtcacagcaacagcgagcagcacagcctcaatccgactccaagtccattaatgagtccagctcagtcagttcagccaactctgccaactcagccagaacagctcaagaagtttggagaaaagcccgaactctacttcaattgtaacaaacctggacacatggttggtaagtgcccgaagccaagacgtgctggacccaagcttgttcaggcccgtctcaatcatgcgtctacaga

SEQ ID NO: 21127 - DNA, 200 bp, Oryza sativa
  unsure (1)..(200): unsure at all n locations
ccacctaatcgcaggaaaatgacttctcggtttttcacactcgaaatgaaacggcactgagaataagagataccgaactgagctgaacctgaagctctaacatacaaatagctaacattgcaaaaattaacacatacaccgacacaccagtngattatacgcgtacacattagatcaacactgaactaaagaactgctta

SEQ ID NO: 21128 - DNA, 447 bp, Oryza sativa
  unsure (1)..(447): unsure at all n locations
gcaccgagctgcactgccttctatacacagacggattttgattctgggncngcctcaggcactggacttgtgaagatatggaggacctcaccagattctattgatgctgctgaggacagaaaaagaattaatgctatacttgaagagcttggaattgagcagcctaaaggagggattgcaagaagtgaatcggatgccttgtctattgcctcagaagttggttaccctgttgttgtccggccttcgtatgttcttggtggccgagctatggagattgtgtacaatgatgagaaacttattaaatacctcgcaactgcagtgcaagtagatccggagcggcctgtcttggtggataaatatctaattgatgcaattganattgatgttgatgcattggctgactcagttggtaatgttgtgattggtggaattatggagcatattgag

SEQ ID NO: 21129 - DNA, 430 bp, Oryza sativa
  unsure (1)..(430): unsure at all n locations
agctngtgatgataataaagtcttgacttatgttggtctttacctcggcataaacatggttcaaccggatggtcacaagtgttgatctcggctcaagcttgaccccaagatggatggtgcaaggcaaaggtataatgtagctaagaatgttttcttagtcttttcccggtcttggtgtttggtgtagaccggatttgctagataagcgctgtactatcaagaggggtctatgaagcgagcttgtggatgatctagtgtcatattagttcatatgcatgtaggtgcatttcgtgggcttgtctaaccaagtgtgatgagttttctcaagtcctaaaccaagagagaagtgggcatgttcaatatgagtgagtgacatcttgtaagtatgtccgagggatactctttggagtgtgagctctttatccctgac

SEQ ID NO: 21130 - DNA, 401 bp, Oryza sativa
agctattgaacaaacttatatcatttttgtattgttatgtgcccctacgaaaataatctctaagataataataataaaaaaaaaacccatctctatcttcctaccatatcttatctcttcctaactaaggccccattctaacttcataaagatacagatttttcctcgttttccgttagcgcgctttttaaactgctaaacggtgtatcttatgcgaaaactttctatatagaagttactttaaaatatcaaataaatctatttttcaagtttgtaataattaaaacttaattaatcacgtgttaatggctttctcgttttgctgcccacttttaatcttcatctatagaagattcgaacggcgcctaaatggtctctgatgattattggatcctccctaa

SEQ ID NO: 21131 - DNA, 210 bp, Oryza sativa
  unsure (1)..(210): unsure at all n locations
atgggtgataatttatggtgtacccaaactagccataattgaagattcagtttaagcaattataatattggttggggaattctaggctattgtaggagctagctcgaggaaagataaaccttcgtgagactgagagatgtatgtaatgaccctatagaaatacacttctgcatacacatctacatcaacaaggtgngctacatgatcata

SEQ ID NO: 21132 - DNA, 374 bp, Oryza sativa
agctaggctgctcgttcgcgccatgctattatcttcacgatttctaccagcaagcaacagactcccaaagataaggttgacatggaagccaaaatgcgagcttggttggaatccaaagggaaaaccaagagcatacaaagaacggatggacctctcttcccaaatgcaagcaagactcctctatccatgagccatacaaagcaatcaccatctggcagggcctctggcacacgtaaagccatggatcaagacggcggtaacaccaagaagatagcgcgcccactctctaatcatgaactctacatgaatcagatggaacaacaaagaggccattatatcttctgttcacctttgcacaaggtgcgttttgactc

SEQ ID NO: 21133 - DNA, 346 bp, Oryza sativa
ctgaataaatactattgtacataaatttggatcaatacattattaaaccttctcaatatgctttttaattggagagggtgtgttcgatgcgcatctcaattctatatctctcaagactcactaataaatactatataggagtatataaatatatatattaaatacaactctagactaatctcataagtatacgaacgcgcctaattaatactaactatatatggtgcctcttcttcaaataacacatgtctacactagtaagcccttagctagctagactctatctactattagcatctcttgtggcttgtatcggctatatgtcacatgacatatcatcttcata

SEQ ID NO: 21134 - DNA, 384 bp, Oryza sativa
  unsure (1)..(384): unsure at all n locations
agctntacatggtgcatagagtatctctgctagtcttaaagattattgtagtagttcaagcagctacagcaatatctctggtacagtatcccagaatactagtgtgcagaagagactgagctgtgaaagcagcagcaacaacaaaagtagcactgcagtcgtaatgagttctcctgattcctgtatcactctcagcacacaagtggagggtaatgaatgtgaattaaatctccaggtaggagtatttatcatggtttgcatataccatttatctcataatatccctatgtagcaactaaatcttgcttctatatctactggaggctcatggcaanntgatatattgtagattatgatatctatgggaatgatggcatgcaatga

SEQ ID NO: 21135 - DNA, 250 bp, Oryza sativa
  unsure (1)..(250): unsure at all n locations
tattattatacctgattattgtggcattatgtgcactcatcacacatcgaactgattaggccacattgatactctagtccaaccaatatttgggattaatcccttttttctctgggatgaagaggatccagactatgtttatccagntatcaactaacaatctctcatatctaagatcagaccatgtgacacaacgctgactggtatgatcgaccaaacacaatcatactctaaaccatggtgcatacta

SEQ ID NO: 21136 - DNA, 419 bp, Oryza sativa
  unsure (1)..(419): unsure at all n locations
agcttgtaaaatatgcaaaaccactatccaaattaaccttaaaggtaatatgaacggttntgaaaagttcagcgggttaaatatccagttttaaagtttaggatgctagctgcactttcctccaaagtttatggggggtatttggactttttcattcaaatttattatattttagccaaaaaaatggtgaaaaatctaacggttttaaagataaaaaatgttagaattttgtgtttttttgttatggctaaaatataatgaatctgaagataagatttcacacgttggtgtaatactattagaagtatgtgtccaatttttttttaaaaaaaattctatgatatttgttagttggtgtgtacggaaaagctgtgtacatatgatatattcctatatatacacttacgtttcccaaaact

SEQ ID NO: 21137 - DNA, 425 bp, Oryza sativa
  unsure (1)..(425): unsure at all n locations
cggaggcagattagctgtaattagtgcactacgactgggcttattangccttcatactactccagaatatgaataagttcactctatgtccctcatattgtcgccgagtccgaaattcttcccttaagcacaaaaccgcggataaagcatcctccaacctacaaaaccggcataaacaaggtcccttgacagtattatcctctgggtttgggtaacagagcgtctatgtggctccttggactacatatttgtctcacatgccattgacatgtcgattacatggtacattcgatgccgaaacagaataanaccatcggattcacatgttatgtacacacacaaaataataaaacatggngagcccaatgtgggcgcacatatcactatcactcctccctccttctatccctctctctcctcctctc

SEQ ID NO: 21138 - DNA, 453 bp, Oryza sativa
  unsure (1)..(453): unsure at all n locations
agcttaaccaatgtagcccaactcgatagcaatgtcttaaacttgtattggctagagatcgaacttaaccgattagccctgctcgaaaacaacctgtcgaaaggttggcgatgcacccaaaaaattattgtattgatatgtggatgcccttacaaagaccctgagtgtacatgtntataccctcgggccgatacaagccctaatcggacatgagataggatttcctaacaaaaaaaaggaaaataactcatcatgcctatttaagagatatacttaagaaaatatataattgtattgccgcggtcttcccgatttctcctttagctcaacttgatctgaataaactttcatctatganaagaccttgatgtagacttgaggggggtgaataggtgttccttaaaattatcacaacttcatagcatattagaatgatgctatgaaaatataaaa

SEQ ID NO: 21139 - DNA, 453 bp, Oryza sativa
  unsure (1)..(453): unsure at all n locations
agcaccgagctgcactgtgaagggggtagttccctgtatactttatcttctatgagncatgactgtacacattgttttcattccctgtggttcaatcttcatatctattgttgttaactgtacacattgttttcattccctgtggttcaaccttcactatgagcaattcggtgtgtttttctttactgagtcatgacttcatatatgctctactgagtagtgacttcatatatggttggcgctagagttgccagcgcaagtgccattaactgtgagtcagtttcacttcatgttggagcatggaagaaaaccctccagattgtacatcaggttgcaatctgccggcaagaatgtctgtaaaatttactggttggagtcgtcgatcgaatctgtttgcaatttgagaatagccctcgccagaatgtgtaccaaatcatcgatcgaatatgtttg

SEQ ID NO: 21140 - DNA, 468 bp, Oryza sativa
cctctcagtcacctgcggcatgcaagcttccatcaaatcgtcaaaactcctctgttcagttatgaattaaagacagagcaaagaagcaaagcttcacccgaatcaaatatcaatacgatctagtaaaaactcataatatagtttcagccagtctcatgtttcaaagaggcaacttttcataagaagtataatacttgaaagttataggcgaaatcctccttcccgtgtcgaccacacacaggtgactgggggcaaaccttatccaccgtcttcgccacccccttcattcctctctttcgcctcgccgccatcagaacactccattggaaaacgagtagcgagctgggatagcggcagcggggccaaccccatccctcatgcgtctaggggagtctgcatggcagtgcacaaagccaggactgtgtgacgtgacggtggtggggcagcgactatatctatgcacccccc

SEQ ID NO: 21141 - DNA, 472 bp, Oryza sativa
  unsure (1)..(472): unsure at all n locations
agctttgcttggctgcatactgaggagtgactattctttataatgtttctactgaggagtgaccacttcgccatcaaaaggcaccggctagtggccagccaactcctccatatgatggatggaggaaagaaaaccccacttctgttcatgccactagctgctaaaaatcatgtgaacttgtgcttgcacccggtccctactctcatctgagaacgaatcatgatttcagccaatagacagtaaaaacatatacacgccccacgacccataattgttccatacttaagtttttgcaagcatagatgtttntctttatcagcactaacaaaacgacctaagatgtgtgctgtgtgcctgagtactataacgaagacagaatcctttgactntgatattgtgacggattcgtgggtgtatgatcgtgcttaaatgctgatgttcataaatataggtatgtgttttttggttgata

SEQ ID NO: 21142 - DNA, 276 bp, Oryza sativa
cccattacttcgccccctgtgacacaagcccaactcctcagtgtatggcacacgcgaccgaacacccgttatcctactcacgccctcagccaagcctaacaggggaggcctctaaggccaagatccgacttcacatccagatgtgaaagcgcgctagatgggagctctctctcgttatggtgacggagacactccaggccgctctcagctgtggcgcgctctacgtacccgccgttgcatatccgagctcagccacgctggctgacattggccaat

SEQ ID NO: 21143 - DNA, 361 bp, Oryza sativa
gaagtcccgtcatacactgacattatactcctctacaaccgtgcactgcatcttctctttattgacactgctattttaaaaatcgaacataattatcgttaggtttattattctttactttctaaagttccgcccaaacgttagtgactttgtcactgtactcctctacagctcgcccgctgccgccgttctttattatcattgagatcttaaaatacaaaacgattatcattgtggttcttttcttttactttttataagcccgaacctcttaaaagtgaaacttcttatactttttagagtttattgtctcgatggattctatggtttttataatttttagaaaatcccgtgaaacact

SEQ ID NO: 21144 - DNA, 464 bp, Oryza sativa
  unsure (1)..(464): unsure at all n locations
agctnggctntcgctcaaggtccttgattataattgaacccctganagcggaagtacgcttgaaggtcatcgtgctgttgctgcatcatgttgttgaaagtggcgaattgagcatcagcagtctgttgccattcttgcatttgagccatgtattctgtgaggtcgtactagatctccctcgtctgcatgtcaagggtgttggtatttcttatgaccacagataaatccgcaagcgcacggaataccgctgtagcacttcaccttcgggtgacccgtanaggatatcgaacttagggaacgtgtgtaatctacctaaagctaagactatccaaggacaacaactgatgatatgtaggctatgttagacaggactttctatgtgttttaattatctacgctaagcaaatgtaatttcctatctgttgcttcgggcaccgacccctgcaagtctaacagcgtggttc

SEQ ID NO: 21145 - DNA, 390 bp, Oryza sativa
  unsure (1)..(390): unsure at all n locations
cataaaatactcagccagggctgctcccgtataaagagcgaggtattgtaatgtagcaagggaatccgccatttcagctactacaataatgtattccatggcccnctcttcatggaaagtagttactacttgagctacggaggatgctctttgaccgatagctacataaacacatattacatcttgccctttttgattgagaattgtatctgtagctactgctgttttgccgagttgtctgtccccaataattaactctcgctgaccgcgcncaataggaatcatcgaatcgatagcaataagccccgtttgaaggggttcatatacagaacgcctggaaatatacctcgagcaagagaatctaataagcgagattccgaagctacaatt

SEQ ID NO: 21146 - DNA, 441 bp, Oryza sativa
  unsure (1)..(441): unsure at all n locations
actagccgnagacaccttctatttcttatggaataatctcgcaatatgtttcgcgccagccaagctccaatagcctaactatgctttggctttcccctgtccctctaaaacaaaagcatttcctgtggttagccatgaaggacaggatccaaaccaccgaacaactgaaacaaagaaactgggagggctctgagtattgtgagctgtgtgggaatatagaaaatgcttagcatgtagattttagatgtccaattgctagatttgtatggtgcatttgcagggatgctttgaaagttattttctctctagtgttacatgtttctgatgtgtctgtgaatagaatgagttntgtaatcttagctgcgatcagctggcagctgggcattacctggaatgacatgatcagtctctgggaggaataaagaaagatcctagtactcc

SEQ ID NO: 21147 - DNA, 215 bp, Oryza sativa
ttgagctctctcaggtaatggtgggcttttgccatattaggaagagaatgtaccgctgatagaggggagctgaatatgctgagagatgtaggaagtacgggccgtagatgcattcaaaagaacctatctatgcctcttgcatcttcagtccatataccgactcatgggagcaaatactgctgttccacgggagtaccttttgcaataccatcata

SEQ ID NO: 21148 - DNA, 386 bp, Oryza sativa
  unsure (1)..(386): unsure at all n locations
agctngatccgattgcactattaaatcgttgtatttatttctttaaagcaagaccacacatggatatattccgacgaaattatctttagctcattattgaattatttttaaaagttgcacgatgttccaccacgtatatcggaattgtttcactaaatacattgaaaatgtgtcactcgtttaaatcgagtgttctttcaccttatataaaaacaatgttttaccaaatagtgaaagattgtgtcacgtcactgcaacatttgatccatacataatgaaacatattgaaagaagtgctttaaaaagcacttttttttccttatttccaaatgattacaaatattaattaattgagtgtttggattcctggagttatcacgtcatta

SEQ ID NO: 21149 - DNA, 448 bp, Oryza sativa
  unsure (1)..(448): unsure at all n locations
gtactctgtggcagaaagctcttgaaggcttataattatttctgcgacatcatctgagagagaatactcttggattatgtgtccagattcttctttgaaatgctngatcttttcaccacttgcatttcgcatatcttcattangggcagaagatgtagtgaatgaagcatcaagccatccttcagatgtagcagtcagaaccagcttgtcaagagaatcttggcagaaggaatatcaaggctcagatcatcaatactctctgctagccgacaaaaaccctagacatttgattagaactgatcggcaacctgcagttgatccttaacagctcaggataatggctggatacagatctcatgctcaaggaagccgttacaactatgaggaaatggagccactcctatccctanactatcatattcctctataactctaatatctgatctct

SEQ ID NO: 21150 - DNA, 395 bp, Oryza sativa
agcttaccatgctcctccttagaataagtatatttttgttgtccctttgggctgtcttatatggttgaaataagtttattttgcattccttgtctctctggttgggtcttatatggctggaataagtctattttgcctccctaatcgtttgactaggccatgccgggctagcacattgtgccaatgaagaggcccaagcacagccccaacggtcgggctaggccgagccaaaacccgtgcagtcggaacttgggccttttcggccatctatacctcgatcctccatcgatgaaatctccttcttgaaagaaaggtcgcacttccttgacacccttgtcggcgcctgctttccacactgaggccagtcattacacccttgcctaatccctccctat

SEQ ID NO: 21151 - DNA, 264 bp, Oryza sativa
  unsure (1)..(264): unsure at all n locations
gtactttggatgttcttgtacttcacataacgatatattagcttggatcttttctacctctaacaggtgtataattagttcgtatgaacaaacctatgtaaataatcgaaagctgttctcgatatcaatttgtacgtgatcgaaatcctggacgatcacgagtggattnttggggcaccaagcctaaattgggtggtcccacactttgtcgctcatcattcatcaatcatcatcaggcacacattacgcatgagaacctgacta

SEQ ID NO: 21152 - DNA, 415 bp, Oryza sativa
  unsure (1)..(415): unsure at all n locations
agctggcagccaaagatagaccaatccatatatgtnttgcagatagtattgctctggagatagcatgctatcaagaatgggagagactcacatgaactcggaatgaaaagcatcttggaatagactagcaccgaagcttttcttggctatgccttctacatttgatggagatccccccaacgaatgattaaggccatggtcggcgccagctgttgtcgaatgacaaatgcgtttgtcgaagaacgtggtttagtcttggtggaaaagtaaaacagtaagtattaatattgatatttttgcgatcccccattacatgccccttggggtctaattatagtgtcaggtaaaactctagcaccctagggcatataagtaaggggaatttacatggatgcttttatgataggaacaatta

SEQ ID NO: 21153 - DNA, 289 bp, Oryza sativa
  unsure (1)..(289): unsure at all n locations
cagcttgggagctacagagcctggtatacaatttgaatctctgaaccctatactctcatctgttntngctttcgtcagggaagtccaggcccttcaatgtgttctccttcggccattatctgcaacccaccaaaaattccttgtcatcttagtcagatcatcacagactgactctgggaacttaagaagccccatcacatagactggtatggtctggataacagccttgatcaagatttcttttcccccactagataggagactttcaccccatagaattacccttttc

SEQ ID NO: 21154 - DNA, 458 bp, Oryza sativa
  unsure (1)..(458): unsure at all n locations
agcttaggacaatgcaaatgaagatgatcaattgttccacattcttagcaacgatttggaccacctcttttcctgttcctggcattattcgtagctcgagaattctattagcaacaaaagccaaatcctcctcctcgatttgttcgagttgatcatcggatgtgacattaaaaacagcaagaaaagaaggcttagatgaaaaagcatcaacatccaaagaataagaagaagaagaaaccaaagcgcttgacttagaatcaactttcctagaaagaacattcatctcatgtgttttcaattttctataaagtgaatccaaagtcaaagtagacatgttaacagacttttgaatagatgtaactttcatctcccaaatagacatgtcaagaccattcaaaaagtgacgagaaatctcagattgtggataattagtatcataagaaanatcaacagatcta

SEQ ID NO: 21155 - DNA, 321 bp, Oryza sativa
agagaagttggggtcccgggcctggtaactcgccagcacgagttcgaccgctccccgcgcgaggtccctcgaggatgacttgatggtcttctcaagctccttcgggagttgttcgagaacccatgccatcctgttgaggtgcggagcgaggccttccagattggtggggggcaccgtcgtcttggctttccagaggcccgcttgccgaccggcgcgcttcaagcgggagaccgcattccaaagcatgtcgggcccaatctcgcccgccaagcgaagggcctcagcctccccagtggagaagtccagcgctcgctgcatatc

SEQ ID NO: 21156 - DNA, 396 bp, Oryza sativa
  unsure (1)..(396): unsure at all n locations
tccgaactactaaacggtgtgtttntttgcaaaaatttctataggaaagttgctttaaaaaatcatattaatgcatttntgcaagttataataattaatactcaattaatcatgtgctaatggctcacctcgttatgtttatcgttccaatctcctcaatccactccttgtcaaacacactcttagccttcatgtataagcagggcaagaatcataaagtggtgctgatgttctttcatggtgtaaatatctnttttcatgtatgcattacgtggcgataggtcgagggactaaagtgtgctaaacttagtccctctcacaaacataagtcctacctagggctcgtctttcgtgaagggactaattagtctctagtctcaattagtctcaaacccc

SEQ ID NO: 21157 - DNA, 383 bp, Oryza sativa
agcttgaatcaagagcacctcgctctgataccaattgttcgtgctatagatgtagcctagagggggggatgaataggctttcctgaaattttctcaacaaacgcagcggttaaattgacagggtccggaacctcctggtgatgaacatcggaacttcctggcagtgatgagtagcctggaacttccgaaggtcttgagccaggaactttcggtcaatagagaaaaatgaaatatgagaagtattacaggttctatctagtgaaaatcatgcacagggttgcacaagatgaaaatcacaagataccagcagattcaaacacttgatcagcacaagagagacaaaagcgagtttttttccgaagttctgatcacaccgattctac

SEQ ID NO: 21158 - DNA, 342 bp, Oryza sativa
  unsure (1)..(342): unsure at all n locations
agctnttattgaaatactgaagagaaanaagattatatatgcatatgtggtagcctccggccaaccctgcacgcccgaagggggtgcggagttggcccgagcccgagacctgacacccgacccccactaggggtagaagcgacgaaggtgttcgatgttccacgggttaggcagctctgtgccgtcgcccgtggccagccgaacggagcccggccgggggacgccgatcactcgatacggaccctcccacattggtgagagcttgctcagtccagcacgcgtttggacgcatcgtatgacgaggtcgtctactcatagtgatctggccccgacgtgacgctg

SEQ ID NO: 21159 - DNA, 361 bp, Oryza sativa
  unsure (1)..(361): unsure at all n locations
aatatctggtcatgtgaaattntaagagtattgaagattccaagtagtctcttattcgtaagaagccatagaggctaacattaagtaaagcacagaaaaagaaaattaaagagaaacattactccctccttcccaatggaacatcatattttatgcctcangaccaatgataattatatcacatcaatcaagncatcatgaacacattctcccacaatgcatgcatcgattaagacatcatttcacgtagagcaagttaaatagttagctaactactagctncatatcatgtatagccaatgtaatagccaatatatacaatagttggcttacacactattaatacatgatcctacacact

SEQ ID NO: 21160 - DNA, 437 bp, Oryza sativa
  unsure (1)..(437): unsure at all n locations
agtctgttatggcgacttgctttctctggattattgcttacatctttatgacactctaatcttgtttatgtaaatcgtcgagttatcatatatgctatataatctagattgacattactatctggtcttgtcgactagcctccatcatcgagatcagccgatagaattagataactctgtcgggttagattatatagtatatccaccatctcgaaaaggctttcattgngttggtgatcagatcttatgtttctctttatgcttaatgctgcatcagttaagtttgatctattaagtaatatctagaaccataatatctaacttgcttcatgagtgctaacagagatagcatcggagtttcagcctatcttacccggtttagctatcttgttcttcacttatnattacttgatatgctanatctaccctttatatta

SEQ ID NO: 21161 - DNA, 425 bp, Oryza sativa
  unsure (1)..(425): unsure at all n locations
agcttcttcggtatatatgttctagaaatctattgttgtattaaatatgctccgatcatcacgcttggtctttggaacgtctgtacgtgtctatccaaattgtgataacagaattatagcaaagttatgttgcttctgtatgttcaaaaatcaacagatntctttttgaacgcttagaagttcttgctgacaaggcctctagtttaacttcgtttgtgctaggcttattccgggtcaagtcgggtcaacagaaaaacaaatcagtttatagttcagtccaaaaatattttgtctatagtccaaagtatggcaattaaatcgtacagaaattgtaactgtacaatacttatttacagctcgttaaagccaatgtctacaacagacaacactctaaagagaaaggcactcctacagaaaagcttttt

SEQ ID NO: 21162 - DNA, 286 bp, Oryza sativa
  unsure (1)..(286): unsure at all n locations
tcagctancaccattgngcacggcatatcatntcntacatatggctaactattacatttgctcttgcctatcatgagaaggacatgaatcactatactaattagttgctattgctngaaagcggaacaacacgtatgttacaactaagaatctcttattgtatctttttgacagtctgctgaaaataggagatagacaatgacagtggtacaattaattactaacacaatgtacagtcatgatgtcattctgcaaatatgagaaaaactatctctctgtctctgca

SEQ ID NO: 21163 - DNA, 423 bp, Oryza sativa
  unsure (1)..(423): unsure at all n locations
agcttggaagaaatggaagtcgaagctcttcttctagnttgtcaacccgcccggcaatcatacgccgttcgatgaataccctcaaataaccgaagcggtgtgggaggaattctgctctctcaagaccacccaacagtttaaggaatcaagcgaggcacatcgcgtactgcaacagcggaatgagcacccgcatcggctgggcaccgcagggtacatcggcaaggaggcaatatgggcccaagaagatgcagccgctgcagcagcgaatgtccctgccccgttttcagacatccctgaacaaagagctcgcaattgggcgcgggcaaggggtaaggtcaacctgtacggctctgtcacattngagaacaaaagtgatgccgtcatctatcatgaactggtgagttcactacttaacctaactaa

SEQ ID NO: 21164 - DNA, 369 bp, Oryza sativa
  unsure (1)..(369): unsure at all n locations
atatatagtactacctccttaaaacaggtatgaccttggttagctcacttttgagctaaccaatgtcanaccacaataaaatggagggagtactatagtactaccaatactatcattagctcatcagctgcactactaccaatatatagaagctgaatatttatcgcttattcagctctactgtgagtagacaaagtcgctgtatatattataaatatggatgatcctgttagcgtaagaacagatgaaatgtctagtataattctactactatagactatcgtacaatcaactcgatattagtcatcaatcgacgtcagataactatgttgggtcagctacataaatcattgtcagctcatctatcac

SEQ ID NO: 21165 - DNA, 450 bp, Oryza sativa
  unsure (1)..(450): unsure at all n locations
agctntancctgctaaatactatataagctaattcagtttctagnagnaatatattcgatgcagtagtgagaaagggaaacaattctcattatctggagaaacaaatgaaatattctttcccttgtctttgcatattatatttgaagtagtaacaaaggtgaagaattttcattcactggaaaaacaaatgaactagtttttttgccccttgtttgcatgcccaaatggggtatgatagcacaatttgcgtcatgtcatatcaaaaagtgtttgtcctctactactcctatctatttactttaaattaatctgcacttttttcactctcaagaaaacctagatagctactgaaatgtgtatgaataaatccttttatttaaaaatatgacacatacctgaccacccacagcctttactattatatgtcctgacttgttctgggtgaacaa

SEQ ID NO: 21166 - DNA, 343 bp, Oryza sativa
  unsure (1)..(343): unsure at all n locations
agctntatagcgcaannnccgatatatctatttttatggannnngcagataatgatgcacatcatacctccaatcattggcagataatgtagcaacctccactctaacatccttgatcattggcttatatctcgatgccccttgagccaaatcattagcttcaacattttgttctctagatacatgcttcgaaatcactagctgaaatcctctcaacaattctcgacatttctcgttgtaaaccattaatgtatcatttttgcactcatactctcctgccaattggctgatcaccagcaaagaatcattcatgatctccacaacatcggcttcaactttcttg

SEQ ID NO: 21167 - DNA, 228 bp, Oryza sativa
  unsure (1)..(228): unsure at all n locations
ctttcggtctggcttgcccagctcagccaccncgattatctttctttagcggtgcccccccagcaactatggatgtgcatgcgcaccggttgccttgcgcctaagacgattatatagaggctgggagagaacgcgcctccnttatttaagcttctcaagcgctccgagccgtttacttggactgaggaagctgaacgtgccctcactcacgtgaagacatatctcagc

SEQ ID NO: 21168 - DNA, 466 bp, Oryza sativa
  unsure (1)..(466): unsure at all n locations
agcttctcctcgtgcttcacatcgtttagcggtctagtgaataatgaggtatttgaatcatacacttgangtttggaattggtattcaacttcatcttctatatgcttaaagggatattccgatgctgattttggaggttgtagaattgatatgaaaagtactagtggaacatgtcattttcttggtacaccattgattgcatggtcttctaggaaacaatctagtgttgctcaatcaactgctaaatctgaatatgttactgctgcaagttgttgttcacagattctttggctcttaattactntgaaagaatatggtcttatttttgagaaagtacctctcttttgtgataatactaatgctatcaatggtgctaagaatcgtgntcaacactcacgcacanagcacattgatattcgtnttcactttttgagggatcatgttgagaaaggagatgtggaattt

SEQ ID NO: 21169 - DNA, 187 bp, Oryza sativa
  unsure (1)..(187): unsure at all n locations
ttaccacactcacaacgatttatcatatcttataagatacctacaacaacctcaatgtcaggtattatttctaatatacacctgttctaatgttangcatcaaagttgtcatggcaggacattgcaagagagacttcttttgcaaggtgaaaaagagaacattattgtgattgaacaaaatatttta

SEQ ID NO: 21170 - DNA, 370 bp, Oryza sativa
agcttcaagaagagatgggttctaagctgaactttagtactgcttatcatccacagacagacggacaaaccgaaagggtaaattagattttggaagacatgttgagagcttgtgctttagacttcggtggaagttgggataagaatctaccttatgcagaattttcgtacaacaacagttatcaagctagtcttcagatggctccttacgaagcactgtatggtcgtaagtgtcgcactccgcttttgtgggatcaaacgggagaacgttaggttttcgggacggatatcctgagggcagcagaagaaaaggtgaaaatcattcaagaaagattgcgtgtggcccagtctcgtcataagagttatgccga

SEQ ID NO: 21171 - DNA, 225 bp, Oryza sativa
tcttccttatgacaagatgtccaggcaacagctccgtcggtctaactttttttgtgtaagttgccgaagtgcctgtggcatagatgcgcatgtgttcgagtgcttcgactcttacttcctccaagagttcgagcgacacctggcgcccctcttcggccctagagaacatcacccttagtgagttagcccctagccctattgggtcattgcctcatcgtgcccctc

SEQ ID NO: 21172 - DNA, 312 bp, Oryza sativa
  unsure (1)..(312): unsure at all n locations
tgtatctttacactctttcagtatttaatattaagacatcttctgtgttgatatataacaatcaaatcctattgcagtgttgaatattatagtgatctgatgggagctccaggcacattaatcccttcagatatttctggcagtcaggttcatgactccaacaatagtcaactgagcaatgatgccatcgaggagagtgttgcagaactatgcatagcccttgagcagattagtgctggatgtaagaatacacgtgacatggngggaagttcatctgaacaaatatctgctttagcactcgcatagtcacag

SEQ ID NO: 21173 - DNA, 384 bp, Oryza sativa
gctccaagaaattctgcatacgattacctccactgttacataagaagtcatagtaaatggccaaccacttatctgcctatatgcagtaatcactgctcctgactgtttacattctctcctatacattgtcaaaaatactttatacctcttaatctgaaactataaatatttttaagaagcattatcatatttatacaggggatgatgatcttatgtgctgtgatggacactatgacacaagcatcaacttgctaaaacacaagatccggacacggaattaccaattgcgaatcaacatcttggactcatcacatgaagtcactgtatcaagataatgcggagtcgtaatattactttgctgatctttcgagtgtctaatacttt

SEQ ID NO: 21174 - DNA, 376 bp, Oryza sativa
  unsure (1)..(376): unsure at all n locations
agcctaaccttggctcgnnccgagtgaacgactttattttactaagacttggctgctgatcaggagctgctactatgctgcatatctcacacatacaggtgtaaagtatatgtactctctctgagaataacaaatccttggcacggtggttacccttacccctgattcccacgagacactgcttctccttgccttgcgcggctaaaagatagaacagcaatttagagtaccaatcacccaatctttattcaactcttcttcggaagctttcaatgattctgaaaagaaaaccaagttcttcaattgattcactcaatctctctaagcgtatcaatatgaaatcctcaccacatgtctgccttatgatatctactct

SEQ ID NO: 21175 - DNA, 390 bp, Oryza sativa
agcctgcggagaagctcgttttattccacattgacaccggaggatgtgccaataatacacacccgaccctcaaggaccgaaaccgactactatgctgatcgactttacgcgtggcctgtcggactcggagtgacaggccggtacaccgttgccaagatcgcacgtattgctgctcccgacatgtgcacatgcatatgcaaactcaactaggttgtatccccgcggcactgttacaagtataatgagacataaacacgtcaatcatagaaaaacgtatgctgacaaaagaagaaccgcatggtacaacctaaacattaccatgcaagagtaactaagctatatgtgcctacatataagcgcagcatattacccaattaactgtaatcacac

SEQ ID NO: 21176 - DNA, 495 bp, Oryza sativa
  unsure (1)..(495): unsure at all n locations
agcttgagaaatgtctctagatgcttattactttgattgcctctgttattggcccatatgttctgatatagccaacaagatccccctagcaaccataaatatttttttctgctagtgattaggttcctggtgttgttgaactgtatatatcctagcctatccaggtccaggctggccatataataatttattggtgtcttggctggaaaaacaggttctgcatgtcgatgatttaaagcttagtgatattgcgcctaaattcgagcatcatgaaatgtttcctgcccgcaccaacacaggttactcttaattattatagaaccgtatgccttctattcatacatattcttgcatttgaagttacttaaattaattttcttctgcagaanttgtagaggtcctgtctcgctcacacctcataatgagagtctgggagcgtggngctggaactgatgttccttaatctgattttataggtatatgcactgtggttaa

SEQ ID NO: 21177 - DNA, 414 bp, Oryza sativa
  unsure (1)..(414): unsure at all n locations
tcaggagatgttctctagtgtggccatctccattgtaccccttccgtatttaaatatgagtatatgacaggatnntatttagttgatcaacatttgagactttgaatatattatagctcttaaattggctagcctgaaaacatcaaaattatatggatatatctctttacttgtacgatattatnaatttggtagatatttcgttatattctaantacaaaatacatagtggtcagattaagacagaataaagtcgtgtatttaaatatgaaggtagtactatcaacgttcccaaattaaatttcaaactgaatcttcttagttggactctaagaggatnanatcnagcattaatgcttaatctctatgatgttttagaatataatgtctaantctctatatattctcatcgcc

SEQ ID NO: 21178 - DNA, 284 bp, Oryza sativa
  unsure (1)..(284): unsure at all n locations
agagncacctgcggcatgcaagcttagctttgctcagctcagctgcatgcacatacatntctgtggcaggggccaggnggtacctggtgctatctactttcttctactccaatggtgtgaagtgtgtgtggcagtatctcacagcagccagcatgcagtccactaccatatgacactgatctctctagctttcagatgatgaagctttcttgccaagctagcttagcgttggatgcttgatcaagccacattaactcttttcttccttccgttctcacttgtca

SEQ ID NO: 21179 - DNA, 58 bp, Oryza sativa
tcctgcttctgacttctactccctccttctacaaaaaacctcaatctaagaggggacg

SEQ ID NO: 21180 - DNA, 230 bp, Oryza sativa
  unsure (1)..(230): unsure at all n locations
tctcttagaaatgcctttcagattcctgtgaaactctangtcaaattcaaattcaaatcccttcaaattctcctcacaattcaactctataaatccctgcgaagatgagaaatatcactgttcatattgggccctcttcccttctctctctctcggaccaactctcctccacctctgctctcttctttcccctgagcaggccggcccagcgcagaccatttctgctcatc

SEQ ID NO: 21181 - DNA, 110 bp, Oryza sativa
  unsure (1)..(110): unsure at all n locations
cccccccccctccnttccctatntttatcaccttcaagccaccgggggagtcgtgtcggcccgcaacaaccacctcgactctgcacattacctacaacacacaccttcct

SEQ ID NO: 21182 - DNA, 305 bp, Oryza sativa
  unsure (1)..(305): unsure at all n locations
cacttgatcacgcgcactttgtgcctaagcaaaagtgcctaagtccctaatagaacgtgacaggccacacctgataatataggttgcagacatattaggcctaggccanaaaatatgccttcgacaccctntaaaggatgacgcatgtaacatgctcccgagtaataaatcttccaggtattatagaccaagcttagctcatatgaatagcttctgatctgagtgattatcccttatgggcatactcacaatagatgtaaccaatgaatcccgactggcgcaagtattcgggtgtaacccttatg

SEQ ID NO: 21183 - DNA, 483 bp, Oryza sativa
  unsure (1)..(483): unsure at all n locations
agcttaagaataccacagtcctaatatgcacttatattctataatctaaagtttcactggtatgggttgtggtatgcttttaacatgtgtagataatgattgattgaagaatgcataagttcagacgacttccacctgttctgctgtcagttgttagatcaccatcatgcattcctgtaggctctcgcttggattgagtatttgtgtctgccctctgaaactatgaagcttaatgtactatttgagaagtcggataatgaatnccatgatagtactatttgcactccggcttacacataatgattataatggaatttctccaaaactagatctggcccatatcaataagtagatttcactctgaacattanaactnttgcactataattgacctgggacatgccttatgatctccttccctttatctgcttaccatgcaggtgcactttacaattctatgctattctttccgctgcatatcaa

SEQ ID NO: 21184 - DNA, 235 bp, Oryza sativa
  unsure (1)..(235): unsure at all n locations
aacagggacgggatctntcaccaagaacaaacagncagatgcctaaccacgaacatcttactagtatcgaatacatcggctatcactataaaaactaataactcatatataacgacatcgtctgctantaaaaatataactaggtaaaaatatgagtattcatgtcaacccgacgacttaaacatgagcgcaccagtcccattaacaaaaacctaactagctgagccattcttaa

SEQ ID NO: 21185 - DNA, 299 bp, Oryza sativa
gggaattcctgtcgacaacggtgatcgaaacagaacacaattctctagttcgcagatcatcgatcttgcctcaaacaacttctttggcatgttgcagccgcaatggttcgatagcctcacagcaatgatggttacaagagagggtgacgtgcgaaatgccctggagaacaacctctctgggaaattctaccgtgacacagtcgtggtcacgtacaatggcgcggccacgacattcatcacggtcctgatcgccttcacgatgatcgacttctccgacaacgcgttcaccggcaacattt

SEQ ID NO: 21186 - DNA, 457 bp, Oryza sativa
  unsure (1)..(457): unsure at all n locations
taatgtaatagaaaacccatgtggtgatgggaggcggaagaagaataagaagacataacatcactcagagtcgtcaaaggatgttggtcctactcatgatgtgacaaaatcattgattacaaatganatctcaatacaaaacacaaatgtttctcccttagatccaaagcanataacaccggccacaacaggagtaggaacaatnggtcaccaaacaatgntngacgtaagcctggatgtagcagcagcaaaagttattgatgacgtattgcagattaagatcactgatacacaagaaggatttgatcaatgtcagtatanaacagaacacccggcacgatgacttgagtgatgaaacactgggataaggccttatgcgtgtcctctgaatatcacggcatcatctgagtccatcactactacatataggctaagagaaatgagtctgcactgcatg

SEQ ID NO: 21187 - DNA, 496 bp, Oryza sativa
  unsure (1)..(496): unsure at all n locations
agcttcttgttntcaagaagaataatagtattatatgtgacattcaattgcctttncgcatgagttgccgagtaggtagtatttgtggatcaaaccctataagcttaaagccattgtttttgtcatctagataaatctcaaatcaaagtgtttctttgaacttgaaggttgatcaaggtgctcttatattctacttcctccgntntacaatgtaagactttctagcatcgcccacattcatatagatgttaatgaatctaggcatatattatatgaaatatgggtaatgctagatagtcttacagtatgaaacggagggagtatctacatanagaaatcaagccaaattcttagtcactctgtataattgaatctgtagcatacatcgagtaatatancaagtcagaataagatactcgtacctttacgtgcattgattcaagagattgcacccttgctgaattgaaattggccacctgcaacattgatgttgtta

SEQ ID NO: 21188 - DNA, 396 bp, Oryza sativa
  unsure (1)..(396): unsure at all n locations
catgtcagaatctcaaaattcacctagactaagacctatctgatcataatgataagagaatccatgccatttggattatcatacatacctgcaaatcaaccttttctgctatatcctctagcatactggaacttatattgatatgaatattacgggccctcggcatatattctgatcgtatggttctgaggaacantctgataatgtgctacatgccaactttctgatgttganattgtgatcgccagngaggctgcagatgatagaagatgtccagctaacagataggtctatatatactgggtaactgctgtgtgctttacctttgggtaaagtaccttgatgttagtacaacaccttcaaccacagagaggatgttcgagccctgacacttgt

SEQ ID NO: 21189 - DNA, 186 bp, Oryza sativa
  unsure (1)..(186): unsure at all n locations
atcatgccatgtgtggacgaagattgaaaccggtaagtccatcactctggtggctggaatttttgctcgaattggatatctttcttcgtttgccgctcttcaattcttgtatttgggttctaattcgaggaaatnttataaccaattcttggatgttgtatatgcaacgttctttggtgtcacatg

SEQ ID NO: 21190 - DNA, 350 bp, Oryza sativa
atgcattagctacctgctttatctgcatggatccaatggcgcccctggccgcctcgaactcgaccagcagtgacagccagaagatcgtcgagccctcgtttacacggaaggctatgttcttcccgccgtacttgcacgcagtcctggtatattagaacactgcactggtcagtttccgccgaatagaaacacaaaatatctgggttcgtactaactgttaattgaatggacggtacacgtggcatgcgacagcttttctatgatcaggtagactgatgaacggagaagcagcattggaaaagaattatagacaagagggtaaatgccatttggatatcttgtgctctgac

SEQ ID NO: 21191 - DNA, 288 bp, Oryza sativa
  unsure (1)..(288): unsure at all n locations
actactcccatcccagnttagagacagcttgaggtcgntcaagatcttatttctatgttttgntcttctaactgctgatcctatcctgtagtggccgcattacattgctgccttacaaaggatacgcttattctttctattaacatttcagaactgtataactcagtgaacatatctcgtcgtactcttgttctcctacggactattatgcttgtctctggatacttagacttccttacgacatttcgagccctgttggaatacccatgcagacaacagcttcatact

SEQ ID NO: 21192 - DNA, 450 bp, Oryza sativa
  unsure (1)..(450): unsure at all n locations
agctngtatgttgagaataaataaactacctaagtattgtgcatacgccatgcgcacactgctttaacagacgtgctttagtccctaaaagacacatgtgttcaccacacctggaaatatatggcatatgtggtgtaaaatccgagagaataaactcataaaggatttaccaaccgcctagaaaatgaccacaatatataatcagcctaagccataatattggtcaataaaaatgcacacttacgtggcgaaaagcaatgatattgtatccaatcaattgcttaaaaacccaaacagcaccttgacttatatataaaaaagtcagcgggacagctatataaagctttactgttagacacctgttaagatgcatttaccaactcctaataagtaagtaactgcgtgataacaggaatttaatgtattggtcacttgatcacgcgcactttg

SEQ ID NO: 21193 - DNA, 144 bp, Oryza sativa
gatactgactctatgccgatgatgacttcgggcttaccacaatttggtgtaacaatatccttatgtttctgaatctgaagaagatgatgtctccgaagtagcagcagcagccgaatgggcgagaaacaagaagggtttaacatg

SEQ ID NO: 21194 - DNA, 373 bp, Oryza sativa
  unsure (1)..(373): unsure at all n locations
gctntccaccatctcgctggtagccaattttttgcagctacctccatcaatgatcatgcggcaacaacgctctntgacgacacactttgtttggaacaacgtgtgtcgctgantttgctccgccttctccatttgtgcgctaaggacacgctgcacaatgagactctcatagtgatccgcaaatgcagccacaatgtgctcttccggtggctcattatctgcatggtcagccgcaagcaaagcaagtgtatcatcatcgaaatcactagcagaggagtactcaccatcgttgtttactaccaaaactcgcttgctagggcagtcacgctgcacatgcccaaagcccttgcaacggtggcactgaacatctctc

SEQ ID NO: 21195 - DNA, 302 bp, Oryza sativa
agcttggcgtcgacgaggacgagagtgttgcggtgattctgttcgacatgtacgccaagtgtggtcgcgtgggctcgtcatggcgggcgttggtgctcacgccgcagaggagcgttctgagctggacaagcatgatcgcttgcctcgtcaaccatggtgattcagggtaccgcgacacagctattgtcctattcaagaagatgctggttttgacggtttggccaccaaatgctacgtcttcttgcattctgaaggtgtctgatgtgcctgagttgctccccagcggaaagtatgttcacggc

SEQ ID NO: 21196 - DNA, 314 bp, Oryza sativa
  unsure (1)..(314): unsure at all n locations
cctgcaataccagtctcctctccaccgacaactgaaggcatatttatattgctatcatacaactgacttactgattgctggtttacctgcttacaaaatatctatggtacaagcagacgttccatttatatagnctatctcatcacttgctgactatctattttaagaacaactggtacctgaccctgataatcatgaactatgtgacattatgcggctgttcttgcaaagattgcatagaaatgaaagagagcacaccttgcctccacagaatgattgctgattggtgtactcggtgaattgtgtgatgattt

SEQ ID NO: 21197 - DNA, 374 bp, Oryza sativa
  unsure (1)..(374): unsure at all n locations
gcctaatcgctctatgacttgacaatatggtgctacagtaaacattcgctaatgacagattaattaggctcaataaattcgtctcgtcgtttactgacggattctcgaattagtttttnttatttatgcccaagcactcctgcgacaccctatataatacccgatgtgacatgccaaaactctacacgcctgtgtcttaacaccccattactcgtacggctctcatctttatcttatactcatgtttataagccaacaaatattttattgtaatataaacttgaagtcatattaggacattttatcacgcactttaagatatgttctaatgtaagacacgacataaagtttatctgaatattttcattgaaaat

SEQ ID NO: 21198 - DNA, 404 bp, Oryza sativa
  unsure (1)..(404): unsure at all n locations
ngcttgacaccatcttctctagttctccatggtctataagcgatctgctgcggatagtggcatcgccgacgccgacgagcacgccggcggcggcggcggcggtaagcggagctgcatcgagagcaccgacaattactaggtcacgtgctggctcaagaagggcgcgttctgcgccgtcattagggcgcgccaccgcgcgacgggcagggacgtcgcgatcaagttcctccgccgccaccgctgcagcatgggtggtaaggccgtcggcgaggacgcgctgctgcgggaggcgctctacctcgcgcgcttgagtcaccaccccttcatcagccactaccacggcctcgcgctcgatccgcgctccgggatgtggggcctcgtcatggagcacgtctgccctatcc

SEQ ID NO: 21199 - DNA, 449 bp, Oryza sativa
  unsure (1)..(449): unsure at all n locations
tataaanncctacataagttttttaacatagcgcacatataattctataaaattatgtacttttaacataacatgcacgtacatataaagttttcacttcagatacattatacatattggacacagtaggggaaaaatgattagtacccncatctgtcaaaaaagatctattcctagatccccgaggcaagtttagtattaacgtganattaccacagtaccatccttaactgcattcatccatcaacactgccattctctgcacacacattataattgagttgcatntgcccaagaaaagaatacattngctcgtagaaagggaacaacctacaagaactacaccatgaacaaagaacagagaagaaccatgaatagaggggatacattggaataagttcttgaatagatctgcacatataggctgcaactttaccttcactctgata

SEQ ID NO: 21200 - DNA, 144 bp, Oryza sativa
  unsure (1)..(144): unsure at all n locations
ctcanattaaacaccaagaaccactattaaccaaagaaataaagaaaattataccgcatgagaacacagcangaggagaagagtttatcacagaacatgcattaaagctaagataattgattaccagatggatgcaaaggaaag

SEQ ID NO: 21201 - DNA, 374 bp, Oryza sativa
tgcagctacactacttttacataatcctaatatgctgaacaccttggcctaacgttgcaagttctaagaaataaacactaaggaacttgcatgacaagactgagaaatgacctttccttattgctaacaattcatctgcaggaatctgcaatatatggatctcatttcaaagaaatccaagcagatgctcctaaattaacaaagattaccgttgtggattctgatgatgactacccacatttgctggtcttttcttcgttgcgttctgaagatttgatgcttggagtaagccatatattcgacaagcaaatattggctttcttgaagggagaacccctctaacagtatcattgtatacctaggttaagttagta

SEQ ID NO: 21202 - DNA, 337 bp, Oryza sativa
  unsure (1)..(337): unsure at all n locations
ctagctgncttggtggcaccatgtttgatcatgttgctaagtttgtttcatccattagctaaggcgaaataaatgtccatgatgtgtgaattatcatatctgaagtgacataatcatattgcatgctcactacttggtataaaacaatgatgtgcctttcttgatctaatgttgagggctgaacaccagtagagagaaaaagacggataaaaaatcttttctgagctgagatgtatgccacccttatttaaataaaaaggatgaagggtcactctagatgtgtagaggccttgcctctagttttacacctgggaacgtgatacttgtcaaattgtga

SEQ ID NO: 21203 - DNA, 189 bp, Oryza sativa
aaaaaaggaaggagtatattaaatctcacaatagggtatgtagctaagtacaattacattaaccgaaccatgacagagaagtcgatacagcaccagatgtaagtgcacagccgatacaacacgtctgggcaacattgtaacactcacaatacacgatcgtcgaacagaccattggagacaaaggaggag

SEQ ID NO: 21204 - DNA, 393 bp, Oryza sativa
  unsure (1)..(393): unsure at all n locations
catgcaagctcggattnctgctctggctgtcttaacgggttncttaatggttttactcancgcancagcgccgttggcggcctgttcctattattcaaagaaacacaaaaccaccaccaggaagaaaaataacctttttacaatcaaccctaaacgaccatctccccatacccatcctcattgttccctatgatccaacagaatagaacaatctccctttggatgaagccaacaggtctcagacaagagtagtatctgtggcttcatcgaanactatcagccaaaatccaaataaaatgcatcatagacccagtatcatccttcactgggaactacagaagcaacatccaacttcaacctggcggggctttgacacaaaaccnccgatatatc

SEQ ID NO: 21205 - DNA, 158 bp, Oryza sativa
  unsure (1)..(158): unsure at all n locations
gctactgccgacggaatcagagactttgtctaattaacttgatcaaacttttgttagatngcctcagctgtccattagcttgcgcataatatggcgaagaattcaacaacttgatgcccatgcctgcggcanactgaacaaactcatcatacacaaag

SEQ ID NO: 21206 - DNA, 403 bp, Oryza sativa
  unsure (1)..(403): unsure at all n locations
tcaaatggcctctatgtcctatgtatgctactcttgaaatttcttgtgtaagntctttgcataaaataaggacatgcttaatgtcctgaattaagaaagtagtaataagaagataatggcattattctgggttgaactattatgagacgttgtcaaaactatggccttaatattcggccacatttcaaggggagaatggacgtctcattgagatcgagacacttcacccttagaganttctgacatctattattacttagacgataaatcaccacgtaaaattaagtgattcacagttatgaaaaataagatattatgcttccattanataaataatacaatctgtgggagctcatacagagctctaatangagaagaatattctaccttatttatgactcat

SEQ ID NO: 21207 - DNA, 334 bp, Oryza sativa
  unsure (1)..(334): unsure at all n locations
tgtgacagatcctgaaactcaagaactggaaattaaagtcttcgactgggaacaggcatggaatagctttgttntactattcctgctcttgggccatgttaccaaagactgcagatttagttctctttgtatatccaggttggaaagcacgacaagatgggcattaacaagaatctgttgaaagaactttccccataggaaactaaagttacaacctataacttgcttaagaccatggatccaaatgacatacataatgagaagtcttcgtgtcaaattactctggagatgacatataaacctttcaaggaagacgatctagagacagatgtcc

SEQ ID NO: 21208 - DNA, 332 bp, Oryza sativa
  unsure (1)..(332): unsure at all n locations
tcagctaaatgccctaagataagattttatgtgacttgctacaggcgttgngttatccaangataatntggcacgacgaaatcggaatggcagcttaagatgttgtatctgtatgacaaatgagactactcaacatctttntatagagtgtcattatgccaacacttgttggagagcagcacagatctctattggctatagcgtcctactaccatatctaatatagttgatggctggctcttgtgggagacaagaagaagagtaactcatacttgtaagagctttgcctatcgtgggctctgcggttgacatagattgatatgggttttgac

SEQ ID NO: 21209 - DNA, 416 bp, Oryza sativa
agcttagcgcatgccaactgaaacgaacttatctgttcgttgggcaggcaggtctcggcctctcgggtacagctatagctgctggtggaggtgaacctcctttctttcgtgagcccatgggcgcgctgcagcgatgcaggggccgcattggccccccttcatggccacacgtacgtaacgtactttactgcaccatccccataatacaggcataccgatggttatgtcctcttctttactgcacctctctctctctgtctcactttgggtggttctgaacatgatgacctctgtagctggagggggaaagggaaggggatgggcgccggtcgtgcgtctcgcagtcctgaaaatggcctgatcacacggacggagcctgggccagcagtccgcgctcgtctccgatcgtgcatgca

SEQ ID NO: 21210 - DNA, 425 bp, Oryza sativa
  unsure (1)..(425): unsure at all n locations
agctntcctcttatgttatctttcttgtttccatagatgtattcgcatatcgnanagccacgccactggctattcctggccaataatggccctctntgacatnatttatcgagctattcctaactctacaaattcatggatctgatctacgatacgtgcataacatttagataaatcacattgttcttattntgaaaacaagaatttgtcttatttagaagaaatctaaaactttaattataatgtagcatataagtataaaatctaccgtggatctaagattcgaatcagcagaggtgagacgcttcaccaatctagggtctcctttataatactagacatcaagcgcgcgttgcgcgccctatcgtatataaccatggagcataatagcacaccatagtatataaccatggagcatatgctca

SEQ ID NO: 21211 - DNA, 232 bp, Oryza sativa
  unsure (1)..(232): unsure at all n locations
gcttcttcaatgacttatgnntttagaaatatgactgnncagcctgaaagaaaatccagctcacacaatggactggttcagttattgttctgctgcattggactgtagtggactggaactggtgcacttgatgggttcgattatacctgagataatttttacattgctaggttcacttgcagttgctcaaatgctaaactgattttgggtggattgcgtcttttgcctgcct

SEQ ID NO: 21212 - DNA, 466 bp, Oryza sativa
atcctcagagtcacctgcggcatcaagcttgtccagctgcagcttttttattagcttgctctgctagaagctgccccaaacagtccacagcttctgagaatctatagttacagattctaacaaatgaactaaaaagtcagaagctggagaagctgggttttaaagcttttccagattctcagaagctggctaccaaacagctgcttctcagaatctaaagccctccaaacaggccctaaggccattcccaacccaatgactaggatgttgtccatagcattaaataagctgtcacctaaaatgaaaaataatgtgacaagtgaataaataaggaaagagaaggaaaccatgtcttgcatgagacatggtttctacgcaacattcaagacatcatgtgagataagtagcattacattcaagatagaataatgatgttcgcattgaagagtagtgtacacagttttga

SEQ ID NO: 21213 - DNA, 228 bp, Oryza sativa
  unsure (1)..(228): unsure at all n locations
tctgagaaaantaggaganagatcatattcagaaacaaacactgtgacatattatttacgttatggatcagaaattattgcttacatgaatccagagcatcagaaacaatatgcacaatgtccggctcttcgatcatgcccggatgagctatggtctggtttttccccatgccatgcctggatgagtatggttagcctctaggggtcgtctgcacatacattgatctt

SEQ ID NO: 21214 - DNA, 362 bp, Oryza sativa
  unsure (1)..(362): unsure at all n locations
agctttgatgctgacaacggcaagataagtaatcgcctcanggtcaacgagagagccctgngaaatatttcctccattaatccgttctttccatgcccgtacacatgtggatcttgacatcgatgactgcttcanaacatgtgctccttttctttntctgaatgatgttgtttgtcatgtacctcaccaatccgatcttgcaaatctgtgaggtcccttcttttcgccaaaaaaaaggatgtgtttttcctgccatncaaaaaggataatattctgttcagtttgcattgtaaaacagcaataattgacgtgatgaactggtaaagcagacaaaaaataggcatgaaaaacgtcaatatact

SEQ ID NO: 21215 - DNA, 376 bp, Oryza sativa
  unsure (1)..(376): unsure at all n locations
ctgcagctggcaatttagcctcgattcgcgagtcncgtactcttcgcagnngggaaacagctgaacatagagntgagaactgtagcttcttgtcgtcgagtagtcattgcttgagtgaagatatgtgctgaagatgtccgagtaaaatctngaatattgagcaccacttgagtatgttagtgcggcgtcgaatatggtggcacatgccgagatgtcgtggttggtgatatatangcaatagagtttgctggtgccgaagacaatgaagatgaagtcacctcacaatggtgacatgagtgcatagccatgatgactgttacacgagttggcggcacagatgcaaaccgatgcgccaagataccagtcagcgacagac

SEQ ID NO: 21216 - DNA, 333 bp, Oryza sativa
  unsure (1)..(333): unsure at all n locations
ccatgatcatctttccgagactgacacagatatgcaattgctgcaacaagctcntcatcactcagtatctctttctacccactttctaatctcgatagcgctcctaatagggaatgtaacacctgtgataaaagctctggaccatgggcacggcctagcctttccttattaacctgatcgtcgagtgccaccgaaataatcctcaaaatatgaacagaaagagaagcagtccaagaacgacgacacatcccgagactaggtccatattaccaactcgacattgctcacagcaatggagcacagcatcgacctcatacctaatgccacatgatt

SEQ ID NO: 21217 - DNA, 473 bp, Oryza sativa
  unsure (1)..(473): unsure at all n locations
agctacntgnaagctagnagcgcctttgatctttgttgtttgaagtgaagctgacgnggtgtacacaaccatagctagatagacacgtcaatatgggtgagatctatcggtgtggcggcgattgtatttccggagaatctcttccgaagacgacggactgataatgatcacacagagccatatgttgccgcaagcatgtacgggggttatttggctactagaagaaacgacaccaatagtcccggtgcgagccgtcatttctcgtgacgtcgtctgttcagttattaccgttcctgtcatggtcgcggacggaggctggtagtttctacaccctctgccagaacactgtttgttcttcttgaagagacgtgtatacaacgtctcttatgagggatcgtttcacttttaatattaccgtcatgtatgtcgtggagatggttgttctacactccaagacaacacgttattttttt

SEQ ID NO: 21218 - DNA, 244 bp, Oryza sativa
  unsure (1)..(244): unsure at all n locations
ctaatagtatacagaagaacatnggtctgtatgatatcatatcagaatgagagaatatactctacaaactctttcagatcacacagttgataacaccaggtcatggaccattctattgactctaccagaaaccacaanatatactaacatacaatctagcatatcttttgataacaccaacaaaactacattaatcccaagaccactgcttgatattcacagatgatactttttcagcaatata

SEQ ID NO: 21219 - DNA, 516 bp, Oryza sativa
  unsure (1)..(516): unsure at all n locations
ctctaagtcacctgcggcatgcaagcttattgaagtgaaatatgaaggtcacagggtgctggagggaggagacaatgagcgaggaggaaagaacgaaagatgacagccgctcagcctttcattcgcttgcgtggacaaatcaaccaaaaccaccgcttccacgctggcgaaacagccatgcaaaatcagtttggggggctaaacgaccttgtattagtagtttagaggcgtaagtgagcctaacaattatttagggataaagtagaccaacgcaatagtaccttntcttgataaatcaaagtatactacaacaccactctatcctcataaggatattcttcggttatagagtaaaaaacagtataacatgccttttgtacgcaagcatggccgcatggacataattaaacatgatgtttggaagtaccacacgcctttataacttactcncnntcgttctaaatattagacatcattgaccttnttaaatatgttcaaccgttcatcttattcaaa

SEQ ID NO: 21220 - DNA, 227 bp, Oryza sativa
  unsure (1)..(227): unsure at all n locations
ccacaaaatataacagtcatctttttcagcttntcttccttcttcttggcagtagatattatcgttgacggttgaccgccgacacctgtgatctttatgagagggagaaatacataacatgtatggcttatttataggtttacaccttgacagacaaaatcatatttcatgtggagagagagagccgtagcaactcaatcgctggtggctacatactacgagtccac

SEQ ID NO: 21221 - DNA, 505 bp, Oryza sativa
  unsure (1)..(505): unsure at all n locations
gctaacaaggatcacgaaattagtgattgtatttgtatgntaaatcaatcagcagctgctcagttaaagttgttagtacagaagtggatactggatcttttatgaggtactaccactattactttttctttgagaggatgtcactaatatttgtgcgatcttgaagaatgatataaatgaatgataatatataccaggcagttgtaccgtacacaatgatttggtatcatatatagagtggctatcatttggaaatgaggattaccgagaaacactagtactatatattagtacgctcagtagacgtacatactaattagagctgtaaaggcacacctacgtacgtgcatagaagaaactaccctaatcctaataagaacattaagaacataagaatattggcgactgggaatcacaatggtgtagtaatggacatctctactgtccacctacgcnctacggnntggtaaagttaccatatcgatgtctacttgcaatntctact

SEQ ID NO: 21222 - DNA, 221 bp, Oryza sativa
  unsure (1)..(221): unsure at all n locations
ttttctttttttgggtatgcaaaggtataaggcatatgtgcagaacttgcaagacaagttttgatgtaggtagaatatccttcattatttgtcttatgacctgactatgttagcgacctgctgtgcccatacaagtcantgaactgaaaaggttaatcgtcaactgtataaatacataaagtgatatgtgacatacgtgtataactagtatgactagtatg

SEQ ID NO: 21223 - DNA, 343 bp, Oryza sativa
agcttaacggaaacctccgaccaacaactcgttttctgatccacggaactcgtacgccgagaggagtactcttacctcgagctcatggtagtccatccccttgagcatgaccctcgagccgggctcgcagcgggcggcggcgggaggtcggcggagcgcggagaagatgcggctcgaaggcggagcggaggagtggcctcctcggagggaggaagcgccccaccggaggagaggcagcgccgccatgggaagggaacagttcgtgagctctcccgctggggatttttctcgcgattaaattagttgtaacaggatagaattgaactgcgctgctttatttcct

SEQ ID NO: 21224 - DNA, 163 bp, Oryza sativa
  unsure (1)..(163): unsure at all n locations
tactcagctgtcaccanattatattggctacggagaataattatcactttttcggttgctactgtagtaacttctcttagatgcatgcatataggactggcttggtttgagatctaaattaggcttaccaatatttatcaatttcaatagtatttagtgtcta

SEQ ID NO: 21225 - DNA, 92 bp, Oryza sativa
  unsure (1)..(92): unsure at all n locations
gatcctcaagtcacctgcggcatgcaagctntgcgtagagactgagagagcgcgtggtcttgcagcgctgtgcaaacaggcggaaccgatgc

SEQ ID NO: 21226 - DNA, 400 bp, Oryza sativa
  unsure (1)..(400): unsure at all n locations
cagctntacttagacactgattctcactaggatttcttctctaccttcatccatatctatcttgtgtcattgatgaaccggaggaagagataatcacacatgtttccttggattcgatacccttgaaatactccataggggaagtgctacatcggtatatccgtgcgcttgcggattctatctgtgatcgtaagaaacaccaacaagcatctctggcgcctgtncataattttctattcttctacgttcaccctgctctatccgaagaagtttcctggaatacactgcttcctcttctatggagcaacctatctttgaattatctgctcatagggatgaattttatgagtggcacgaccggaaattaacccacgggcgttccttacgtgtgtgattattc

SEQ ID NO: 21227 - DNA, 438 bp, Oryza sativa
  unsure (1)..(438): unsure at all n locations
atatgtatggaacccaccttctggcagaaaactggcccgttatcctaatgcttagtatttgtgatatcaaccacagtcttgatgatatttgtcaaagtattgaccagcacccgatagattaatcaaagcttgatgaacagcataatcaacttgatcctggaaaatattgaacttcaaggccatttgcttctcaatctcctctctttcaatctcttcaatctcaacatacttaggctacccacttttgtacctgaataactgtgctactttagttcccttactctaccatgctagatgatgcacatcctgatntcggctaggattattaattattcatcaaatatattagaattatattatatgtcattatttacagtgaagtaaatgtagacataaacttctaatataaacatggctgattaagtttataaatctcat

SEQ ID NO: 21228 - DNA, 494 bp, Oryza sativa
  unsure (1)..(494): unsure at all n locations
agctntactggttgacacctttttagatgcattttaccaactcctaanaaggtgagtaactgcgggatanaaggattntaagggatggggcacttgatcacgcgcactttggcccaagcaaaaagtgcctaagtccctaaaagaacgtgacaagccacacctgaaaatatgggctgcagacatattangcctaggccaaaaaatatgccttcggcaccctttaaaggatgacgcatgtaacatgctcccgagtaataaatcttccgggtgatatagaccaagtgtagctcatatgaatagcttctgattngagtgattatcccttatgggatactccaaaatagaatataaaattgaatcctgactggcgcaagtattcggntgatagcccttaccggcgaataatgaatagtccagtcgtgagcataagaaatcgactcatgaccaaattgaagacataatcctcgcgcttgtgtcgatgagcccctaagcat

SEQ ID NO: 21229 - DNA, 220 bp, Oryza sativa
tatcgcggactggaccattcccgatgatggctaagtcgaccgaacggacaatgagcgatggacaatggccttcgatggaagtttcaacaggagctggattcatcctaacttctccgaccgtagatcatgttagacacgtcgtacaactagatttccgagcaaccaacaatactactgagtacagaggacttctagcacgtttgagagcaattgcatcact

SEQ ID NO: 21230 - DNA, 374 bp, Oryza sativa
  unsure (1)..(374): unsure at all n locations
agctngcaatttccacccaacgttcgtactccatcaaagcatgaatgaactatatggtcggttcaagttgcgttatcggcccgccactggaagtaactctgactgtgtcaatccattgtacaaattgacatttccttgcatcctnctatgtacatccattgtggggatagttaagttaatgatagtactgaggagtgatgaaaagaatagttgtaattaccacgaaatcatcgtcgacaatgtttggacacacganacacctttgtcctcgagttcggtgccttacggaccttatgacctgacaacggtcaccacaacgacactccggacgctcacggcacgtggagagtcctatgggatntacctgccattct

SEQ ID NO: 21231 - DNA, 266 bp, Oryza sativa
  unsure (1)..(266): unsure at all n locations
ctcagcttacgctgctgagagacagantaagctctcgcaatatacctgtgagagatagattatataatagcaacaccggctggtgcatctatttactacaatctcgtgcatactctagtaccaacaaatctcatactctacaaatacgggtgtcgggtcccgtcgacacgtaccatatgtcccttactcattctgagagtttcggaatattgcacgacttcatagatagtggtctgaacgaggtactagagcttgggacaatgaag

SEQ ID NO: 21232 - DNA, 384 bp, Oryza sativa
  unsure (1)..(384): unsure at all n locations
aaaacgggtggttctagcgatattgtaatatgtgtacctntacgctntgccgagatgtaaggcgccaatttaggattccatctcttactaccatgaccaaaatgacctcccgcttctatcatctctttcaaattgatgttccaatatcttcttgcatctttccacacttcctttgatttttctttttttcatcctaccttcattacgaaattctttcttttcgaagaataagaaagagccgaaatagcttgaaataaataataattgctccgatggaaccttctacatggtatacgcataaccttaatgaattaactanacttctttttaattaacataataatagaaaatctaacctcttagcgttctacggtcaaaaatcta

SEQ ID NO: 21233 - DNA, 132 bp, Oryza sativa
  unsure (1)..(132): unsure at all n locations
atctacgagaagatcgtgtatntacaactacaacggaatagtatacaaagtcaacacanatcattaaatggatttatggctacactanaccgttgaagatagttctagacctggaccaagacagactcgcgt

SEQ ID NO: 21234 - DNA, 438 bp, Oryza sativa
  unsure (1)..(438): unsure at all n locations
cagcctacacatangagactctcaagcatgtctgtgtttttatgacccaaaccagaacgtgtgacctaactgaggcccttgcttacttcgcgaataagatacattctgggtgtcacatccgattgttgaccggatatcataacggcttttctgacacgaatgataaaaataatttcataactcaccgtccttagcatatgtgggttactgaagcacttatggctaatcatgtactaattatgctcacaagattcgtctcgcgattttcccctaactgtgcaattaggtttttcatttatctatatttaatgcttcatgcatgtgtccaaagattcgatgtgatggttttgggaataatttttggggaactatacggtgcctgagacacacgacgttcttcatcaactttttgtcagcgtcgttaggcactcaagcaag

SEQ ID NO: 21235 - DNA, 248 bp, Oryza sativa
  unsure (1)..(248): unsure at all n locations
agttcttctcgtatggctggtnntcgatctgngcaaatctccgcagtttttgtttactggctnnggcatcggtcgcaccatgagtntgtgctcaatcacctncttgggtacccccagcatgtcggacggctgccaagcgaacacgtcagcattgtcgcggaggaaagtgatgagcgcgagttcctatttctcgcctagtgatgccccgatcttgacggtcttgtcggngttggcattggagagtggaa

SEQ ID NO: 21236 - DNA, 460 bp, Oryza sativa
  unsure (1)..(460): unsure at all n locations
ctctgagtcacctgcngcatgcaagcttgatcgctgtaataggaacttataagcagatttctgttagttatgaatgtggaaatggcatgcaacgatgaacatcctacttgtgattatgccatgccttgattattggttatccttacatctttgtaaccatgtntacgtattagtccctagtcaactatgacaattgcttagaaatgctattctagaatcatgcatactcatatttatcaaatgctatatgcttgggcaattacctttgggaaggtaattgagatgcggcatgtggagacatgagcgccacattgccatgatgttgatgacatgatttgtgaaaagagaaataaaattaaacaactgttttcgacaggggcggacggaggatttgggtggtatctggaaaatgctagtaccgtcctagtcaattaatgaccgagccatgaagttaagcatg

SEQ ID NO: 21237 - DNA, 267 bp, Oryza sativa
agattccaatttatcattcacataactattatattagaatccatcacactttatataaacactcctaaaacgtcacgtagtacatttaacaacgcttctaaaccatcacttggaaccatataataagtcgcgccattggttttcctactaaaaaccgatgatcactattattattatagatgcataggtgaattgttaatatagcattctttgaccatgaaataatattggcatatctggccaaatggaaattcattttactatact

SEQ ID NO: 21238 - DNA, 203 bp, Oryza sativa
ggtctgcgagcccttaaacctctgttgtatcgctggcatccccagctgaactgtttatcttgcttctataaaagcacggccattggccttttctctaataaacttatgataggcagctgaccatggaacagtatgttggtcatggagattgttgcgtttttgttgcaaactatataacaggtgtgttgtttataatgcatcaa

SEQ ID NO: 21239 - DNA, 442 bp, Oryza sativa
  unsure (1)..(442): unsure at all n locations
ctgcagctgaatctaaacaatcatttattaaaattattcttaacgncgcaaagatgatctcatctcaaggacatgcattctaaggaaacacataacactgtatgtcaaacattatgtgttacataatgctaaattgcatttggtttgcattataagaatttataagcaccacaagagataaataggagataaaacaagaaacgtttaattcttttcaattccttaccataatagtatgttgacagaatgctgatacgctcaataagctgaanataaccaanaaaaaaatgttaatggttcatttcatcatttgtcatgtatgtaatacactttgacacgaagttcaagaatataatagaagtgataagattgcgtaagggttcaagtatttctaaagccatgcgtgttcagtgagcctgcttggacataacacacactaatg

SEQ ID NO: 21240 - DNA, 468 bp, Oryza sativa
  unsure (1)..(468): unsure at all n locations
catgcatgcttgacatgcatagggccacatacttatttattgtagttatattataataaatctaaatatccattagaaccatacatgtcacctagataaattatagacacattagatttttctcatgttcggtatataacaatttatgtgtcatatacaataaaaattttaaatcaccagatatcaagcttaaaatattatctttgtatatattataatttcttttcttaaagcttttttttacatatttctaaattnttccgctgcaacgcgcggtgtaatcgctacacccctggtttgactttctacttaatcaaactatgttaaacttgactagggttatagataatctagcaataatcaaattagttttattaaatttaatatggatatatatcgataatgtgtttgtctacgttaaaatactacagttgcaggaaacatagtacacgacttgaataacgagta

SEQ ID NO: 21241 - DNA, 262 bp, Oryza sativa
  unsure (1)..(262): unsure at all n locations
ctagcactctagtatctccatgtatgcttatctcatcaacccatcgaacatatagagctcagcattnatacatatagcaattatgcctatanaataatttattctaaaactaaacaaacacatgctaaatcatcattatcagatcattgtataatatttcaatctacatcatgttatcatttcttctatatgtaacatatattcgtagcaatagcacgggacatcatctagtattatttgcatgtgtgcgagggtttgaatt

SEQ ID NO: 21242 - DNA, 474 bp, Oryza sativa
  unsure (1)..(474): unsure at all n locations
gatccttnagtcacctgcggcatgcaagcttgtctagaagcaagtcaacgtattgttatattatgctacctaatcaaactgtgttgtactaccatctttntgcttgatggtcttgatgagaaaactgacatgattnttttgttctgtatttgtgcagatcgtctgcccaggaatgtggctctcggatgtgaccagatccaagtatatcgtccgcgagaagaagtccaccaagaaggtacatatactcctctatcgattttatccacatccactttctctgatttgcatcaagttagtaagtatttaaaaatcgataggttcagtaatactcctaactacttaanaatcgatagtactagtatttggcagtatcgtctgaaattgcgtaaaatttggtgaaaataaaaatataccgggaaagcctgagaaagcataaagcgaatgggcatgaaaaaagcgaaatggaaacgatcc

SEQ ID NO: 21243 - DNA, 489 bp, Oryza sativa
gctttgatggcacgtaatacacgatgcttagtctctgttgtatagtatgccatttgccatggacatgattttccttcaccaaattttctgtgtctgtaaagatagaaatcctatttgaaaggaaagaaattcaacacgcctctcggttgcagaacttgtacgaagacatgccaagtaagcagctaacttcaggtgtgatgttttatgttttgccacaaattaatccatgacatacattctaggaagtgatcaaaggtggaaccctttctgagactgaccagtactatacttacatcacctctaccaaattcaccactctgtagtcctgaaatcaagtggtaagccactatatgtgcttagaattgtgccgtagcttacagcctcacaacaatgctttatctactatctaactgtctgacgaataggcaacacacgatcgactattcttttagtgccacttctcattgtcatttgaatataacacatcta

SEQ ID NO: 21244 - DNA, 413 bp, Oryza sativa
  unsure (1)..(413): unsure at all n locations
agcttctaggataatgcgagtaaacttcgaattttgtattgtctngcacctaatacttcgaaagcaaacttatcctaggccttaatggctgacttgtcatttgcatagtatagaacagaaagccttctacagaacatgtttgagcttagaataacacctaaactgaaccggattaaacatggtcgatttatatagaagaaagagggtcgctacaaacaggaagctgctgatgtcaatcaataactgaccattacgaactgtgtccagcctgtgatttcaaattcctgtcatagctctaattacatgaagcacataaaccaggatacaggattgcgaatacaccatgctgctaagctaggcatgcataacacatgagcgatcttaagtattaaatagcagcacaactgagatac

SEQ ID NO: 21245 - DNA, 329 bp, Oryza sativa
  unsure (1)..(329): unsure at all n locations
gacatcttcacaaaggcgctcggaacccaagaacatcctggccggactangggaattggtagcgatgtggcctggaagcatggactcccgcagtacagctctcaatacaggaaatggaaagtcttcaaggaagagagggacgctcgtttgaaggccgaacttaaggttgaggtcatccaagaactataagctagcatgaacgctaaggtggaagataggggtaacaaggtcctcgccgacatgaatataccccgaggcacaacaccctgttgtgcatccaactcctcgtgcacaacacgacgcgagtccgtcacagcataagagtagtt

SEQ ID NO: 21246 - DNA, 182 bp, Oryza sativa
gcgataatggaattcatttcactacggacagccctcttccagtagtctgcatcaggagatgcatatgcttctgaaattgacttaagagtgtcatccacgaggtacacagtgaaatcatcaccaagagacttagccgtccttttgctcttacttcttcgaggagcttcactgacatcctcctc

SEQ ID NO: 21247 - DNA, 378 bp, Oryza sativa
  unsure (1)..(378): unsure at all n locations
agcttaatggataatatatcatttntnttaatttggcatgtcgcgtcacagcctgctcccgtcgccatcgcttcgtcctgctcttttctattgtttctttcgccttggatctcgtgtgcagtcggcgactaattagtcgccggctcataccctctctcctatcctggtcatcgataacgtcagcgtggatgcactatcgctagctaaaattttattgtacttgctctaagtagtatggaatatgatataatatatgactacttttaacgatgaatctatactagatagatagctagaattacgtataggagtaagggaaaaagaacttgaaaatgaattaatgattctgtatagcactctttctatagaacatgagag

SEQ ID NO: 21248 - DNA, 354 bp, Oryza sativa
tctcagctggctgtatttgggcaccatgcaatgataagaatttttttattgttgacaaacatataactatgtcaatggtaaagagtgttgcatcttgactccccctgctttgagatgacttcaagactgatgtgaaagaagcaaaggaaatcaatattctaaaacttgttcactagacacaaaccattgccccaaatgaatatgtgcggcgctttgtactttaaatatattgtgctaatgaccaatctgtgtagccatttgcagaccatacccttgctctgtttagtctatatctgcactgttacaccttgctgattgagtgttctgaaaactcaggtgaccgacaaaggacta

SEQ ID NO: 21249 - DNA, 474 bp, Oryza sativa
  unsure (1)..(474): unsure at all n locations
agctncaagctnngngntncagctcggcgacatctttatgtatgttgctacttgcttgcaagcagaaccagcatgtaaagccactcgcagcaccaacgtgtttcccagctttttctgccacacactcactacttacacacatctttgcgctccaaatgcatccctaaccaagtagagcatccaactataattgttcccagcaatcttcgccctggcgatttccagaagatgggatcactcaagatgactggacaaagctcctgtgcagcactgccagagttcttatgtgcctacctgcttcaagaactgaatgtgcacacattcctctctctcaaaacatctagctttgtagcatgacagctgaagattactttgcttaatcatactccaaacgacttcagatgatatgggatgaagttggcaagaagaacatgaagagagagatacttcagagatagagcagatgcccgaagt

SEQ ID NO: 21250 - DNA, 452 bp, Oryza sativa
  unsure (1)..(452): unsure at all n locations
ctgcagcttcttgaaatatcttgaagattgtctgtttcttcaatgaccggagaaggcaacttattgtgtgcagcaacttgctgtgctctgttggcaatagctttggcattgactggagcaacttggttattaacaaggcttgttctgttgatcatagcttttatatttaatggaccagctgagtggttgacttggtgagttctgttgggtatagcttctgcagtgactggaaaagccgacagattgacttggcttgatccgctggcaatagcatcagtagtgactggagcaacaagcagatcagcttggtttgttccatacgcaatagcttctgtaatgatatcattggaattattntngtatcaagctgcagctgctgtgcaagttcagctgactgacaattgtcatttgtagtancaggaccaattnttgatgaagcaatgacagaactc

SEQ ID NO: 21251 - DNA, 242 bp, Oryza sativa
  unsure (1)..(242): unsure at all n locations
gcttcagtcctacaagctggtttgtcctcatctctatgtagcacattcttagcccgtacatctttagtgctggtgcatccaatgtgtaacagtctatttggaaattctgtattatcttggtcatcttgatgatgcgtcgcacctgcacgtctgtanatcaaatttaaaaccactatctctgattgttcttctccaagagctgcgtggagaaaaatggttagtttttacttcatctgtggaat

SEQ ID NO: 21252 - DNA, 422 bp, Oryza sativa
  unsure (1)..(422): unsure at all n locations
ggcttagagggttgtttattgagctttgtggagttacgtcttgcattaatatattttgtgatagtcaaagtgcaatatgccttacataggatcagatgttccatgagagaacaaagcacattgatgtgagatatcattttattcgaggtgtgattgctgaaggtgattgtcaagtatgcaagataagtactcatgataacctagctgatatgatgacaaagccagntcctgctactaagtttgagctttgctcaagcttggttggtgttacagtatagtcctagagactatttggcgcgcggtgattntacctatatgaggtatntnttggtgattgatgtctctatgctacaagaggaaattcgtctcaaggtggagattgttaatatgtgatccgtatttggacccacatatattccgat

SEQ ID NO: 21253 - DNA, 398 bp, Oryza sativa
  unsure (1)..(398): unsure at all n locations
cttcctgcagaagcgttgctggcatttgtgatttctgtagttgattctactgataaaaagtgtggatcatgcaatttattgataggggcaatgtttgctggttgaaaaaatgagatgtgatctcttaattgtgatcgttcgggattaccatttaaacagataatatgctttcagaaaggagatcaggtaggttacatcaaaggaattattctcttgccatgaaaatgggaattaaaatgaacgtagaatattgtgtgttcagctggtagaaaatgctaccagataactaatgaaacagatacagtagagtttcaagagctattagtgtaagagtaattgatattgtgcaagaaactcgattatctctgatgaatttanaatagaattttaaagcacct

SEQ ID NO: 21254 - DNA, 224 bp, Oryza sativa
  unsure (1)..(224): unsure at all n locations
aaacgcccggctgcggagagaattaaatctttctttttctggagcatagatcgatgaatgcacacgcttctcatcgagctgagtgctcacatacgcggnctcatctttccacttatgcttatgtcattcctaactcaagacattgacatagcttccatatatgtcacgtcatcgaaaaaaactggtactatacactactcttccaatgcaaacactacgggatt

SEQ ID NO: 21255 - DNA, 406 bp, Oryza sativa
  unsure (1)..(406): unsure at all n locations
gcttctggttgcccttactctgntatgatgtatatacggnngtaatataagagcagagagactggtgtgccctttgcatttctttgtgtggatgtactggttttgccccgatatatgatgtggacattaactttgagattgtatggcaactccacacaaatcaatttattgccagttattttcaggaacattgtcagtgcatatattcatcatcacgaagggaaaaagaaaggagaacgcaaccaattgtccaaacaaatctattacctagctntttcatgaacaaagagattgcacacatcaaanaggagaaagaacagagagcccaagcaaaaaataatccncagatccatctaacagagcctcaatgattcatcgcagttgcttgccggttgattcaatcaac

SEQ ID NO: 21256 - DNA, 203 bp, Oryza sativa
  unsure (1)..(203): unsure at all n locations
gcgaccaattcttcgtgtctatattcntatggtaaacgcggcgatgataacgtcgtccgcgatgtctgagatcttgttacgttgttcaaaaaatcgccggatgtaatctcgaatggatttctctgacttctgaataacgttgtagaggtcgtattgtgtgccgggacgctcgaaggtaccttggaagttggcgatgaaatggt

SEQ ID NO: 21257 - DNA, 92 bp, Oryza sativa
  unsure (1)..(92): unsure at all n locations
gaggaactccanatcaattgataatatgntttttgacanagctgaatgcatccncagaatcaactttcttcanaggaattacctcaacccac

SEQ ID NO: 21258 - DNA, 490 bp, Oryza sativa
  unsure (1)..(490): unsure at all n locations
agctttngccatgcatgggacatgtcacaagcatacctcatgcagaccgggcaagagaatctggcgaaatgtcacagattgacaccatagtcagcaatcagttgggagaggccatggtgtaagtcttatctgtgattacttactgttgatgggatctcatctcgtataggcattccagatggatcgtgtgtccgcagtgcagtgcactgatgtcttttgttgagtcaaatagatactagcacagaaacaaataagggaatntattttagtagaatacagaaaatttcagagtccatggtttctctgacaacaaatatttacctcgaagcatacagggcagttatggtgcattgctctttccacacaatgatgggaatncttcagcacatagctgtagcagcattctgataaccacaatanttgtcaatgcanatatttactaataccanaatctgaaattgatgaaatcactcgaccctaacataccgat

SEQ ID NO: 21259 - DNA, 243 bp, Oryza sativa
aacactgtgacagacacggatatattgttatatttattactccctctgtcccacaaagactgtaaccttggctatgaaactagagaagcatgtccagattcatattgaacaatgaagtcttcttgggacgaatgtagttgtacctaagtatctgctctttcttttcacataacagctatggtgccaaaaataactgcattgcatgaagcacttgccaaatctattggacttctatcatttgat

SEQ ID NO: 21260 - DNA, 264 bp, Oryza sativa
  unsure (1)..(264): unsure at all n locations
tacattctcagancacgacattagactatttgacatgtatgcttctagcattcaaataacagtaaataataataaagcctatgtcgaatctgcacaataatataacccaaacgagtagtctgataaaatagaacggacaatttacttcgctaattaatgtgttctccttggatagaggttccctatgacaaggtggattgattgctcttcggtttcgcaaccaaaagttatactttagactttaatcttagagcttactttgac

SEQ ID NO: 21261 - DNA, 350 bp, Oryza sativa
tgcatacatacaagtggcttaggtgaaactaatcggcgggtgaaactcgtgctatttctaacccccgccgagttagtccgttcttgctccattgtgcagaatgaagaggcgactgtctcgtctgttcaaggagtccggctcttcgtcaagtcatcatgacgagtctagtgctcgttcatcagccgatgtctcgatggaggatgccgacgctccgcgacgtctcctgaacgacaccgacctcgaccttgtcgatgatcatgaaagacaagcttactacatgctgagtgaccgggagtatgctcacacgcgaaagtactcaccagagctgctgaaaagatacgtctgatgtg

SEQ ID NO: 21262 - DNA, 453 bp, Oryza sativa
  unsure (1)..(453): unsure at all n locations
angctcaatnttatgcgcactgacgataacgtattattaagatagttcggctcgacgagaggagagatgaataaggagtagggaggcagcgcgctccatgggagaggaaaccaagaagcaataagtgagttaagttaatatggcggtgtctaccaactataaacagatacccgaataatgctancgctcaattntatagggtgccgaggacaatacagatgaaaaatagcggcaccggtagataagtggatgggcgacataggagtagggaaacgacgatttgccatggaagagcgagccgacgggtggcaaatggcaacacagagagggagcaacaggtggactgtataggagcagatctataatatgttaaacaagacctcattacagctagattcaatttaagaatccattgtcatatagagaagtgcgggggcagcataaagcgttggt

SEQ ID NO: 21263 - DNA, 187 bp, Oryza sativa
gcgagtgtggacgatgatggccgactcaaccttcagcagcagcagcaacatggtagctatgtgcgccaataacatcgcaacagtatcatcggcgacaacgagatgcagatgacaccggtgacagatagcatcaagtgcgagtgatttgaatggcaccattccatgcgatagaaccttaccgcccacg

SEQ ID NO: 21264 - DNA, 392 bp, Oryza sativa
ctgcagcatgcagcttctcgggttctgggtctctgaccgaagcattattttcaccccgagaagatacgagctatagagcggatgcgccccaccagcaagcttatggatgtgcagtgcatcaccggctgcatggccgccctaagtcggttcatatcgaggctgggagagaaggcactacccttatttaagctcctcaaacgctccgggccgattacctggacggaggaggctgagcgagccttcactcagttgaggcgtacatcagttcttccccggctctggtcgtcccgaagccagatgagccgttgctactatacctgacggcaaccccgcaagtaggcagcgcgtgattggtcgtggagcgcgacaaggacaatcctcactccgcgcat

SEQ ID NO: 21265 - DNA, 198 bp, Oryza sativa
tcccgtgtggatacattctcctaaccttatgagtcccctaatattaatactggatttcttgattgcttattcatgcatgacaatatcagaaatcgtattcatcattgccaatcataagcagaactgcatagatgccggtcatatagctacaggtactatcatgacactcatgattcctatgttgcatagtaatgaaag

SEQ ID NO: 21266 - DNA, 388 bp, Oryza sativa
tgaggctgcagcttgttcaggtgtgcaagttacatgtattgttgtcttctctccagcgacagggatgtgttaatatggagtacttaatctttgggttgtcgatagatcgacatgcatgcttggatttaaaaggattgtggtctttaattcatctttagaaatgagaacaaaatttgatacacagaacaacagttaaattgcccaaatcccattcattcgaatgtgcgagatataagcgatctagccacctcaaagtgggttaccagagtaactacttcatgctatgattacccgcatcttggaggagatactgacactaacaggtgctggtggattattatatatgtctatttgccattttttgaaaatgctccaccattatgtgact

SEQ ID NO: 21267 - DNA, 545 bp, Oryza sativa
  unsure (1)..(545): unsure at all n locations
gatccttgagtcacctgangcgtgcaagcttggtagctgataaaccaagaagagaggaggtaatttgttgatttctaaactatatgggatctatgcccaataaggacagcgagctggaggtaatggataagatattgtctttgagttacaatgatctacctcaccatatgaaaaactgcttcctgtacctcggtacttttccagaggatcatgacatcggtaaagatattttggtatggaaatggatagctgaaggggtcattgttgcaaagcaaggttttactttggaggaaattgcagaaagttacttttatgagctgataaataggagtttggttcaacctgtaaatatgcttcatggngtaagtgagcatggatgccgagtccatgatatagtactcagtttcatcatctctcggtcaactgaagaanatattttcacgatgttggacgatcagganactccatcttcannagacanggatcgacgtctctctatttggaacaagcaacaatatcctacgttcatatcacaagaaagcatg

SEQ ID NO: 21268 - DNA, 488 bp, Oryza sativa
  unsure (1)..(488): unsure at all n locations
atctctaagcacctgngctgcagcttttatgcttctgttgtgctaactgcttttctattcattgtagcacttaacaatgttcattcttgttgtgcagggttgacaagaacgctgatggaatgctcacagcagaagaggttaaggaggtaagtcataaaacacaaaaccgaataaaaatataacaatttctatatgttctgtgtttaaatggtattaaatggatgattatgcttttgcagattattgcccttagtgcatcagcaaacaaactttccaagatcaaggagcgagctgatgagtacacagcactcattatggaagagcttgaccctacaaacttgggatacatcgaggtttgtccaattccaagcatcaaagtaatattgtgcacaacctatgacctaaccgcattaataatttngacagatggaggacttggaagcactattgcttcagtcaccatctgaagctgctgcaagatcaacaac

SEQ ID NO: 21269 - DNA, 209 bp, Oryza sativa
  unsure (1)..(209): unsure at all n locations
cgcatagatcagattgtcgactccactgcggngtgcgaccttntgtgttntctagatgcatactctggttaccatcagattcgcatggctagggaggatgaggaanaaactgcattcattacccccataggaacttattgntatacgacaatgcccttcgggttaaagaatgcangtcctacttttcaacgcactactcgaatntcttt

SEQ ID NO: 21270 - DNA, 220 bp, Oryza sativa
  unsure (1)..(220): unsure at all n locations
gtatgctcccaatgtgttctnatgatatactaatactancctttccataatgtgttgcatgtgatcaagagacatacttcccatgatcgattacaaagtgaanaagaagtcgatctcgaattggatatgaggaaagcatgggcagaagctttcctgaaactgcacaactctgtgagggaatcaaagcttacttactaacacacctggtacataagtgttg

SEQ ID NO: 21271 - DNA, 346 bp, Oryza sativa
  unsure (1)..(346): unsure at all n locations
accaggaacgggctccagaagaactccatcgagcagttgtagtcctgtgcatgtttgagtcacatatgtaatcagaactttatatagggcctgcttgtcattcgatgtacggattgataactatacgaacactggttagttgataccatagcccaaagtttttctttcaaactttcaactttccatcacatcaaatctttcatacacacacaacttttcagtcacatcgtctctaattttaaccaaattctaaactttgggccgaactanacacagcctatctcaaatatatagcttttaaattgccacctaanagttagggccagtttggtttggtgtatactaa

SEQ ID NO: 21272 - DNA, 292 bp, Oryza sativa
  unsure (1)..(292): unsure at all n locations
tactcctgcttatatgaacatataatttggcagttcttcttgccggttagtttcaaacaatagtattatagtacgctctaagccaactataagcttatgtggaggaaagagaaattgacaaaggagaggattggtctttatgcaagagctagctattcacatactntaagatagatacattaaatacatacgtgagagattgtgagaggagaagaaaaacagagaaaccttatgcccatttacttacatgtaactctatatagctatagctcatagtggcttctataaactg

SEQ ID NO: 21273 - DNA, 431 bp, Oryza sativa
  unsure (1)..(431): unsure at all n locations
agcctataatgaggaacttggattgatttctgttatgccatccgataagaccacaatgcttcggctaaacgagtatgccatcgccaagggtaatcacaaatcttccttttaatcaacttaatcaagcttttgctagatgcctcagcttgcccatcagcttgtgcataatacggagaagatatcaagaatttaatacccctgctatcggacaatagaacaaactcatcggacccaaatatggaancttgatcagttgttatattctgacgaataccaaatcggtagatgatatgttcttgaacaaattgtatcgcatacccagaatcaaccttcttcacaggaatcgcctctacccacttggtgaattaatcggtcgccaccagtataaacttatgtcccttacttgatgcgggataatcataccgatcata

SEQ ID NO: 21274 - DNA, 245 bp, Oryza sativa
  unsure (1)..(245): unsure at all n locations
ggacatggcggtgtgacatanatgatgctattgttattctaagcacttaaggcacatctgtatgtctgctactaacacaagcacattgaattaattgtttaaactcttccacctggagggcctctaactacttgagatataacgagaataacatgcgagccgcagtgatttatgctatctagctaactcgcagaaactggatcttccacaacctgcattattcagagtccctcatattggaagac

SEQ ID NO: 21275 - DNA, 359 bp, Oryza sativa
  unsure (1)..(359): unsure at all n locations
tgcaagcttaaatctacataatantatttaactgtaaaaggaaaagaaaaatctcaagcgtcaatctatggttgtatctaacgtctgcgattatatacagccgaatgcaaggtaacaccagcgtagattcatatccaattgattgttgcaatnttttgaagtattatccaaaaaaaagtaaccatacggagggtatgcaaatagaatgctcaattccctcnaaaaaanaaaagatggtcatcaaatgttnntgttgaccattctcaagttatttgataatattaacaaacaatttctatgaaatttaacatatatcccatcgcaaaacacggagcaccattnttttttatgaaaaatgc

SEQ ID NO: 21276 - DNA, 426 bp, Oryza sativa
  unsure (1)..(426): unsure at all n locations
ggatccttaagtcacctgcggcatgcaagctggcatcgaaagagagaatataagggatatccttaattaatcctcttttgatgcatgacaccgggaacggggagatcgaagggtcacgttacctggatgctgcagaagcgcgggtggcgcgcgagggtggcctcgatgccggcgcggacggcgggcaggtcgaccggctcggcgacgcccaacgtgcacacgatgtagcagctgaagtgcggctcccggaacagccgccccgccgggctcaccggctcctccagcaacttctcctcctcctccgccaccgccgacgccttcttcttcgtctcgctcatccccgtctcccccgcgggctccgcgttgtcaatcgacagcaccggcctccgcagcctgatgccgncgagatgatccatatcgcttcag

SEQ ID NO: 21277 - DNA, 65 bp, Oryza sativa
gaaagaaggcagagccgagaaccaaccaaccgaaacgaaccccaacaaccagaaaagcacccgac

SEQ ID NO: 21278 - DNA, 449 bp, Oryza sativa
  unsure (1)..(449): unsure at all n locations
cttaagtcacctgcngcatgcaagcttggttactntatntacttaccttttactttgattttctaactttattcaaattaatccagaaacttgcgctattaattggataaatgtcttaactncctcctttcacttgtctttagatgccgcgctacaagcctgagacttgttggtgtgagggattgtccaagagttgcgtacgatgtcctttgccataagatttgggactggccctttgtatgcctagattcctcatgatcgtcacgaagagaagtgccgagtcaaagtcaccttgaacagtaatagtgaagatatcccatcagtgatgttcgaagctggaggaggaaactacatccatgcatgtcaggaggtggcaaggattgccatatgagagctccgcgatcgctacagtgattagttggccgacactgagtatcgctaccattctc

SEQ ID NO: 21279 - DNA, 261 bp, Oryza sativa
  unsure (1)..(261): unsure at all n locations
agcttgagccgntcaacccggagtacgaggactcgtctgttctgtggacggacagcaaggacgtcggcatgggcttccgctgcatccgcatggtcaacaacacccgccttcacttggacgccttccacggcgacaaggaccacggcggcgtccgcgacagcaccaccgtcgtgctctgggagtggtgaagggcgtacaccagagcttggagatcctccactgtggcctctaggcttactcctattccccggcgccgcaccg

SEQ ID NO: 21280 - DNA, 312 bp, Oryza sativa
  unsure (1)..(312): unsure at all n locations
agcttgccatacggccatacctgattaatatacactcnctgccctacgtggtttactagtatcnagnnttttttagaaaatggattaatacccgacctctacatctaaactagtatcagttagccacttagccagcggtcagaggacgaagaactattcagagtcctacattgtacgttcagttcctttcagaaaaaagaaaggagagaagagagtactacgttgagaataatagtataggagacaccagtctcaaagctttattaaaagggaaggttggtacgtgtgtctctaactatcaactagtgcatt

SEQ ID NO: 21281 - DNA, 251 bp, Oryza sativa
  unsure (1)..(251): unsure at all n locations
ttcttctctcttgtcagatacagccactggttctttcctcttcccagatacagagactatttctgccctctcagattcactctctgtgtcttccctggtttcagagtcactatctggtgcttccctctttacagatgcagactcttcactcttcatacctgaactaccttctagtgccatgtgcttggtcaccatcacatatggctcttaagcangagcagaatattcacgactcacaacaatggcgtctt

SEQ ID NO: 21282 - DNA, 311 bp, Oryza sativa
gcactatctaaatcacagccaaaatgatccattcatcagaacactggagatccgcctaaaagttgctggcgaatctgctgaagcattatcatatctacactcactggaccaccctatcttacatggcgatgtcaagtcgatgaacatactgcttagaacaattttattgcatagatttctgattctgggtgctccaaaattagggcagctgatggacacgatgacgtggtgaaaggtacgattggctatctagatccagagtacctgctgaagttcgagctcactgacaagagtgacgtgtacagctctgg

SEQ ID NO: 21283 - DNA, 269 bp, Oryza sativa
  unsure (1)..(269): unsure at all n locations
aacacctagtccggactgctgatacgaaagactcattctttctctatataaatatatatagnnnctccgccctgaangtgaagatgaggtgaagtgaagaatanggtttcgtcctggttcccagccgtcgcctgtggtgttgggtggtagacccgtggttccgctgctgctgccgttgttggtgttcgcctcgtccgtgtcgtcggttgtattctcgggctgtctgagctgcaacctaagctaaggtaaataagtcctctatttatttt

SEQ ID NO: 21284 - DNA, 373 bp, Oryza sativa
  unsure (1)..(373): unsure at all n locations
tgcggcatgcaagctgatgacactgcaaggtgcaaatgggtgttatgccatgcttcctctgcctgcactccacatgtatacaatctatgatcactctaagagtntgtgcttgtcctgagtgtactggtaccctaaattttgatccagtcagcgcacccaaatggcggctttactgcaatagatgaaactgcattgtcctgctccaacatgccgctcataagatcagtactacagataagaagtgcccaacatgtgaatctactatcatcgaagctgattgtaacaagaaaactaccccacttaaggatggagctactctgcatgagggttcatcttgtgcgataagctgtgcatttcctattgagatgaacat

SEQ ID NO: 21285 - DNA, 128 bp, Oryza sativa
  unsure (1)..(128): unsure at all n locations
tcaccctcgtaatcaagaagaaccaatgcccctctttctgccaagaaccttgcacggttggtcagctgacaagcctcatattgagaacgaagcgaanattcaacgcgtgagaatcatctataatctaa

SEQ ID NO: 21286 - DNA, 483 bp, Oryza sativa
  unsure (1)..(483): unsure at all n locations
ggatcttagagcaccgcngctgcaagctgtcactttagtgtgatcgccttgggtacatgataatgatgctacacagcatggtatgagttataaatacaantttgtgcataatgaaaagaaaattactttgctacctttgacccttgctgaaatagtagaagctgataaagaacgagctgctagtttgaaacttgatgaatctgaaaatcagctagttgctaaatctgttttcccacctaaaaaggataagctttcaccaagctctaaggttgagggaattaaattgaagggtggcgttatgcttgcaacanaatgtgacattgctgaaatttcagatgatgatatttgctattccttactatgcaaacaagttntggtttctctagatgatattgctagttcgataccttctgctggtatataacctttgaggagtatgacgattgtctttcagctaagaatacccggtatcgccacctatga

SEQ ID NO: 21287 - DNA, 463 bp, Oryza sativa
  unsure (1)..(463): unsure at all n locations
agcttaccaagttcagaaatgtttttttttttatatataattcagatgaaattaatgtctatgcactattggtacatatgatgaacaaggatgcgacttacatacgtacgtacctccggtgagcatggcgatgtgcagcaatgtgaggaggacgaacaaggacagaagcagtagcaacgagatcgagcagcaatgtcgccgccgccgccgcttcatcccttcctcctttctcatttgctccatgcatctatgatctatctctgccttctaattagtttttgacattatgaaattgttcgatgggttaatttacagaccanatgcatgacctgcacatggcactggcactggcaaaagagacgttgcattgttctgtcaaaaaaacaaaaaaaaaaggaacanacagaattgttggttatacataacaacacgtgtgattgtgtgatccttgatgacacggatc

SEQ ID NO: 21288 - DNA, 298 bp, Oryza sativa
  unsure (1)..(298): unsure at all n locations
ctaagctttctttctgaatttggaattacagcatatggtagctgcaccacttcttatatatggaaaggaccanangacgggccagtaaacagaaattttgcgtagtacactactggtagtaacagacatggaaggatcacatggttgacagacattgactaattgtagtaacagagatttgctcctttttatagcagcctcaatattctctgcagtgttatatatcagcatcataatgtaagctactatgtgattctgagacggcaatactaatgtgtaattagatcatgccataaag

SEQ ID NO: 21289 - DNA, 396 bp, Oryza sativa
  unsure (1)..(396): unsure at all n locations
agcttctaatattcaccactcctatatgtctgtatatacacgaacttcctattaaactgtcgttctacaagatgttggaaacttgtgaagactgagaaaacatcagacttattcttgagaagatagatccaagtaaatttactaaaatcatcaataaagcttacataatacttgaatctccctactgattgaggtgcaggaccccaaacatctgagaacactagatctaaaggagcagatgaccgactagtagaattaggaaaaggtaattgatgactcttagctggttgacaagcatcacacaccacatctctatgaggctcactaacagtaacattgttntctctaagaatntcgctgacaatattaataagaaggatgacctaaacgactatg

SEQ ID NO: 21290 - DNA, 162 bp, Oryza sativa
  unsure (1)..(162): unsure at all n locations
ccaaaaccacgggggccacgggncgggaggcacgtataaagaggaggcgagggggccgaccccgccaaaacaaagcacacaaaccacacgagacaaagcacagcaaaacttcaccagaaagaccacaaacgaccgcgcaaactacgagaagcccacaacaag

SEQ ID NO: 21291 - DNA, 305 bp, Oryza sativa
actatcgagaatcgatgtacaaaatactatcttcgaataataaaacatgagtattctacatgaatatgttctcgaaacaattcgactcataacgtgaggatttatgaaacaaatcacaataactaaggctttatgtaacggatacccccaaaccttaggttttgtgaaattactctcttaattaatctcgattgtattctagatagaccttagttcacgaattcatatgttttcttccgaatatatgttatctttacactattgctcccacttaactctatctattactctctctctgtctctct

SEQ ID NO: 21292 - DNA, 404 bp, Oryza sativa
  unsure (1)..(404): unsure at all n locations
gcatgcaagcctgnatatgtgataaagaaatttccaaagtattgtgcatacgccctgcgcacactggtttaacagatgtgcttaagtccctagaagacacatggtttaccaccctggaatattggatatgggtgtaaatccgactatataaactcataaaggaattaccaaccgcctagaaaatgaccacaatatataattagcctaagccataataattggtcaataacaaatgcacacttacgtggcgaaaagcatgatattgtatccaatcaattgcttaaaaacccaaacagcatcttgacttatatatataaaagacagcgggacagctatataaagccttactgtttgacaccttttaagaatcattgtaccatctcctacaaagttaagtaactgcg

SEQ ID NO: 21293 - DNA, 360 bp, Oryza sativa
agcttaatctacacaccatctttccttatgatgctgtcttgtaggaatcaatacgactgacaaaggttggctccatacttaaaatacaggaaccgcttattctttttagataataagatttagttccactttcgcagaagaatttatgttcaaaacccatgttactggattcttcggacactacgttttaaattgcgataactgattaaaagtgcttactttgtcttgacacgcaataggatcgcatgtcattgccttaagacacatgcaagggtgtgcataacacacaaacaccgtacacctgccaaggattgtggggattgaaggattcacaccataaggtctatttcaagaatgatc

SEQ ID NO: 21294 - DNA, 390 bp, Oryza sativa
  unsure (1)..(390): unsure at all n locations
agcttaatctacaaantatctatcctctntgtttgctgaactngnaagaatcaatttgacttacaaaggtttgctccatactttaaatacaggaaccgattattctttcaaataataagattatagttttcactttgcagcaagaaattatatccaaaacccatgttactggattcttcggccactacgttttaaattgcgataactaattaaaaggtgcttacttttttttgacacgcaataggatcgcatgtcattcccttaagacaaaagcaagggtttgcataacgcagaaacaccgagcacctgccagggattggggggattgaaggattaacaccaaaaggtctattacaagaatgatccccacaggaaaaggaaggaaggaag

SEQ ID NO: 21295 - DNA, 430 bp, Oryza sativa
  unsure (1)..(430): unsure at all n locations
agcttgccaaaacaaagcaacttcgacttagcattttctttgtngtcatctccgagctcatcacataaagatcaagtagctccgacttttcatggcgaacttcagtcaaagccaccatattgccgcttcctacacatgtctagcaccaacacctagaaaaagggaccatgtcatcgccacttcctgcacacggntgataaggaatatatcccttagctttgaaaaacaagcagcagcatttccctctattttcaatacataacaaaatttacatatcttgtagggtcttactctttaagaaatgcatgaattgtagattacttcgtagctacaataacatctactgcatgttggtccaaagtccaaaacagaacactttgatccttatgggaaatgcacagatgaaagccttcaatttagctaagctagt

SEQ ID NO: 21296 - DNA, 310 bp, Oryza sativa
  unsure (1)..(310): unsure at all n locations
tcagctcaagacggaaccacnatatatccacctgaccattaatggacttgcttctgtgctttacttatatagtggatggcaactattaattatatggaccacaaactgtatcacgccacaaggtggtgntatgtgtaataccttatctgattactcataagattttcagatttgcacccttctaatctacaagaagaatcaaatgcctttgttctcatatctggataatataattgcctctcttcatatataacacgtgagagttctccctgccatttcctttacattagaatcaatcgtccatggtcca

SEQ ID NO: 21297 - DNA, 357 bp, Oryza sativa
  unsure (1)..(357): unsure at all n locations
gaccttaaatcgactgcagcatgcaagcttggaaaggggtacaaggaaagagagcctatcantgtttgctaccaaactagggacaaaatactgtgattgacatggacaaaacggcacacgagacacaactgagtgtgacccccagaacaagacccatcatcatcatcagggttttacttttcttaaacctcgccaagaaaacaacaaatcgcagcccgatttctacccataatcatggcaaaaggaggtgggagaagaaaaacgcgagaagcaaagattgcggcatctcgaccgcgtgaggaggccaagacacacacacacacggtgtgacacatcgcaattcatcaccataccctg

SEQ ID NO: 21298 - DNA, 196 bp, Oryza sativa
gcgacccaaataaactactaccccgaacattgaacagacacaagtcgacaccagaggaaaccgcaatcgcagaaagaacagcggcaagccaaaccaatccgacacacaatgaccctgagaagaacaaaccgtaagtggggacgggttcaactgaatccaatattttgaaacaactgtacaaacagccctcatgcag

SEQ ID NO: 21299 - DNA, 438 bp, Oryza sativa
gctttagccccattatccgatgatgagaagaaaattcttgaagatatctctcatcggctagaggcatcatcgttagacagcttaatggttgattgtggctcaattaagactccgctacatgaggtttaagctctgatcccagatgagctagccgatgtccttactctagccgtctatgtcgaccaacattaattcaagctggagaaagccaagctgagactatccgaacgccaggagcgcaaaaatattgaagccacaatccaggccaatcagcaacttgttcatgaagagaaggccaaacttgatcagctatctgagggcccgatcaaatctaatattgatcggctcgaagctcaccacattgagctcttggcacaactcgaagaatgcaatgccgagctggatatggaacataaaaagctatgcgatctcccaaag

SEQ ID NO: 21300 - DNA, 432 bp, Oryza sativa
agcttccatgctggtctgctgaagtacatactgtagtctctaagtactactacagagtttctcaccgatcacttgctcagccgcctctaagcttcagcttaggtattcccaagctccgtatatcattggttgctttttaattgtgccgctgctctgctctaccattttctacagcgctagcagccgctgccaactcccctccggcctcccatctctctctcgtgcatggtgtccatcagtaaaaccatgtcagctcagcagcctttcaataattgaattaaaattttcaaaggctggacctttcatgaaaaatgaagcttaaagcttcaagttgctcttcagaagtgcccacgagaggctgttacgcagaattttttactttaatttgtgtacaaatatagaatcatagaagtggatttatgcatgtatgcg

SEQ ID NO: 21301 - DNA, 275 bp, Oryza sativa
  unsure (1)..(275): unsure at all n locations
caactaacactaatgagccacatcaacttataaaaataatgcctattacatctctctctctcttgattataaccatacatgcgtcatgtataactgaaattctacctaaatngcctaaactgtgggccatacttntaacactatttctaaataagtttatttgagccttcttgtaattaattctgagatacccacagcaacgcgtggcgtatcactattaaaaagatggccctatccgctacccattgcttgatattggcataacttatggagct

SEQ ID NO: 21302 - DNA, 433 bp, Oryza sativa
  unsure (1)..(433): unsure at all n locations
agcttcatgctcangggatacacttaggacatttttatagcaaatctcctgtgtattattatctaaagagaacgtcagtaatcatgttgtattctcttcatgctactttcccgtatgaaacaagcaaatgactgaattgtatgtgaaagcggaatgattcacgtatcacattggttgcttatagatgcaaatacatgtagcaaggctttagcagattcaactgcatggtttatggaaaacaaataccgatgggatcagaagacaggccaggatattgctttaattgcaggaaacagtaacctgttcttgtgcgattaattaaaccctgatagagaggacgataagatgattccacggctcattgttgcatatagccttacctggcttatctcgttgtcgttggattagatgtattttattcccttcgtgacac

SEQ ID NO: 21303 - DNA, 96 bp, Oryza sativa
  unsure (1)..(96): unsure at all n locations
catgcagctttacatacaggagcgagagaaagtttgatgntttaggggatcggagaccacatatgggaccgcccttggacgtgaccatagctctgc

SEQ ID NO: 21304 - DNA, 431 bp, Oryza sativa
  unsure (1)..(431): unsure at all n locations
agcttcccgtacatactccgtgcacaccaacattttttatcacaaaaaatttacaaaaaattggacgtttactcgtaatagtttgcacatatctgcaaagtctcatattcaaattcattgcgttttagccgtaacaaaaaagtggaaaatctgacagttttaagggtaaaaatctgtcagaattttgttgttatggctaagatataatacacttgaagataagatttcacataatactgttagaaatatgtgtacaattttttctagaatattctgtgacatttgctagttggtgtgcacggagtgtgcacaggaaacttttgtggataggatgttcccatganaaagaactctacatgttgtaagggctctgcataacaagggtattagaaatcttatcatttggttgagtgtcacaatattgcaagtga

SEQ ID NO: 21305 - DNA, 159 bp, Oryza sativa
cctgactcgtgccgcggcctctttgtcaaagaggtgacttcactacctctctctggtccatcaatcctttcactgccctgtgttcacatcgatcctctcacgtttcttctcgacaagactggttggatcacgttcactttcatgcacgaacggaatcac

SEQ ID NO: 21306 - DNA, 427 bp, Oryza sativa
agcttcttcgctgcaccatgatgcccgtgtgctttcttctgaccaacggagggttgactaccactagcctcctcctcctggttcccctccacatccctttacacgtgcccctgctggttcccctccgcattcctctccacgttaccttcctcgttcaagtactggattggatcctcgttcccctcttcttcattccagtactggctgcttccctccgcgatagtatcgtacaatatctgttcctcatcgcggtcagccatctgttgatacaagaaacatctgctatgtcacgagacatttatgttgtaacaatctaagtcatgtatgctaagagtaaatgtcgtacattagaaccctacacaaccttacgtgctaagtctaattacaaatcgtgatataagttaagtctaggtgaccgatattatac

SEQ ID NO: 21307 - DNA, 371 bp, Oryza sativa
  unsure (1)..(371): unsure at all n locations
gagacttatacccgggtgagctgtgtttactccaagaaacattaccaattaagctacactcaactattntattggtaatgacaacacanatagagaagtttgaatgtgagttggtgacagggtctcaagtctcatattgagttggtggttcaaatanaaattaaagtgtcatcttggatatgctgattctcgtaaacattgctttattgagtttagaatgccatactctctctgttcatattataagtcatgactttntcttaatccaaatctcatattggagtgagttatcgaaaaatagcaatatctattagttaatttaattagcattgatatatttgatatatgctcgtttgattaaaatatattat

SEQ ID NO: 21308 - DNA, 408 bp, Oryza sativa
  unsure (1)..(408): unsure at all n locations
agcttctgattggctttgaatgctagaaatccttatattttgttatggaggtaatagatgcttattgtaagattgaccattatgttttaatctgtaggatgactatgaatttaagttctcacttgttgagaagcgaacggtgtttgtcttctcaataaagtgaaagaccaagatttcagacgtacgcatatttcttacccactctctttgtctaatattgaaatggctatgtctggtttcttctgtcgtctcattaatagtttttgtattttcagcacactgcatggcatatgcctctgcagtgaatgctgatataacaagtaaggtcacaagcgtacttttatgagaagcaattcgtgatgcaaaatctgaaatatgcatgagaaactttcttgcanaaattgaagc

SEQ ID NO: 21309 - DNA, 417 bp, Oryza sativa
  unsure (1)..(417): unsure at all n locations
ccgcaagaaaacattggagtaatgtgttacataacgggcctgatatcacatctgataccaaaccgcggaagaatgccatatgagatccacatatgatgacgacaccgagacacgatatntgataacggagttcagccaaggcctacatctccagggcacttattacgggcactcctccccgatccagcatatacagcgtatcagagttacgacgactcacggtcggtcgtcgncggcagccgctccctctcgctatgctatgtcgacatgcgggtacaacaggcacgctcctttatttatgagagattctatgatagagtccgactcgtactctaatactcctaatacctattataactctaaatcctatactgtaaccgactacgtagacatatttgacatagactctaacataat

SEQ ID NO: 21310 - DNA, 429 bp, Oryza sativa
  unsure (1)..(429): unsure at all n locations
gcttgagctaaatataagaggctctattgttctattttttatactacaanangaagagagttaagtacaaggattctgaagaatctcggcagtgtcgcgaatcttctactattacttttattttgctgataactctgaattcaatataacactcttcttgagtaaattaaaattatcttgtgagaattatctcttgggtagttcgaattagcatactaaattattgttcactataatcaaccacaatatagcgattgctttggtgagtataaacactaaagtagatattaattgcttacacgtggtgttaagtaattattatccagtaattgctgcgtatcccacagttcgtttgaagcgggtgtagaagtggtgacagccctcgagatcacttaagtcctccctgtccgggtacataatagagagaca

SEQ ID NO: 21311 - DNA, 433 bp, Oryza sativa
agcttataacatcaaaacgcaatgtttaccttctgtttttcttgataacagatgcagcaattaagatgatttaagctgacataagaacttatttttccgccttatagtgggcttgcacgttttaggcctaatccgattacatttgggccttaatggtctttcacttcttggaccaaagcctattacatttttgcttacaccacggcaaggcattctcttttttagggcttaaacgttttatacaacacttcagtaaagtactccgtactccaatattatttgcagtcaataaaactattattccaattaacaacatagcaagctcttcaagtggagttaaattaatttttaaaaaagattgaactgaaatgatggagaggcgccacaagcacaatttccaaggcatctgcttgatcagattccatttcattcc

SEQ ID NO: 21312 - DNA, 424 bp, Oryza sativa
cgcatgtcagctatgccgacatgtgggacccctgcaccggcgtttcttttcggccagccttcgagcaccgaagaccgcgccacacccaccggcagctcctccttacacctaggtcgccttcttcaccgccggccgcctttctgcgctaagccggacttctctactggacgcgcctctcgcgccaatccggcctccctccatcggatgcgccttccgcgccaagccggtctccatctccgccgcccgtgcctctcgcgccgagctggcctgcgctgccatcggctgcacttctctgtgctaagccggtctccgacccctccaccgaacggtgccgcgccgaccagatgcgaccgtctcccacgccctcggttagtcaaacgaagccgccatgcctccggtgactgcgaacacggtcaccaccacc

SEQ ID NO: 21313 - DNA, 501 bp, Oryza sativa
  unsure (1)..(501): unsure at all n locations
tcttcntataagctgagcatgtnctctntgtctggccaacacttttacctacttcaccgtccatgctcaactccaatgaaccagcgcaagcatcaacaacatgaatagctgcatcatcttgcgttgcgccagatatcatatgtggtacataatctttatggcctggagagtcaagctaaactacacggtacttcttagtctccaaataagccacggccacagtcattgtcacgcctctttctctgtcttcactgctttcatccatagcccacgcataatcatatgatccttcttcgtggtaaaaataacttccatattcatagaaatgaatggaacatcgggacatgtagactcaatatcaacaatataaactactttgtcttagcctcgtctcatcttgcgcaaacttttgcgatatctcctacagatgagcagctccagaagtgtgactgcccaataacatgactactaaccaatgtcgttacagtaccattatacaac

SEQ ID NO: 21314 - DNA, 433 bp, Oryza sativa
atgctttaagtttctgttctgaattcagaccggcttcctcattctgaaattcagcttgaaggtctctaaggctgtccccaaccctccatatcatctagtttccattgcattaaatacattgccacatgggcgggggtcctatgtgacaagagagttaatgaggagagagataaaaagatgaaaaaaccatttctcatgcaaaaaaccatctttacacaactaccaatataggggggggggcggggtgaataaaatgagagagaataaagatgattggatgagaatttaatttgaagacaccatccattgtatacatagtatctatatgatatggtaagtatgttagggagcgtatcctatgcatacaggccctcgcgtgtacacaccgtgtataccaactaaaaattatcacaaaaaattctaggaaaattta

SEQ ID NO: 21315 - DNA, 419 bp, Oryza sativa
  unsure (1)..(419): unsure at all n locations
tattatntatnntnngttcacacgtcaaaagcccacccggatgcaatacacagttctgaatgtgctacaccacaagcatacagcaatgatcttgcttattngaagcacaaagatctctctgatcacatgataatgactatttccattcacatgagaacatcttctgttgtattaaataatcacctgtacattgtctagcataatatcttatttctgaattatgtacaactcgtagaaaacatangctgtctgttagcgacctttcgtcttcgcagcttcttatcgaatgcacactttcactgcangttgatgctggtgctgaccttatcatacacagctttctatacactgatatcttctcaatttgtgatgactgccgcaatatgcataactcgcccactgttctggcataatgccat

SEQ ID NO: 21316 - DNA, 376 bp, Oryza sativa
ggaagcaactgaacatatagtccagaactgtatacttttagtcgtcgagatagtcattgctttgagtgaagataaatattgaagattggaacaccacttgttgtaataaaataacaccgcatcatatttggtgacgtatgccaaggtgtcgaaactctcgtagatggcatgattggtgaagttgcaaagcttgcgaagtagaggctatagagtttgccgatgccgaagattatacaaatgaagttgctccaccatggtgacaaatgtgcatatccgttatgaagtgaacaaccattctcggcgatagaagcaaaccggttgcgaagacgctctattgtgaagataatagcaccagtcggcgacggaagacgatgat

SEQ ID NO: 21317 - DNA, 433 bp, Oryza sativa
agcttgctaaaatacatgcatatatgtatgattgttgtggagagagagtagtagcaggtagtttcagaaattttgtgaaacacactgaagacgcacattgaaacatatccctatcacatatgaaacatttagttttagcggtttgaaacacatgtttttcttttgacataatataatcatatgataacttgttgtaatgatttaattacaacgaatacaacggtatgatcggttcgtagatcggataagtaatttaggaggaaaaatatttaaagagaggtggaaagaatgaaaagaaacagctaggcatgcatgttacggtaacatggttcgtccgattcatccggctgtcgaatttgcagcattttctgacgtcaacagagagaaaggagaaattagtaagtaaggagtgagctggtcgtaaggtctaata

SEQ ID NO: 21318 - DNA, 398 bp, Oryza sativa
  unsure (1)..(398): unsure at all n locations
gcattttgtttgaactaccgtattggaaggatcttanactaccccataatcttgatgtcatgcatattgaanagaacatttgcgacagtttattaggaactttattatacatagatgacaagacaaaagatacacttaaggcccgcatggacttagaagatatgaatatccgaaaagagttgcactcgcaacatatgggtagtagtatatgtaagcctcatgcatgttacacactatcctgagacgagaagcatgagttcctttaaatcatagaaacagtttgctttcctgatggttttgctacacatatatctaatggtgtgaactataaagagggcaagatagccgggctaaagagccatgaccttcacatacttcttcaaagaatacttctaatt

SEQ ID NO: 21319 - DNA, 434 bp, Oryza sativa
  unsure (1)..(434): unsure at all n locations
agctnttgtcttctttggggtataaagattattttctcgaggaggaggctatcgccgccaatcaatgataaactgtactcctacctgaaagtttgaaaagctggtgcatatcttttccactactattcatccacgacatctcaatcaaatcactacttttattttacagtattacttacaaatatgcagcgaaactgcttataacactctaaccacaatgttttttaataaaaaaaatgttttacatctctgacttctaccataagaaacaagaccataaatttattttctaaaaggaagaaaagaataaaaaaagagaaaaagaataggccataaggtgatgggacagttaaacacaatggttagacacaaaaatcttgtgaagacaaaattaatgtgaattatctgtttattaccacacaaacgcacaaaca

SEQ ID NO: 21320 - DNA, 435 bp, Oryza sativa
  unsure (1)..(435): unsure at all n locations
agctttgatgctccaagatggaagaagataactactacctccgtcccataatataagagattttagttggatacgacatcctattacaatgaatgtgaacagacaggtatatcccgattttattgtactaagatcatatcttatccaaccaaaatctcttatattatactagcacggatggagtagcaccatactacgtgagatgccacgcgatgatcccagaagcaacaactggcgaacgatatggggaaggaatatagaggtagtactagatgctagctatcccgttttgctattgcaatcgccatcactagtcactagcaacaganaaagaataggaggagatcaatcgattgcaagataaaaagatgcctcttgtctccgagaccaactccttccgtcccgtttcagagtgtcgcttgctcgcgacgcccg

SEQ ID NO: 21321 - DNA, 433 bp, Oryza sativa
  unsure (1)..(433): unsure at all n locations
agcttgcttatgatttcttagtttgggaatgtttcattgtttcttatatcctctctgtgccaggctgttatagctacatagaaggacaactgatacggtgttaggtcatggaggagattcatggcatgcaagaatcaaagactgcatctgtcatcaaagttgccagagagcctgccgtcattatcaatggagttccagacttgcctcctgatgtagcatccgaatcacaacctgagccacgtaatgctgcagaacctcctgttgatcatcgttttggtgaatttctagaagggcggaaagtaaggaaaccttttggggacaagcattntgtagggaaagtggacaagtatgatagtgaaagtaactggtacagtgttgtctatcaagatggagaccaggaggatctcgagtggaaggaagtggaggagatcat

SEQ ID NO: 21322 - DNA, 392 bp, Oryza sativa
agcttgccacagctgcggcaggcgacatctctttgcttgctagaggaagccagaggcaacgccctgtgcgcctctgcaggcgccaccctctgcatgtttcacgcccaccgtatatggacacctccacgcgcctagcgcggcttacggaagtctgtcagggaaaatgactcctccttcctcccgttaccctgagaggcctcccactgctcccgagtgagaaggagcttcccgccgatggtgatgggccccaatagaggatgtggctcatcaccatcgactaccttgaggcgacctaacgcctcctcgatcgacatcgaggagacgaccagcatagattcgatcgaacgaacgatctgcctgaactattcttggacgtctccgaagagcttctc

SEQ ID NO: 21323 - DNA, 436 bp, Oryza sativa
  unsure (1)..(436): unsure at all n locations
agcttgtgtgcgcgaagcaaaaatcgccaagaattcttctctcaggaacgatgcagtccctgacttccatggtgcgcgtgcagctggagggtntgctgctgctgcttcaccttttcctcctgacgcgtgcgctgtttccaggacgtgggctgctactgccctaattacacgcgagcggcagggaggacggcgacgaacaaattgattcggcgactcgacgatccggcgactcgacgaaccggcggcggctgcgtgacgcactggtggagaaaccatctttcgttggtcggccgatttccacaatagtcccggatgcaataaaaaccggggctaaagatgatctttagtcccggntcanaagggtaacgggcatattngatctttagtcccggttggtaacaccaaccgggaaccatctttagtcccggttggaaca

SEQ ID NO: 21324 - DNA, 257 bp, Oryza sativa
ctcaagcttcatactactccatctatctggtgagagagagagccttcatgctctggcaatcttctactcactgcgtggatggcatgatgcacccagggcactacatcacgccgctctccatggcgcggtggcgaggccggtgaggtcgtcgcggcatatcgggcaggtggtccccttgaacagccacctggtgatgcacggcgggtggaacgcgtgcccgcacggcaggttcgccggcggcgtcttgcacctctcgc

SEQ ID NO: 21325 - DNA, 378 bp, Oryza sativa
  unsure (1)..(378): unsure at all n locations
ccgaacgcctctctctttttcgtcgagctggtttgccgccgcgcgcgcgcgcgccgaggacatcgttcacctcgggcctcctctcgaagacatggaggacgagctgggaggcgctcctctttttcatgagcctncaccttcgtcccagactccgccccgccggcgccgcaccggcgttcccgttccaattcttcacgggaacaactgcaacagcgacctctatttctggctgcctttggtcgacgcgaagggagtccaccgcggagacctgcgtttaccggacgttcgcggcatctctgaggcggtccgcgacggcgccagggtcgtgtacgccgacgtcgtcgatggcctctgcggaggtcgcgtggtggcgcgcat

SEQ ID NO: 21326 - DNA, 234 bp, Oryza sativa
  unsure (1)..(234): unsure at all n locations
gagaatangtactactgcgcagacgccgatctgacttatgtccccgctaagggatctcacccctcactactggcgttaggaatgtgggagcctcacctgagctcttctacaactatntgctccacatatatagaaaatggaggttcaaattctatctaatttattcacccgcacctgctgtnttttgttggatccgctactgtccgggtggaggctgacgtacctgagatcgac

SEQ ID NO: 21327 - DNA, 420 bp, Oryza sativa
  unsure (1)..(420): unsure at all n locations
agcttagaacatcaattgcaatttgctcttgagctttttccatgaagatgatgcctgcccatctcaacgtatttctatatattccaccatccttccacagtttatctacctattgatgaacagttcatcaataaagcttccattgtcttaaaaaacagttttttgaagcatatttccttcaatgtttaaactgaattcagatggtagtttgattagggtccaaattcttatacaaggcatcattaattgcacccaacttccagttagcctataaatgatctgcaggtagcatgctaattaaacatttgataaaacactgcaccgtttaacgctgccaaaaggccaatataattatgtaattagaaatnttatcacaacctactatcttgaccccctcaaaatgtttcttgcaattaaaga

SEQ ID NO: 21328 - DNA, 273 bp, Oryza sativa
cgagtaagcaataagtactaaactactcactatcaattaaccatcttagtattcttaaacttgcataactggcttataaatcatcactaacaaatgtctcaagtctcaacacagtgctccttaccgggagaagtctgtctatatgctcccacaagaaattactgcatcattgtcattatccccgaggcaactcagttgtaaaatctcagcagcttcaactgcatgtgtggaactggttacccatcctttgtatagactgatggtcctatcgac

SEQ ID NO: 21329 - DNA, 434 bp, Oryza sativa
  unsure (1)..(434): unsure at all n locations
agctngggtttaaggaggatgctgctttggtcaagatgtattttcacgggcgaaaagaatgctgggatggaacagaaatggattttacaggacttactaatatgtttagatgatcaacacatgtattaattgatgatccagtcttatgggtcatggtatagaaatacccaattaataatgtggacacatattaatgaacatgttattggatagacccaacttgagacactgcaagagccatatgtgttgtgtcatcaatgatctcatttagtgttggtggtgaatccttagacctgatattatcatggttcccaacatgtgtagtagcttacttagggactgctaaacgctactccgtaattgggtagttataaaagtaagttttgagtatgctatgaaacatgtagtgggatatgaataatcaagatgggatt

SEQ ID NO: 21330 - DNA, 239 bp, Oryza sativa
  unsure (1)..(239): unsure at all n locations
atgacggtgaacatatacgacactaccggngagagcatgattcttatgtatgggtcttcgaatgaatcagccagtggcatgtgtcatgtcagcacgctcgacttctgtgatccattaatgaagcacgagatgcattgcatgttcacgcaatggccaccttgtgcatggctggcagtagcatcatcgtacggaaccctcgtgatgtctatacttggtggatacatctttcattttactga

SEQ ID NO: 21331 - DNA, 434 bp, Oryza sativa
  unsure (1)..(434): unsure at all n locations
agcttaaataggggtagcgccttctctcttattcttattgaaccgacttanggcggccatgcatccggtgacgcactgcacatccctaagcttggtgggggggcgcatccgctctatagctcatatcttctcggggttggcctcaatgcctcgggcagagaccaagaacccgagaagctngcccgcaagcacgccgaacacgcacttatcggggttcagctctatgcaggcggagcggagactttctaaagtttccgctagatccgagagtaatgtctcttggttgcgcgtcttcacaaccaagncatcaacaatatgcctcaacattgcgttctatctggctacccaaagaaattcgagtagtacgttgaaaagtaggacctgcattctttaacccgaaaggcattgtcgtataacaataagttcctatgggg

SEQ ID NO: 21332 - DNA, 425 bp, Oryza sativa
  unsure (1)..(425): unsure at all n locations
cggatcttaagcacctcngctgcagcttcttgaatcctaaagggaaaaaaatttatgttttgctcgatgtagtgtaactagcccattcctccttgaattccatcttacaattggtgagctaaagtttttattgtgtaccaaaacaacaaattagttaaatattatctaaaaaaacaaattatttaaatgaacaggcgtggtattagaaatataatctattcactgcatgctttaagttcaagtaggggaatagcatatgtatatatgttcacatttattaatttccacttgcagtggggaagaagatccaggattacagctcttggacaattacgatcccactcgaccatcgcgatttataaatgcccaggaaatgagagatngctttgttgctgcctgccaacgcgacgctaagccctttgcag

SEQ ID NO: 21333 - DNA, 449 bp, Oryza sativa
  unsure (1)..(449): unsure at all n locations
tcagataagggcatngcattctgcatgcactgntgcacattgaataacatattgtgatggtgtgccaacgcgtttcgtcttgggtgtgtctccatctatcatgacagaattcttcactgcaacatgaaccgaatccttgcttgttctccagctgctgcctctgcctgtgctggagatgcaaaggaaggcgggcaatcatggtgtaaagcgctcatgctctactgaaatggctgcgaaacatcttatggtaaggtgattatggtaccgaattcttccacgctttgagcactcctggtaacgatggcgataaaacaatctctacattagctgacgtgggaatatattgtactgtaagaataatggatatccttgacagtgaactgaacacctcatggttacaaaggcatgatctcaactatgatgaagtctgtatacataatacattttgt

SEQ ID NO: 21334 - DNA, 434 bp, Oryza sativa
  unsure (1)..(434): unsure at all n locations
agcttcagcgtccatggaagaattctttatgctttctttaaacacaaaaaggaaaatgagagaattttcttggtgttaagacacttctatttgcttactgaaactaaagactttataatgattcgatcttaattcctcttttttcttaaggcatcatttagaggggggaaatgggtaatgagagacatttgtttacacagtccgagtcaaggactgtcacatgttccaggtagcaaagcaagcaatcaaaaaaataataatccaacatttctttcttgaaaacgatagtccagttcattaagttcagtcttttctccctaccttttcacacaaatcagagaaaaaaaacaagtcgcatccacctaaaaacaaacctacaaagaatttgtgtctatgaaaataaaanatccccagaacacatcaccaacaacaat

SEQ ID NO: 21335 - DNA, 433 bp, Oryza sativa
  unsure (1)..(433): unsure at all n locations
agcttgagcacggtccgatggtgggatgggcccattttcaggttnctcttcagggaaataggactgcttttgatggttatgtggggactcatccatatcttcagagacagggctatggctcatttccttgttaggaacagaatagtcaacttcatctccaacaaaaatgtcatcttcatctgctctagcaacaggaatagactgttcctcattcttgcttaagttattatttcgagggggtggcggcggcggcatgtccttttgaaattgatgtttcagagaagaacctgtttggccaggtctggctacctcatcatagtcaccacttgctaaactgttattccctgcaatataacaagcataacaagaatcaggataatctaatttcatcgagcanagcaagtgcagatatggatgagagagtacatacatg

SEQ ID NO: 21336 - DNA, 432 bp, Oryza sativa
agcttgcagaggagcaacttctttggcttgatcttatctacaagcctgaaaatctccccttgtcaaacttattttctgagggaaaaagaacagagcgaactgcaagggtgagaaagtttctgaaccacaagcctgtgtgtaagcataccaaataatagaacatagctaagactggaatatctgtaagtgctactcatacttcccaccctcagaccaagctgattaatttgatgcttgtcgggcagctgatctttacaggacgcggtatgagtggggataatactgttcaccacatagagatggttgccgtagcatttgggttcgtaagttcagcccctgaatcccctgtctaaccttgggattcatgacaaattttagtaatcatcaatcagtgttcaagaatctgttaaagattattaacaaagatatatg

SEQ ID NO: 21337 - DNA, 431 bp, Oryza sativa
agcttcgctggctcgagaactgagaaatctatctggtctagtcatcatagagaagcagagcataatgacagttttacaagaagggaatatacttgtgctgattttattgaagcacttcgcttgattgatcaggtacttctttttgaaacaagcataagtctttttttcatgtacttttcttgaactaagataatttactatatttttaagatatatcatcagtacattctatcagatactctattaaaaaaatctcatacgtctttgtgttttcatactacactgcattaattattggcatttcgtccttcagatctactttacatataataagaagaaacatatttcaaccaaaaattcattatgtgatttgattagttacatatactcaagtttaactaagctaatgattagtaagccccagcattaaa

SEQ ID NO: 21338 - DNA, 429 bp, Oryza sativa
  unsure (1)..(429): unsure at all n locations
agctttagtgtccatgtttgacttatgggttttatgcccatacttatttgaatatacaaatgttattgtatgttattaatttgatggattcaaacaaatatatattagacttagactattgcataatatcaatgactaatttgtaaatcttgtaaaagtattgatgatggactaacagcagaaccaccaccaccaccactatcgttttttttcagtagtatagattgatgctcaaagcatctatacacttcgagtgccatcacaaagcccatatttgtttgcacttttagcacattatacatacgtacagcgtttctctaaaaaaaattccacgttttgctatcgatggacgatctgttctccaaaatatcatcaacatgaatcctacaaaataccatgttacaagcatttttcattntttttatcacc

SEQ ID NO: 21339 - DNA, 192 bp, Oryza sativa
gacacatatatatcatcagcagagagagatggactgatcgcgacgtggagagttcatccacagcaagacacacgggcggatcactcactcgctcgctcactcactcaccttggaaggtctcccacgggtagatgatgccgtcgccgctgctgtcgaagaacacggcgtgctgctggagcacgctcatgccgc

SEQ ID NO: 21340 - DNA, 424 bp, Oryza sativa
  unsure (1)..(424): unsure at all n locations
agttcttccttcactccgaaggtggtgaactcctatattctctcaaacggngccgggcctcctccacaatctctcttgagaggtcaccgggcaacacctccacaagccgtctatgaggcggcaacctccaagagtaacaagtctatgatgcttgccgaagatgatcaagtgccacactagctataacaatgaagcaatgcacttggattggcttaactcactctctaacacctcactagataaactaagtgcacaagggtgtgagagctcttgcaaggggggttcaagataatgcaatggagtgccaaaaccttacccttgctgctggggagtgggtatatatacctccaaccaccaaaactagccgttggaaccgaaatccccaactttgtgctctgccggtcagaccgccgttgtgaggccc

SEQ ID NO: 21341 - DNA, 438 bp, Oryza sativa
  unsure (1)..(438): unsure at all n locations
agcttaccggtgtgctangaactccacaaagaataattttcatgttgatgtcatcatcataaatttttatagctggaaacacatctgaagaaccttcctcctcaaccatctcattctcaggaggggttatatttatctttggagcatcccctagtagacgaggcccaagcttaacactntgtacatggttgtttcttacacagtataatcgaaaagatgcatgagcaagctgaatagcatcccaagtatggctcaccgaactacatatacaagaaaattattagttgttattgccatatgatgatgatggtagagagggaaaaggatgctggtacctttgaaccactgacattaatgcatggcgaaaatgggatgctgcatatgatgaaaatgaatttctccagtatattacgtatggaatcccctgaaatgaaacat

SEQ ID NO: 21342 - DNA, 430 bp, Oryza sativa
  unsure (1)..(430): unsure at all n locations
taatctacaaccaagtgacaacaatatcatctcatgagtctataccataaagatgtaacagaagagagaatatggctgaatgctgacctataatctttcatctgtcttgttntcatctttagcgcatctaaccaaactagcggaagtcataatgctcattctagatggtccatactccataattgtacccgtgcatgcaaacagactcgttcgccctgtacaggactaacatttaaattaccaatttgtgatggaactacacagatgggaactccttatcccctaccctctgtgtaggttaccctgtttgtcttgatgggtgtctatgctgagacagtgaattattacccntaaacngaagcangtgagacaacggactgagatattctagagcaactatattaacttgctgattcttcattgcagcatc

SEQ ID NO: 21343 - DNA, 424 bp, Oryza sativa
agcttcgaagatccaaccatggcgagtgctgtctgtacttttactataaacacacgctgatttcctgattgtttgcgataagcgaccacgaaagagggagagagagagagagagagcaggcgcgtaccgacggcgaatataccggtgagcatgccggagacaacgccgcggagcagcctgtggaggcgcgttgccgcgcgacggcgactctcctcctccgccctcgttatggccgccgccggcgccacctccattgttcacgcgggcagtccaatcacaggttgccgatcaacgcatcgtgatggtggcggtggcgctcgtccgtcgatcgccggggttgcgtcgcgcaacggtgaatgagggctcgccgggaacggagggggagataaaagggaatgcgtgggcgcaagagaacaaatctctc

SEQ ID NO: 21344 - DNA, 437 bp, Oryza sativa
  unsure (1)..(437): unsure at all n locations
agctntatgacacaatgattatcacaataaaaaatagtatgatacaccataaaatacaaatattaattgaattaaatcatattagtttcatcaataaacatatgcactgaccaaggaaaccaatgagcttgctgtttgcgttgtgagcctttatagcatcatggagtccccatataacattgtgcccacctggggactgcctcccactgaagacaacaccaaccctgcatcattcacagattntaaattaaagctgtacagacttgtaagagtcaaggttactgttccaaaacatagcaggaaaaaataagcagacatgacatgattacaccactgtgtgcatctcatataagcatgtaattatttttttcctaatcatgaatgactaactcaataattagtaaaggaagaatacatcttaaataatcagcaaaaaa

SEQ ID NO: 21345 - DNA, 431 bp, Oryza sativa
  unsure (1)..(431): unsure at all n locations
agcttcagagattatctcagaaaagttctcggttcactcttcttcagagattgnctcaccaagctgtatggttgtgcaactcttttgtgacatcaaagaaatcacaatctggagggaggcaggcttcatggtacgcgaaaaaccattggcattattccttttgcagatttttctctcccactctttgaaccggtttcacaacttcgtgtggacgcttagtttgtaacaccatctcataatcttaatgaatttgcttagcctactcttgggccaagctggctaaaataaatgtaatcagagttatacttcatttgttggaaacataacttgtaaaataaaactaatcatttttatccttacaaaaggctgctcaatgcttgcataatttatgttgaataaggaagtggcaaaacagcatgtcttttgctact

SEQ ID NO: 21346 - DNA, 112 bp, Oryza sativa
  unsure (1)..(112): unsure at all n locations
tccgtcagccatggtcgacgggcagtggcgcacaatctctctccgagcgctagcggngaatacngagagcagaacccgcgccgtctagctcgtactccactgtccccctctc

SEQ ID NO: 21347 - DNA, 392 bp, Oryza sativa
gctgggtgcaacgttgtgacaccatatcaaggttactgcagcatgaaatatgccattcttggtattcaccagtcgctcaagaaattctagagtttttaactttttattaccaacttgatgacgaaaattctcatatcaatagtgctacagaggtataccttatcagctattgaacataagtctttatcatacaaatataagaaaaaccgaagcgacttttcattctgcggacgaacaagataacacgagtgcgcaatcctacaagatagtagcaggtaggcaactaaataccaaaaagctgcagtttcattggaaggccacacaaaagatttttttttaagaattatgatatccttgtatttgccacatagccacagagagcgaagttattg

SEQ ID NO: 21348 - DNA, 436 bp, Oryza sativa
  unsure (1)..(436): unsure at all n locations
agctntagataaaggatcaataggttgtggagcttatctaccacaacaccgacgcaagaaacttcaataagatgcttttcaggccctactaaagtacgaatagcatttcagaagtaacaacagattcaaaggacttaaatattgatttgtaaccgtgcttccagataagaaacttggcacggcgaatcttataatactggttagctgctgtttaatatggatggagctataatagaggcgagaagtgtggataaaataaagaataactacaagaaggacaggggcacacttatctgcatgatgccaaaggaagcttcctttcctttgctcttcctgaaaagcagaggtaaacataaccaggttaaactatttacacatcattcttccacgattccatattcatcaacatcaaatactatattgcagagatgtaatt

SEQ ID NO: 21349 - DNA, 381 bp, Oryza sativa
  unsure (1)..(381): unsure at all n locations
ctgaactacaatgcaatagaatagaatggctgtaagttattctctgtaatcctctccattcagatggatctgcatgcgtgaggaacgctatggtatatacctctttggaagaacaaataatcaagatatgaaagaacctgacttattcttttgttgacctatacagtacatatggtaacatttgctaactagacatatcatttcacttgtatgttgtaagcactgaccttttacctacagcaattgtgtgtggaactctttcagcantcactacattaattgatgaatctgtattgacctcagccctgtacagctgcttgcactcaagaccagatgcagagaacttaacctcggtgtatgcttgcacgaagaacacatcac

SEQ ID NO: 21350 - DNA, 430 bp, Oryza sativa
gcaagctagcaagggagtctggttgctcttttttcattcttagggcacgtgatatctgcttaaggagttgctgtggatcccgaaacagtgaccgccgtcaccgattggatacaaccctagacacgtactcaagtccgcagtttcttatgtttggcaggatactatcggagattcatcgagaacttttccaaatcgctcgacccatgacacagttgttgaagaaagaagagaaatttgtgtggagcccgcaatgcgagaaggcgattcaaactctcaaggaaaagctggtgtcctcgccggtgttaatcttgccggatactcgcacggacttcatattgtattgtgatgcttcgcgccaaggattgtggtgcgtgctcatgcaagacggtcatgtggtagactatgcctcacgccagctactgtctcatga

SEQ ID NO: 21351 - DNA, 432 bp, Oryza sativa
agcttcacttccaaatacccgggcctcccactctgttttaacaagcccatcaaatctgacctctagcctctggttgacagggtggtcacaagcctgccaacatggaaagccgagcagctatcgccaccagggagaagcgcaagaagcctttgctagattagtcgcaaaaccgtctcgtgagatatagccctgttctgtaactttttcttttccttttgctcagcagctgtacgaactcctcacttaatacaatgatcagcaaatcctatgcatattcttgaaagccaaataaacaactaaaaatagtatggctggggtgcattgtattgtttaaacttcttttcttatttggtaggtagcatatgtgctcaatggaatgatgctatgtggcttatagcaatgctaaaacgtcatcctatgtcattatcacta

SEQ ID NO: 21352 - DNA, 280 bp, Oryza sativa
  unsure (1)..(280): unsure at all n locations
ctcagcttcgctaaccaaaatcagaaattntnggcgtgaggtccttatcaagaagtatattgctcgtcttgatgtcacggggaacaatgtgaggccggacaccatcatggaggaatgctagtcccttggcaacaccgatgcatatatttactcgagccctccagttgaactgtatgttactttgcctagaaccttaanatgtagcaagcagaagggtttatagcatatgcatattctcccaaggagaaaagaatacagaggattcagtatagacaaacta

SEQ ID NO: 21353 - DNA, 397 bp, Oryza sativa
  unsure (1)..(397): unsure at all n locations
aagcttcttgacgcttactcgcttaccattttctggcaagagttgagagaaacagcttatcacgccgtcgggatttgctacataaaagccgttggactgataccgataaatacctttcacgccgcgcgggggcgggcgggggnnataactgggtaacaatgttgaagcctacgtcgatgacattgttgtcaagaccaagacagacgactcattgattgacgatctacgggaaaccttcgacaaccttagacgatatcgtctcatgctcaatcctgagaagtgcacgttcggagtaccatcgggcaaattgctcgggttcctcgtctctggcagaggaatagaagcaaaccccgagaagatcaaggcaatcgagaacatgaagtcgcccacaagactc

SEQ ID NO: 21354 - DNA, 424 bp, Oryza sativa
  unsure (1)..(424): unsure at all n locations
gtgaagaatatggcatcagcaatgaatgttaatgcagtatctagctaggtttactcccctgtatcttagaaaaatgttttacaacacctttgagcattcataccttcttttatatcatattatgtgtgttcttcgtttcttaggccagaaatctacaagatagaagcagctgttgtaattccagatttcttgaatcttggtatgggatttgcctctcaagagtaactctgaacatacttggttgggatagtagtcagttcttgtcgccttaaatgaaaaatcatgcatgtatagctcactgtattatataacctgataatgatgatgatgaatcgtaaaaaatggacggaaatccaagaatgcttcgtaaatatatgtagctganaataaattgactcggataaagctaggaaaaaacagaaac

SEQ ID NO: 21355 - DNA, 301 bp, Oryza sativa
  unsure (1)..(301): unsure at all n locations
attgcatgttggttctaaaatagaaaatattgtcactccatgcgattcttnctccacattactctgaaataagtgcaatatgtgcctttggcgatccagaatcgcaaaatctggtgaattgtaatgtgattgatagctattcttattcatttcctgtaacatatgtaagaacgcacagattattgatgcagctaaaaaactgcacgatattatgtgggatttcatgcatcgctgtttaagttatggaagtcatacnagcttggtgcttcataatatgtactactcttttaaagatgttgag

SEQ ID NO: 21356 - DNA, 420 bp, Oryza sativa
  unsure (1)..(420): unsure at all n locations
agcttgtccttnttgtctagtcctgcctattgttgttgggccgatgtacctctaatatgccacccattggcacacaatttattatttgctaacaacacttgatggttttggttaatggtgccttgcattacaccttgttggatttggatctctcctacttggtttgtgaggaggttcacttcatgtgccaagccacgatattccctctctcatgtggatgagaaggaaaaattggccactttgggttggtggtggcatttcgcttgaacatgacatcagcatggaacttgaggcttctcctgctcatcgctctcatgtgatgggtgttggtatttcttacgaccacagataaatccgcaagtgcacggaataccgctgtagcacttcacctttgggtgaccccaaaaggatatcgaactc

SEQ ID NO: 21357 - DNA, 491 bp, Oryza sativa
  unsure (1)..(491): unsure at all n locations
agacattggttctcaccggggaatcctctctatccttngcctatcattatgcttcgngtccttggacacacctggtaaagagctgacacacacgttccctgtggaaatcaatacctgagaatactcctggctgaagtgctacatcagtattttccgtgcgcttgcggattgtatttgtaaagntaagaaataccaacagcatccaagataaatggtgaatgcaactggtagcactatcctgatcctaatttcttatatactttaatcgaaaataaaatatctgaacacccatatacttgtgcacttgacctatgcttcaagatcacctctacagggtatttatgtngctcattaagtaactaattattatattttagtgtctaataacaccgaaccagctgtgtggttacccagctgataaaccatgatacccatcatgtgacatttacactatataatatgaagtgataggatgaatatgtggtgatgat

SEQ ID NO: 21358 - DNA, 427 bp, Oryza sativa
  unsure (1)..(427): unsure at all n locations
gcttcgaataatagctacgctagtcttcaatatcgtcttattcgttggttttctttgccggcatcgtaatggattggtggttcgttgcctctattttaaataaggtacggcatacttgcctgaatcttctctctcggttactcagtggagtgatctctctcttaaattcccataaggataaggaaaagtagacggttcgaaacccgtgcttaaatcctactcaaggcccactacgggtagcgagcaattaacaaatagagacaaggatgaggagaaatgacgcatatacggccggcctgngtcactcatgatgttggtagttcaagtgaattgtcgtagtgtaaggaagattgattggttttctgattgctacttggctggcataagaaagaaggcgccccggcaggaattctgtaagcttgacttg

SEQ ID NO: 21359 - DNA, 159 bp, Oryza sativa
  unsure (1)..(159): unsure at all n locations
agctngcccgactcatggactaagatgaaggggngtcngattatacangatgatatnaattactcctggacaacatcaatccacttatccacatccatatgatgtagataaatcagaggatgaacttggaaaggaaatactacctccgttctttaatag

SEQ ID NO: 21360 - DNA, 436 bp, Oryza sativa
agcttgacgctacccctacctggcgcgccaactgtctattctagatttcggcaataataaaagggggtggctatcaagctagaaaagtgtatgggtttggagacaaaggatttatacaggttcaggccttcttatataagaagtaataccctactcctgtccggggatgaatccgccgagtgtattattgattgtatgattcgggaaaaatcagcatatgcccctagaggcgcccggaccccccttatatatgggaaggagtccgggttacaaaagataatctatattcctaacagaatatgaagatacaggtaaaatacagtcgtaaccgactaagtttcagggtatttccttgatacacaagttaagaaactaacccaagatacagataagatattctatctacattaggtatcctgtacccagttcgaatacc

SEQ ID NO: 21361 - DNA, 404 bp, Oryza sativa
  unsure (1)..(404): unsure at all n locations
agcttgcaggctacatcaaggaaatcaatcataactatattttgcactgctgntaatattgggtcagctgactgtccacggtatcgtgcaattaatatggaggtcattgagctcgatactggtaccttctaagtacattttaacttgtgatttcatgtcttgtttnttttttcagaataactatattgaaaaatatttattttagattttggtagtgcattttcgggtatattgacggatgagcaaggaagagttcaagcattatgggcaagcttttccacccaggttaatttacattacagttgctttgctttagcctgtttcctaagtaatgatgcttgcacgttctcaggaacatttattctaaagaaaaaaagaaagaacaaaacgccgtcttacacgga

SEQ ID NO: 21362 - DNA, 273 bp, Oryza sativa
  unsure (1)..(273): unsure at all n locations
ctaagcttctagccatgcatggtntcacttaatgactatactgcaggcacgtttctcatatcttatggtggataatagcgggagaagggtgatagaacatgcacacttacttggcaatagccaaagtcgaaattatataaggaatacctctacaggatattccgtagcacaagaacattgtgattgtcatctccttcataatatggaactgagctatctgtgctcaccctgatatccacaaaacaattaaaacaagcgatcaggttggatatc

SEQ ID NO: 21363 - DNA, 417 bp, Oryza sativa
gctggcacacacgacagagaacgagggcttattttgacacacgcgccccctacctggcgcgccagatgacggagcgtggggttcctcaccgggagaccgcgcaggcccccctttgccagatcggccgggggcgctaagtgaggttcttcgccctcgatcgatctggagaatgttcgcgagagagcaagtgcacgagacacgggcgatgtatacaggttcgggccgctgagaagcgtaataccctactcctgtgttctggtggatctgtgtgtgaaggagttacagagagccggagagccagagagttcaggctccagaacccctctagcctcctttttttctttctccccccttttgggtgggcaaggtccttcttttatatctcaaggggataccacatgcaccacttctacctac

SEQ ID NO: 21364 - DNA, 430 bp, Oryza sativa
agcttgctccacgatatattgggccataccaaattatatctaagcgtggacaagtagcctatcaattggaattgccatttcagttgtctaatatacatgatgtattccatgtttctcaacttaagaaatgtcttcgaactccgattgagcacacctcacttgaagacattaatctaaagccaaatctctcctatcaagaatacccaattcgtattctcgaagaaagtgaacggcgtacccgcaaaagctccatcaagatgcttcgagtacaatggagcaatcatactgtggatgaagccacatgggaacgagaggaccgacttaaggccgaattccctagtttcttctagaatgacgaatctcggcgtcgagattcttttgaagggggtaggctgtcacataccatgactttgggtgtttggaaaacatg

SEQ ID NO: 21365 - DNA, 427 bp, Oryza sativa
agcttggcggcagtggcatacattggtgtgtttttctcgtggcctggatgggtgaagagtaatagctagatgcggatgcaattggctgactgcatactgcatgtggtagactcccacacgaacggacgagagatagagcagcagcagccacaatagactctttatgtcgatctcaagaccagaataatgtcgtctatgttggaaatatagtcattattcggcatattttaatccaagaaattgaaacaatgatcatggcataagcagacataaccagtagcatactatgcacatcatgaatgtcagaaacaggaacataccagtaacgcgataacatgctagaggcatcatgtagaacaggaacaagaacatagctcacatagtatagcgctaacagcagtagcaggaggagaagatataccccgag

SEQ ID NO: 21366 - DNA, 444 bp, Oryza sativa
  unsure (1)..(444): unsure at all n locations
ctcagcttgactccaatggaaatcaaaggtcaggcaggcttgttgcaatgtgttttacacagagaggagatagattacaatgaaatgttttctcccgtctctaagaaagactcatttagaatcgcatggcgcttgttgctcattatgatntatagctccatcagatggatgttaagactgcatttcttaatggtgactcgcatgatgatgtatacatggcacaacccgacgtgtttgttatggaaggcaaggaccatctggcttgcaaacttaagaaatctatctatggacttacacaagcgtcaggcaatggaccttaaattcatgagatattagagattcggattaagagaatgacgtggatattgaattacattacactaacggtggagattatatactagactctatggtgtgactactgtatcagcagtgcattctatg

SEQ ID NO: 21367 - DNA, 409 bp, Oryza sativa
  unsure (1)..(409): unsure at all n locations
agctctagaatctncaaatggagggggttttaatttctctctcatgcgaancgtatgagctactcctatataaacaaccgcatttgtagtacttgatatatggattggtgccaattacaagccaaatcccatattgtagtgaggaaatttctagacactgtgccaaatttaacatggatataaccaactaattggcttcaagccaaactatcgcatttactatttaaactaccaaaagattggtatgggcacgttttgacatcaatccaaacaatttttatatttctacctttctatcaatcctgagtttcagaaaaactcttactgatgattagattgaaccctctctgataattagcgatctaatgagatacttcatacatttccaaacgccagcgattgatttgca

SEQ ID NO: 21368 - DNA, 345 bp, Oryza sativa
cttggtggatgaatatatcatgttatagcagcgacacatatgttgttctatgtacatgcggcagcatcatttttctctccttccagcccagagagctgagatgtgtttccactatagcatcttctgccaaatcatctaatgagagagataatcgcaccacacaaccatgtggattaaatagtacgatcaccacgtaatttaatataaaacgacaggaagattcgacccttgtgaaagcaatttctcattagatagagcctctctcaaccctcctcgaatggtggtgcgtgcaacctcaccttttgatcctcattatgtaacagactatagatcaacctattttat

SEQ ID NO: 21369 - DNA, 430 bp, Oryza sativa
  unsure (1)..(430): unsure at all n locations
agctttgaaaatgaatttccttgngaattctattcgcgcagcgagcactcatgaaaaggggaaggcgatcaaatgaaaaaaaaaggatgaggtcattcgcaagcaactactactcatcctaatcatacgcatatcatttcttcatatataattggtgcgcaataaaggtcatttttgtgctataaagctcaaattctgtgaagccaagtcatccacgaaaaattaaccgtcggatcatttgaggaagttattctcaaccattcgattatctccaatatgcttctttttatggtccattcatttgattaggtccattggaaattcttattcttctcagcccatcaaagaccaggcaacgaggtatggagttgttcgatctccccatgtggggctacaagtggtcactagggacgtaccaatactctgttgc

SEQ ID NO: 21370 - DNA, 396 bp, Oryza sativa
  unsure (1)..(396): unsure at all n locations
accgtgagtgctgcatgtgtgcgagattattcgtcccatatggtgccctatctaccagtgacgaattcaagcaactttgggagtagagactgctatgccataatgtaattagatggcgtatttgaagtgaccatgttaaaaaatatcgtaatatatattntgacaacacttttcacttatgcaatatatgtagatttctcagtaccaaatgcttgttaagtctaataatcttcctacatcagattctattaaataatttaaaactaatctattggccgaatattattgtatcaaatatccaaattttctacccatctctacaggcggatgttatctttttgaggcgtgcgtttctattttgcaggcggactgttagctacgtcaactgtgaaatat

SEQ ID NO: 21371 - DNA, 411 bp, Oryza sativa
  unsure (1)..(411): unsure at all n locations
agcttanaactctggcaatatcacaggaattttttcttgctcaggagatacattggcacgagaggcgtgcggaacaatagctgctcgcacagcgtattataatggtgaggccaacgggaccaagagaatgatcataatatgaagtttggtatatgaaagtacagtgattgatgaccatatggagctgtaagatcatatataacaaaattaccatgtctctgtttgggtctgacgtacctccaacaatcttcccgagccaagacatgtggactaatacgggcaaattggatcatgatgattatgaatatctaactagacctttcgccatggatgaaatagagaaagcctttatgggcttgaagactaatacagcaccagggcccgacggccttccagtctgtatgtttatgg

SEQ ID NO: 21372 - DNA, 392 bp, Oryza sativa
aacatgggggttatttaacataaactttctcctgtataaaactatttagaaaaacacttttcatatccatttgatacaatttaaaaccttttgaagcagcaaaagccaacataaatcttaatgcctcaattctagcaacaggagcaaaagtttcatgaaaatccaaaccctctacctgggtaaaaccttgagcaacaagtctagctttatttctcacaatcaaaccatcctcattatgtttaattttgaaaacccacttggttccaataatattatgtccagaaggtggttcaactaaagtccaaactttgtttctctcaaaatatttaaggtcttcatgcatggcattaatccacgattcatcaggtaatgcatgagtaacatctttgggg

SEQ ID NO: 21373 - DNA, 250 bp, Oryza sativa
  unsure (1)..(250): unsure at all n locations
ggttcgccagccactccggatggatgacttctctgttgaatncggcctncagaagtctcgccacctcttcgcggatgaaggctngacgttccggtgcctgccgccgcactttctgccggaccggccttgcgcccggccgcacggcgagacggtgctcaatcacctccctggggaccccgggcatatccgccggtctccatgcgaagacgttagcgttggcccgcatgaaggagacgagcgcgtcttccta

SEQ ID NO: 21374 - DNA, 448 bp, Oryza sativa
  unsure (1)..(448): unsure at all n locations
atccctaagtcacctgcggcatgaagcttccattcggcatagcttggttggagatgttattttgtgcatatcccaatcagatgccatagtgaaattctgaattgaggtatcctagttttttgcatatgagaacacagatgggaattgtcagtccatttgtttctccacaatagagcagtgtcaccttgacccatattatacctgagaaaanagctcttaacaagggtacttatctgatagtgtctttccaccataaggcatatttttctttgttagcatgaaggggtttgtctgactcaagataatgtatgctctcaatgagatgtacccaacgtaaatcctttctgttatagaatttatccaaatgcttgatgagcaaagcaatgttctgaaattctagatttattatccccagtccccctttttttcttggttggagactatatcc

SEQ ID NO: 21375 - DNA, 426 bp, Oryza sativa
agcttcattcctctctacatgtatatctgtcataattatttatgtataatataaatatgaccataggggattacctcaagaaaggcttatattatttgtgcattagacattgttgtgcttcaagccacagtgcccccacaaataattctttgtatgttttaaggtaacaaaaatgaattcattattatttatggaagtaccaaatagtaactactaatgctagacaaactcattacttttacttgtatttgtagaaccattttttagcatagcttacatatttatttatcatgaaaatttcatggaaatattacaattaatgcaggtgggatgaaagtgcaatatgactgctcccagagtatattagggggttctatgcatacttgttgaagacatttgactcattcgaggaagagcttggacctg

SEQ ID NO: 21376 - DNA, 305 bp, Oryza sativa
caacaacttagcctctcttattaatgagtatggaggccgatatttcttatggaatccacaggcgacactcagaaactgaatgacaccagagttcgaatctgaaatgcttgattggaacgagttaattaaattggcagacgggcaaatgatctgagtgtgtgcatgatgggaattaagtcatgtgacagcaaacccatcagtgtgcataaggtgacttgcatgtactcaagaaagcctgctttaaaggatttaccacctgatactaaaaccataaaagacgattatcatgctctctgcagtctgtt

SEQ ID NO: 21377 - DNA, 437 bp, Oryza sativa
agcttcctaccacaacctgattgagaacagcaatcttatctattcaatcaggttgttgcccacagccagcatagcatatggatgaatatatgtcattgttgagtaatctgaatatcaagtacagcacgttcttttttttatatataatggatgacggattatcgcggacactcttctcaagcttctagaccggacacttggttttcttataaagtataatatcaatagttcttaaataactttgataaatcaaacttataactcttctattacttaatccatttgtttgtgccctcgaataattgttataaactcaagtttcgctatcattcatcaacactttggaacacacaatccatggagcttaacggagcattctaaatagattatccacaaattcaagccgattgattataggaataaattaaatattatat

SEQ ID NO: 21378 - DNA, 165 bp, Oryza sativa
caggccaaaaccgcttccttaccacacaccggaggctcacaaggtttttcacgccacgcccggcggtaaaaaataatacatcgatggtcccccgaaaaccgctcaatcggaagagtacctcacccccaaatcaaagcactcgtccaccgactgaaaatccgcatt

SEQ ID NO: 21379 - DNA, 396 bp, Oryza sativa
gcttttattgtttatgatggcggcgcctaatcatggagcatacgccttctgtccacgccaaggcacattgaatggtcagtgacgagcttcatgaaagttggcgatgctgccaaatgtaagccaaccagcaccacctctgccatggaacagcactagctcttttctgggggtgaattactttcttctttcaatactatattctcttttacattaagccaaaagaggagcttcattgaagcaatgtcagacgcaatgaagatccttgggatttcatgtggatacctaacaatttgtgtcataaacataatatatcatatgtatatcacatttagatatatatacatagaattaatactgcatctccaatctgtttctcaatataaccatttatttatc

SEQ ID NO: 21380 - DNA, 430 bp, Oryza sativa
  unsure (1)..(430): unsure at all n locations
agcttcttctacctcaaagctctaatccgtcattgttgcattacatcaaagctctaaccattcgggaaagtgaattcatacctcgaggggatatcccctggtttcgtgaatacacctaaatagtcatcaaaaaatatataaaacaaattagcaacataaattaatatgaaatatatcactccataaacacataagtttaaattcaacttctataagttataacaaaaataatagatatagttgcgaatgtgcgataactattttcagtttaatttgttatctttgttgcaatttatagaagttaaatttggtcttgcatgtttgcggaatgatatatttaatattaatctatgttatcaattttntttatcttttttataacaatctagatgacatgcaaaccacgagtgtatcgagggatgaaaatcca

SEQ ID NO: 21381 - DNA, 402 bp, Oryza sativa
agcttccttaccggttatatcatgagcattgtttgcttcaattttacaacaacggaaagagaagatctagtggatcaaaagccctaaaccaatttttggagatcgagaaagactcggccaaatttgatggggagaatcagcttaagcatcgtaagggcatgggcacggcaccatcttctggagggctccacatgtgggttgggccacaagaaaggattaaaaacatcttatccgtttcaacggatggccattctttcagtcataagtgaaaaaacaatcgcaaaaccttattcagctgagtgttttattttgtaacttgatgctgctctggtgtctggccttgtgatcgaaagatatacagaggctgcaaccttctgtaattttacggcaacaccttcttcg

SEQ ID NO: 21382 - DNA, 441 bp, Oryza sativa
  unsure (1)..(441): unsure at all n locations
tgcaatcctcttatgagcangaatcacctaatgtgagccggaggcgacgtgttcttttttatctgtcagaggaggatgacatggatcaacatgttaaagatgagctgttagcacttgtggaggcaaaacatacacgggtaacctacgtcatggggcatgtctatatcacagctatgaagaactctatatttttaagagaattgcaattgatgttggctactctctcctccggaagaactgcagaggtccatctgtcacactgcacattccacatattattctgatagaaattggaatggcgtaccaagtgtaacgcgatgctcatctcatgtcacgacgtcacgtggatactccgcagcaacanatcatggtgagtactagccattataccatatgaacttacaatcgttcacgtttttgtcttgtattatcatttgatat

SEQ ID NO: 21383 - DNA, 255 bp, Oryza sativa
  unsure (1)..(255): unsure at all n locations
ntgccttatgtatattaataaaccaggagatanataaacatatgccagtgtatattcttggttagtcgaggaaacagactaccccgcataaaatgaatcgagctaagtgatatcttctacgattccaaactcctgcagagatgttgccccttctttgacccatgctctcagatattgacacagtgagttgctctataacactccggtttcttcataanacatgcttgtgtgcagtactgaattcgacttcagaaa

SEQ ID NO: 21384 - DNA, 433 bp, Oryza sativa
  unsure (1)..(433): unsure at all n locations
agcttcacctttcactgtgttttactgaaacattctttttacatttttattgtgatttaatgtgtttatgcctcaattttccagcctattatttttcttgtgcacccatactagtatgattagtacagcactttagcggtctgattgactctgctaacctgcatttggcatggtgctggtactgcttgtatggagtaatgtagtgcgaacaatagtcgatgtaccgtagcatctggccagggaagacatgaggaagacttcgtcttcttcagcaggaatatctatttccctaattgattaaattaccttcctagtttaaggatttgctatcttgcatctgccagttcagaaagccctcttttntgtaataatggcattgtgatcgttttcattaagcaatatataatctatatacagctagtttcatatattt

SEQ ID NO: 21385 - DNA, 428 bp, Oryza sativa
  unsure (1)..(428): unsure at all n locations
agctntgtttaaaaaaaactgatcgaccagcatttattatagttctgaatgggaatgttatcatctgttctgaagaagtatatatatatatatatatatggaatgttagtgctgatgcatatttacatgttttggtgattttgcagaatggaatgcaacgtgcagaactacgctaacagaaccgagtgcttccggtgcaatttccccagatactacggtaagctacccacatgatggcacatttgcaatttgacagtgacaaactgctgctaaatatatgatctcatctgattcagntttctcttctcttctttctctactcttttcagttgattgatctgacatatatgatatatgccttgcactgagaagaaatgaaagggaaataaaatttacgagatcgaagatcgacggacaagattgatcgg

SEQ ID NO: 21386 - DNA, 426 bp, Oryza sativa
  unsure (1)..(426): unsure at all n locations
agcttgtctaaccctagcttgcatatcggtgatttatggactntctaagtacagaagaaccatacacacatgagtagggtattacgcttcataaaggcccgaacctgtataaaccccttttgtctcatcgtcttgaggggggggctgatcccctcaagatgacttatttttgctctcgaagcctcaaatttcacccgctgcccccggccgaaccaaaaaagggggcctcacagttccctggtggaggagttaaccctccgacatctggcgcgccatgtagggggcgcgttcgtgatttttgaggttctttcgagcgccggcgtggtgagtgccacgccgccagtatgggggaaggcgcaactgttgggatatgcgtatgctacgatagcatatatcacaactttctatcgtgtaaaccaggaacca

SEQ ID NO: 21387 - DNA, 433 bp, Oryza sativa
agcttcactccctctatagcatttaaaacaatcatcatttattttctgccaatgaaaccccactctcctaagcaaccaatttatcttatgggccgactgatgaattccacaaatccctacatgaacttctcccatagcaactctagattgatcattatccaatcactttaataacactccatctatatttcggcgatataactctccatcaagcaaagtgtattctattcaaaggaattctccaagctatttctaactcatgagcacaaatgtccggattcacaattaattcggcattatatttaattgtaacgtgccccccagcctcctgtctgggatcgatcagactggccacgcaatgccggttagaccgctctgtctgcctggtcagaccggccatgtagagccggtcataccgccggtaccaccggtc

SEQ ID NO: 21388 - DNA, 496 bp, Oryza sativa
  unsure (1)..(496): unsure at all n locations
tactcagcttgctatatgatatatgaagaacagctctggtgtcttgtttaaacattgctttttgttaacaatatgtcagcataatacatgggaacataacatctctgnatatcgttcaggtctttcaagaatgtgagatattgttatgcctacatacgatgttccaatcattataagcatgtttatattacacactataggcgcacatatccttttgcttctccgacaagacatgcttntgaaattcactatcaaccgctagcttccaattaatgtaagcacgaggatcataatctccctcgaaataatgcagtgcagagttgatctacctagaacatatccttacctataatggcatgtgatccctctcatgctcgacaagatgcgatgtgacgcagtatcccattattagcgatgctgccttgtagagaaacaagaacataccataatatcgcgtcctatactatagtatggcaggaaaatcgacacactcact

SEQ ID NO: 21389 - DNA, 435 bp, Oryza sativa
  unsure (1)..(435): unsure at all n locations
agcttgtcagcaaatgagacgatgccaataccagctatttgtaccaatatcaagcgtgcaaatataatcgcgacggtggtccgaaccccaagtcttctactttcttcaccagggcctaanaccataataaaccacaagtatggacttcagataaacatataaattgcagaagtataaatgtactataagcacacttcatattgcagcacggttctaatgagatttgagaatacaagatgagcttaccgtcaacaagattgccaccaacggcaagcaaaatgcacggaatcatagcttccctgagatatataaaacagcattgttagcaagagatggtgtttaaatgcgaatcatatttgttattacaagacactataggcatattgcaagaagaaactacaagtcatgagacaggtcaatacccaagaatgagac

SEQ ID NO: 21390 - DNA, 168 bp, Oryza sativa
tattgacattacaggaacaaacatcaacacactctactgttgttgcgagtccgggcgcatctcaagtatgaaatattaactaatgtattgaatctaatatttcatattcaaagcgaataagtgttgatgataaaactgtgcttggcagagatccatgatattaacaac

SEQ ID NO: 21391 - DNA, 430 bp, Oryza sativa
agcttgagggatgtatttggcacattgccaaactgatctgattatctgatgtttcaattggtcattcttgcctctgttggcatatcctctggtagtttccatacgactgtttattcagcgtacatgatagcttgaataaatgaatagaatgttaaacatgggtcgcaactatatggtcctcaccgaaatcaactgaccaaagcaagaacaaatttcgcatgaaagcatcccatcaaggagatcctgatcggtacatactgaattatcgatgttgtatgtatgcttcgcgcaattgcatagcacccagctcggtgctcacgggcacacaccgtctacgtcagacaatacaagaacaatgtgcgcaagcgcaatagacaccaagtgctttgaatagaagtatcaaaagtatcaacgtggaaaatttcttaaa

SEQ ID NO: 21392 - DNA, 433 bp, Oryza sativa
  unsure (1)..(433): unsure at all n locations
agctttgattcggatgtaagaatgcaacacaactttgtcattgttctgcttggntccctgagcatatgtcttctcatagaccaaggagtgtggtatgaatattggagttatagtacattgctccttaaatgtctttttatttcctgccaaaggatagtggacaacaaatacccaagggactacaaagaattgaaaagattttatcatagcctcaagaataattgttcacatccatgctanaagagattggattcaaaacttaagaagtgtggatcccacacatctgccataattttattttgtcatcatttttttgtttttttcgagagaattttttttacatgagagacatttcttttatcctttgaaaacataatttccctttttttcaaatttttttttgttgttcaccacattttcatttaagcaaaac

SEQ ID NO: 21393 - DNA, 321 bp, Oryza sativa
  unsure (1)..(321): unsure at all n locations
acgatggaatactgtgtcaatcactgccagattgaaactgaatctttntgtttcatattctgatatacaagccgcantccatactgcatactgaatactgaatcttcactaacacagtattactgcaatccatactgaatactacantttttctattcattactcaggcatatatcagactaccaatgtactgacatactgattctaacaaatttcattgagcataaacaggaactaattactaatgcatgaagaagagagtcatatcatgtatcatagtgtacaatgaataatctgcgacaaggagataaaaccatgaac

SEQ ID NO: 21394 - DNA, 439 bp, Oryza sativa
agcttctaaactggaagttggttttccacagaaattcctttcttataaacttctacattagactatgctttcttctcctaaaaaagatctcggcaaatagaaaaacgaaaataaaggagaggaaaggcatgactatgaaaaaaaaattatacaaagaagaagaaaataaatgcttgctcccaaatcattgagcaaagttggaaagaaaatatagccatgccccttccatattcatgccaagaaaacaaaagggaggaggaagtatatgaaaaaggggagaatcatttccattattccacaaaagattatacttttccatttttttttcccacaaataaagactcttgatctagaaatatgattgatgatcttcttgaagcccgtattttagctctacaatatatatatgatgcaagtatgtcacaatttatccctacca

SEQ ID NO: 21395 - DNA, 427 bp, Oryza sativa
agcttcacagatccctcatcagaggtggctgttgtctcaacctcctttacgcccagaccctggacgacatgcaaatccctcgcacggaattaaagccgagtaatgcgcccttacacagagtcatcccggcgctatttgttacaccactcggccacactcttcctattactttcagcactcgggagaatttccgtacagagaacatcatgtcatactcggacgcccggcgttagccaagttcatgggtgtcccgcactatacctacatgatgatgaagatgcctggtcctcgaggagacatatccctgcggagtgacatcaagcaagccgtcacatgcgacatggaaagctgtgagatggcccacacccgcgagatcacgctcgtccgagaagaaattcgactggctacgtccacagcaagcgaatga

SEQ ID NO: 21396 - DNA, 430 bp, Oryza sativa
  unsure (1)..(430): unsure at all n locations
agcttataagnttatattatcaggtcaccactattatgccaatgatttcctccaatactacagtatggtgctgaacaaatcacaggaataataaatctcaagtaacttttatattctgatgaattatgccatacaaagggatgttaaatcaatgttccagtgacttcgataattaattaggaacatatctactaacagatgtactggttagttttctgatcgatatttctgcttagttaattttctaatatagccaaacagaattgtgacaattttatcaatttgccaagctgttttgcagcaaaagataatctctctctctatatatatatatatattgcagcaaaagatagtctctctctatatatatatatatatgtatgagctggatataagttcatatgcacccataatctacactctacacgtg

SEQ ID NO: 21397 - DNA, 312 bp, Oryza sativa
  unsure (1)..(312): unsure at all n locations
ctcaagcttgaatgctgtgaataaataaatatccaaagtattgggcatacgccatgcgcacactgttttaacagatgtgcttanagtgcctaanagacacatgtgttcaccctacctgcatatatatggcatatgtggtgtaaaatccgagtaagtaaactcatcaaggatgtaccaaccgcctganaaatgaccataatatataatcagcctaagccattatattggtcaataaaaatgcacacttacgtggcaaatagcaatgatattgtatccaatcaattgctggataaacccaaacagcaccttgac

SEQ ID NO: 21398 - DNA, 413 bp, Oryza sativa
  unsure (1)..(413): unsure at all n locations
agcttaaagccatgaatccctttcatgcatatcttgtatctggatcctgcagaacanacatattggaggagatgtctctgatctaaatataatactcgcgaaaaactcatgtatttcaaaatatttataaacatgtatctcttctcttgtcaattttgaatttcccgagcagatgactccttacccttaaacactctgcccgactagtcatagccaccaagcaccggaagtctgcctaaacccttcccaaacatgcatatgagtgacatgagttcgccattaatggaacaaagtttcacggatcggagtttactactccggtacttttgcaattatatagagcatacaaaaaatatatctcatctctatgcttttgatttattctcgataatacttagcacctttgcgtactc

SEQ ID NO: 21399 - DNA, 304 bp, Oryza sativa
  unsure (1)..(304): unsure at all n locations
cacctacatccacccactcatgtcactctccctcctccagacccttttttccattctccatcccaccaattcttaaatatataataatttataccaatatctcaacatgccgcccgcgcgccgcgaacaccactcatttcattattatcttantaattataattaatccactctacatccatccatatcacaccctcctaaatactttccctcttctccatctatcttccctattcatcatgtcggtaaacatattgcacattcttctcgattctattatccttccacactattagtttactat

SEQ ID NO: 21400 - DNA, 296 bp, Oryza sativa
  unsure (1)..(296): unsure at all n locations
cagctttaataactaaccacatcattgtcctgctgctaataacatcattggtgagaggnntatgaatattcactctaatacaccatgtgtattccttctgccatgcacgcagggatggacataatacacactaacgaattaacatgcctggaacgggagaaatgacacatgtactcttgactctgcacgttgagaacgacctgaaacatcagcttagtattggcgcattaaaaccttgcgcacgcctgatactataaatctggcggagcaattaggtatgagtattacacctgtgc

SEQ ID NO: 21401 - DNA, 428 bp, Oryza sativa
tagcttaccaaacccaaattgctgctcaagactgtttccgatgaatagcaagcttatcatgttgacaatcatgtggattatgccagcatgtatccagatacagctaatgagacgccatgcttggtgctgatgaacaaccttcgtccagtctagtgctcccatcttctccaaactggccaatggagcaaacaacttgttagcactaagaaccccccttgttcttaacactatcaaaataaataaactgcacaggcgtattacagaacagtatgcatcaatgaagatagataatgtagtcctcagaaagcttccgatgtgatgaaattcgcaggctagaacaaacaaaattcaccctttttaacatgtgttggataaaaagaacgtcactcctccataatcctggattgcaaggggtagtagtaccaata

SEQ ID NO: 21402 - DNA, 420 bp, Oryza sativa
agcttcactctgtatgtgagcttctgcggttgttatggaaaggaactatgtggcggcaatggggatgcgaaggctggagaactccatgaccttgatgccttgatggtaagcgcactgctggacaggatgaaggctgtgagcttggaagcggaggagctgctgctggtgcctctagtgttgatgaggaggttaggccattgggtttcaccaggtaggaatggacgggcacatgaggccctatgtgggtcttggtgagcaataattgagctggcgtcggctcagctcacgctctgatggtgttgatcaagctccactgcaaccaccggacagcaatggtcctgcttcgctaatcgtcacctcttctttctagaccgagctccaagtaactttctttcccttggcttgagctccaccttggtc

SEQ ID NO: 21403 - DNA, 295 bp, Oryza sativa
  unsure (1)..(295): unsure at all n locations
atcgagttcacactatgaggaagccttctctgctatccaccgagtattaccagttgtcttgctcatcgagagtagttnggtaggctagattagctagcctgcttcctcttctttngtgatataccctagctcaatacatataaattggagaggtccaataccctttacgagagcctgaaccagtataaaactcatgtctcccatgttgttattccatactcatgcatatgttggtatgagccatatcctacgtccctcaaatatcatagtcagatataacccgtcgaccaatata

SEQ ID NO: 21404 - DNA, 432 bp, Oryza sativa
  unsure (1)..(432): unsure at all n locations
agcttatctntaatacttcatacatatgttcaaatgttcaatgtgacgaggtgaaaaatnttaggatgagatttaaacatggcctaaataaagacactcactccgtaaaaaaaataacctataaatataacctttctagttaggttgagtaggccacactagctctagtagtgtcccagtggaggagtactgccacagttcttccccttaattgcctatgactggcagagccggggacagcttacgattgaagaaccgggggcgcagtgaaatcgaattgcatttgcatgtgcacttttgtgtgacggtgtagtgtagtactccgtattgattagcagagcagattgtgaagttgatgacgctcgaggcgcagatcacggtcgcccgctcacagtaagtactactgctgcttgaattctctgttctctccac

SEQ ID NO: 21405 - DNA, 417 bp, Oryza sativa
taagctcatcgtacgaatacgttcctattctcgtgtagggcaaaacatcgaacagaattcctcagcttatacacatatatatggcatgattgaggtccatcaaagtaacccaagaggttgtatataccttgattacgtacactactactccctccgtttcacaatgtaagtcattctagcaattcccacattcatattgagattaataaatctagatatttcatcaatatgaattgcaaaaatgctaatatgacttacattgtgaaacggagaaagcaattgttattaatccataagatactccataatttcaaccagtcgatgctaggtccaaatcgaatggcatatgacatccatctgggtaacaagctgtgcagaatacattacagcatagcaatgataattttaggcagaaac

SEQ ID NO: 21406 - DNA, 298 bp, Oryza sativa
  unsure (1)..(298): unsure at all n locations
cagcttgacgacacgagtgctcacacatctggtctagcgcactctctgcatctatagtatataactcgcaaaaggaacacaacatatagatatacttgattgcgcactctaactgcggatgtacctgatcataaatacttgaaacttcctttgtagtctgtntcacatgacatcaaactattaaaggtgactgttgatagaaggattactctctctgacatctgaacacataatntccgagcctgcgcatagtcgccagctctcttgtacatataaatcatcatatgagacaacttct

SEQ ID NO: 21407 - DNA, 326 bp, Oryza sativa
tgcagcatgccacttgacaaattcacagaagcataagctgtgctttgttgtacggctaatgacactagtgagtttgagcggccacatccatctgaatcaatccccttgcatgatcctatctgaaatgatgataagtcaccatcaacggattaaccgggactcacttttgtgaaacaactaatgtgatggactttggtactgaagccgaatcaccaccatcataatcctgctagcatgtgaagcaaagcccttctttatgaagatgtattatcacgacagagataagcatactgtccgcaacattcttcttcctttagaagtactgc

SEQ ID NO: 21408 - DNA, 435 bp, Oryza sativa
  unsure (1)..(435): unsure at all n locations
agcttgagtcgagatcaacactagtgacaatntgattcatccatgtntataccaaggtatttaccatcatttgtcaagactttcttctcatcacaagcttgatttcattcttgccaacatggcgatgtccttggcttggtgaccattaacccatggtgtcatccattagcctcatcatagtgggacctattccttttcacatctcaaaggagaacaatagtctcaacaaatcggntgtcatccttcacttgatgaccaaccggttgcatatgaaagatatggatattgttgttgagttttcattaacatcacaagtgtcatatactcgtatgcaaactcaagtgcaaagatccgatataaataataggtgaacaacatggatctggaacatgcacaataaatgtataggaattgctccccctaaatatatgcata

SEQ ID NO: 21409 - DNA, 240 bp, Oryza sativa
tcactattcttgttttccattatcttcagctggcctttctttgccttctcttgcagtaaagtaatgagctgaacattctcctctgactgagagtagacaatgttctttcttccactgatgatttccatgaccacaactaccaagctatatacatcaaccttctctggtgattgtgaagtcagccattcatgtgccatgtatccaggtgtccctttcattcttgtcacaactatgcttatc

SEQ ID NO: 21410 - DNA, 433 bp, Oryza sativa
agcttcccgatcccgagccgaaagggaggattgtataagccgggaaggtacggaactgtggaggaatgggagtggcagttgagctccgcgacgggacggcgatgggattaggtcgctgaggtggaagaagacgaggacgaacagtattcctttttttttaattgaaaactaatactccctccgtcacaatataagggattttgagtttttgattgcaacgtttaaccacttgtcttattcaattttttttacaaatataaaaaatgaaaagttgtgcttaaattactgtagataataaagtaagtcacacataaaataaataataattttaaatttttttaaataagacgagtggtcaaacgttgcaagtaaaaatctaaaatcccttatattacgggacagagagagtaataataattcgctcttgtcatgg

SEQ ID NO: 21411 - DNA, 431 bp, Oryza sativa
  unsure (1)..(431): unsure at all n locations
agcttctactctggctacaccatgatgttctgtctctgactangaattctttgcggcgagcatgtaaacttgtattcattgtatttcaaattgccacttggtctgttttgacaccacgtctttggtttaggtgctgttggctatctaggatctactctctttgtgaggagaatctacagaaacatcaaatgcgactaaattgctactctgaacatcaaatgtgaccaaagggctactccgttgccgatagatcctatcancgaagtgtgtgttgctggcgcacgtccattgtggagtaatgctcataagattctgatcaacttttggaagctatacacgagattgttctccctttgttttaccttctctttatatgtttttcttttacttcatatttcttcttggagctggcctcataaatgtatacctca

SEQ ID NO: 21412 - DNA, 439 bp, Oryza sativa
  unsure (1)..(439): unsure at all n locations
ttaagtcacctgcagctgcagctcttattggaaaacctatttttgttctcgataaatctgtttcacatcgtccatgtatttagagcaaaatgtcagacactcatcagcaatattagcctcggcaattgaaccttctggtcgtgacctattcctcacatatcgcttcaaagtatatagtcgcctttcaattgggtacatccacccatattgcacaggacccctgagcaatgcctcatcaggtaaatgtatagcaaggtgtaccatcacatcaaagaaagctggagggaaaattntctcaagcttcaccaaaattatagggatntctttcttcatttgaaccagcacatccttgttaagagttctgctgcacaatttcctaaaaaacatccccaactcagctatagcttcataaatatcactgtccagaaatcctctcatg

SEQ ID NO: 21413 - DNA, 451 bp, Oryza sativa
  unsure (1)..(451): unsure at all n locations
atgataggcgactactacaggtgttactatatttcctggcatagcagtctttaatttctatttctttatatcggcaagttcatgcgtttgaatggatgtgtttgataagcacctctcagagtttaagactggagcttagnagaatgatgctgttgagaacaccatggtggcataccaaaccgctcaagtggcttccttaacagcgaatttgttgttgcggcatcctgtttgttgtttgtgcactttgcaatttgactcgggtgttcagctaagttattgagatcggcgctccttggcctgtcgtgttctctgatattggagtgataaaacttcaagaattggcttgcgagttgcccgactatctatatactggctgcctcactctcgtgttatatcaacctactctcgacggctgatctgaagagttattctcgcttattcttttggatgg

SEQ ID NO: 21414 - DNA, 431 bp, Oryza sativa
  unsure (1)..(431): unsure at all n locations
agcttcgtccttngagtagcaagctagattgttatctatgtataatatggataatatataatatgtatatagatcctagaaccaatacgttctctcgacatatatgtatgctagctgggtgcctgtgcgttgcaacaggaacaatataactttttaaagaaatattgcaattgacaaacacttaaattctacaatttgacaatttgcccctagttgcacaggtctccggcaggcatacaatttcaaagcgataagtatacatgttgtaaattaaaattaaaattcctaggtgtaagaaaattatcacccttttgtatcttgagatttattcacatgcaaggcaccagagttcaataagccatgaagatgcttctctcttattttagaagttgtttctaacctggctattaagttcactttgtcactatgct

SEQ ID NO: 21415 - DNA, 222 bp, Oryza sativa
  unsure (1)..(222): unsure at all n locations
aacgatatgtccgaagacatctattcttatgttcatttgcgatccattcagttggttcgcgggtattaaatatatccctgagtggaaacaatgcgactaccgtgaccgggtgactttgatagtaatgagattatttcctgacgggaattaatacaccatatagtaactcttgaacctgatgatatctntgtctggagtgggctaagacctcgctaacgaaat

SEQ ID NO: 21416 - DNA, 408 bp, Oryza sativa
  unsure (1)..(408): unsure at all n locations
agctncatctgcatcaagcactggatgtgctattctattctggancngacttaccctgtgaatctgcaaccatttttgtgctgcagctgctgcactgaactcatcagatcagactttggaagcctgcagcataacactattcttggtcatcttggttcctgacgaaaaaggcctctctggttggtaagtggcctctgtcttttgataaagaagaaaatgagactcaggataaagcttcagtctcaatgccactaggtgtagtagctatataaccctgctttgcaatgttctttgtgctccataatttcacctccttgcattattattacataggcttactctctttcgtctcttttcgttatgctgctgattgatgaatggatggttctactctcagaaccaaattcc

SEQ ID NO: 21417 - DNA, 419 bp, Oryza sativa
  unsure (1)..(419): unsure at all n locations
ntgctaataacttgcgctgtcgacacggattngtacatatgcacgatccaatcttaactatacagatacggccggcctgcgccgtacaagatcgacatcatccttccttcaccggtttccacccgacatctatacatccaaagtgcgcagcagtggtgccagcaacgtcatcaagttcggacgactaattaatagacactataacaggatcggttatctctaatgggcttaaagcatcatctccttcgggctgtgccctcgtcactaagcatagatcagcgatgtgagagaatatctcaatcgggcatccgggcggcacaggatgaacatctcattcgggccaacaccataagcccggtacggatgactctcatctctaacggagctagattatagtccgtcacggatgaatataattc

SEQ ID NO: 21418 - DNA, 425 bp, Oryza sativa
  unsure (1)..(425): unsure at all n locations
agcttcgntgctagaggtgagttaatctgacctctgtagactatcttcgaacatattacttgggtcataactgggaatagctcccacgaacaagcagctcggattcactatctttacattccatttacttcccattattatcttcaggttgtcctcagttagcattcaacgtattcctttacacctttaaccttgatgtgttctttcccattgggtcatctcccaacacatggcattccctggtaaccggtgcttgcactttttactccgtgtagcatctgatactgagttgaggatttcactccttgccttcatagaaacacttttacctaggtcatcttgcttacttaatgacaaggtgactgttgcggtgcaattactatcangggtcttccttgagcgatgcagagcatgtttctgtttat

SEQ ID NO: 21419 - DNA, 333 bp, Oryza sativa
agctctgcgagcaaaatatatagcatggatactattaagccgttaggacggtagaccaaataatccatggtttgtgtgtacgagctagctcagtctaagttagaaatattatttcctatatgcgctactccctctacgtgacatgcatttgacttttctttatatccaagctacaactttgacataacttttatgaaaataagtttataaatgtaacaaattatgatatcatggaaataattttcaagacaaatctgcacatgttatttttatattttaacttaatatttaaaatgttttattatttaaattttcataaatttaaaaagtcaa

SEQ ID NO: 21420 - DNA, 378 bp, Oryza sativa
  unsure (1)..(378): unsure at all n locations
ctagaaaagaatattgttcgttatacgaaactgtactttatacgaacgaaaattagttagggtaagtagtgaactcaccaattcctgatagacgaccgcatcacntttgttctcaaatgtgacagagccgtccggtgtgaccttaccccttgcccgcgcccagatgcgagctctttgttcanggatgtctgaaaaccgngtagggacattcgctgctgcagcggctgcatcttcttgggcccatattgcctccttgccgatgtaccctgcggtgcctatccgatgcgggtgctcattccgctgttgcagtaagcgatgtgcctcgcttgattcctaaactcttggtggtctgagaaacagaattctcccaaccgcttc

SEQ ID NO: 21421 - DNA, 402 bp, Oryza sativa
cttagcaacccaactgaataaggcccaagatgtcttcatagagcctggttctatccttcgagaagtgggaaacacaatctaagttcatagagcggagagttctaacctttctcatacaagtgactcgatagatcatgaggtctccccaaataatctgttaattcaaaaagatgtggaatgggctagaaaagcgtcactacaagaagatgaaattctgatggtgagggaaaaaatagatcgtatgctttatgtagaaaatccaaacggtgaaggttctggtgctatttatcttgaattggacaaggaaaatgatttcttgaacgtcaaaatacaagaactctagaaggactgttctgaactaactgatgaaaatctggagcttatatacaagttgatagaagt

SEQ ID NO: 21422 - DNA, 371 bp, Oryza sativa
acagtatgtgaaaatatatataaaatggtcataactatttacagttaagataattacattatacagcagcttttcagattaacaggtgcatatcttctgaaaacaacaagatggggttaacaccaaaatatgacacctcgaacataaatagaagaatatggccgaatttaacaaggacctggtttcctttatggcgctagtatgaccgcaccgagagccggcaaaccggtgatgtgggaccggtctgactggtggcatgttggcggtcagatcgggtgagtctgactccgagttcaatttcgccgggtctcgagtcccctacttgagaaggtattcttgagtctaattggcacttcctcataaacatggaa

SEQ ID NO: 21423 - DNA, 429 bp, Oryza sativa
agcttgtttgcatgttgtcattaataatttatctctttcttagcccttacgctatctgtacgttttctccttctatcacataacccaacaatttgaccggtgttaaaaaaaaaaactcacgtggacagagtgacaactatcaatgtgcatgtgagtgttatgaattggacaaaaccgttcaaggacgtaaaatgagcccactttaatggatgaggctggctgaggggtgaaaatcatcctgggcgttagttgaagaaggaaaaatttacttatttcttgtggacgttgggccgtgttgaatgggatgggttggatgcaaccgctatggtgcagagggactccatcaagaccgtcacgactctgtccatagaatgaggactcgtccgcactcagagggcccttggtgaaatattatgttgaaagaccgat

SEQ ID NO: 21424 - DNA, 390 bp, Oryza sativa
  unsure (1)..(390): unsure at all n locations
actactatttctataatggcagtcttcgatacattcacagaatatacttatcaacgaaanactgccataaattacgaacacgcctgaacttttacaattaattaacctcaactaacccctacccatagttgaagtgccaacgctactgatgattttaaatatgcatgaatatctacaagtatacgtattagagagacacctatctccctaattgccaactacctttctggacgtactttaaaatattgagtgttaagaaagcgtttaccaccgaaacacaactgcggctgggaagaaggcactaaaatgtctcttgtttcagacttggaatgttccgcacccggttgctttactctgtctgctgaaagaaaaatataaggatgatctttt

SEQ ID NO: 21425 - DNA, 418 bp, Oryza sativa
tggaggcaactttcatatggttttggtctcacatcataatacctccttagcagttaggaatctgcaaaacaagacacatacctcacatagtctgattctgatttgagctttgggccttgtattgtatcgtgcgctaagaccaatgaggtggtgccgggtaaccctaggatgtccctaatcatatttattcagtagccgccatagtgtagactcgagctttgcttacattatttttgccattacaggtgcgtcactgggtcgcgttgtggaaccctattcgagtgcttatacattcatctacaaattgagttgcaatctacgctgctcctacttgtttcatccattcgcacacaatgatcagccttcggtgatgtaatcaggttgtaactagagaaacgtgggctgaattgcaggtcgg

SEQ ID NO: 21426 - DNA, 446 bp, Oryza sativa
  unsure (1)..(446): unsure at all n locations
agctngccatggagtgtgccgtcgatgtcgtatgattgtattcgcacgaaggcggcacgtgcagagattccacaccttcataactcttgtggccaaccaccaacccaccatgatcagctacccccgtggacttcttgcattccatctgatcatctccaatgcagactggggcaacgtacagaaaccatttatcacaagccgcaagagagtctagctagcgatccaaccatttatcacactgcatatgcatatggtggtggggatggtttgatagggagttgggacacactgctacatgcgatgcagacgcagattttgttttggcatgcaatatctgtataggttttttgatgaacactctgagagaattagaaacctcggaaatttctgtcttaaggcctgataacaatccgaggggcattactggcaagtataatagtagctgg

SEQ ID NO: 21427 - DNA, 496 bp, Oryza sativa
agcttgattctgagcttaaatgtgccactcattgccaggtgatactggtttagacatgtgactcacaaacaattctttctcagttgtcatctgcactcttgctgttgtgggaaatgaaggtgtcaacataccactacaactggatgtagctgagattctaatgattagtttgtttattggactaacgttgtcgatgctagaagagaaatacttgttcctttcacatgccatgtagatcttgcaacgttcagccatcctgatgcctaacatttctatctcattcgtctatgtaacaagctggattctcagaagagagaaggcatacatgaaaatcctgcatattactacatttctcctcttctttttacttgcattgttgctctcttggctcgtagttctgtatacaaccacagtatgcaattatgtagcattcactacagagatggctaggatcttaaccatgctcagcaacaagcattgatgcttctgtccaatc

SEQ ID NO: 21428 - DNA, 304 bp, Oryza sativa
  unsure (1)..(304): unsure at all n locations
tcatcacannatcttttcttttttcnncncaagaggtgtcttgaacatgtagcccaaaaccactactccctgacagaagaaaagcaaaaatacttcaacccggaaggcctgctggcagtacaatcgcgccggcatgtacaaccctctattcatactacataatacttaagtaagcgacggtaacggaaaactcaaaggtctgacagctactgaccaaaacacttgcatggccagggaaagcgaccgcacctatctggaactgcaaaaacaatcacaataagcacaagttggcaccacagatcag

SEQ ID NO: 21429 - DNA, 180 bp, Oryza sativa
actttcagagtcttgaagccagtcggaccgacgtcttcgtcatccttcttctctgatgtgcactgatcttcggctgtagccttcattgcttgattggcatattgcttctcaaactgcttgtagatgaaacaatctttgctgcatggtttaagtttgatgatgcgagcattgggcgttcat

SEQ ID NO: 21430 - DNA, 365 bp, Oryza sativa
  unsure (1)..(365): unsure at all n locations
gactgagctcagcttgagggcgccctcgtcggtctcccattcacaggaggcacccgcggtagacgacgggcacaggccacaccggcgcttgtatgaacccccagcccccgcaatctcaatttttcttttcttcttttttgatagacacttattgcatcaaatgatgaaaattctatgtaactttgttttgttatgcatatgagttgaggatgatttgtgccgcggtccttttgcattntagcttgatttaagggctcgtgctcaagtcccgatcctcatatggctcgggtcggtgctagtgcctggggagatccacatgtcgagacttgccagtgccggaacatggtgaccganggttatgggtg

SEQ ID NO: 21431 - DNA, 240 bp, Oryza sativa
  unsure (1)..(240): unsure at all n locations
aatctcagcttggatatgccccgatgggggtggtaattacaacactacatggggttgtgggtgcttgtattgcaaacgtgccatggcgataagaccggtcgcggatgcctgaagaattatcgacttacacagccagcgtgggcacggtgggcttgtaggtactctttctaccgactacccanccagggtgggcggatggagtggtcagcgggtgtctgtgatcgctgcggatcaccgtga

SEQ ID NO: 21432 - DNA, 408 bp, Oryza sativa
  unsure (1)..(408): unsure at all n locations
agctttgagatgtccgatcaccaagctgctatatctggtcttangtatagcatagttgtgtgacgtctncgactcctctaaatatgttcttcgactgggtgtatttaattcacgttaaaattaataatttggttgaaattagagcgatgtgacgganaagttggaaatttgtgtgtgtacgaaagttttgatgtgatggaaaagttggaagttgaagaaaaagtttggaactaaacgagagcttagatagtgatcttgagcatgttttgtgcgagcccgagtttagctttagctctcccagttatctggaagttgggggcctgttgattggtgacctgagtgatatgcctgagaaataaagcggtgggtggaagaaaatcaaagaatgaagttgcctgatgaggcgtg

SEQ ID NO: 21433 - DNA, 109 bp, Oryza sativa
cacgttgtaacttcaaaaagtctgaggcttctcctacatcaccatattacaagaacttatgcccttattgggggaagcgtgcgaatacgtacgtcagaaaaacctttta

SEQ ID NO: 21434 - DNA, 361 bp, Oryza sativa
atctattaagcacaatactgcaggtacatgacaaagctcaggctcttatcatcccacttcattatattttagtataggcaactcttactaaaaaattatgaagcttctacagaaacaaaatcctaccttatgccatgcaacgaataagtcctgaaggaacatttggaatactaatggacaaattctgtaactgactaagcttcctacgaaaatatcatgtgtcagacactacagaatcatccaaacgttcagaaacggtggatatccagtcatcttagctgacattctactaaaataaattctacaagcataaattcaaatacatatactagtgacagaattaatagcatgacaccactta

SEQ ID NO: 21435 - DNA, 255 bp, Oryza sativa
  unsure (1)..(255): unsure at all n locations
cgtatcgtacatattcagcttctcggtgtgtcgagactatatgaactattcttatatttntatatacaagatgcaatcacatgccgtatgccaataatgaattctgtagatcatgcaagtatctatatatattacctcanagttggcaaggctttaatgttaaaataattcatggcgtgatgacatgaagtgaattctgacatattaatcaaagccacgatagttaaaacgttttcatactaattatgtgtctta

SEQ ID NO: 21436 - DNA, 501 bp, Oryza sativa
  unsure (1)..(501): unsure at all n locations
ngcttattctcacttaatgtaacgacatattatgtactattggaaatatgaaagaacaagggataatatatagtaccttgatagaacagcacanaataacgtcttcgtaatcccatagcattttcaatagtgcttccccagcatcatctgcctgcctaagtaactccacccncaaatggaacctgcaaacaccacaaatccttatcagcttgaatacaagttaatatttggtaatagtcctatattttntaatttggacaggtagtggtatagccgtatatagcaataatgcagctcctatctattaataccaaaaggcattcataagatatataggaaataaacatgtacttactggtagctttggcaaatccaacgagctagcgttggggcttcaaggaagcctgaaattatcttctgcccagcattcatgccagaccgagaaggagaaatagccattgatactctctgaacagaggaaacaatactgctgacatattg

SEQ ID NO: 21437 - DNA, 408 bp, Oryza sativa
  unsure (1)..(408): unsure at all n locations
caccactcatcaatggcctttcaaatgttgtcctatccgcgaaatcctcaaatgtgttctgtcaaatgtcaatgataacaagatctcataatcttgaaaaaatgcacagtattaatatgatagaaaataacaaagatgtgtttctttaaataacatatatctttgaaaaactgtgcatcccctcctggcctcctgtttcagctataatgatgttctgttcccagtgacttatcatggtataagcagttttgaatggagacacctattctaaacattcttctttggacaaacaaattgctaatggctaatcagatnttatactccttccagtcagtcacaataacataccattttgatcacaacggcttcaaaatacaactttcacagctaatttctgttacaatgcat

SEQ ID NO: 21438 - DNA, 464 bp, Oryza sativa
  unsure (1)..(464): unsure at all n locations
agcttcaaccagttagataccataccctcattcatatcangaactatgtgtggtggaaatcaatatatcaccagattctcaaaattatcacacatgttatcaattgagtacacacagaaaaaaagaaggtctaactccaagcattatatctcctatgaaatatgttttggcaacattgaatttattcgtgaataacagatttaaaaaatggtagaacatattgcacttttgtacaatgcatgcaaacaattgactgctgccgctntcacttcacgctccagaaaataattccttctaatcatactgcttgtaaacacttccttcgtaacaaaataactagttggtgaagagggcgcatagtacagcacacagataaatgaattaccgaaatcgcagtcacattgacatacaaatcaatcagtggttgcaccaaccacctacacagagaataattacaacttcaa

SEQ ID NO: 21439 - DNA, 442 bp, Oryza sativa
  unsure (1)..(442): unsure at all n locations
gcagcttgcttttgctcatgtccgngtgattattaacccctaatggcgaaagtaggcctgcaagtcagcctgctgttgatacatcattgttgtccaacatcggaaaagtcgtgcatcaataattctgctgccacctcttgagtctgcatgatgtgatcttcaagcgcatgttgtatctctcctgcttgcagcacaagagcgcacaccctccgagtgagctcacccaaatccccacgagaggagaccgagtgacgcatccatgatgatggagggacgccactggaacttgaagaacgggagtacccccagtgtgtgtcatgaggcaagatccaccggcgtcacgttgcggtacttgggccaatcggagcatcccaattaggcccaacaacctatacatctgactagtggtaagatgttgattctcgactcttctcctgcatgt

SEQ ID NO: 21440 - DNA, 100 bp, Oryza sativa
atcaaagctcagcatcacatacattggatacgaccttatcatctatgcttcgcggctcaggtgatatagtcctgcgacacatccacttccctgctaattg

SEQ ID NO: 21441 - DNA, 103 bp, Oryza sativa
actactgcacggggaaaaacagaatctctgcttatgctatattggccatcctatctggaataatattgcatcaaaatgctgattgctatgtggcctgctagca

SEQ ID NO: 21442 - DNA, 362 bp, Oryza sativa
  unsure (1)..(362): unsure at all n locations
agctnttacaagtgtcttaccagcattgcttatgatgctataaccgcgggctggtgtgtgacaccttaatagacgtgatgtgacaattgcaaggatcacagtggtgctgactataagtatatatgtggagcttacgaggcacaatatatagtaggaaaggaacgcaattgtgctaatcatacaatgtgaagttgaataatagttcacagtactattcaatgtgcttgtctagcctagactcaactctagctcaatcaagcacccgacaacactaaagactagatatgaatcgatgcacaactctgcactctcataacatactctaaggatgaatgagttttgtttttctctttcttggcgcg

SEQ ID NO: 21443 - DNA, 277 bp, Oryza sativa
gcagcatgcagcttgtcaggcctcaaaaagcaggaatgttagtttttattttcatcactccaattatcatataaaaactgattggctggtaatcttaatctgccatatctgaaaaataaaattggctataacataaataatcatactgatgatatattgcacacataatatcaataagcaatataatatatataatacttatatatatatatatacatatgcaatatatacacaatatatatatctgtaaaaagacactcgtttggtgcccatggtg

SEQ ID NO: 21444 - DNA, 333 bp, Oryza sativa
catctacatatctcctggtcgtatcttgattcagcatataatatagaatatgtgtttctcaatgttacaaccactgcatagcacccaccatttggttatgaactactcctgatcattacatcggtatccaaaacattcaagtatattgctttaccaaccctgtgttgctaccattttttgttatcatgataaatcactgacatttccttttccttctgacatgcgtagctgaacataaatcccgcactaaggagcgtaatgtatcgctatttcctccaattatagtagtatgctctttttcttaaaaactttctatctcaatgtttccatgtc

SEQ ID NO: 21445 - DNA, 417 bp, Oryza sativa
actcggattggatccatactggtttccctagttatacttggacacgaggcatctggggtataaatcaacccccctagaggagaagggagacacccaccatagatgcaccctacacaagaggttgctaagcgcgcatgcgcgctaggaaagtagttggcgagcactccctcctttcctttagtgttaactacctatattagttaatatacttaacgctaatgatagtaattacgaaaaatcatggagattctttgggagatatcttttactaacaaactaaaatctttttatgctagatctgagaactttcgacttaacgttaaatttaaagtcacagttaaaaactttaactcagatttgaaaattcaacctaagattgaaaacttcactcaaattgaaacttcaactgagattgaa

SEQ ID NO: 21446 - DNA, 157 bp, Oryza sativa
tagattgggatagggaaatactcacaatctgtaaaatgggttccttccaggtttgggcttatttgaagggccagcgaccaatcctgattttggtttcgtgtttatcattccgcccatgtaccagtagatagataaacttgaccgactgaccggcgac

SEQ ID NO: 21447 - DNA, 493 bp, Oryza sativa
  unsure (1)..(493): unsure at all n locations
agctttcaaataatttatctgatatttgaaactcctatttctagggtcgtttagaacttcatagaatatgtgataattatgacaagtggatagacattataggcttcagataaacgattataaaaactaatcggtactaattcatgcccaatgcaagctagctaaacaagatatattgtgggtctggttactttcgattacataattcctaatacttaactaaaaattttattaaaaaatgaaattatgggaacaatcatataagagctcattccagataatgatatgtttgtagtaatatttaaccatccaataattgtgttctcgctagcttcacacacttatgggttgtctcctacactgcacaatagaattggactctacaagaatatgtatntaacatagttttgaatccgctcaatccatgaataataaacaacangaacctattttagtttagatggtacacaaagttgatcatattataaaatgt

SEQ ID NO: 21448 - DNA, 416 bp, Oryza sativa
  unsure (1)..(416): unsure at all n locations
gcttagcctattctacaatgtctcaatggggttatatgatgttagctctaggtatagggtcttatcaagctgctttattccatttgatcactcatgcttattcgaaagctntattattcttgggatccggatctgttattcattcaatggaacctctngttggatattcaccagataaaagtcagaatatggntcttatgggtggtttaagaaaatacattccaattacaagaacttcgtttttatggngtaccctttctctttgtggtattccacctcttgcttgcttctggtccaaagatgaaatccttagtaatagtttggtatattcaccctttnttggaataatagcttcttttactgcaggattaactgcggtttatatgtctcggatatatntacttaactttgatggg

SEQ ID NO: 21449 - DNA, 264 bp, Oryza sativa
ctcagctatataagggcttcacaggggtttattcgttctctgagcacaaagatatatatcggatagattcgaaccgcaattgcataggtaatcactactatgccagcccatatcatgatcttcaccaacttggatttggttctctcgcgaaaatcgcgagttgcagagatgagaaccatgaaaagcaagatcccgaataagataacagaaaccgaggaaaccacaagagtgaagactagtagagtctcgtcttttgtcattctt

SEQ ID NO: 21450 - DNA, 441 bp, Oryza sativa
  unsure (1)..(441): unsure at all n locations
agcttccacgcggaggacggtgtgtggaggaatgagatactgatggaggagcagtgcagtcgtggactttcggctgatctactaaacgtcgcaggaggcgtctggagcagncgtcaccgccgcgcacgctgctgtgcagcccgctgccgtcgtccatcaagctcgcagcccaacgccgcttggcggctactatccagagacaccccctgctctcacgggcttgcagcaaatctctgaacttttggagcaagcttagccagccgccttcctctgctttcttgctgcttgtaattttaccttcttcgacatagcaataggtctctgcttctgatctttctttttctctccttcccttggtgtgtgtagtgacaagtgatcacagatcagtactatataaaagagttctatggaagcctagcttatggtttctggaactagctc

SEQ ID NO: 21451 - DNA, 452 bp, Oryza sativa
  unsure (1)..(452): unsure at all n locations
catatataccttgccacccgctagcttcttgtcatcttgagcaatcagacctgcatgtgtcgtttaatttctctagctagctacttatgcttactcatccttactaattacaataatctattatctaattcccgtgaaaaaaaagctatacaaatgttatttaatatttgcgagggaggaagtattatgtcctaagttatctatacatgtatctagcggtgagacatggaagagagaaattaacataatgggggccggcggggtttgagatagacatgtcatttgtttgtgatgtacgcactccatgcatcatatcgtacatgtcgggnttttgaatggagatcttttgaatgcgtagtgtcgtccgactgatcgatggagctacaatagctagctggatggatggatgcagtgtgggtgctactactccatatatatgttcgtgttgcatg

SEQ ID NO: 21452 - DNA, 316 bp, Oryza sativa
  unsure (1)..(316): unsure at all n locations
tatcttttttttttctggtacctgatagcttatatttctaattacctcttaccatatgctccccagccatcttctggtcctcacaagtccagagagtgcctgcctctgatccttattatcaggaacaggctcaagtatgctctgacataccgngagggtatttctatcctcatgcagcgccattgtctggttgatggcaaggtcaggactgnacagactcaccaacttggttcatgggtatgctcaatcgtattgcnatcaatatatgcttcagtggattgatgtaaaacacttggtgctttgtgnaaacatattc

SEQ ID NO: 21453 - DNA, 380 bp, Oryza sativa
tgtgactcggagatgaaagtcattagagggaggaaagttgcactaaagttcatgatgacattggatcttcttatcagactctccagggacttagacaaagcgacgctttatcccctcctgctgcgtaatttagcagcagaagctctgaccctcttagtgaagagagctgatgagaattctttactacaatgtctacgaatcaatgacgaaaacaaggtggctatgttacaatatgctgatgacaccattctttttatccctgatacttggatatgcagaaacctcaatgcgatcttgtctcttgagcagtttcaggctcaaaatcaacttatagaaggaaatctttgtttggttgaaaagagagcccatatgatagcacc

SEQ ID NO: 21454 - DNA, 321 bp, Oryza sativa
acttctcatagcttcaccatattacaattcattttttttaccaccctccgtgggaggtgtacacaccgctactttatgtcccctcacgagagatttattaaaattttctcacgaagataaagaattttaaaccaattttacgtcaacaactttgcaaactttaaattaactattttccaactaattattccagcacgacttcaattaatgctagcctgaccactgtatcctaaacaaccacatagcttggctcaaactattatgaacatatattaacgggggggacaaagtatagataccttctattcacaatggttccaa

SEQ ID NO: 21455 - DNA, 429 bp, Oryza sativa
ccggatcttaagtcacctgcggcatgcaatgctgatcctgccagctgatgcgtgtgacttatggtgcatacatgggtgccatgttcatgatatggcgcgtgatctaatccgcttgttgtcagctgaagaaaactttgtcactgtattggatggcaatgaagaactggtacttctatcgagaaattcccggcaactagctctgcagtgtaagagttctgagccaaacgtgaatgtcccctgtcagctcaataagaggtggagcaactgaggtcctttcgtgtgactgagtgctgtgatataagcatggcatgcacaggctctcatgctatacgtgtattggctctacaaaattgccttattctggaccatagcagtaaacacagtctgcaacatgtatggagttacttcacctgatgtaccttggactac

SEQ ID NO: 21456 - DNA, 378 bp, Oryza sativa
  unsure (1)..(378): unsure at all n locations
ttaagtcacctgctgcatgcaagcttggtgatggtgaaagcaactaaagtctatatatggaatntatgatcaacttatgtgatgcgtgcgcatgtatatagatgcatcacatgcacgcatatgctgcatcctgctagtcaggtccatctatatcgaccaatggctctgttctggagtccatctgactgatctgtggctggctagctagctggaacgacctcttatattgttattatggtccgaagattaacaacaacgaccagtatattataggcttaattagatctcctccctccatccaaaaactataacttctagagtttaaagtgtatcacttcaataccatttacctgacatgttagtcattcttcatcctca

SEQ ID NO: 21457 - DNA, 313 bp, Oryza sativa
ctcagcttataataactgataataatcggtaaactcatattggttttattgactcaactgctgtttttggaaaaaaagtgtgataagacctgcctaactacaatatcaactaattttaactttcactagttttgattgtaggatagaactgcaaggtgcacctcaaatgattctgatgcaatttgaggggtctgtctatcaaaatcattatgtcatgggggaatagctaggtcattttgtccaagtataatgcaacaacgtgttatgaactgtgcaaagggtttattaactgagtgagagactgaataagact

SEQ ID NO: 21458 - DNA, 301 bp, Oryza sativa
attgaccacgagcgatggtagatggcgcttgcaaatgttgcctttgacttggctttcctgcaacttccgtctcagaagtgtccggggcacgtatctcgagcacataacaataatcttcttgatcacttggcaaaagaactcgggtttgaccatgacatgttgccttgatgacataatacaaggacatcagttgcattcgcactgatctttaattatgacatcattaattctccattaatactaggcgtattgttagaattgtatattttttaccgaggcgggaatacactattccccagcc

SEQ ID NO: 21459 - DNA, 485 bp, Oryza sativa
  unsure (1)..(485): unsure at all n locations
agctnggatctagattatagcaactctatatctctatatcatatctcacaataacttaaggttagatcactgttggtatttcttaacgacactattagaaatataattcccagcaatggcgcataaatacttctggtatattatggttatagagttcatttgcaagcgcacggatataccattgtaacatttcacccgagagtattacaagggtatcgtatttattttataccgcgggaagatcatgtagagagaacttgactaataatttatatattattcgtgataatcatatcctaagcacgggttaagataatccaagcgtagagtgacacacaagcagtaagctactcattctcataataaaatatctaagctaagtggaaagaacagagaaggagaatctattctatacttctaggatacatagtatacatatattctagttatctgatatactagctaataccctctatgtgatgccc

SEQ ID NO: 21460 - DNA, 322 bp, Oryza sativa
  unsure (1)..(322): unsure at all n locations
taataaattcgtatttatctgtcccacatagtaattactgctgctcatcatcactctatagctncatatatacctgtganattcctttcgaggagaactcgacttaccccaatccccaacacataagtagaagaagctagctaacatccatcatatctgctagacacatcacatgtgccacgtgtaggaggcattaagaaaggtcttgagacaataacgtgtcatgcatttncaacatatcactcgatcacctacttgactacacttcagacctcatacttaatagactngtccagggtatacatgaacagagcataccaca

SEQ ID NO: 21461 - DNA, 407 bp, Oryza sativa
  unsure (1)..(407): unsure at all n locations
ttgcagtagaaagacaatcatgaggctggagttatcagcctacacagaaatttaataaggcaagatctgcctgctgcatgttttctaatcatagatactctaaagaaaacagccaacaaaaaggaaaatgtattggtaatgactttctctctaagcgctcaaacttctccatgaagtcaagtaatcttgtgaggcangaagcagcttgagtttctcatatctttctttcttaaccaagagattctcaagtctcgaccgacttataagtaatatgacaccaaaaggcattgtattcagaatgttttaaggtaactctaagttcaacgtccttaagtatcttcaatatataagtcactaacacagaagagatcgaaagcagcatctcaatacgttgaagttaacttact

SEQ ID NO: 21462 - DNA, 399 bp, Oryza sativa
  unsure (1)..(399): unsure at all n locations
tattctatctggtgaacaggctaggttattgcaccacctgaatatgcaacaaagtaaattgctctgtttctgttcagctgctccctttttttcttttagaaattagaagagctgaagaattntaacggctatattgaaattctagaagcatgtgtcatgtgcttaaagagtgagttagcatgagaaacgtcttacacacctagctagttaggcatgcctcgtggctttcgaaattgcggttttacctgatatgtgctctatgtgtagggtgtgagagtgaatatgaataatctcctgctcaatgccgcaatccatcttgacctnncaaatgcaattaggtgttattggtgtctttcatacatcaaaatattaaaagcggagtcgtctgtcttgcccccc

SEQ ID NO: 21463 - DNA, 471 bp, Oryza sativa
  unsure (1)..(471): unsure at all n locations
cctctttagccttccatctgctagcttcttcttgtctatcttcaaccctatcttaactatcagtaagaaaagacagtgataacacattgataaaacaattacaactttactttgcactcttgctctgtcctaattctcgcttaagtcatctctgatgctgctacatactaaaaacagctgatcaataagacacccaactttgaaagacaaacaattntggcttggaaagcatgaggaaagtgtgggcgatgttctgcatagagggatgaagtgtctcgtactttctgagatcacaataatgtttactccttgatcatcaacatcacctcatattacctaaaacctacgttatcagctatacacaaatatttggtgcagatgtgtataacaattcattggttcacatattaatctatctatctatctatcaatccatagccggccgctctgccagcattttattggtccaca

SEQ ID NO: 21464 - DNA, 154 bp, Oryza sativa
cagcagaaactaaacatatgtaacacagtttccaaccgaggttattttatccccctgcaaacattaaaacactcacatcatgaacactaaatcctcgaacaggaaagcacacaaatgctaattgtctcattctacgacaggacacaatttcata

SEQ ID NO: 21465 - DNA, 455 bp, Oryza sativa
  unsure (1)..(455): unsure at all n locations
cgcagcatgcagcttagcagagtgccgagttcaggaggattcttatntgtacagnctatccacttaattatagcagtatctcgtaaggtatcctcttatctttagaaaagaggtctagggcaaataaagactctatgttttcctcctatcttttatgagaggttctttcttgtactacaaggactaatatctccccatggatataaacatgtacacccgggtgccatgtaaaatatctcacgaccaatacaatactggcgtattgccacacctttctacttatctactctatttaccatcatgttgagacttggcacccgacgcggcgctgtatcggttatctatctctggcgaatgggtaaagtcaatgtttcgctggcccaagcgactgtatagtcacatctgcgacgttcaaggctgcatcaattagctctatcgggtgtaattacctcaga

SEQ ID NO: 21466 - DNA, 201 bp, Oryza sativa
  unsure (1)..(201): unsure at all n locations
acctctgtgctaacccgcgcatcaccactaccgttgtgctctncaacgccttcagcctcgtctaagccggtggtggtgggcgctgcggtctatgcgccgtgcatgttgctgccgccgctggcgtggccgggcctctcctcgccttggtctatctgtgcgccttgcacgntcgcggcagctgcacgatctcttccatcaccg

SEQ ID NO: 21467 - DNA, 415 bp, Oryza sativa
agctagcaattccacccgatcgtactttatctctacatgaatgaactggtcggtcggttcatgttgcgttatcggcccgccacttgaagaaactctgactgtgacaatccattgtacgaattgacatttccttacatcctcctatgtacatccattatgggatagttaagtacatgatagtattgaggagtgatgataataatagttggaattaccacgaaatcatcgtcgacaatatttggacacacgaaacacctttgtcctcgagttcggtgccttactgaccttatgacctgacaacggtcaccacaacgacactccagacgctcacaccacgtggggagtcctaggggatttacgtgccattctagagcctcatcagcaattcgaacgtcatgctcattcttccacctta

SEQ ID NO: 21468 - DNA, 401 bp, Oryza sativa
  unsure (1)..(401): unsure at all n locations
tgatatttacaaagctccctattgacaattagtntgtatctatgtatctcgacaatgacaacactgcttcgtctatatcgctcaatggatatgaatggaaatggcacgatggttctatcttttagatacgctgaacatgaaatacatgatacaggtctaaccatagtgtatgtaaacagatatgattctatattatagatcttacagatatacaaatagaatcacaagctttgataaaccatataataacattgtctaacagctggagtaacaaatagctctttgccttgactatgcctcatgttatcctgaaatctccacattaaaactgtaccttactatagtttttgtaatcacctgttgagtcaccagtctcctcacatcatgttatctctcacgtt

SEQ ID NO: 21469 - DNA, 279 bp, Oryza sativa
cttaatactgcacaccgcggttagtgctcaaggcattttgaaactaggaacgggcaccattgagctaaacaccaggtgactttgtaaattatgagatgcaggcttatttaactgaaatgggctaaccggaattacgcacataaattactaaaccactgaatgtatcaaaagattagacttttctgaactatcacaacatgtcctaacgaacaacaattttggaaataaatctggtccttttggatgaaacaataaagaaatctaacttttctggcttat

SEQ ID NO: 21470 - DNA, 303 bp, Oryza sativa
gacccggacactcattttttaagagcaacaaacggcgcgttaacccacggaaaccgcgtccactaacctgaccaaccctcccgcgggtaacaaagcccacatgcctcaaatcgcagcgaaggaagcgcgagcgactcctaccacggcgatccacccaaggccctagaaatgtagagccaagtaagagccaaacgcaaccgtagaaacctagaaaaaaaacaaacataagtccaatagaagacaaagcattcacaccgccacaaagaacatagtaaaatgctactagctccaacacactatata

SEQ ID NO: 21471 - DNA, 351 bp, Oryza sativa
acttgataatagatattgaactatcacataatatcagaatgtatttggggctatttgaaaatatgcaaatgtatgctgaccactcaccaccactatggacttttgtagtaaacatatattatacctggtgagcaacgaacatccatagtgctgagctgtagatgctggatcaaactatgaattgtgagctttgtgcgtcctcactgcttgagcaccgatagggaagtgaggccatgaaattcatcgcacgactgcggattatcgcagatcaagttgagctccttgagtgaaggcgagagctgaggctgatgaatgatgcttgtggtgtcatggcagatgactgcttaacac

SEQ ID NO: 21472 - DNA, 412 bp, Oryza sativa
tctaacggactaagcacgagctcactgtacggcaaaataattattttttacttaacacgctcgacgtttttaataaaagatcattcttttgctcaattcttggctgaagaagaatacatatatagctgaacttacccgcgtgaatcagactcatctgaacaacgtaagaaaaataacatgcaactatttactgtatgtccaaaccatatcccaatgacacccaactaatgtgtggtttccggagtcagtaccaactaatgcggttcaaattttccatcttttatagtcaactgctccactttaacaacagcatcataggctataccagctcatcacttctgacgattctttcttatgacaaacatatgcatgcacagcctaggttggtgatgtctaacctgctgcagcaatg

SEQ ID NO: 21473 - DNA, 204 bp, Oryza sativa
agcttagccgttatacaatactctctctctcacgaagtaagctatatctatcatattctatattaatattgacggaacaaacctagatatatatttcgcgttcatattaatgtgtaatgaatatacatagaccatccatattgaatctgaaaatattagacaaacttacatcgtgagacagagaacagaaactatttgcgcgcg

SEQ ID NO: 21474 - DNA, 330 bp, Oryza sativa
gtctcgaccattatatgattatggaggttgcggcacaacaagaagttattctcctctcagcgaatgcgacatgtattctctaaggcagaatctgactgagtgcatacctgctcagaatctgtgccaatggaagctcttatcgatcttatatgcttatcaaactagggcatgatgtaattgttgtatttcatgcggcgtacaacaacttcatgcagcacaggagagtttatgtatacatatagcacaatgatttaccttgtccttatggatcaggtcgatgacaacttgacaagctgtagatagttcttgactgtgatctctattctggag

SEQ ID NO: 21475 - DNA, 427 bp, Oryza sativa
  unsure (1)..(427): unsure at all n locations
agctntgctcacagttnattctgtcacatgttatcagnagcactactacaatataaatctcatgtagcggcactcctctaatatctggagttctaaagagtagagatattctcagaggcactgtaaatattcgctagaatactgttaatctacagacacgtttatatatttcggtaaagtcatcttctaaaatatgcatgatatataatagcattttcttgagacatttcaatctctgtagagatacttatcggaatgttaatctatgtgaagaaactaaatataaataacacgaggcacacgtatacaactagtactatgagggtgagatggttagagcattcaagttataaatgatgtacaggtgagggttctgacagggggtcgcccgggattattgccccggctcctcgtggaaatctcccct

SEQ ID NO: 21476 - DNA, 110 bp, Oryza sativa
tctaaatatttacaccggagggcgaaggaaactacctcgttcactatcaatgtcatgtgagcgcatcaccgccatttacctctttaccttatattatcgccgggagactt

SEQ ID NO: 21477 - DNA, 369 bp, Oryza sativa
tagctgccacctactgcgcccactgcaactagattcgcatattttgtgtgcttactgaaaggatggtggaaaaaattatacagtaggccttttataaaaagtatacctatctgtcgggatgaaccgccagtgtattattgattgatgagtgagaaatcaatatgcctagagcacccgcccccttattatggaagagcctggtacaaaagatatctattccctacggatatgcgatccaatatataccttcggacgactagattcaggtattccttgacgtctaattaaaacaaacccaataccatataattctttatatctgtatctatttagcccaaatatcgcgttacaatggtatcatatctccac

SEQ ID NO: 21478 - DNA, 457 bp, Oryza sativa
  unsure (1)..(457): unsure at all n locations
gcttacggtgtaagccaactcacagtggaagccggaagccagcttgtgggatacgcaagcatacagtgtaagcgaacttacaacttacagtggaagccatcaacctcctctgcctataaatatgatcctaaagggccaaggtgatattgactgctcttcgacacttcctgccttccatcctatagcttgtactcaaaatcagaagaaataaagtttctactcactcgtactttcgatattctacagcttctgtgtttgtctgctcgtgtgttnttcggcagaatagaccggnttctcaacgatacttangccccgtttgttctctccaactggagagatatttccagcacacgcaaaacgagaatactcactagcacatgattagataagtattaactattataaaaaattgaaanaatagatttatttaagttattaaacaacttctatatagaag

SEQ ID NO: 21479 - DNA, 480 bp, Oryza sativa
  unsure (1)..(480): unsure at all n locations
caagcttgtatattctgctaggtagaccatggctatttgatagggattctatgcatcatggtaggtcaaaccagtactcttttctgtaccatgataagaaaattgtgttgcatcccatgtctcctgaagatatcttgcgtgatgatgttgctaaggctgccaaatccacatgtgagagtgataaaaaagcccaatctgatggcaagaaacctgagacaatcaatttgaaacccagatacttacttgctactaaatctgatattaatgagttgattgcatcaccttcagttgcctatgctttggtatgcaaagatgctntgatttcacttcacgatatgcagcattctttgccccctgctgttgctaacattttgcaggagtactctgatgtgtttcccaaggaagtgccaccggtgcttgcactggtgcgcggcattgagcatcaaatcgacttgatcccaggtgcttccctaccgaatc

SEQ ID NO: 21480 - DNA, 265 bp, Oryza sativa
aaaacaactacccctggcgctatgacttgagtgccgctaattaccccgaggatgactgacattctctcaggcacaagcgtggcatactatttccaaggtcaacaagcacctttgttcaaagtggatatgcgacaatagtgtaacctgataaatctctcaaactggcacatgctacgctctgtgctaatggattgtaacggggaaccacaactggaaaaacgtgttattatccatctaacattagtgcttatgaggccatcttctt

SEQ ID NO: 21481 - DNA, 283 bp, Oryza sativa
  unsure (1)..(283): unsure at all n locations
ataatctcagctgcgcacatcaccgaacaatcacccacacatctagcaataagcttcttactgatncaccatcatccgncgccaatcaatccgcacatcatggtcgcccaagcccagtgatacaaatcacctatgcaacaaatataacacgttacagataaagctaattgatatagctcagatcaaacaaatgagataactgagaacaagtattatgctaatatatcaagatggagcaactagctaggtacatggtccgatgcatgcaccgtatatatacctg

SEQ ID NO: 21482 - DNA, 388 bp, Oryza sativa
cactctctatttctccacccatgttgacctacttgactaaccctagtcaagatgtggttcactagttaatgagaggtgaagaaatgaagatgcactggctgtggatgatacaacggcgctgtatctcccatgatgtggatcttgcacatccccttcctaccgacagtaagttaacagtccacaattgattatttgccttacagcacacacctgacatataacatattgtagtacccaccatagctctgtttaaacatggcatcttgttaatttagaatatgctgtcctcgataaacttgaacatggctgtctctgcttcgaaatgcgcctttcttctcacttctgccaacaagaaggcacatggatacatgtgatatagtattgcata

SEQ ID NO: 21483 - DNA, 263 bp, Oryza sativa
accagctgctgtgcgccggaggatcgctgtggctatttttatttgttccgtgcgaaagtatcttggagaacttcccttgaatgttatattacaaattaaagtattattgacctattatcatttgatgggagctggtgaactggacaggtaacacctgtacgtcgaatttgataaaatccgcgtacagttgctcaggttcatctatcgtaatgaaaataggcttaatgccttgaaatcactctcttcatacccacacaattaac

SEQ ID NO: 21484 - DNA, 395 bp, Oryza sativa
  unsure (1)..(395): unsure at all n locations
agcttatgcgcactcaagatgaaggaaggtgatgattgcaattggagcacctctttctgaccagatggactcagatttcacgggctcagaaactaatgaaaaattagttcatatgtatgttgtgcacgcaataactgtctcttgaaaggttctcacagccttacagatcagtagatcacaatgggcaatgtcaagattggaaggaagtgagaacataacatgcatctgatgaaggaattgacagcaggatagactgagaataagccggtccttttcttttccctttgtttggacataatatngaagaagtgggtatacatttttcagaagaatgtgagcataaatgttgatttatacagtactgaagaacaattacatagaggtttttttttttg

SEQ ID NO: 21485 - DNA, 105 bp, Oryza sativa
ttctgggaaataataaaagaggggttctgtctcgacggacaacactggaggcggaggcaggtgttttgagcacagctcagagaaaaacccctaaacctaacgtgg

SEQ ID NO: 21486 - DNA, 307 bp, Oryza sativa
gcccttatctactgcagtctcttgtgtgttcacgggctattcatttgttcggtactggtccactgattgctatactccagtcccgatcgagtgaacgacacgcatgacggaaggaaccagtctatttcctagagccattaggttgcggtgactaaagacactatgcctcgttggttgtgttgtctttggggcacggagggtggttgtacattagtcctgggtgcgcgtactcttatagagcttgccgactgctttccttaatgctattcagcgtccttgtttgtacattcgatagtggattattttg

SEQ ID NO: 21487 - DNA, 390 bp, Oryza sativa
  unsure (1)..(390): unsure at all n locations
agcnttcatgcggagttatgctatgccacggtgtttgagtatgatgtgtgagaccaccttatgcgggagacnggagccagatactcacatcggacgacacgtgtgacatggccgcggggacgacagatgcaagtgctctgatggcgagggcgctgctcgtgatgtcgtgcctcaacgacaacccgcactaatttaaataattaattagtgcacggaaaataattaattatttttcgtgaaacgtgtatttcgccagatacccatagcggacgacgcgtgtgacgtggcggcagcgactaatgcagacgctctgatggcgaggacgctgctcatgatgtcgtgcgtggcgcgtctcnaccactatgacactaggaccggaggcaacgtgga

SEQ ID NO: 21488 - DNA, 293 bp, Oryza sativa
  unsure (1)..(293): unsure at all n locations
ctgctggtgtgntctcatctttctctatatatcactcatacaatatatctctatactattactgattgcataccttatggcgcagttggttgactgaactggttctttatagcatttgcacaaacaagggaattgctggagtacgcacgacgcgagatgctttgacagttataacatggacagcctaaatgtcgcattctcacatcattagctaacttatcacttatcagctaatcgattcacttctcttggaatgcatatgatactatgcattaagtcgcgcggaagatcac

SEQ ID NO: 21489 - DNA, 463 bp, Oryza sativa
gtgttctgatgcaagatgtttatgtggttgcctatacatctcgtcagttacgtccgcatgagaagaactaccctactcatgatcttgagttagctgcagtggttcatgcgttgaagatttggcgtcattatcttttcggtactcgtacagaggtgtacaccgatcacaagagtttaaagtatatctttactcagccagatctgaacatgagacaacggagatgggtggaattaattaaggattatgacatgggaattcattatcacccgggaaaggctaatgttgtagcagacgctcttatcaggaaaggctattgcgatgctacggaaggacgacagttgccattggagttatgcaaagaatttgaaatattataattgggaattggcagtagagggtttcgtgcagccttagaagcaaagcccactctaatcgatatggtagagaagcccaaataatgatc

SEQ ID NO: 21490 - DNA, 436 bp, Oryza sativa
  unsure (1)..(436): unsure at all n locations
tctagagatgccgtatactctaatagtcattctccatgtaaatatgatattataattaactcatgcgtaggctaatgtagcaatatggatatggacattgtcaaaagtggtttaaaagaaggttaattatgatgatatgtggtaactggagcacgacctaatttacggtgatcatncatatcttaacattgacaattactcttaccgacaatananaataggtcatgactaatgaaatactaccagaattgagtatttgactgcacaagctggtgtacttgcacgacacaaacttgtttcagataaatatccatactgaatactctcgatacatattttgtaatggcatgtattggacggccgagactatatgactgtactcagtcgactattacggacatctactacattgcatatttacgctcacctaaagtat

SEQ ID NO: 21491 - DNA, 464 bp, Oryza sativa
  unsure (1)..(464): unsure at all n locations
agtcacctgcngctgcaacttgagcttgcttggtgctcgcgatctttgttttccggaggtccagaagcgtggttcgcggtcgtcgccaaatgttctgaaggccgttctctcttagcaaggcaagtcacatcatccttgagcatattgaatcccagtttataaaattattttgatttaaattaatgcattatcgctctatttatattcccgccgtatcactggtttatttagccatgcctatttacctttgttaagacattattattgctattgtcattattaccttgttcaccctagaataaacaaaaccccaactactggacactctattcatggttccactagtatgaaattaggtagatgcttcgctgttaattaggcaacattaggtggttttataacttagactttgggattctcatatcattgtacactatggaatgggtggctatggcgaattggca

SEQ ID NO: 21492 - DNA, 427 bp, Oryza sativa
tcttcttctcggctgctctcactctcacaagatatcgcctacatgatagacaagatgggctatgtcgagatctctatcaatttgaaggttactcttattttcactaaaagattttgggtttttttggtttctctactatcaccctctctgtatggttgttggtcttattcgatcgtacaatagtggcccatatatgtcgtcatttcccacgaactgtggcgcatgtgcggaggagccctcccctacttctggataccgagccacgtaagcccctcctcactaaccctgcccatctagccatactggcccgacctgcatgcaccttgccatcttgctatatgcacaacaccacacagtgcactagcaccaccaactcagctccatgcctgctgaccatagaagttagaccgtcaccggtgtgggccac

SEQ ID NO: 21493 - DNA, 291 bp, Oryza sativa
  unsure (1)..(291): unsure at all n locations
tctcagctgcgcttcgctcacatctacttggcgctctctgcttagatgcttatgtgnctactggactggcaggacatatgcagtccatgaatttgcagatgaaactttgtgttcgtctatgtgtgggggatttgcatacatgtacgctgacccttcagatagaccggcacgtttatttcaaccatcttgctatgagatttaaccatggacgttgaattcagattgatcaatcttaaattatttacttacgaaaatctaactctctatatataaatgaaagggttcaccatt

SEQ ID NO: 21494 - DNA, 401 bp, Oryza sativa
  unsure (1)..(401): unsure at all n locations
agcttgacacactctgtgacctgtatgagacactggttatcacgcagagaggcatctttgtgaacacccgccgcaaggtggactggctcaactgataaatgaagggcagggatcacacagtttctgctcccatggtgacatggaccagaacactanggacatcatcatgagggaagttcgatcctggtcttcccgtgtgctcaatatcacggaccttcttgcccgtggtattgatgtacagcacgtgtcccttgtcatcaactatgatctgccgacccaacctgagaactacctgcatcgcattggtcggaatggtcgttttggtaggaaaggtgtngccttaactttgtgacccgtgacgatgagaggatgctgttngacatccagaggttctacaatgt

SEQ ID NO: 21495 - DNA, 385 bp, Oryza sativa
ctacctacccacatggctatgccaatgatctggcaagaaaaccaaacaaatggctcagtcatatacaaaaaaaaatgcggccagaccaaacaatcacaccttactaaaaactttgatcggggaatcttaccactaccaaaatattggcacggtctgtacaatgtttagcaaaactgaccaatcaaaacgcctgcgacaaggaggagttgggctatgtgcattgaccgctgtccaatcgtcgggccgaacgggagatagagctccaacaaaaagaataagctcatttgactcgcttaattatagctccaatctgattcatatccacaactacagcaccaaatatcttgacctcatgactattaaaaccgatcacaaaactcccctg

SEQ ID NO: 21496 - DNA, 340 bp, Oryza sativa
  unsure (1)..(340): unsure at all n locations
ttttctgtgatgaactactgaactcaatcaggttgagtgntattctgtcatgcctaagaccatcgtatgaagcacacgattatggagaagaatgtagaaggcagcaatggaaaaataaaaatcttccttcttgttttccatcttttttctccgagcaagtcgtcctctacggngaccccaagctcgttggcaaaccgaggacacgatcgatttccatgtgaactggccgctcttatttaccagactttggaaatgatcacatgaatatatgttgagataatctattctattgtgtacatttcaacgaatttacatcgacattgtctcttctataattacc

SEQ ID NO: 21497 - DNA, 520 bp, Oryza sativa
atcctcttagtcacctgcagctgcaagcttccccacccctgttcataatggactcctgacgtctacgaaagagtgtggttcgttcgacaaattcctacctctatatctatctctgaggtgtttgggttttgcaaaactccatagatatgcagaatagaaatgctatccccactccgaccaagacagaacttttaccaaaagtttattgtgatctttttgttcaataacaattaatgtgaagcagggtcaggaacaacgaatctctttatgataaacagatccattttgcaagctcgttattacgggtagttcctattacgatggatggaagaaagaatggataatccaatagctgcttcagcagccgcaagggctataacaaaaattgccaatatgcctcctttcaattggcggctatcaaatagatcagaaaatgttacgagaattacattaattgaactcagtataagttcaaggcatattaaagctctaaccatgtttcggcttgtgatcaatccat

SEQ ID NO: 21498 - DNA, 448 bp, Oryza sativa
  unsure (1)..(448): unsure at all n locations
gcaagcttagaacatcaaaacaacaggcagaactatttgtatctacacaagctctgagaacgctacttcatgaatcagagcaacacatttatagatgaatctttcaccaactaataataacatatttttagctttgaaaacaaatgtggcactaatattggcatggcatgatatgaatagttcacaagcacatgcgaaaataacagttgaacaaaacaatgttatctgatgttatacatgataactgagcacatacacctactggagaggctttangatataaaataaatgctaacagatttgtttagaaatatatcaggaataaaatgctctattttcattcatgaaaagttgcacaaggtggagtatttgcacgagatggttcaataattggtgttacgtctggtatcctctataatgatgtagtagagcatggacacatactacc

SEQ ID NO: 21499 - DNA, 487 bp, Oryza sativa
  unsure (1)..(487): unsure at all n locations
gctttgccgnatatgtattaatatagtaaagttattttcagagtctaatatattgacagggcatggtgaaacagtcccttgcccgcaaaagataagattgtaggggatatctcccaacgcgggtatctttcgaagctttgctgacagcaatacaattataaactatacgtaattctcaagaagacaatttgatgcacctgccaactgcagcaagacatttagcacatggagacaccaactccagtatttccttaaaacgcttttgatggcaaacgctgtgaccagtggctgttctgttatcacgcccaacactgtcaatcagtctgcagcactgtcagcactatctcttgacacacaggtagctcttctgctatccgggttggcatgccacatgaggacacagacacactgagtgaacagattatcaacaggacagcagatgggataagacatgcaaatttgacatgtcatagggttatgagggatc

SEQ ID NO: 21500 - DNA, 343 bp, Oryza sativa
  unsure (1)..(343): unsure at all n locations
tgccttccgcttgttttatcctctgcttcngctggaaatgtgaaccatttcttcattgccgtccaagctcgctctntctcggcttttgtgaccttcccgatatctttatggaggatcccgaagttctcacgtgccgcttgcccgcaacatttagaccatctttcaatgacagtcctgggcgccgtgggcctaccactagcgtcaacctctcttataacttgcactgtggtcggccatatatattgtgaccgcggatatctactagacctacttgcacttgtctcgcccgacatcgacgtatgttgttcctgccgcaattctgcagctcaaacagaaggcaata

SEQ ID NO: 21501 - DNA, 253 bp, Oryza sativa
  unsure (1)..(253): unsure at all n locations
agtcttcagggatattctntattatctctgacagatagagtttaccaactcatacacaactgtatgtggatgaaaagcagcttatcaacgaactacaggaattcctgcagaacaagaggtacacatgctagtcatcatactgccgtggttagcaactctatgcattaacccatgctatttgcatgggctatttatgtcatcattatcttgataattatataaatagtagattacagatctcgtgctaacagtt

SEQ ID NO: 21502 - DNA, 490 bp, Oryza sativa
agcttattaggtgagacttttccagattattgtttgaataattatgcaccatgccaccccacttgctctttagacttacaaacccaataatctaggctctaataatctaggaaagaaacaactaaccgcttattctactacagattataacaatctagtttatagtaatctgacttaataatctagattataataatcttaagctgaaagacacagggcctcaatgtcgctggggtcggcatcacgttaaaatatagttttatgtagggtgctatatttacttattctaatttatacatgctcagaaatctgtaggatctagataatattgaattatcgattcttttaagaaagacttgagctttgtttccttttgaccactatctgttattagatgtgtataatattattctaggtctgctaattgttattgttcattttcaaatgggcacgcctatttatactagtattgttggatcatcgaaagaac

SEQ ID NO: 21503 - DNA, 372 bp, Oryza sativa
  unsure (1)..(372): unsure at all n locations
tctcaccggctcgcgtgtgcctccagcccagttaggaggggtgtgcaagaccaccacgaagtgcatgttgtggttcggcacactgggaaacaccagagtcttgtacttgcagtaagcctcaccagcagctgggcctgngaagatctgaccggcgctgatgatggggaccacgccctggttcttcgccgccgccaagtgactgacatgtctcttgatgtcactaaccatctgcacatacgaacttgtcattctgctgcaatcctcgtacagcctgaagtggatgtacgggacaaccgcgctcttcttgcatttgtgcaatcggaaagacagagacatatatatatacgttagttcgtcgattcgatcagagag

SEQ ID NO: 21504 - DNA, 189 bp, Oryza sativa
taatcttctacatgaatctgcagggaccagctatgaatatattctaagcatgcattttgttgttcactgatggatcatgcctaccacacaccctaatcatggacctgattatcttaaaagcacactgtcctcttgcattatacacgaaagaatacatagctgtatacatcactgaaaactgtcctgata

SEQ ID NO: 21505 - DNA, 402 bp, Oryza sativa
  unsure (1)..(402): unsure at all n locations
ctaaatccagagttgatctgctatagagtgagcaataattaattgagcaagaaagagcctgcatacaatctactacagagttcatcagtgtatgcaaagaaattaacttctcataaaactactgnatgtggtgaaaggataacaatangattgtatccacttgaactgatagctagatcgaatagtgtaaatcaagccatagtgaaagaaaatgatgtacattcagattcagataatccacatagaggactattgngctgaagaagggaatcggaagactcactttcagctgaagcactctacactctgcactctcacctgcaaaagagaggatggcacacgtccgtgagaaccgagtgcgtggtgtgggcagactatgaaccttacaacggcggcaccact

SEQ ID NO: 21506 - DNA, 295 bp, Oryza sativa
aaaaggacgccaacgaaaataacgcacaggtcacaaaagccgcctaaaaaaaccaatcaaggttaccaaactcccaaaaaagacggttaaagataggccaatagacgcggccgtatgaaaccaatataaacaaaggcgggtagaaaccgccatcaataaggcggggaaaaccgccaacgaaacgaaggggaacacccccaaacgaaaacgacaacgccagggtagaaacccaatgccacgaacacccacggaaacaacaaaaacccgacacctaaccaacgaacggggcacgcaa

SEQ ID NO: 21507 - DNA, 176 bp, Oryza sativa
tatattgagatggctgaacaaaataagacattacagtgttcatctaaatggtttctgaaccatacatgaataattgacattgatgaacaaactcgagaattttatagaagcttctgaatgagtcataatattgggccatttacacggcgcaataatagtaaacctgactctaatgg

SEQ ID NO: 21508 - DNA, 232 bp, Oryza sativa
  unsure (1)..(232): unsure at all n locations
tctagctgctactagtctcaattgcctaattggaacatcaatcattaattcaatagactctgcaactatcaactaatcagcgagttaattntcaattttcacacgcggattatatttgttgagttgtttaattaacgcatcacatacatatgtgtngaacgaactgatgaagtgatggctgaatggtcgatggatggacgtgtgtacctggacgtaaaggagcggcgagaaa

SEQ ID NO: 21509 - DNA, 276 bp, Oryza sativa
  unsure (1)..(276): unsure at all n locations
gcccttanatctcagctttcaaggatggaaaggctctctgatggagtatgagatagttatgcaacaaccccgccttgaaatccaaatttcaaacatgtggtcaacttgaaaagcttntatggttaaaacatgctcctaagcctggatgaaagactgtaacccttctgcttctaatggttttaaatggggctgtgaataaaacttctactcttatagcggatcgatttttcttgccagatattgttgcgacatcatatttggggctccctcatgact

SEQ ID NO: 21510 - DNA, 380 bp, Oryza sativa
atcactgcagatcaactactaatcagtgggaacgccttttttctacaatgcccattgaagtgggtgatcttcacaacctagctcagaagagaagcaatcacaaatcttcggctgctatgtgctgggagccttatagaaacgaaactgtgatattctggcatctcaaaaacatggaatgttactatggaaataactactcaataacgctgacataccagacaggatgttgagaatcggacgaactgtatagcaaaccgagtggcacacgctatggtggatgcaatttggcctaaatgaacactactaaactatgtccactattaagccactatacgggtatgaattgatagcactaacaaaggggacttcccgtcatatct

SEQ ID NO: 21511 - DNA, 225 bp, Oryza sativa
actcctagcttatcaaaacaactagatggattttccatccacgctgaaaaaccctgctattttaaaaggccgtcctggctacaaatacacaaggtttctataaagattgggagcctcgccttaattattgtataactggctttagaacatgctgttttaaaaaatacagaatatcactactgattctttcaataggagaaaccaacatagagtttcatagctttt

SEQ ID NO: 21512 - DNA, 391 bp, Oryza sativa
agcttcgatataaacggatatacccaatactttctaactcattgcccaagggtggagaaagaccgtttccacatcaaaaacaacaaaaactagcgcatacatgtaatagcgtattctgaattgtaaccaagccccccccatgggttctatacccgattcataactagaaagcttctctggtccttcacgaaccggagctaaaagtgctgaaatccaaaatgctaaaataagaataaggcttgctattattagaaatgcccaaaaaatatcatattcgtgaagcagaaacataaatgtactcccattaatgtggaataggcggaactgaattagtcaattcaagtcagcattgtcaatgtatacagaatgtctctcttttcctctgtgaaac

SEQ ID NO: 21513 - DNA, 132 bp, Oryza sativa
  unsure (1)..(132): unsure at all n locations
aaaaaaanaaaannnanacaaaagaacaanttaacctccaccaccacagaggtacaacaaggcaccaacaaaccaaaacaaacaaaaaaaaaaaaccaccaaaccataaaagacgaagcaacaaaaacaaac

SEQ ID NO: 21514 - DNA, 142 bp, Oryza sativa
  unsure (1)..(142): unsure at all n locations
actcactgaatggtggaatgatgaactacgcctttataggcagcatgactgtgttataatttaatacgaccaatagtcactcacncgtcattgngagaacaactgtaacgtccacgccaaaccccactatcaactggtgatc

SEQ ID NO: 21515 - DNA, 492 bp, Oryza sativa
agcttaattcgagtggcccgcaacgtacgtattgtgtgttatattctgaagaatctccttgcactgccaccgcacaagcaagggcacagcttagcttaacttcgctggtagtggtggtggctgtgccgtccagccgctagcatcttcctcaccagcagcagctagcagcggcgcccttctccggcctcaccgagctttgctgatctttgctttggttcggggatccgatttccattccatccatctcttgctcccgcgggtctcgtctctgtctgtgtttccctggtaagtgctaacatatgcgtctttccctttcttcgggattccttgtttctgttccttaattattgaggaattatattctgctctgctctgcgccaattcaattaggcctatggaatcatgctttagagctcgaaactgacgagtatactactagctgaatgattcaacatgaatcgtatatatagttcttgcatctgtggacaacat

SEQ ID NO: 21516 - DNA, 204 bp, Oryza sativa
  unsure (1)..(204): unsure at all n locations
tctctgcacagatatttctagatttcaacaaaagcgactcatatgaggtgtgtcaataatatttgtaatattgtcanctgatgagcattgtagatgtcttcaacacatattaggtctaaagaacccctacattatatcagccacggacggactcacataatgaaacattactgtattactattattggcatttgaagttgattg

SEQ ID NO: 21517 - DNA, 439 bp, Oryza sativa
  unsure (1)..(439): unsure at all n locations
tccttgactcacttgcgcccttatttatttcgacaacctggtccaaatctgatatgcggtctcaaagttgctcactctatcgaactcctcttggctcacagaattgaacaaagcattcatagcttggcattagtcggagttgcagtaacaatctccgtcagggcgggccggtgatagcaaagcctacatccacaataattcaaatatgaaagctcatatccttgaggtgagtagacattctaattgtccaagaggaggatgttgtgccataaaacatgggagccttccctacatggttcacctcgttcgacatcgtctctctaggcggtgaaacctaattcacaaagaccaagctctgataccacttgtaagatcgagatgtgcactagagagggggcgaatatgcgattanaactcaatgaccctaatcaaactacct

SEQ ID NO: 21518 - DNA, 464 bp, Oryza sativa
  unsure (1)..(464): unsure at all n locations
taacttatgattatgtgttagaactactactactggtactaataaccgaatacctgtactgctggagtagtagtttgaaatggacaaatgggagcgcccgccggattaatgatgggctggctggcaaccagaatgtgctgcttcaaaccctcaaccatcaaagggcaacgctaaattactactntactcggtgtagatcaacttcctgagttgtaaatggtactatctcacggcttagtttaagtcactctttgcgataatataagatacaccatacatgtgggatagcttgctgcatctgggtaagcatccaagctagatgcagctcggtaccatttccttgcaagtacgaatcttaacgcaggcacgacagattgaaacaaggacactgtgaaatggcgcaagcatcccaccacccttgtctgacaccgagtacctgaaacactcatgcttgttttattata

SEQ ID NO: 21519 - DNA, 428 bp, Oryza sativa
  unsure (1)..(428): unsure at all n locations
gtggcgttgacctcatgtcttatctacatatagatcagcttcggatccacgtggccacgggttcagcgccaacggatgtggcgttgaccctctggacctcagcgccattgacattggtgttgagctcatgatctcattttggctgaagatctttgcgagggttagttccaatataagtttttccaaggactatttgtcaaaaaaaacggaagttatatacacgtatgtaaagtttgatatgcgtatgcacagttatatacgtgtataatttntatacgtcaatttgttgatacataagagaaatatatttatgtatgtatatattctacatacatacatatgaatcttatattgatcataagactacaagttctatgtgatatataaatatatcatacgttatatacatgtgtaagactgtatagtat

SEQ ID NO: 21520 - DNA, 261 bp, Oryza sativa
  unsure (1)..(261): unsure at all n locations
gtataggacgaaagcttgtgaatcatagtggntgggtcgtgagggacaacgtcctcatcagcatagtgtactggcgtcgaactatgtcacgcggngatgaagatagcttttctcctaacacagagaatgacatgttgtggaccaccatgctggagacattcacgatccctgaggcagatcgtcccagatgcaaagaatggaccctgacgaanatggcagagctattccagagctacaaatcagatctgtacaagacataca

SEQ ID NO: 21521 - DNA, 284 bp, Oryza sativa
ctgcggcatgcagcttgatccgaagggagtggaaggcgctcatttttcaaatttagaaccatacactctggtggaaaccatctcacgctgctatacgagctgtagttttttatgaactggccacagtttgataggacaaaaccaaaatcgttgatttgaacaggggactatatgtatgggtgtggcatcctagctgatgcaacgcaggagttaccttccttgctaatataagtacgaatacactcaaacgtgtcttaggttgtatactggctgcaggtccaact

SEQ ID NO: 21522 - DNA, 310 bp, Oryza sativa
  unsure (1)..(310): unsure at all n locations
ctaccctcgcaagtctgacgtcacaacttggtcacaatgatcacgccctgctntcctttgatgagctacaaacggagttaaatcgtctgatggaccaagttgtggacatggaaagggcatacagtgtgatgcaagatgctctctcacatagtgaacatatccagatggatctcagatggtaagatatctcactccagctccagcttttcaatggtgaagaccggtagcaacagttatgaacgatacagtcgccactggaactgaagctagttatatgagaaatctggttgatgagcttactgggcaactt

SEQ ID NO: 21523 - DNA, 355 bp, Oryza sativa
ttaattacatatgattgcgtcatcattactagtcatgcatgaattggtaccataagaagcttggaacatccctgtgatggtcagtactgatggatttactctgcagagaatgatctgcaggaccagtatttttatactactaccatgtactttgtactagtacttggataaatccctgtaggggctaggtgctatcctctacagtacatgtatgtctgccacgtcatctatgcctgtatgtgcaacagtcacatgaaaatgatagccactgtgcatgttgacttcgatcaacaaatgatcatctgggtgctatcctttcatatacatatctcgttgaactagctacgtcacttat

SEQ ID NO: 21524 - DNA, 380 bp, Oryza sativa
atcttagatcacctgcagcatgcaagcttctatagcacagtagtagcagcgtctctctcacgcgcgtctgctcggtgtgctcgcgggaggggagatctaggcgagggagctcgggggatcgatcgacgggagaccgttggagcatcatatcgcaatgccgcgtgggacgccgtaaggatggtggtggcggcagctgctgaggctggagtatggtgaggggcgtaacgcgcgcggcgtcgttcggtggccgcgccgcgaccgcgaggtggtgctcttaccggcgcattacggtagccgtctggctagggaacctcgttggcgagctcctcgtgctccgatgccttagctacctaggcgccacaccgtcaaacgtgagctga

SEQ ID NO: 21525 - DNA, 287 bp, Oryza sativa
  unsure (1)..(287): unsure at all n locations
ctcagctatattaataatacctantaattacagctagatcacctctgttccgacttgtaccgtgatcaagctcatgtggactgcttttttagtggcttaactgttaaccgtttctgggtccgctacagacctgacaggtagacacgtatctgaaatcagaggagtccaaggtccatatccaactggcatgcccagtcaccacactgcttctgaacacctggacggttcgatcgtacagtcaaacctgccaaacatcgtattcacctggccggacagcggaatccaca

SEQ ID NO: 21526 - DNA, 407 bp, Oryza sativa
  unsure (1)..(407): unsure at all n locations
caagcttggcctatgacgtgttcacacatctatcagctagctctagctagcatagctaagctacccagcaatgatgaagctctcacaacgatcgatcgctgtagctagcatgttntccttacctccgccgcacgcttctcctcctccacgcaccgctcgacacgtcgacaccccggcggcgcgcggcagatacctcccttcgacgaacctgcccagccgatcgatcgcccaagattaacctccccggagcagcaagcgaaacgatcgttattccaacaaagagaatgtaaggaggcacgccgcgtangatgggggtgaagcgggcggcgcgtggccgaattaaaggagaggagatgaataaacgaggcggaggggtgagctcttggggggacggcaatggatgggat

SEQ ID NO: 21527 - DNA, 352 bp, Oryza sativa
  unsure (1)..(352): unsure at all n locations
gcttgagcatggaagtataagcccgcaatattacaggctgcgcagtcatagttaacctgtgattattaaaaaagtatcggatttttcagaaagcaatttatactctgcggtttgtcaataatgcgaaataccaagtctgatgattgtcgaaaacttttggctgtaacctatttacancttcaggtctacttttttctgataaccacagaagttcatatccgtacataattgaacactgaagaaactatccgatggagaaagccaccgggagaatggcaggagttggtggtctcggtctgcaatggcagttgcgtcactgaagacgctgattctgtcgctacgatgtcacttg

SEQ ID NO: 21528 - DNA, 456 bp, Oryza sativa
  unsure (1)..(456): unsure at all n locations
agctagattagactgttttaattnttcatttttcgataaaattcatattttaaatattcttttatacatttgaaaaaaatacattttaattgtgagtaaaaaaaaggcattactttgagagacgtgtgctgaatgtgcacgacgaatggtgaacttatgttgtttttgaagaaggattgttatcagcatcaaaacggacaacatgcaagttttgatgaaaaacactggaatagaaaattcggttcaaaatataactggttgcaggacgccagtaccaaatgtgttcgaagaataacgaaacggaagttgagctcagaaggttgtggtttgattatataatcttttccatttagagcttgtatggataggtagaattataagggtgctttggtttgataccctaacaaattgtggtggtaccaaatccttatcgagtcgtggtgttttatttcctga

SEQ ID NO: 21529 - DNA, 442 bp, Oryza sativa
tgcatgagctcctcgaggtacgcggcgtcgtcgtcgacgactatcacgtgcagcctccctaataatcctcccgccgggagctggcagccgggatgcaccgctccgttgttctccgacattgccggtctcaccgatcgacatacagacagtgatcgatcctagctctgcgaaccgctagaatggaccgccgatcgagagaatgttcttgatgggtcagaccacggcggacagtgacgggaactgcatagatatggctttgatctcacctggtcatgcgcttatttatactactcctaactacaaacattaatgcacccccaccggacaatctcctggccattatgatcagtaatagttcagcgggaagacgacgaaagttagagtgatcagcatcacacacattggttgacctgagtaatgaatggaacagaaagaattaatc

SEQ ID NO: 21530 - DNA, 419 bp, Oryza sativa
  unsure (1)..(419): unsure at all n locations
agcttcanaataattcttctcttaaattacttatccaatctatgatctgatcgtaccggtgtattcgttgtaattaaatctttagaacaagatatcgcatgattatttttgataaaagaaagcatatgtttcagtcagttaatacatgttgtttcatatgtgactgcgacatgtttcaacgtgtatcttcaccatgtttcataaaatatttaaatgttacagttgctattttttttttgtttcaccatatataacttaatggttcacttgttggtcaattgttacatttgaccgtctgtttttttatggacatcggacgtccgatgggtagattcctcctataagtaggacgacgctatatcatacacaacacatacgctgattgtagtataacctaacatgataaacaattcacgtgc

SEQ ID NO: 21531 - DNA, 427 bp, Oryza sativa
  unsure (1)..(427): unsure at all n locations
agcttagacactagatagtatgcatgtcttttttcgtacctacagttcctaatctcttatcaatgttgacaacctttattggtgatcgctatgtaattcatatcatcatatgtggtggactacttcctcagtcccattttaagtgtagccaactcacatgccattaaggacccttgatgctgtactcttaatgtaacaatgattatcatgctaggctagtgtaccaataattgcagagcaatgcaaatcatttacacttaccacttgtgcaattgccatcgtatgagcaggattgcaagagacgactgacttgcagcctttcttgactactttactttgtttgcattntattagtttatctaaaaggcctgatcacggattagtggttagtatgtgaaaactcatctgtatcgagcgagcagccatc

SEQ ID NO: 21532 - DNA, 254 bp, Oryza sativa
tactaagctttctcgctgagatacgaaccacagagtaagacatctttttaacaccgatgcaaaaaaatgagcagctcccgagcaacgaagataataatccgccaatgcaggcgtcaaataaatcaccaagacacggaaggctgccctgtcatgacaggagctaacccaaccactcgtaagagataaaagacaactacggagccagtcgcaaagacagggcaacaacattgcagacacacgaaccaaagcagtgc

SEQ ID NO: 21533 - DNA, 425 bp, Oryza sativa
agcttgcctccatctactcccacttcggtttctttacactatagccgcctgacccccagtggtgatggtacttcttcttggcggcattttctttgtttctttccatcatcgcttgcccttgttgacctgtcttatatgcaacgaactcgtcccagtgatcccttagctcttggaatgtgtcgaagttcggtgtctgccccttcatgatatatttctggtacagatctcccttgaagctctgaaactgttctgccattttctttagagtccaccttttcactttgtcctctgtacccgcgggaagggtgaatgtctcgagcattgtggtccacaacatctctttctccgaatctgggacaaagctctcatgatctctgtgtgcacttgttctgcaccagtacactgtattgacaggcacgttattc

SEQ ID NO: 21534 - DNA, 437 bp, Oryza sativa
ctgcttcttgaaggagtcaagttccactctgtatgtactgtctttgctaagctaggaatggtcatcttcccatcagccctaaatgactcagtgttcttttcagctaaccattttgcagtacacctttttataatccactccttcttgcatttgtgatggggctcatatgtcttaacaatgaaggcctttgccctgctgtccattgaagcataatatgtccaggggcatccttctgcacaatgtgccttgatcctatttctatcattcctgggcatctttatgttcaccctgttcttcatgctatattcagagatagcctttctaactaattcaactgaagagaataccatgcctactttgaagattgggttgtgaatgtcttcaggattaaaagacttaaacttcaagttgaactcatcatcatgatcatcacttgg

SEQ ID NO: 21535 - DNA, 440 bp, Oryza sativa
  unsure (1)..(440): unsure at all n locations
agctctaggtatttcatttagatttttccttattttaaatagactanaaaaaatgcctgtgcgttgcaacgggtaaaaaagtttttgattgctatatattatactccttcacttttcatccactctcccataatatcatctttccgttttttatcaaaatcaaagcgaatctcgacattctctttctatttttatcaaaatcaaagcgaatccatagaagtcagataaaaacgacaacagtaaatccggtgaattaaaaacaaatgatgaggtaatagaaggaatcaattttttaattaatcgaaggaggaaacgtatgggggaggcaaatcgacagtggcgcgctaggggtcagcctggcgactttaaaaaaacgtatccttaccgcatgccataaatacgacttataacggatgattagatactcaaaaagacagcga

SEQ ID NO: 21536 - DNA, 313 bp, Oryza sativa
aatgggaaatacacacactggcctggatgatctgcttaaatccagcgcaagtccaaaaacattgcctttaagttcgtgagcgcaccacctgattcaatgctgctatctacatgaaacaaagacaatagaatccactgttaattccataatcgatagccgaacggccaatcgccgatgacatatcatattattccaagccgatgtcatatcgtgaatctatcggctgatgcaaataaacatgatatgactaaagctactcgatcggctatagataattacactatatagcctatccggccatgctaatctaata

SEQ ID NO: 21537 - DNA, 321 bp, Oryza sativa
  unsure (1)..(321): unsure at all n locations
tgcagcatgcaagctcgatgtgccaatattgccagcctttgtccgtatagtgaagcttcatgtgctggacttgagctttaacaatatttctgggccaactcctgatgagttatcaaatatgtcgagctcggaaatattggatttagcccacaatgatctcagtgggagcataccatcatctctaacgaagctgaactntctgtccaagtttgatgtttcgtacaacaatttgtctggagatattccggcaagaggccaattctccacgttcactattgaggattttgcaggcaatcacgcactacacatttctcggaattc

SEQ ID NO: 21538 - DNA, 454 bp, Oryza sativa
acggaacttatatactcagctgcccgctgtacaccgaacacgcacttatcggtgttctgttttatgcgggcggagcggagactctcaaaagtttccgctagatctgagagtaaggtctcttggttgcgcgtctttacaaccaagtcatcgacataagcctcaacattacgtcctatttggctacccaaagaaattcgagtagtacgttgaaaagtaggacctgcattctttaacccgaagggcattgtcgtataacaataagttcctatgggggtaatgaacgcagttttttcctcatcctccctagccatgcgaatactgtggtaaccaaagtatgcatctataaaacacaaaatgtcgcaccccgctgtggagtcgacaatctgatctatgcgaggcatggggtaaggatccttatgacatgccttgttaacgtcggtgtagtcgatgcaca

SEQ ID NO: 21539 - DNA, 445 bp, Oryza sativa
agcttcatactcctttctacattgcatgttatatatgtatatgggaaaattaatttctacttgaaacagatttatacaaaggtacttctaaactatcaaaagttacttcccactaacattaaaggtactcttaaaaattattaaacttacttctaaagacctaaaactctgcaccgttcttataaatgattagttttattagttactccatcaatggtatgtacaatccatcatagggttgaatatctttgctgatactgcataaagacaataaaaaatgaatcaatataaaaagttacttttgaactatgtaaaagttacttcttagtaacaattatgttacttttaaaaattactaaacttacttctaaagcccatagacttcagatggtatacacgattagttctcattagtaccctactaatattatgacaattcatcaca

SEQ ID NO: 21540 - DNA, 417 bp, Oryza sativa
atctcaatctgattgcctcaagactaacacaagtagcattcttatgttgtgtgtaactcgcttccttgaaatcgttatttgctggatttcgtctctggtttagactatagctttctggacttgttccactatattatgttcccattttcctatttaatgcattttctgtaaagtttattgagctttcttgtatgcttttgacccaatgtatatatctcatatcaccatgatatatatatccaatgatgtatatatccatgtctaagggttatctcaatatttttttctgaaagaaaatcggtattctgccttatcaattaagggggagatagatatggacgactacagagttcagtttacatgttttgcatataagaataccaacttattcttactgctaacaaactaccctaatta

SEQ ID NO: 21541 - DNA, 436 bp, Oryza sativa
  unsure (1)..(436): unsure at all n locations
cgtgacactatatatactaagcttgacagttngtgaaggagttctttgagacatattatttatctacttcaaccgatatgcccttatgcactgtcatacataacatagaaatcacacgtggaaagggtgggcaattatctagagcagcatgagctgtatcgaaactgattgcaaaagaaggtaaatcggccactttaagattaccatctggggaggtccgtttggtatcccaaaactgcttatcaacagtcggacaagtgggtaatgatggggtgaaccaaaaaagtttgggtagagccgggtctaaatgttggctaggtaaacgccacgctataagaggggtagtcatgaaccctgtggaccacccccatggtggcggagaatggaaagcccccattggtagaaataaacccacaaccccttgtggttatcctgc

SEQ ID NO: 21542 - DNA, 227 bp, Oryza sativa
gactaggtcataaccagccaagcaatcgggagtcgggcctaagcgcttcccaaacatgcatatgatcgacatgagtttgtcatttatggaacatagtctcatcgatcagaggttactactcgggtacttttgcaacttgtaagagcagataattaaattacatcatctctatactcttgagttattccgaataatactatgcaccctgcgcaactcggtccatccaa

SEQ ID NO: 21543 - DNA, 416 bp, Oryza sativa
atggacggctgatccataatgtctagctagctagtgtgattatatatatgcaatcatcacattgtatgatgattaaccaactcaacatcaaattggttgatttcataatacaataccggctgtggcttgctaatcatcggcgcaaatgattgggccgctatctaaaccgtcatcagatcagatcaagttgcagttagtgctactaattgagggcactctttgtttggttaatgaccataaagttgagcaagctggaagaaagtaattacgaatgaaaccaagaaaaagaaataaagaaaaatctctgaaccaaatattgggcggcgaacatgctgtggcgtgtactcttcaatcattgggggaagaaaggggagaaatgctcacaaagttcgtagctcatgcgtgctgcaatccat

SEQ ID NO: 21544 - DNA, 352 bp, Oryza sativa
  unsure (1)..(352): unsure at all n locations
agctntaaattgttaggttntgcgtgattttttggagggaatttatcaagggccattgggaaaaaggagctgcttatttgtttgtttttgattgcattaccttatgtgatgttatgtttaactgtgcagttatgatgagagggcattgacaaagggaattcttgaaaagatgaagcttgaaaattttcaagtaatctactcaacagattttatattactgtcattccctaatatttcttgtttatataaagagtaaatttcacaaaactacatgttttatggttcaagttgtagaaaaccacacacattgtgatacttagcacttaagtacatatattttggtagtttagta

SEQ ID NO: 21545 - DNA, 423 bp, Oryza sativa
  unsure (1)..(423): unsure at all n locations
agctttaaagattattntactctacatattcatagagcaaaggatgtaaacaaaccatcgtggtaatcatgacttaacaatcttaacataatatctctatataataggtgagtttcgtatgataataagtataaataatttgtaagatatctaaacgatataagcttacataagttgatgtggtttatgataatttaaataatatataaaatgatgatccaaatgtaaaagtaatgtgatgtggttttatgagagaagaaaaggagaaagataatttggaccatatattattatctaagggttagaaacaattgacgtgatatcacttaatgagagaagaaaacaataaaaataattaggaccatagattaatcatcttaggatataaaananacaacagggtaattggatccatactattat

SEQ ID NO: 21546 - DNA, 410 bp, Oryza sativa
agcttgttataatataggaactgtttagtatcataaatcctccccagcaatttgaatattttctgttttctataaatcaatccataccactatatggtgatgtttgtgttacttttaatagatgcgtaatcaaaagggtgaatttctgatgacaagtgctcgtcatggtctgattttatgcttgatgaacatgaatatgcatgcgattgtaatgataagtctgataattattaccttttatcataaagtgaatcataatcattgaccttaatattgacctgattgaatttttcattgtgcacctgattgaatttttttatgaaattatgtacaataatattgacctgattgagattacttaacttctgatgttgatgagatgtgatcaatttgatatgcgacggtttact

SEQ ID NO: 21547 - DNA, 345 bp, Oryza sativa
cattcggacacttaaaactaagctattatgaacagtacaactagactgttaattcatatcttcatgcgacacggagcttaatatcgtccctacattattgtcctaatgaaaaatacacttatagggtatttatcgttatgtatatgcaggatacatctgatatctcttggaagaaatggaacctgtgggtggcgtatagttgtgggtcttgaccccataataatctcgctgtctagaacttctcttctgaaaagctgttaatcaagatgctggtacctatatttttttggtgcatgcaatgtactatgatccgtatattccgtatctctcatgttaattatcata

SEQ ID NO: 21548 - DNA, 477 bp, Oryza sativa
atcctctcagtcacctgctgcatgcaagcttgatttcccccttataatacctattatgtaagtattgccatctctttgccctagctcatcttcctttctcggggctaaagaggatcagagttctatccgttcgtggataagagaagactagttagaagagggaagggtggaatgaaacaatccagggtcaaacgaagatacttgttagcctagccccatgtgtatccgtagccttccctgttttgagaatctcatattgcttcgtaagacgtgtgtccttcgtatgttccgtcgcctgttcctggataagtagattttctaccaaccaagtagaatcagcctgagaatcagcagctgagaatgctggcatatcataacattaactacgccattcttgagcgccaatcagtatcctcctatattctcatgtgttgagtatcagacaaaagatcccatgtttggtggtcagatcaattc

SEQ ID NO: 21549 - DNA, 460 bp, Oryza sativa
  unsure (1)..(460): unsure at all n locations
tcacctgcngcatgcaagcttggtttgatgcttagcttgaacgatctttctcactagcgagtgcatctgaatgacttgctcacatagctcggctgtctcatatattatgttattacttaccctatcttccatggattcttaagcttttgttcttgtgcaggttaacctttcttctctatctggaggagtttagatttaattagccacacatataaaaaaaataaaaattgtgaaaggttgtaccgtacactagtggaggattaacctggtatgagatcttcctcttgccaatttccttcagcttcttcctccagcggttgagtaatggggtttctgtaatacagtcaacgaataagtattttttttagataatggaagctctattaatcttagtaaaactctatcaagtgatataattattctgcgagcacctccggcttctgcacccacagagtgcaca

SEQ ID NO: 21550 - DNA, 410 bp, Oryza sativa
tcttgcttacgcactggtgatggcatcgcgcaagcttaaacacttctttcatgcccacaaagtcacagtgccatcacagtaccctttgggcgtggtactccggggaaggaagtcactggccggcacaacaaatatgaggcggagctatctcacttccacttgcatattgtcactcgcactgctatcaaatcacaagttctagctgacttcgtggccgaatggacaccggcgttcgaccctgatcctgagcccgtcgaacaaccctgtgtgatggactacgacggcttgtggtcgcacaaagtggcggacgcttctgcagtactcacttctccagggggcgtgccgattcggaatgccgcaaggctgcatttagacacaaccaacaacgcggcagaatacgaatccattct

SEQ ID NO: 21551 - DNA, 433 bp, Oryza sativa
  unsure (1)..(433): unsure at all n locations
atctctaatcacctgangctgcagcttcactcatatctaaagtaaattttctacctttttatcatcacataccctcaagaaatgaaataggcaaattaaaagcacatatagcatatcttgccactgtccaacacgcatgttactttgtgcaattatcaacaaaccagaaccaatagagtagaggctagagaagaaaagcagcacatttcctgtctatcattgcacaaaagagaaacatctctgaacacttcaaggtcccttgataatgatcaacaccaataacacacaatcaagacagaatgatctcaatcgaatgttgtagaatctcagacacaccaggacactagatgatgtcttgcagaaggatagttaatacagtagaacaatctaccagaatcgatgaagataggagagggaatctgacatcttggga

SEQ ID NO: 21552 - DNA, 351 bp, Oryza sativa
gaacttaaaatactcaactttcaatatctaactgcagcgataggattgggaatacatttctaacattccctcagtagtacaacacgtgttctgtaattaacagtgatgttccacattgcattcatgaatagctggggatgagactgaaaggccctttcattagtctggcccataccttgactgtctcatccattacagcgatcctgcataataagccggaggcaaatcctggaagtgatattgcacattacgaaatttgatcatgtcaataaacagtgacgagtactgatatctgaatccttcatgtggtaaaggtacagcgtacattgaacactcttgtgaacatccttt

SEQ ID NO: 21553 - DNA, 198 bp, Oryza sativa
ccccagtatgatagtcaattttacgaggattgataaaaatcctttgggccacatttgcaatctcaggatcaaaaccaggcattaactgatcaagtgcttcaaccaaaataacccgtccaagtgaatttatgtaaatacaggtgaaatatcatcagatgacaacaggcctttatcataaaacaacataaaagggttatt

SEQ ID NO: 21554 - DNA, 439 bp, Oryza sativa
tgtctttgtgcatgcttcacaaagacctccgtaatgtgtatccttaactgctgatccactactccactggggaaatacttgtatgtggcccaacgtaataaaccttgctaagttaatcattcttgcatccactgtgttttcgcgtccacttgtgaacattacccatccaaaaagccatttatggttcgcctccaaatacaattccacatgtgaattttacgtgtcgtctctcatgtaaccaacctacaaaggtacatataagttcagtaacaaaacatagtatcatcactgcgaaattgtatggtcgaattaattttatctcgaactggctgagccagtgtaacatatggccacgcgcctcatcttctaagaataacctttgatgtcgctatcatactcttgaacaatgcaagcgaatcttgcaatgatatcatccctc

SEQ ID NO: 21555 - DNA, 441 bp, Oryza sativa
agcttggacttaaaacatgtgtgaagcttattcttctaattttctttactctagtcttcaagctttctttcagtgttttgttgtgttcctcagtttcgaggacacgagtcttataactctgtgtatcttttgccctgtggatatagagattgggttgtatccattaattaactttaaaaaaaatgcatgtatatctactatactactatagacttctagacctttgaagttagtacatgaattaattataatttggtgcgaacatgaaataactcgaaaccatgcatgtagaattacctgaagttgattatttagtgatgagcatgtagcgcctaataattaaagggagatatctgaaaatttcgatctgaatggcacaatgaaaatgtttcacaattaattactacgtacagttgattcttatcagtgaaagaaattgct

SEQ ID NO: 21556 - DNA, 433 bp, Oryza sativa
tctgacatgtattgagccacatcatgatataaatactccctctattactatgtataaggcgtacttgtttctatgaaaatcaaacaaccataatattcgactaataattacactagtaatattatgctaagtattatacatgctataccatatatctgtattttaaaatactattatatgacactaattctatagatatggataacataatataaattaaactaattgtaaaagtatattattaaaaatcatgtaagagaaatatcgcgcttataatgtaggacggatagagtagtaacctttggatcattgtcatgctgtgatctcaaccatttataagcaatatgctgtacaactctgagtagctataggaatataaaacttcatgtgcattgagatgtgacaccataaatgttataatagccaatagatc

SEQ ID NO: 21557 - DNA, 424 bp, Oryza sativa
cagcttctctcctttactctacgtgctagagacttcttttgtagtaacttggcagtcgcgatctacgcgcgctccgggtgctccatttccgaagtttgggaagatggcagacgcgtcaggtgaggtgagggagtgtgagatcgcgggggggcaatgtcggtgctgggcgcagacggggcggcgataggcttcctccctgacgcggagcacagattagagcgctcggcggagccgtcgccgctgcgggatgaggaggaggtgctcgaccacaacccgaagctgccgcacgtgcggatgcccacctacttcgccgcgttcactgggacagctccggctccgactcctactcctttctcatcatgatctacacgccatcaggtaaatgttgcttcatcaatgcgtgcgatcatgacaaaatctccct

SEQ ID NO: 21558 - DNA, 382 bp, Oryza sativa
agcttatggatgtgcaatgcgtcacctgtttcatggccgccctaagtctggtcatatcgaggctgggagagaaggcgttacccttgtttaagctcctcaaatgctccgggccgtttacttggacggaggatgctgaacgtgccctcactcagttgaaggcgtatctcagctctcccccagtactggtcgccccggagccaaatgaacccttgctactctacttagcggcgaccccgcaagtggttagtgcggcgttggtcgtggagcgcgatgaggacaatcctcattccgcgcacccccaccttgtgcagacttggcccgggagagagaatggaggagaggcccccgaaccgaacggtggcccaaggcccccgacgaccgg

SEQ ID NO: 21559 - DNA, 433 bp, Oryza sativa
  unsure (1)..(433): unsure at all n locations
agctntatatcattctggcatcgagtctttttgctccaggacctcccctacagattcggcaccgcagaagagtttaaccaccaaaaccgggatggattggtgtggttcctctacgcctaggacaccagaatatcgaaccatgaacgaggaaaggcatgagaaaaacattggctagtaattgcgaagccccaattcttgactggaagggacaccaaaggcctctgccctccctctctatctatccaagagatggaagggcagagctctctttcggatctatcatctctacatcaaagagtccaacaatgaacatagatggcaagcgcctgatcgactggatcaagacgtgatagaacaaggttcaaatcgttcgttcgcaggatgcctagctgatacatactgcacttcccctgacacccaataaacggctcgt

SEQ ID NO: 21560 - DNA, 371 bp, Oryza sativa
  unsure (1)..(371): unsure at all n locations
atactggaaggtgcaactactaagcgtccctctggctgcatctggaaactaacatttgcagcagatttctacaactggcatcggattgaaggaacaactctacacatgatcccagcaatttcaaagctagaatgtccaccattgggcacaattttttgcgtgtgaggtggtgaaacaagggttattgggtatgaaacagatttgcttccatcatttttacacaatgaaacagattgattccatagatcgcttgctgtctttaatgtcctcaggcatatgtggtaaagggaatcctgctatngttcctgttgtacgactgaggaacacacaggcagaccacggtatgacctcggtaagcattatgctgtcct

SEQ ID NO: 21561 - DNA, 425 bp, Oryza sativa
tactaacttacaaattgatactgtcattataacaagcaatgtctctgttatctatttgatggtccataccgaaagaaactagataattatatggattatcatgaaatggtggagcttcaatatcgggagatgtctcacattttactgtcatcatattatggcgcctcctaataccttatcacttgaaaggcatcacattgactacttgaataaggtggtatactctctctggtaaaaaaaaacatatttggggcaagattcagtcaagcatttaatttttcaatcatcggtacttctcaaaattcttaatttaaaaacaaaacaataagatatatgtatatatttttcttgaaaagtacaattataacatcatgaccttattatattttataaactcattttaatagaataattgaaaatttgat

SEQ ID NO: 21562 - DNA, 436 bp, Oryza sativa
tatataatactaacttatgcggaagctcgagtacttatgttttctgatgtgtttcttctatcatccactattatggatcctatttgcgaaccaacccaagatatacttatcagactattaacgattatgaaccatcgaagtatttgtgcaaatagatataatagttgcaaaaactatccaaaccaaaaggtaaatttcaataattataatcctaagtatgcgaaagataaaaaaatctccttttttttctagttcctataatgcagtgggagactatagacaaaaataaatctgtttatacagtcacttaatggctccgattgaaactagatcagcgtgtcattgggttaagaaaaattccgattgaagttcaatatgaatctttgggacttatcgtgaaattatgcccactatctagtagcggtgaaaatgaaaa

SEQ ID NO: 21563 - DNA, 353 bp, Oryza sativa
agcttctcaacttctggcattgtcttctactgagctgaaccgcaagttattttaaccactctgatcctaccgacgttcgagctcagacgcagtatgtggcctggagaatgttataagcttaggctgcccgcacgaataacattaaaatattatgtacgactttgtcactgtattcgcccttgtatattactagcagctgccttttatacgagcattccaaccgctccaccgggatatgaatgcgcccctgggcgtcagtactttcatgagttttaactctactctcgcacatactggacatcagagctggcctccgttgttcatatcacactgatctatggaatactgaaaac

SEQ ID NO: 21564 - DNA, 329 bp, Oryza sativa
agcttattgaacttgctaatatttatgtttcttttctaaatatgattgtacagccattagagaccaactgacacatttatctgtgacgggagatctgatttggatttctcaagctgctctgaccttggtagccttattgcgaagatggtaagaagggatagacacgagcttttccattgatatatatatatatatatatctcttaattgaattagctttgattgtgctcttttattttttctgtactttgtacttcagcatatgaattatcatggatattacttcgatttgagccctaagcgtactgagatcctgactccgccattgta

SEQ ID NO: 21565 - DNA, 440 bp, Oryza sativa
ttatatactcagctgtgggagagcatctctcaccccactgatgttactcgtttcgaattgcataacatcctctccaatcgcatatttgcattccaattgcatcttactaacattgaaaacaacatactaaattcgcgaaactgaaaataccataagataagataggtttgagtcatgctatgcaagacaagctacttctctgtgttgaaatgatgaatagtagctctggggcataactcttatatatgggttcatggcaagtgctctctcaaagttaactataagttaccaacaattaccgcgaacctgatgtaaatgatctggacttgctgaactgagacttaactgatggaatacatgaaatagtatatatgagttactaagatcctgaactagattgacttgtattccggatgttttgattcacgaaatgatgaaat

SEQ ID NO: 21566 - DNA, 434 bp, Oryza sativa
tgcttaaaagatacccaagctttaacctatctcttgagtggctttaggcgctgcttatggtagagttgggtcgtcctctgagtgagcttcccatagaggccaagatcataataaacggactcctgagcgaaaagttatagtcgttttactctgtgcttttcggaagttccgaaaattatcggaagttccaaaaatggttgcaaaactgagtttagcttatgtaaattatcgtaagtttcgaaaattccagtctattgcctccaacggctagtttttgaggggctcgggtatataaactcctccacccctcctatgagtggctgctgttcttgggcaacattagaatcatccaaatcccaatagctatccccatttcccatcccttgtggcgcctctttgtgacggggattcgagaacggaacagagttggattg

SEQ ID NO: 21567 - DNA, 436 bp, Oryza sativa
tctgatgtcacttgtgctgctactgtatcgttgccctcttatcaataatctttagtttatcatgctgtaatgggacggtgatgcaaaagctgcttagctgctattggtactacggctcaaagtaagtaaggttaagtgcacacaattatggattcggctaatcaggctcaattaagctggcagttaagcgcacctatctagcaaaaatgcagtatgagccctctactgatgaacacatctgtccatcaagcatacatcgatcagtattagcgtcgacactaaggtagttttcagggcaccacattgactcctgtattagacacaactacataagtgtgagaaagatgacgagcatttaaagctgatgccatattcttgagacagttatacaaactttgtcaattttggacgaggttcaaaacagaattaataattt

SEQ ID NO: 21568 - DNA, 419 bp, Oryza sativa
atgatgattgcatttgatgctctttctactccaagatttgagcaactcatgctagagctggaacgcgatggcgcgctgatatcaacgatgccaatggtgacatatgggcccggctgtggccaaagccaatcaacaacggctaatgggtagcaaatgtgcttcccttgatctgaacttatgctggcttttgcatatactgtcgtttgtttgtgtcaatccaaatgatgtatgtaagcagtttacaggtgtcaggtttttttggcatatagaaacaaacatctcttatgctgatgttaatagtgaatctgtctgtcatggaaagatacctgcttatatatgtcatgctgacgtatcctgtaacaaatctcgtagctgttgttaacctgttattaaagattcctatgtatggaacaacatct

SEQ ID NO: 21569 - DNA, 67 bp, Oryza sativa
cagctgtagcctacggtcgaactagagatccaaggaattttctcttattcacccttaatgaatctgg

SEQ ID NO: 21570 - DNA, 439 bp, Oryza sativa
  unsure (1)..(439): unsure at all n locations
agctntgtatctttgaattaaaagttgttctttttctatatgaaagtttcataattttcaattgaaagtgtatatgaatttcggggatgaaagtatgaagcacaaattaaaagttttgaatatggttaaaattttaattggagtccgactcctcgacgcgagcatgagacgtcgtgtgaagtatcgcctgcatgcgatacttgtgtaactggtgctgagtcaattacctcgctaaatttaaatctatgatatgtgataatttatactaacgagataaatgcgtagctcattatggattaaaaacctaactcgctttgactcgttataaactacaagctcgagttaattcgactcgagccaatccgtctcacgagtttaaattctttctttcgtggagggaatttagggcctatatatcagagcttccgatattagatca

SEQ ID NO: 21571 - DNA, 423 bp, Oryza sativa
tctcgttcttctcttgatccgcgtggagaggtagcttattttataacttgctgcattaagcttgttgttataacctaacagccatatcgatggcattcctcgtggagaggtgcggcggcgagattgtggtgtccatggagcgttcgcactgtcgctcgacgactactgcggcggttgtgactgcggcgcctgagccgttcctgatcatgacgtaccatctggtggacgacccgtctaccgacgacgtggtgtcgtggggggaggactatgccaccttcttggtgtggcggccgccggagttcgccagggacctcctcccaaactactttaagcacaacaacctttccatcttcgtcatgcagctcaacacctatgtatgcatatttacatcatgcatgtatatatatatatatatatgccgct

SEQ ID NO: 21572 - DNA, 432 bp, Oryza sativa
agcttacataaagagaagattagagcaattttttccattcctgaactcttccgaatgtgtgcggactacgatttttactatatgcctattccactagcctattaacactatactaacttgagataatatgagagaactcttgcttgatgtgtgtgaaaagagtgaggaagtgataaccttctttagcctcccaatgacggttatggcagttggaatgatcggaaatgccctctaaccgttattggtgaactatcctggacatacacaccaaaccctgcatccaacggtgcatatggtggttcagccgtacctcctggttctaccaatccatgtgctggtgcaatccatcccattgtaagctggcagcctctgtactgtatctctctcagactagtgaatattggctaatcggctcgaatttctgagaattgg

SEQ ID NO: 21573 - DNA, 338 bp, Oryza sativa
  unsure (1)..(338): unsure at all n locations
ancttgcagctcgcgggcgagctgctttcttangaggagggaaaggggactaagatgacatgggtgatcggcacccctcaacctttaagcatggctttcaccgcagctcgaggacgagctgtctcgaaggagggatggagatgttatgggcagaactcagcccctctcattattagataatgttgtatgaggtttgttaggccttctgttaggaagttcgttaggagccggctctatgtaaggagaggcaccacagtcatgtggaataaattaagaaagaagctaaacctatctctagtctcccctcttctctgtttgaccttacccaagctctgggg

SEQ ID NO: 21574 - DNA, 421 bp, Oryza sativa
  unsure (1)..(421): unsure at all n locations
ttgatgatgatgttcgtggcttgcgcacagatgtttgttacttgaatgcttacgtggggagattgcacactatattggatacattggattctcgagtccaaatgttggagagctcccaagcatttgtgtatcatcgctgtcatgatgcttctcatccttccacttcggcgcgtactgcttctcctccacaagagtgaagatctttttggtgcttgatgccataagggggagaaaagtgcgttcatatgttgggttgggactagtagtagtgaggatagtgccctcatatctaatatgttaaggtgggttgggctatattatgtgtgggtatgggctattactctatattgngtgatatttgtcgtttagttatactctatgtcattcggacccttcgtggtcttgttatacgacatgtttt

SEQ ID NO: 21575 - DNA, 416 bp, Oryza sativa
  unsure (1)..(416): unsure at all n locations
agcttcagtagctggtacatcatttgctctaatagaactaaatagagatcacagggatatgatctatgattatggtaacataagaacttttgactaattatgatctatatcaagatacatgcaagtttcaatgtatgcactaaagtggacgattaatttgttgtcaggatttcaccaaacactgaatgttaagttgagaactggcttgctttatttgatcacactgatatgtatctatgaacaacgttgctgtttcagtgtggataatgtacaactataggtgagttgattctttgaccttcaatgcccattataccacactcaagtatacttattntacggaaatatatattccaattatatatttntattaccattaagctctgaacagggtaaacaagaatatttatgaacag

SEQ ID NO: 21576 - DNA, 437 bp, Oryza sativa
  unsure (1)..(437): unsure at all n locations
tagcaaanatgtattccaacattcctggacataacagataaatggaggcacctgagaaaaatacctcaatcactagtaacttaatggttcaactacaaataaatgataggtcctcagattataaaataaccatcgctaccatttgcacacagaactttcccaagatttctgagttcattaatcagctgtacatcacattgtcaacggtcaagcatgcagctgttggtagtgtctacaacaaacaggaaagagaagcatttgcatagatgtgaagattaaaaaatgagaagagacatgattcgaactccaaaggctccacaacaaatccaggagtcgcaaagtgcagagaatatagctaaaatagcagaaggtacaaaagttgcagaacatgaaggccattaagaaatgtaattcactgcttggaccatgtataggac

SEQ ID NO: 21577 - DNA, 426 bp, Oryza sativa
agcttcataatttcttcataacagatgttttgtcatgccaaaaattctattgaatttagtgtagggattacatacaaatcggacgcgcctaaaaagttagcaacttcatcctccaaagtttttttctgacatactacatttgcacctatgttttgcacactttttttgttcctaaaatctcagtgtaagttgatgagagagaaaatgtgcgtggggaagaaagaatatataaaaatctacctcatttgctaaacaaggttttataaaatagttgaaaacgaaaactctactgaaagtatatctcaaataatagaaaacaaacttaaatgaatatttatagatagaaaacacattaaaattagcttacaactctataaatattgtttaacaattatatggtgtatactttatgattttgtatgaaaa

SEQ ID NO: 21578 - DNA, 431 bp, Oryza sativa
  unsure (1)..(431): unsure at all n locations
ngcatctttgataaaccatgaaactcatgctccatttgtgaccatgtataaattgaactatgagcaagcaatactataccatgtagatgcaaagtttgacaaagaaaggggaaacaacttcaacttaagcaaatcatcactaccggccttaccacattgatcaatatagcggccgatatgctctattgtaatcatatcattctcacctgtgaatttcgtgaagttgggcacctcaaatccttgcgggtatgggaccgaatctacgtgttcatgatacggcctttgatatgtatgcatggctactttggattctatttcactactattccgcaagacattgtcatcatcttttcaacatacacacgaccgattagtgactcggtcttatgtgacaatgctatttcactttcgcttgtgatacaatccaaacc

SEQ ID NO: 21579 - DNA, 315 bp, Oryza sativa
  unsure (1)..(315): unsure at all n locations
atcttgatgacactggcaatgttagtatatttgtntgtcatgccatgcntactctgactgcaccccacatgttaacatactatgatcactcaaggagatttgtgcttgtcctgagtgtactggtaccctaaattcttgatccaatcagcgcacccaaatggcggctttactgcattatatgtaactgcattgatcatgctccacatgccgctcataagatcagtactacagataaaaattgcccaacatgtgagtctactatcatcgaagttgattatacaagaaaactaccccacttaaggatggaactacctt

SEQ ID NO: 21580 - DNA, 380 bp, Oryza sativa
tatttaatactaagcttgcaaatactacgacacgattgcgaacaacatatgctatatctttaatagaagaagccatcttaaatattcctggtagtagaaatactctgagtgctactgcctttcagtttcttctacaaagttatagcaaggcggatgcattaaaatcctttcatgtgataaaaacgaaatgggtcaaaagaaagctatatactagacaaatgggctctaacggttctttttattgaattactagctaaatgcatgtgctgtgctatgcatataacgaaaacaatatcataatattgtttaatacaaataaaagcatatgttccatgaaatatgtgacccacatgtatctatagggtaggctcacatcaaat

SEQ ID NO: 21581 - DNA, 328 bp, Oryza sativa
agcaagcatgcgtgataagaggactcacttatcttgccctgtgaaaagcaccatatatcgtatcacgaggccttcccgactagccgtaacgacaagcactctatatagtatttggaggcctccatgatacctgccactgtctagaacctgtattttgaggcctatagtaccctgcactgcgatatgcactgtgtgcaacatgtgaacatgcagtgtcgctgaaattaaaccaaacctgtgaacatgcagaccatagtgggaaacacttgtgatcatctgaacacatgccatgtgaaataattcgttgcggaccatctcaacctatacc

SEQ ID NO: 21582 - DNA, 442 bp, Oryza sativa
tctacaacagctataacatcaagttctactgtcatttttattaatcaaggggcattgcatcatcttcgttatgcacatgctcaccgttacctatatatacttcatcggccctgacgtctccgccgtagctaacggctattatcaatggacaattatgactacgacagaaggatatgctacatgcttaagggctcatcaactcaagcacgagaattatatcttcaatttggacttggtccagatacattcaacttgaatttatggtcatgactccattccttattctcaatgactggattattcattattccccgtaagggctatcaaccgaatactcgtgccagtcgggatttaatgtttatatctatatgggagtatcccatgaaggattatcactcagatcaaaaacatatcacatgaactacacttggtatatatcacc

SEQ ID NO: 21583 - DNA, 432 bp, Oryza sativa
  unsure (1)..(432): unsure at all n locations
agcttccacacttgtatgattactttgtctaatataattcagntcaagttgggagatggatttttcattnttattttttttgcattataggtatgtatggaagtatagcaaccagtgaagctaagaaatcccttttaggcaccaattcaatggatttccttttgttgcagagaggaccaaagtacacactagctgggatgaaaaacaataactgagactgctcataatttgttaaccgaataggccacaagtttgaattacgatgctcattanggtgattgtaaggttgctctttttgaaatgtatagtgatgctctgaataccatgtccctgtttctaaattgtaatgatgcatttcaaatgtgccatgtctaanttcagttatgttttcacattgttaatatttagaccttattgacttatatggcgtcg

SEQ ID NO: 21584 - DNA, 433 bp, Oryza sativa
ttattcctgcatgttggacatgctacaactgattctacatctcttgcttccattgcttgcagccatgcttgacatttgcaaaacccattgtgtggatcagtttaaagctaatatactatatactaacactctatttgaataggatatcaagggatctattaacgtacatctattgttactaccctatgcaaattcatgatgagttgcattgaccgcctcacttttctatgtttctgccaccatcgcaatctcgaggtcacaattgctcttggttcccatccatcacaaccatttgttctgaacttatatgcttgtaccctgataaatccacttctggcttcactttgtgattgctaaaagtatggtacattgactatcctatttgattcctatgaacatcgatgctcactgtttgatacatgtcactgacatt

SEQ ID NO: 21585 - DNA, 358 bp, Oryza sativa
  unsure (1)..(358): unsure at all n locations
agcttgctgaattaccgatctatgtggtttgtttntagaaggcgaacgcctaaaatggcctatgtttatgtgaggatctgatccttctatgtggcatgaggcatccctaggtcggcttgggaaaagctttgtcacgaacctctgacaccggccagtgtctggagaaagttcgtgccttgtgggtaaagtgtacccctctgcagagggtaactaactgttctaacaaccgtgcccaccgtcatgggcggatgtgaggtggttcccgatgcgtaaatttgtttgcctgtgcttagtgaaaagctgtcgcggtgtgggaatcgtaaccagaatcatccctttgggccgatggatgacctga

SEQ ID NO: 21586 - DNA, 394 bp, Oryza sativa
agcttgctgaattaccgatcgatgtggttgttatttgattggtgaacgccttaaatggcctatgtttatgtgaggatttgatccttctatgcggcatgaggtatccctaggtcggcttgggaaaggctttgtcgcgaacctctgacaccggccagtgtctggagttagttcgtgtcttgtgggtaaatgtgacccctctgcagaggttaactaactgttcgaacagccgtgcccacggtcatgggcggatgtgaggtggttcccgttgcgtagatttgttcgcctgtgctatgtgaaaagttgttgtggcgggggaatcgtaaccagaatcatactttgtggcagatggatgacctgagtggtcagaaacgaatctcggtgactccggatgtct

SEQ ID NO: 21587 - DNA, 430 bp, Oryza sativa
ttcatcaagcatttctatctgttgtcaatttgttatttgttctgaatattgcgttcagattatgttgattaatattcgctcaatcgaaactggagtgtctgctacacttctgcattgaattgcttcttatagctcaactgacggttgtaatctttgtattctgaaaatgtacatagttttacatgttcaaatgctggccttttagttgttcagtatgtgtactagaaactgctaaataacgtatggcaaataatgtcaattattagagagcatgaaacatatgtttacctatgaaaatccatgtcagatggacaaacggtgtgagcgaatttagaaagcagattttataatgagtatgaacatcaaatcattaattctgtttgtagtataattagaaacagtgaattcaaattagattgttgagtatgac

SEQ ID NO: 21588 - DNA, 362 bp, Oryza sativa
  unsure (1)..(362): unsure at all n locations
accggagatgcataactaatgcaagggagtacaaggggataataatataggggttaagttttgcagtatacagcatttaaaagtcacttatttgcccaaagccattttataaagacgttcctagagctacacagtattattaaacaaggccgtgaaccctcacgaacctgccttaacccaaggcctacgatgattcaaaccgaactggcaacccgaccctgtgtcccagctcgtcccaagccaacccaggccaaccattccaacatttagttgttgagcataatttaagaattaaaacactgacttgngacattgctcagcttgccataaccgatgtgcggctatccgatagatatactctg

SEQ ID NO: 21589 - DNA, 419 bp, Oryza sativa
ttccggtcgatcggccacgagtccactctgacggcttgtcgtcgttcttgccatagctgataacaacaacgacttcaccgccggccgcctcgtctgccgccgactggtgcctacgcctacacggctggcctattatgccgccgctgttgggcatctacgacttcaccgccggcttgcctccgtcgtcgccgagtggtacctccgtctacacggctggcctattataccgccgctgttgggcgtctacgacttcaccgccggcctgcctccgtctccgacgattggtgcctccgcctacactgttggcctattatgccgtcgctgttgggcgtatactacttcaccgccggcctgcctccgttgccgccgactggtgcctccgcctacacggctggactattatgccgccgctgttgggc

SEQ ID NO: 21590 - DNA, 414 bp, Oryza sativa
tgcaagcttcacctcatacggcgtgcgatgactatctccgccctcaccggcgagcaacttcaatccaacgggagatttcggctccggcatggcctcctacgcgtctgcccccgacttcgacgagccctcctcagcctccgccgtatgcgccttggcttcggccttcttaccaggacccctcttctccttcttcttcctgaactgctgcaactgcacgcccatggcacccaacactcgatcagacccaaaacaaaaaaaaacctcaaaaaaaaatcatcaaaaacaacaacgagctcgcgggattcagtaccttctgacgcccagcaacgaggagatcagtgcggttactggtcccgccaccgccgccgccgtccttgcgatccatgcggcgagatctcttccctggagcgggtc

SEQ ID NO: 21591 - DNA, 436 bp, Oryza sativa
caactggttgttgtgaaaaataaattccaaagattgggctttctccatgcgcacactgatttacagacgtgctgtaatccctaaaagaacatggttcaccacacctggaaatatatggcatatgtggtggtaaaatccggagtaataaactcatataggatgtaccaaccgcctaaaaaatgaccacaatatataatcagcctaagccataatattggccaataaaaatgcacacttacgtggcgaaaagcaatgatattgtatccaatcaattgcttaaaaacccatacagcaccttgacatatatataaaaaaggcagcgggacagctatataaagctttactgtttgacaccttttaagatgcattgtaccaactcctataaagtgaagtaactgcggtataaaaggattttaaggcattgggcacttgatca

SEQ ID NO: 21592 - DNA, 444 bp, Oryza sativa
gcttgcaccctacattatttaaatagactatcttatggttacaattagctaggaaatgatacacaacttttagatagcacactgtacaccatatgtgatagagaatatgtgaaatcttcagtgaattccaaacccaatccggttacatcttccaaacaagaaaacaaaatgcatattacagatttacagtctcaaatcaccgaagcaacaatatatttcttcagataaatcaaagtcaaaataatgaaatcttcagtgaatcccacgcccaatccaattacctcctaccaagaacataaaatgcaaaaattacagcttcaaatttcgaaagcaagatgaatcataagttcacattcgagcagtaaacccagaagtaaaagaattacattcttcagaataaccgcatcatatctgaagaacacagactgcacacttcagtctcaa

SEQ ID NO: 21593 - DNA, 455 bp, Oryza sativa
acttaatactctgcttataggaggaacttgaattgatccatgacatagccatctgtttttaccacaatgcttcggccaaccggttatgccattgtcgaggataatcagaaatcttccgcttaattaatttgatcaagctcttgttagatgcctcatcctgcccattagcttgtgcataatatggtgaagaattcaataatttgatacccacgctatcggcaaactgaacaaactcatctgacacgaagattgaaccttgatcagttgtaatagtttgaggaataccaaatcggtaaattatatgttcttgaacaaattgaattgcatacccagaatcaactttcttcaaaggaatggcctccacctacttggtaaaataatcagtcgccaccaatataaacttatgccctttacttgatggtgggtttatcataccgatcatatctattccccaa

SEQ ID NO: 21594 - DNA, 416 bp, Oryza sativa
agctttggatgactatctttctcggttttattaaatttgagtgatcctgattcctcttatgatgcttattatccacaatctgagatttctcgccaccttttaaatgggcttgacatgcctatttgggaaatgaaaggtacatctattcaggagtctgctaacatgtctaccttgactttggattcgctttacacaatattgaaaactcatgagatgaatattcttgctcgtaaagatgattctaagtctagtgctttggtttcttcctcgacttctttggatgttggtaccttttcatcgaagccttctgttcttgctttatttaatgccctgtccgatgatcaactcgaacggttcgaacatgttctattgtgctcgatgagagggatcatactatcgagattcttaatgcggaa

SEQ ID NO: 21595 - DNA, 426 bp, Oryza sativa
aagcttcagtaccactcaatctagaacagtttctagtctataggtgcttctagacaaaactggattacgtgtactgtttgtcttctatgccggatcaatctaagactgtttctttccttctaaattaaaggatagaaaagcttcagtactcactgcaatctagataagccttctactttagttaatttgtctaaatttcttgagagcgagacaaaagtatatacgtttactgtttgtcttctacgccagctcaacatatgactgtttctttcctcctaaagatagaaaagcttcacctgtcgtgattagcggtgaaaatgggacgggtattttccgaccgcccgcccaacccaaggctcgcgagtggaatatgggagataaaatgggatacccgatactatccgagttcgaatccgaattcgttag

SEQ ID NO: 21596 - DNA, 396 bp, Oryza sativa
  unsure (1)..(396): unsure at all n locations
agctttatatatctagatcacagaattctacattatactttttggtcctccagaagtgaactccctttcttttgatgaatctagaattgatgacatcccccaagtaactgatgctaaaaacgatttcgtcactgcgcctttctctgaggaggaggtaagggcagtggtgttcggtatggagtccaataaggcgccgagtccaaatggctttccggctgagttttatcaaaagttttgggaagtcattaaatatgatttattgacattttttcaatgaattttatactggtgatctccccttgtttagcctcaactttggggtaatcacctngatacccatagtaaaggatgctaatcgcattcagcaatacagaccgatttgccttctanatgtca

SEQ ID NO: 21597 - DNA, 433 bp, Oryza sativa
aagcttctgaagagatgggttctaagctgaactttagttctgtgtattatccgtagacagacggacaaaccgtataggtgatccagattttggaagacatgttgagagcttgtgctttatatttcggcggaagttgggataagaatctaccttatgcagaattttcgtacatcaacagttatcaagctagtcttcagatggctccttacgaagcattgtatggtcggaagtgccgcactccgcttttgtgggatcaaacgggagaacgtcaggttttcgggacggatatcctgagggaagcagaagaaaaggtgaaaatcattcgagatagattgcgtgtggcccagtctcgtcatatgagttatgccgacaatcgccgcatagatttgagttttgacgactgagattatgtggatcttcgtgtcacgcctct

SEQ ID NO: 21598 - DNA, 347 bp, Oryza sativa
ctgcatagacgcaaaactcagctcccagaccttcgccataagtaacagacgcatgcactaaacactaccctacataatctgggtaactctttcagacaggacatcggactgtgggcgatacgcggagcagaaatccaattaggtgcccatagccatatgcaagctctcgcaaaacctagaagtgaacagagtccctcgatctgaaacaataccgctgggcacaccatgcaacattaccaagaaggagctgatgaaagataacgcttgcaaacataaaacgaaaatcccggcaactagacaaggataaatcgtccaaactaccgagggacaagtcggcgtccaccaaa

SEQ ID NO: 21599 - DNA, 411 bp, Oryza sativa
atacctagtatgctatgacacccgcaataaggagtaactcgactttatatacatggatgccaacgatgacgaccacagtcggaagctatgtgtggtcggcaagagacgacagggtaaaacaactctggtaaggaagatctttgaaagcaaggaaaacatcataaataattttccacaacatgcgtggaccgatgcgtcacaaccatatgagatgatagagatgctcaaagatatgaacagccaactactaagacatgaatcaatgaaaagattggaagggaagacgatccgagcacacgaccttggtacgcacctacgagatggactgaaagaacggaggtactctggtgatgatgacgactaggggaacacagataactgcgaacggatagggaataagcttggccaaga

SEQ ID NO: 21600 - DNA, 284 bp, Oryza sativa
agcagaaaggatgatctcccaattatgacacagacagagttctgataaaccacttgagtgctgctggccctctggataaggcccgtttactgcttggcgaaaagaaacagactcactggccaaagtacctacaaggataccgctgtgcaaatcaacgtgcagcaagagctttatcgctcctctgggcactctggaggagatggaaacatacggcacaggaccaattgcacctgtgcatggaaagccgatccgatgcttctccaaactggccgccggcgaaacca

SEQ ID NO: 21601 - DNA, 441 bp, Oryza sativa
agctcgcttgagagaggtatcgaacctgtcactgctaaatggccagatcgatcgaagttctagtactatgctcacggtggaacgctcaacccagttgatggctccctggtcttcagcgatcagatacgcgaggctgcgagtcgactaatggacgcagtggaagcctcttctcatggcacgttccgacccgacagagagaaggacgagctgtcactcgccctgtagactcccgagcatccaagacgaatacgagggaaaggggtgattacttggaatattggattcaaggaggacatccacatgtataggagtcggatgaggagcaagagagataccgaggcgaagattgtagatcttgagtacagggtatcgagctacgagctcagcatgcaagatgaggtggcaaggaaggtggatgaacacatggtcgcacatctgtcc

SEQ ID NO: 21602 - DNA, 433 bp, Oryza sativa
ctggccgactttgtcgccgagtggactgagtgcctttttactcgcccgaggaaaagatggagtattggaccatgcattttgacgggtcgaatatgctttcatgcactggagccggggtcgttttgatctccccgactggagaaagactgagctacgtattgtggatacatttttctacgtctcacaatgtggtggaatatgaggcgcttcttcacggactaaagattgcaatctctttgggaattcggcgtctgatagttcgtggagattctcagttggtcgttaaccaagttatgaaagagtggtcctgccttgatgataacatgaccgcttatcggcaagaggtacgcaagctggaagacaagttcgatgggctcgaactcacccacgttcttctgacaataacgaagcaggcaacagactcgctaacttc

SEQ ID NO: 21603 - DNA, 438 bp, Oryza sativa
  unsure (1)..(438): unsure at all n locations
agcttgcaaagcatgagtaattttatcttattcctctcccaatcaacaagaatcaacatttcattcaatttctacatgaacagcagcagcaacaaccacattcaaatgcaatgaccattgagggaaaaaaaattaccacatcgaatacaatgaaccaaggaactcatcatatgaacataactcgtgattggatatattttcatggcaggagtaactcatcctgagatgggcatgggcattgtatgctgagcactattccttgaaggacatgacggnctcgaacgcgcctaccagagccttcaccctgctcttcctctcctcaaggagtttgcttttggtttcctcaatcacatcgttgctcttcggttcatcttttctccaaaccttgtccactttcgctctcgccttcttcttctctgcaagctgggattgatcatc

SEQ ID NO: 21604 - DNA, 413 bp, Oryza sativa
gttgcaaaccaaacagataaactgcaagttgtctttatttgtaaaaaagcaccttcagcacgtgtgcatacacgaagtacgtaatgaatgcctataaaaccactgctgcaataacaaaggtagccaagatattccatagaatggaagctgtctatgcatgtactgatggcgctcacacatgcgtaaaccgttcggttatactctgcactaacacatggcgggtgatcgattatgctccacatgacataagcgtaccagctgcttatgttgataatgttccataaagagttgagactagagttccctacaaataaaccttcatccccacggacgaaactgaactgcagtgagcgacacaggaatatcatatgtgcagcatccatcaccattacagctcttgcgacccactgctt

SEQ ID NO: 21605 - DNA, 310 bp, Oryza sativa
agcttaaagcgcatttgatctttaacatcctaatataactaccatagaagaaatatggatcagttatgtgtcctacctatatatcctatctagatggaaaaaaaacccgacatgcatcgagccacatcatcttaaaaatattagcttttggatccacctcatgctttcatatctaccgcctatatgccatatacacttacaggccattgagatttgttatttgtataaaatcttgtgtcgataaacaatgacacctagaaagtaataaccattggattcatctcatgcttgatacgcacataaccatcca

SEQ ID NO: 21606 - DNA, 417 bp, Oryza sativa
ttaccggtttccaaaagagctggcatcactacctgtgtgtttgtttcatttgagaaggggaccactcttatgtagcatagtatgacatgaagatgagcgatctgtccttatgaatttgttcttgaatgcctcatttgacctctcgttccgtatgttagcacctcgttgtataatgcaccgcgaatgtggttcctttgatgagctgccagcatatgatcttgccatgcaatctaatgctgcggtggtattggaccatggaactgatattttcatatggatggtaagttacatcatatccttctccttgaccttacctcgttttgtaataagttatttaggtattccaacacttctatgcctctgtttatacagctccaattttttttggggcgtttactccagctcaaaaattcttgg

SEQ ID NO: 21607 - DNA, 474 bp, Oryza sativa
  unsure (1)..(474): unsure at all n locations
ggatcttaagtcacctgangcatgcaagcttgggttccctctaatggaggagagattctttgccatgtacttactatacatgttggattttgttccaacaattatattgtttaaataagaatggacaatgtactttgtagtgacaacagagtgaggttgagagattaactatgcatgaacgcaaaacatgattgcatctataactataaaggggttgatagatgcagatatagttcaatgtagggcttcaatagcattaagcccatgggacatggaatttttttgtaagttgcccaaagtccaattaatggggtcccttgaaaaaaagtactatcaatcgggctgatggaaatgatggagtagtactttgttcagtcatgtgcacagtctagatcacaaaatttgcttgtttgggcaacgtacgtcagaaacagtatgatcatcttgatgttacaaggccggattgcatgtgtg

SEQ ID NO: 21608 - DNA, 439 bp, Oryza sativa
atactaagctcttcgtagtgttagtgccatggagcaaaatgcttgcgtatctattggtgaagatactttatatttctcactctgacaacactttatgcttctcactttgataagtcgatcggtgcatctcccttttgccgggctctacttggtttattggaatgtaattcgattctttgagatggatgggtatgcaagtaaaatgatccgtgaatgcgcgatgtccaatcaatgtaagttttaagttgtaattgaaatggttctattatggattttggactgacaaatcatggttgatgatcctcagagtgatccagcaaaatacaatagcataacatctgtgtttggagtgctcttatacgagccaggacctataagcttcttcaggggatgggtgcctaccttgcttggctacaacgctcatggcgcatgcaaggtt

SEQ ID NO: 21609 - DNA, 409 bp, Oryza sativa
  unsure (1)..(409): unsure at all n locations
ctgattcaaacgaaaaatgtgtaacaccagaagatcttagaggcaacaaaaacatttctggtgctgaactgaaaagacaagattcctcaaaaagtgtacatcagcatcacaggggtgagagtaagcagccaaaaataattgagaagataatgacaactcttagagaggagagtaggcttagagaaaacaattctcctgtaagttctagtggtgtaaagttgacttctgcagttagcaataagaatcaagcagagcaatcatcagagagctcaaggcctcacagtggtgtttcatacagttcaaagtttggtgacatttcatctaatggatggaccaatacaagcgatgaatgtgtatatccagtccaggtgccattgcaattganacaactgtgatgagcctatatttc

SEQ ID NO: 21610 - DNA, 441 bp, Oryza sativa
tcccagactactgtttatcagagcatgcgagttgccatcttttttttagcatggaaaggtcgcgcgagccggcccccggcatgagagaaaacgcacgacctttataatgcatgcgtaactgttctcccgtcacgacctcaatagagctcagcctaatgcgggcagcaactaatccaaaggccgggatggagctctgcgccgtcttcttctcctcggtcttctccctcctcctcctcctactcctctcagcaggtagggatactcatggctccttcgtttcattccattcatgcgtaccttgcgtgttattgtcagtgtggatcatatggaagactgaaacacaatgatcaaggatcgatggtttagttccttgtgttctctgtttcttcttctcactctcgtttcatttcgaagagaccattgatggcttggagcgctttc

SEQ ID NO: 21611 - DNA, 434 bp, Oryza sativa
  unsure (1)..(434): unsure at all n locations
agtcacctgagctgcagcttcttggtgcacttggggttgtgcctttgatggttcgcgtattctgctgcgaggacttccgcttgagctttccttttcccatttttgcgattcttcttcttgcttgactcatgtgcgtccgtggctggtttcttttctccctcggtcttcggcttatcgttcttgcgtcttagcgcattatctgcgtgggcgcatcgctcaacaatctcgaacaatctccgagtggttgtgatgcgtcttgtcgccaactcctgggtagtatagcgatctctgacaccggatttgaaggcgcgaattacaaaagcggcggtgatttcaaggattgtatttctgcactcgntgaagcgcccaatatatttcctcaaagattcacccgtggtctgtgtcaacgcgtgtatgtcgtcttctatcgcgtg

SEQ ID NO: 21612 - DNA, 433 bp, Oryza sativa
ctcctgtctttgggcgagtttacgaatgtctgatggccctctaagatctagccctgcctcaccgagaatgtcgacgatggcgccgaccccttcgagtccctccagatcttgacgacgatcatagatgcggcggggggtggcgaccgggtcatggctaacgtcttccccatggccctcatgggccaagcgcgtggttatcccatgaacctgctgccgcctcggttcactcctaggaggactcttgcagttttgagcttcgggtgccgtctaagcctgagaccccctgtgctggctcttctgtagcggctggctttggtcccgacggctggctactgtgcctggcctggctcaactgatcgtcctttcaagcttcaatgttttttcaattttccaattcattagctcaaaatcttatatttaatttcccccattc

SEQ ID NO: 21613 - DNA, 436 bp, Oryza sativa
tgccagcttgagagaatatgagagaactttactttgtttgtgttgagaaaatgagaagaggagctcctttaaaaggctaccaatgaccgttgtggcaattggaatggtcggaattgccctccaaccatcattggggagtgatccacaccgtacatccaaaccctgcattgaacggagccacggtgggttcagccgaaccatgggctgggccggcctaacccaaattcggcaggtggcctcctctattgctcctcttcgcaaacttgtgaattttggcccaattcgtcgtgtcaattctgagttcttggcccattcatgcataagtgtaacgccccgattttcgttcgggaataaaaatcaattaataatacatttcctagaaattaaataaaaagttaagcacattattcgagtgaattaatgggagaattaaaat

SEQ ID NO: 21614 - DNA, 437 bp, Oryza sativa
  unsure (1)..(437): unsure at all n locations
tgcctctgctatactaaatgtcgccgagccggacaatattctttcagtaagtttatttgacacattgaaaacccttcctggttntgaggaggtccatagattattttactatgctcatttggttgccaaccctcatattgctatatcattcgatggactttcatttgaaaacaagatgcattggtttgctatgttcattagtgaaaagttccctggatcaacataggcttcttggatgagttggatagtacttttggtgttatgtgctggtggttggcttatttacctattatatgtaagactttaaactgccaatatgtttgaggcatagaacttactatacttaaaattgctatcatgtgcaagaattaaaatgtgctattatgtgtaagaccttcggttgctaatatgtgtaagactaaaatttgctttattat

SEQ ID NO: 21615 - DNA, 472 bp, Oryza sativa
gatcctcttattcacctgctgcatgctagcttgtcaccaacactagtgaatgcacctattctttccgtcatcttcattctcttgtgttgttgctttctttggcttacttgcagatgatgcctccgcacgatcatcagtagtggcaggaccatcattctcttcatcattgtcatcttggacatactctgttcctacgactgaacttgagtcctctgcatactttcctgtatccatggtgctaccatatattgtaagcatctcaccatattgtgcaaaaggtttgttaaaataattcgcatcaaccttgtgatccttcatgaaacaaaagttaatgtataagcaaatgcaataaaatgttataaaaattaagcgaagaaccctgataataagacatatacctctatataaccatcttagtgctcatcatcaaaaggaataatgaagttcttctcatccgaaccagcagcactcc

SEQ ID NO: 21616 - DNA, 383 bp, Oryza sativa
actaagctctcctttgtctctaatctcttgtattctcttctctatatctctcagtgctttctctcatgttatcctcaatggctcctgtgcttggaaactctcatgtatctcttctatataagatggtgcgaagtaatatattcatgtggggaagctctcccccccggtgaattttcaaaaaacttctttcagacgcatgagattgttgatgccataatataaaccatgggattttgccattaatacgtgaaatggaatctcaagcttctccagctttggcatatcccctcttccaaatgttttgtacgctccaccatcgtgatcgccgcatacaatgagaaactccatgatacatgggaatcctgtgctttggactgaaagct

SEQ ID NO: 21617 - DNA, 435 bp, Oryza sativa
agcttaatttacttgattagctgttgtcttgtcttatcatcaccttacttctcaacatttagttggttttgacggtttctccgcgagggataacatgcgcgtttgctttttcttcttctaatataatatcccctatgttataattattcagttttataagaacaaatcaactaagtgtgttcttgaaaattccaacagtagtaatatagtagctacgactctcactagccttgagcaataattagggcttgatttctaggtttggctctttaatatcttttacgatcctatctaaaaattctggaaatacacagtaattaagatgccctataagccctatatgcttggctcattatcttggcttaatcaccccctgtttgctccctgaattaagagtgaacatacctcattagtgatagtgcatgttctcttaat

SEQ ID NO: 21618 - DNA, 437 bp, Oryza sativa
  unsure (1)..(437): unsure at all n locations
ntaatttgacggacggtgcctctctagctacatggtgttctttcactggataataactatatttcttctaaaatatatatagtagtaatctaggattaaattaacgagtactacgaattcgaatctagacaaactcttatttggtcctaaattactaaattttgagacggggagagagtatatgttagaaaagtatcattagttgtggtgaatgatgatggagttgtgagtgcaatttgtccatcaagtatcgaattctattgctcacaatatgtactctgtgtaaatttaattactacactgaaaatttatattcattacctttaattaatacactatattcttaaatcaatctgaagtgaagctcagaaaagattatacataattaattaattcgatgtatatatgattatcgttgttaagtttcaaggtttaaa

SEQ ID NO: 21619 - DNA, 403 bp, Oryza sativa
cttatgataatatgcctagtcttttctccaccattgcccagaggaataatagtactttctatgacctacatacatttacatcggctgatgatcgaacaaatagcgtgctgcaaagagcctttgtctcattgggtgcctgcatcaatgcttttgtgcattgtcgatctgtcctatgcatagatgggacatttttgacaggtcaataccgaggttagatattgacagcaattgtgtgtgatgggaacaaccaagttctacctatggatttagcatttgtatagagtgagaacactgaaagctggtactggttcctagagagagtgcacattgcaatggctcgtatgaagcccaacgattgccttatacatgatccgcatgcggtttgttgcgggctattgactac

SEQ ID NO: 21620 - DNA, 434 bp, Oryza sativa
tatgcctgatggtacaatcgaaaagtataaggcatggcttgttggccaaggttatacccaaaaggatggcgaggatttcttcgacacatattctccagttgctcgcttgactacgattcgagtactacttgctctggcagcctctcatggtcttcttgtccatcaaatggacgtttagacagctttcctaaacggagagctggaggaggagatctatatggatcaaccagacgggtatgtactagatagtcaggagggaatggtgtgtaaactattgaaatccttgtatggcctcaagcatgcacctaagcaatggcatgataagtttgacaccacgcttacatctgcaagctttgttgtgaacgaagctgacaaatgtgtatactatcgctatggcgtgggagaatgcgtgatcttatggctgtatgtcgatg

SEQ ID NO: 21621 - DNA, 444 bp, Oryza sativa
ttaagcacctgagctgcagctgtcttgcatgggccgtcttttgtttttacggcggtgagctcgtgcaggtcgccggaggccattacgaggagcccgaacgggccgacgccgccccgcacggcggcgcccttctcaccgcacagcttctggggatccagcagccggttggggtcgtccaccctctcggcctcctccaggctcggaatcttgaacaccacctccacgtccgcctgcgagctcgccacgccgacgatctcctgcaccgcgccggcgcctagcctggtgccttgccagagaccggcgcgcttcctcctcagcgtcttgatctcctcgatcggccactgcagcagctgcttgccgtccttggctaaccacatcttcctcgggaatgtctgcacgccggaccagccgcgggcgacgacgacgggctgcttgcggactcgt

SEQ ID NO: 21622 - DNA, 435 bp, Oryza sativa
  unsure (1)..(435): unsure at all n locations
tcatacaagccaagcagttgtgccatctgattccattgtttctgttacataagtgaaagaacttgctgggagttcatcgtccccatcactaaatactggtggagtatgcaatattacttttgtatgggtggcagataaacatctgcgcctcctcaatgtggtcattcgacagaatccaagtttgctataaaagtcactttctatgatgttgaaagtaccaaggctgatagactttgacaacaagcgtgcttactttatatcacgcattatgcagcatcatgatcagcatctttctgctcctttgcggattaacgttcgtcgggcatatgttttggaggattcatacaatcatttgaggttacatcgtagacatgaacttaatggccacttgactgtgcatntccaaagaaatgacgggattgatgctcgtggact

SEQ ID NO: 21623 - DNA, 380 bp, Oryza sativa
agcttgctaaaatacatgcatctatgctttcatgatgtggagagagatagtactaacatgatgtttcatggatgttgtgaaacacactgaaaacacatattaaaacatatcactatcacgtatgaaacatcttgtgttaacagtttgaaacacatgtttttcttttgacactaaataatcatgtgatattttgtatgaaagatttaatcgcaacgaatacaaacaacgtgataggctctgacatcatgataagtgatctaggagaaaaacattaaagacatgatgaaataatgaaaagatacagatagacatgctttgttcggtaacaaggttggacaatccacacgctgctgatttgtagtaatttctgacgtcgacag

SEQ ID NO: 21624 - DNA, 422 bp, Oryza sativa
tactatgataccatgctaaacggccatccatttggcctcactctacttcgaattatcattctgactactcttatttgtcactgtttcatgatgcgtttcatcatcttcacaatttcttttgttacaaaatattagtattgcatgcttgggttcaaatatgtccataccttcaagtgcataaggtactggatctgcatcctcaatgggcttctttacatgtgaagcccgatgatgtgatggccaactccttattatttactttgctacagaaaggcatgcatcttcatcacagatagtttaatcacctccaatagtttctccatgcagatccctgaataccagaataatatcattgttttaggaacattgatgaactataagcagtgggataactacaaggaaaatgaaaaagacatctcatt

SEQ ID NO: 21625 - DNA, 441 bp, Oryza sativa
agcttgctaaaatacatgcatctatgcattcatgagggggagagagagagtagtagcaggtagtttcagggattttgtgaaacacactgaagacacatattaaaacatatcactatcacgtatgaaacattttgttttaacagtttgaaacacatgtttttcttttgacataatataatcatgtgatattttgttgtaaagatttaattgcaacgaatacaaacgatgtgataggttcgtagatcggataagtaatttaggagaaaaaaatttaaagagaggaggaaagaatgaaaagaaacagatagacatgcatgttacggtaacatggttcgtccaatccaccaggctgctgatttgtagtattttcctgacgtcgacagagagagaagaaattagtaataagaagtgagctggtcgtacgtgtccgatgaattttat

SEQ ID NO: 21626 - DNA, 420 bp, Oryza sativa
  unsure (1)..(420): unsure at all n locations
tggtcgaatttgagccatgtatttgtgtattctccgactctntggttagttgagaaacaactgaacatagagtcgagaattattgcttcttgtcgtcgagtagtcattgcttgattgaagatatgtgttaaagatgtccaagtagaaatcctgaatattggagagccacttgttgtagtaaaataacacggcatcgcatgccaagatgtcgaggtgcacaaagacgtcgtggttggtgaagtagcaaaacttgcgaagtagcaacaatagagtttgccggtgccgaagataataaagatgaagtcgctctaccatgatgacaaagttgcattgccgtgatgaagtgaacacgagtcatcggcaacagaagcaaaccggttgtgaatacgcgcatgtgtgtagataaaagcaccagtcggc

SEQ ID NO: 21627 - DNA, 426 bp, Oryza sativa
  unsure (1)..(426): unsure at all n locations
agcttcccaagagaggggagtggagggtgttatattagactntctcgggcaatacagggcagatgacttgacaggagaagggaaggaataagattactaagcttttctttttaagaagaccataaaaaaaagaaactcaagtttaagaattttggtataaaagaaacttcaaataaaaagaaaattggctgaagaatcggcacgatgctgagattgagatcgatctccgaccttaactatggcaaaaacccaagttgttacattgatattgcgaaccactgggtctagtaccagggggtactaccccgggtggaccactcggtcgggatgatccgagcggtcaaacttgattccaacttcagaccatcgaagatattgaaggtgttctggctggacggcgttgatttccctatcaatcagcttcta

SEQ ID NO: 21628 - DNA, 429 bp, Oryza sativa
  unsure (1)..(429): unsure at all n locations
tgaaccgagtgattgancttggttgcatttgttaaatgatagatttccagaatcgagaaagtctaagttgatgcctcatgctgatggtcacttcaaaattattgagaagattaatgataatgcatataaacttgagttgcctcccgagtttggggttattcccacgtttaacatttcagatttgaagccatacttgggagaagaggatgagcttgagtccaatacgacttcaattcaagatggggaggatgatgcggacatcactacctcagattcacacaacattcctccaacggtcattcaagtaccgataacaagagctcatgcgcgataattgaatttagaggtgagctcattcctatgttcttctttgtatgaattcgagagtatattgctacctaatgattatattgtgattaaaaacaatgg

SEQ ID NO: 21629 - DNA, 417 bp, Oryza sativa
agcatgcaagctagcattcaggtagaaaaggctaacttcttgttaattaatgaatcgaagagaaatccaccggtcgatcgatcgagccatgtgtcaatgtaccacaagggtctatccatccaaccaccggccggtgaagaccaacaagagaagttatctggatgatccgggagtaacatgggattatatcaactaacaacatgtacattagttgctaacatcatggcctgctcttacttactagagccttgtgactaatgagcaagacaacacgtagtgataacaaatcatcaggaatagtgagataatgaaatcactaggatgcctgagtatcctcgtgataataaactcactcgatcgcctgctagtgagataagcgacaggcttactgcttggaacttcctcaggtatcactgc

SEQ ID NO: 21630 - DNA, 407 bp, Oryza sativa
  unsure (1)..(407): unsure at all n locations
ntacaagtttacgacgaacgttcagtgattgagcagtatcttataagctaataacatacacctcatatcgtatgttttcagtttataagttactgcaaaaataataatttcaaaattgtgtacaaccaccatctaaaatgttgctacgtaagatgaatctaacacgatgaaattgggcaaagatctgtacagactcgttgtccaataatatgtcacattccgtcttagatagcaacattttagaacctagaaagtagtaatttatttttttaaaattgctagtttttaaatcgttaagtatattaaactatacgttctcgttataattattttttgtttgctgatcaggtgtagcgtatgagataaccaacaagctcgtcgatgtactgctcctcccgttcctggtc

SEQ ID NO: 21631 - DNA, 408 bp, Oryza sativa
  unsure (1)..(408): unsure at all n locations
caagctatagccganatgagtgacacgagatagaacaccatcggcttcacccaagcaaacgcctccaactccttctgcccccgttcattttacaagagtaagtacctctctctgactacttctgaaattacctccctcttcggctaattacccataaactttgtagttgcagaagaagaaaactgctgtgaagaaaaaaccagcagcaacaattgttaaatcggctccaccagtaagatgtccttaattcttttacttaatcaatctcaaccgattctatataacactcgtctatttcgcagcctactcctccttctcctcctgtacagcaatcatcaagtgatcagactccatcggctgtggggagtcatcacgtcgaagaggaagaacaaccagctgctcctgcta

SEQ ID NO: 21632 - DNA, 357 bp, Oryza sativa
aacaaatattgtttcataccgagtctggacatatgcaagtcgtgtgtgaggtttgccaaagagtgcatatgccatatagttgaacaagtatctttcttgaggaacagacaatcaatttccaaaatacgaccatgcgaatacaatgtcgaagatgaaattgcagaatacagttcagtaaaagctatgcgcaaaagaagatgtacatgttctgtaaagcactaatctgactttaataaattaaaactaatacaaaagaatctaagagaatgttgcaaatgatcatggtatgcttacataaacgattgtatattgtgaatcataaggaaaatgctgaagatgatacaaaccttttgaaga

SEQ ID NO: 21633 - DNA, 424 bp, Oryza sativa
agcttctcctaaccttgacgaaccatgtttttgtctgcctctttactccacaaagaggggtctggctggtgttctcggaaacatcataacaacttttatggaatatcataaagctcggcctgcagatttacttatagacaaagccctatccttggagctcagtatacaccgctttacagtcaaacatccattaggtgtatgcttttgaatgtgcaaagaaaagttagaatcacatgcatataacgtgacatcattgcctgtggtaccattagattccaatgatctacgatactatcttgttgctcctcctcgacagggcgcatcctgagatgatcttccattcgtggtgatttactctcaagttcttgggcctccacatgtagaggagactgcttcttggagatatcttattccagtgtatgga

SEQ ID NO: 21634 - DNA, 340 bp, Oryza sativa
agctagagagaacatgagagaacattacttgtttttgttatagaaaatgaaaagacgagctccttataaaagctacctatgaccgccgttgcaattgtaatggtcggaattgccctccaaccatcattgtggagtgatccacacaggacatcctaaccctgcattgaacggagccaccgtgggttttgccaaaccataggccgggccggcctaccccaaatttggaatgtgagatcctatattgctactctttaccaacctgtaaattattgaacaattctgtgcgtctattctcagatcttggcccattcatgcatatatataacgccatgattttttt

SEQ ID NO: 21635 - DNA, 412 bp, Oryza sativa
taaaaccaactgcctctgcttactgaagtcgcgtccggacatattcttcttaatgacactagacacatcgagaacacatcctggtttcgaagatgtccataaattatttactatgcacatttggcggccaaccctcatattgactgagcatacgatggactgtcatttgaaaacaagatgcataggaacgctatgttcattaatgaaaagtccactgcatcaacataagctgcttggatgagtgggacagatctctcggagtcatgagctgtaggctggctcaatcacctattatatgtaagactttaaactgccaatatggctgatgcagagaacttactagactcaaaatcgctatcatgtgcaagaattaaaatgtgctattatgtgcgagaccttcggttgctaatat

SEQ ID NO: 21636 - DNA, 442 bp, Oryza sativa
agcttaagcgagtcagaatggtgagccatgtctatttcttcattcagctttctagcacgacttggcttgatcttagttagtcttgtgagctcagctctagtacatgataacgtatactttaacaatagctttataaaaatattattaacaataattgtattaattgttttaagctaatcatattaaataaaaaggtgaggagtatttaacattatggataattgcaaatataccactacatttcacacttaatttgaaatagccattataaacatgaactgtaaatttgccactgaaattgatccaccgtgcttctacgtgccattgccatctaaactgtggcaattaagaggccaaaaataatacatataactaaattgaaaatgacataatttattttctcatctccatttaaaaaagatcttcttccaacttacataga

SEQ ID NO: 21637 - DNA, 373 bp, Oryza sativa
  unsure (1)..(373): unsure at all n locations
actagctcacctacaaaagagatataaagataagtggcaactctcttattgggctgaacacttggatgctacttgacacctaattcatataccaatatttgataagagtttcgatgtcaacacatcaagctggatcggcttgttcccttttgaacgaacttgattattcactaatagcgcggtgcttgctgannnntntgttgctgtaacctgtactgtgtgcaaacagattttagagcaatgttaatagcactagataattatcgcgcctctgctcattatatcctgtgtatattttccaattggttttcaaaaatcatgtatataaaggagggcaaatgaaaaattcaatggtgtattaactgatgcaaca

SEQ ID NO: 21638 - DNA, 417 bp, Oryza sativa
  unsure (1)..(417): unsure at all n locations
tacatatatgtgacacantagcccacacatgttatcttttttctatcttgcctcccaagcgacacagcttattcgacttaactacgatgctaccccaactccataaggagcaaacataaacgatatctatgaatgacatcatcctaagctaccaatgaaccagttcctgcacgcatctagcatcaacaatcctataaaaagattggagtgtgtcaccgttgccaagttttgtctcacccctacaacgaatcagcttcgactctacccagcagtacacaaataataatgatgaacacccgccgttgagcatggaacataaccaatgcatcgaatgcctcgtcaaacaccctatgcttgtatgggatcagaggcattgcaagagtccaccaatgctatcgttgcacgcagaaagttctt

SEQ ID NO: 21639 - DNA, 444 bp, Oryza sativa
  unsure (1)..(444): unsure at all n locations
gacactatanatactcaaactgacatatggcaatgaaaagtgctctcgacgacagtcctttaataaacgacataaactcaatgccactccgacactgagaaggtcataatcaagccctccggacaaatatagaatagcctgcagacagaatataaaaccttctgccactactgctgatatgtcactcccacattatgttgtatgatcacccacgcggacgctatgcgcgacagaaaaaaaaagatgactcctcagttatgtaagcacaacaacattgactaatagatatacgtttgaccattcatctatttaacataaaatcacagatatgccaaaaataatatacaacaaaacacataatgagtacatagttgtgtaataaaacaaatagtataacacatgttgaaaatcaatggcgctgtaagcacccgagatgaactggtc

SEQ ID NO: 21640 - DNA, 148 bp, Oryza sativa
gcagcaaccaccaaccagggaaacattttcaagtcaaacaacaacacaagggacgacacaacgaaccgccaagatgaacacccaaccgacagagcaaaatccacaccgcgaacccaaaaaagacagcaacacgcaaccaacaaaggac

SEQ ID NO: 21641 - DNA, 370 bp, Oryza sativa
taaatagcaatgctccatgcaatacttgacgttaacacctcacaatcaacctgttggattcacccactccgactttcgattgaacgccatctatctattcgcgagccgaagccgacaagtcgcatgccgtcttaccatcctccgtacgacccgagcgctacgtctagccatctccctggacaacacagatcatagaaaggctcaggccatcccgcccatagtgttcgatccaacgtacaagaacgacgaacgccttcagcttcaatcaaaccgagcatggggccccacgtctacttgttgagagtttcttaccggaaagtccaggccacccacccgaagtgtgcgacccaccgattggatcgccaatcgc

SEQ ID NO: 21642 - DNA, 394 bp, Oryza sativa
  unsure (1)..(394): unsure at all n locations
tgtatcntatgatggacatacatatcatattactgcttatcctgttaacatagtccgtaaccattagattctacaaatgttggtacttattctgccaacggtaatgacttgcaatctgaatgcatagcaaacatatgattgttcttgcagttatagaatacacctagtcttagagtattgatgtttacatacatttgatcttcgagtcctcgttaaaaattcaaggaaatatactaattaagttatattcattacctgtccatatagatggaaccaaaatttctttcgcataatgctggagaatacccgaatccaatctatcactcgtaatttggtcactgtgatggtaagttcaacaataatgtgtgactatactttgcaaatatgaaaaaaa

SEQ ID NO: 21643 - DNA, 425 bp, Oryza sativa
agcttaagatgcctctgaagattaagatctttatgcggcactcgcttaaagggattgtgttaaataaagattatttggcaaggaggaattggaatgtgagtctgagatgttggttctgtattaaaaatgggactatacaacatctttttattgaatgccattttacaaagattatttggagatcaattcaattttcttttggttttactttactaatagcatatctcatattttttatgattggggtctgggggtggacaagaaaaatataaaacttattcttaaaacatctgctatatgttggactctatggttgagtaggaatgacatgatattacacaaatcactatatgtttcatatatgtgagtaattttcacggcaacaaatatgctcacgctctatgcacaactacaaaaggatgatg

SEQ ID NO: 21644 - DNA, 427 bp, Oryza sativa
tatcttggctcattattattattttattaacataactctctcacgtaatgtgccttaagctacgacgtcaaaatattctactcctactcctacgcttggaaatatttctattgtcaccgctggagatcccgcatgaagggaacaatgggttatgaatgatgaattattggacacccctacaacaaagggaacatgttatgtatatccttacgtgcacttgcaatgaatggtttcacaattgcaattgtttatagttcaatgtactatgttcaaacatgaagtgtatctcaacatcccacgatcacacctatacgtctcccatttacagtgataaacaatatatcatattatgatcttaatgaatgatccgaagaacctttgagctacatagttcaaggagagacacagaacaataatgaaactgatc

SEQ ID NO: 21645 - DNA, 403 bp, Oryza sativa
  unsure (1)..(403): unsure at all n locations
agcttatccaaactctcggtgtaaccaatcatttgaccacatgtgggcacataggattaccttctgcaagcccgctcgcaaataaggactttgaggtattaaacctctcagctctagcttggtcctcaaacatgttacgtagtcccgtgattatcgtatgagcatccaatgcctcatattgcctttgatactcaggggacatagtatcaagcatgagacagcttatatcaagataatcattgcatcgctttctatgctccctacgttgagcaacatgagcattgttggtcaagttatcttgaanaggctatgtaagcacaaactctttgtgctcttggtggcacgcgatttcgtgcacaagaggggatcactactacatagccttcgctctcgtggacgatgg

SEQ ID NO: 21646 - DNA, 454 bp, Oryza sativa
  unsure (1)..(454): unsure at all n locations
acactatataatactcaanctctattaaactcttctcaaccaatggtgggaggaggattatctcctttacgccatagactattattccatgtgtgatacgtaccccacttgccgaacatagacttatggtattgcatgagagacctatgaaccgaggtgatctaaccgtagcgaccaccttatctcgatggacttattaatcgaagttatatggtctgatgttaagtgaataaaacaacaaactggattagtgatgcataaagctctatatctaataataagtgaatgctttgcatcgtgcgtccaatggaatccgacgctacattggaaacccacccacatgtgagcatatttctatcgcagggagaaaagaataatagaaaaacaaatggagggagttatatttatatgagagatttaaaataaacgatgttaactacctatccaatcatat

SEQ ID NO: 21647 - DNA, 210 bp, Oryza sativa
ctccgatgaatattaaaagacattctagcactgcccacatgcacatatataagaatgaaactagacacatatgaaagccgaaatacacgactaactatataaacgaggacaacgctagaaagtccgaaaacacaaaacggaggcacgacacaacgacctgcgaggctgcaatagggacagagcgaacaaacgcggctattgtaacagaac

SEQ ID NO: 21648 - DNA, 415 bp, Oryza sativa
cagcatgcccagctggccgaaagacataaatcagatatgttgccttattacacatggaagaaatagcgcaactacatgggggagggcagcgctacctacacccttagaacatcccatatactccctctagctcccgactaggtcaggctcttcatagcagaaaaataacaacgtggccacgcccaaggccactcctagacgttgatacgatccccgtccgatcttcgccaacgccggctggcaagaacagtcttcacacctcaaagctggctaatatgtgcaaagcatgctacacacatggacttaaattctgccagacgtagatctttgacttcgaacaggcgaatggtgagcatcaatcggccatcggaacagacaaaagaacgggcatgtgtgaccaacaaaaatgactaga

SEQ ID NO: 21649 - DNA, 423 bp, Oryza sativa
gtagctagagctagagtgagctcccttctcgtcgatctcgtggtagttaatacggaaggaagaatgagggcgcgttaagaagtctatagaatacgaaatatacggaacacgtatatgaagcatgaaatgtaaactaatgacaaaacatattatatattttacctataaactatgagataaatcgatcaagtttaattatcatattattagtatcgcattgtcaaattatacggtaattagacttaaaagatccgtctcgtaatttatatgtaaatcatgaaattcgactgtatctatatctaacatcatacgtatatatgtaaaaattggatgtgatatatgcggcctaaatattctacatatagaaaaaggcaagacgggcaataaaagtggcaagatatggaggaggttggggaggccaca

SEQ ID NO: 21650 - DNA, 300 bp, Oryza sativa
tctggagtttttcagaaagaaaaaaccgtattgaaatcgccaaaaaagctggactcgaacttggtttattccataataactatgcaaatcatgcaaactggctgtggagtgttaatcacactaacgcatggaatcagatgaacgaaaaagtacgcaaatggaaaatcgctacaaaattgagggtacacaggctcttattgccaaacatataggtgcatcaacaaagactaaagcacacatctccaacgtaaagatctacattaacttggctgcgaatatcgctcatgaaaaaaaaccaaa

SEQ ID NO: 21651 - DNA, 429 bp, Oryza sativa
  unsure (1)..(429): unsure at all n locations
agcttgctagttgttaggaggttaactgtctactgttatgatgnanccaccgaagagggaaggagaagcggctggtcagatatggatgcgatgcggcgtcaggttccacctccagctataaatgcaggcagcctagccaagcagaagtcccctatcggacatgagcaatcaacttctaaagatgcagnggtgagttcttagagttctcatgatgcctgtgttgctagtgccatgacaaaaaagtgtgcccctgaagtgctactttatacacaattgctatgtaatatctgacctttaagtggcgtgtagttctccagttcgacttttttgggacggtcaagcggatcctcaaggcgacctgctgtctctagtagccgagaaccaagcactgaagctgaccagtcacgtagtcgtacaacagatgcaagt

SEQ ID NO: 21652 - DNA, 437 bp, Oryza sativa
tagatgcatttcatcctttcttgtgcagttccagtgtttttatatgtatcactgggtttaattatttgtatagaattcaaatgtgacttaatatttgcataagttcagtctccatcaaagtgattttgctctatgccacaaaaatggagaacttctccttcacttgaatttctctgttccaaactggaatacttagtttaattgttaacttttgtctaataaatatcttgtccttttttgttagatctatatcttagattacaccgtctaagatctaattcatgtgcctcattttttggtttcaaattgctcataatatagtggatattaacagtactgcatttgagagcctcatttttggttgccttcacctgtgtggatgctgattgcagcttgtggtgaatccaatgaaattgcactgtgagtggactgctact

SEQ ID NO: 21653 - DNA, 375 bp, Oryza sativa
  unsure (1)..(375): unsure at all n locations
gacactatanaatacctaagcgtatgcacaatacacgtggcacccgagcaagtcattttcttgtgctcagacatagggccactaccatgccaccaacggaggttagtcagtgcaagctttcttgcctatggcactagattgacataccatttcaaggcgacaagtcacatatctgcctaggggtgtgaagcgagataagacaacaaactgccaccctagtcaaacactaattgggctgatcacgtaagagagtggacaagcaatagaagaaaagccttaatgcatgcacaatgcagggtgcacccccataggaaaagtgatcaagcacccatgcaaggatatgcctcacatagagcaagccatatacccatttca

SEQ ID NO: 21654 - DNA, 388 bp, Oryza sativa
ataataatacttactatgaccgacattcattttcatcggttgatgatcgaaccaagagtgcgatgcaaagagcctctatctcattgggtgcttgcataaatgcttttgtgcaatgacgacctgttctatgcatagtaggaacttttatgacagtgaaataccgaggtcagataatgacagcaaatatgatgtgatgggaacaaccattttgtacctatggattttgcatttgtagagagtgagaacactgaaagctggtactggttcctattaagagagcacattgcaatcgtgcgtatgacgcccaactgttgtcttatacatgaacgacatgcgggtatgttgcggactattgactacttgcagaacggttgggacgataaaggac

SEQ ID NO: 21655 - DNA, 430 bp, Oryza sativa
  unsure (1)..(430): unsure at all n locations
agcttgtattgatcaaaatgttctatgttttctaagctncaatttgttcactggaggagcttgtgttgattaaaatgccaaagttgaagagatgcttctgcacttcaatcaggaacttgtacgacaatttaagggttctcatgattaagacgtgccctgcactggaggtctttccgttgtttgattactgccagcaatttaaaatcgagcagccatcttggttgttccgtcttagcaagcttgtcatccataaatgtccccatttgcatgtacacaatcctctgccgccttcaactaatgtttcaaaattatccatcaccggagtttcaacgcttccaacggctgagtggtccagaggaatattaagaatcggcgttctcgatgattctgatgatccttctgttattgatgagccttctgatcagctgat

SEQ ID NO: 21656 - DNA, 433 bp, Oryza sativa
tatgtttgataaagccaacgagtacgccatggctgatgtctccgtcaccgcatcaaagcagtcgggtcccagttggaatctaaacatgggtacgccggctacgggaggaggtggaagtaacaatcataatgaccgcatgcgtaagcctgcggaacttgttgcaaccgccagtcactcttctcgacagcgttcgcgcgtcaacacgttcgacaagatcatgaactcccaatgctcgcaccatcctaactccaaccacgtggccaaagattgtgtcgtctacaagcaattcgcggatcaatacaccaagactgcacggaagaattctgacgaataacaaagcacgtcgaggaagaatgacgacggcgacaccccggcaggttttcaagatcaccgctaggagctcaatcatatcttcggcggccccctgtcttat

SEQ ID NO: 21657 - DNA, 345 bp, Oryza sativa
acatattgtgttgtacttgggaagcatacattcctgtaaatgctttaacaactaggatattgaaattttgcttgtgatgcaagataaataatgaatctaatgatacacatttgctatatatagtctccaggttaaaattccttctgtcatttgcattaggaaataaaagtagtgtcatcgtacgatttattttgctccgcttccttatctataaatttgaccttattatcatgtagaatttcaaaagcattatgagaaatctaatgtcctgaacaacatcagagaaattgggaatgcttagatttgcatcatctctatgggaggagagaaaagtgcaaacactca

SEQ ID NO: 21658 - DNA, 387 bp, Oryza sativa
tatgtctgaccgagaagcgtatgatgattgtctctcatttcaacaaaggcctcaagtcttgtctggtctactctttgatgagcaatttgcaaatgtttatactattaatactgtttcagaagttccatgatcacttgaagcagctgatgaacgtgacttgcactgaagtcagtaggaatggatcaatattgactaacactgtgaccgttattggttaggagaggaagcatgactacaatgtgatgtattacagcgctgagaaagaagtgcggtgtatttgctcgtccttacagattaaacgtatttcgtagagccatgctctcgctgtcttgatacaagaacttgtgatgctgtatccatataaatatattgttcgatccgtgagga

SEQ ID NO: 21659 - DNA, 216 bp, Oryza sativa
atgatgtcattgagcataactatggcaccacaccaagagagcgtcagctctttccacagtctacaacatgtgaagacagcgtaccatctcaagaacatggaatgtctatcatgtgacacggccccggcgaagacccacaccaactggcacttcgcagaaacctgttccagtcctccaggaagacacgatcagcaggtagcagaggtactctggcac

SEQ ID NO: 21660 - DNA, 376 bp, Oryza sativa
  unsure (1)..(376): unsure at all n locations
ttttatattcattccacataacatagtgatcctggaatgtagatttctacgttacagtgaccattggaccacacactagatacccagaatttaatggctcggtgccaattagagtatgcttggcttggctaatagacctgtattttatttgtatatactctatccatcacacacatatatgcattgatgttgctaatcatgcacacaccggaggtgtactgatactgtcaaacgcattatactacatttcatactactatattactacaatatgtgcgatgtgcttatacaagattctgaaattgtgcataaatctgtacttacagacctgatctatcactattgagataatgcgataggnatagaaactatatga

SEQ ID NO: 21661 - DNA, 443 bp, Oryza sativa
  unsure (1)..(443): unsure at all n locations
agcttaaggctagtaatggctggtcggactatagttttatttatctccttgagctgttaaaggatctgttgccagaggggaacaatttacctcagacgacatatgaagcgaagcaagtattatgtccgttgggcctggaggtcagaagaattcatgcatgtccgaacgactgcattttgtattacaaggaatacgctgacttggatgtctgccctatctgtgggggatcaagatacaaacgagcaaagagtgaaggtgaaggaagtaagtcaaagaggggaggcccagcaaaggtggtgtggtatctcccaactgcggagcgcatgaagagaatgtttgcgaacaaggaacaagctaagcttgtgcgctggcatgccgaataacggtaagtcgatactatgctgaggcacncagcagattcagtgcagtggaggacaatcgat

SEQ ID NO: 21662 - DNA, 450 bp, Oryza sativa
acactttaaactaagctaccggcattgtttttctggcctacagctgtgtctgatgctgacatgattgtgcggacatgtgaaggttgtcaattttttgtcagacaaattcatctgccagcccaagagttgcaaaccatcccgttgtcctggccatttgcagtctgggggcttgacatggtctgcccatttaaaagggcagtcggcggttacacgcatctctttgtggctatcgacaaattttccaattggattgaggctaaaccggtcatcacgatcacagcagataaagctagagattttttcatcaacattgtgcatcggtttggggtacctaatcggatcatcactgataatggcactcaattcactggcggagcatttaaagacttttgtgaagactttggcattaaaatttgttatgcctccgtggcacactccatgagtaatgga

SEQ ID NO: 21663 - DNA, 410 bp, Oryza sativa
  unsure (1)..(410): unsure at all n locations
acatctaacgntgcagatttgaagccgtatttgggagaagaagatgagcatgagtcgatgacgactcaaatgccagaaggggaggatgatgaagacatcaacaccatcgatacatccacgttcccacaagtacaacttcatggtcctattacccgcgctcatgcacgtcaactcaacaatcaggtgagttctttcttgagttcattttcctcttctttataccccggagacgcgtgcactcttgttttactcangaacgatggagaggatccaaaggggagaggatctccgcgggttggattcggactacaggacagcaccaacttctgatggtcgccacaacttcatgcgaatctccgattgagcgtgccagtactttatggaaagcttatcaagtctactttcaaatg

SEQ ID NO: 21664 - DNA, 436 bp, Oryza sativa
tcgaccgtaatgaataatgaccatcacagtgtctgaccgttctagaccccggaagacctgtaaccactgtgtgctgacagcactcgtgggaacgcaacatgaaccctgatcgacaggatctacaggaactctgactgacgagatctacagcatagcactatccattaccagttaatgggaccgaccataccacatgataagcactggagctactgaccttatcacatgagccccattggttggtgcctataacatgagccccaagcgaccctgagaaagtgcaccagtcctcccctcccctctcctttgaactaagctagccagaaaaaccctagctccatggtagacctcgcagtaaccatggctgcgcccccttcagaaccacctcatcaaccacctcatgtactcccttatgtgtgtacaattgggtatgcct

SEQ ID NO: 21665 - DNA, 436 bp, Oryza sativa
tgcagcatgcaagcttagtattattctgagaggtaaatctttcttctgttataaattacaagatcagacgacgaattcagatcttttccatctaaataaagattaatactactttagtattaccgactactctctatgtcttataataatccaatcaacatcctaataatataaatatggataaaggttcatccttaggatgcatcaatataatgtactatatagaaagagcttcttgtatacttttctcaatgtgaggcctctcttctcttgtatgaccgtgaccaacttggcttgaactacattttttttctgaagacgatcattgcaataataggctgtagctctttataccacaggccgtgactatatattccattatcaacaaaataagtgactacatatacactttggtatactcggcaattcatggatg

SEQ ID NO: 21666 - DNA, 253 bp, Oryza sativa
cattttcgtcattttggccccgcgagaaaaaaatcatttatgtccttttggtcatggagcaattatggatagatcacgtcaggaggaagtatcaaggtgaagacatatatcaccaaaagataaaatctgtagagtttaccgcacactgtgtggtagcataacagaagttgggcaataagttgatcatggatgcatgctgcctcgcaagtcgcaagtaatagcaagcacctctatcggatttcattcatattct

SEQ ID NO: 21667 - DNA, 433 bp, Oryza sativa
agcttatcacaactcatcatgagacaaataattctcctattaagcgcataaaatgattcatagacaagtatcagtatgttcactaaagattagaatgcgttcatgcatgtgctatgcactaagcatgatcataatttatgaactcctgacacgacgccagcctgatcagcagaaaatgaaacaaattaaggggattgcagctacaccatttaacacaacttgaaaaaaaaccttcaagtagataatatacaagaaaagggttggcagtgctgaatcggtgaagcctacataatgaatttgcacatttcttacacagataataaatcaacaactagtgctcacgatcgaatcacacacatttctcactgaatttttttgtaccagtatgaacttaacaggttatctgcacggtgcacatttgcctagtgccaat

SEQ ID NO: 21668 - DNA, 426 bp, Oryza sativa
tctaaataatgtaagtaaaataatctttctttgataaaacatatatgtagagctctagagcaaataatctattgcactgacatcatgaacaagctcgataataaaggccttaaaattaattaatggttataactgaattttgcacaaataaaaaaaataattacctcctcttcttgcttttttattaagaaaatcttttaccacaaagcatgttcatttctcattgtcttcacttcttagctacatatgatatttgatacctcaaacgttagttttgttcattttacattgtcatgcaattatgttggattttctaagactcaattgtcagtttttttttaaaaaaaagatggttatagcgttatttctattcacatatatatttgcaatgatctttctcgtgtgcaagtatgtcaactaataaaa

SEQ ID NO: 21669 - DNA, 451 bp, Oryza sativa
gacccgagatcctctaaggcacctgcagctgcagctatctgatgcatgtttcctgtttttcttgtgagataccaactgagaagactttgattaattgagcagcaggagccaggccttattaagaggtgagtgagtccatgcatgtgacattccaagatctcacgcattaccgggagcgatatataggttaacattcaaaggtgacaatgttcagtcagggtcgtgtcagataaaatcgaccttcaacgcctacccaccaagcaaatatactcccattgcatctgaatcctatgcagcgatgatagttcaccacatatcttggctctatcatgcaaatgctgaacctgttatgcagtaattcgttggaatgagcagaaagctagcacattattatggttcatgatcaggcatacgttgcgatgcaaaatgtcattacagcagcactgcatgc

SEQ ID NO: 21670 - DNA, 283 bp, Oryza sativa
  unsure (1)..(283): unsure at all n locations
tcatctgccaacgacttgcaaataaggcctattggctctgtgcgcgnagaagctcactagttaacacaattaatataaaatacatgcggactcattaaatgataacaacgttgtacccgacagccgagggaatatgcgactaaccttattatggaaagaaaagcacaaactataatacaaagattaacaacaaacatggttgttgcacttgactatatggcttcacaccatgggaacccaaagagaaaagggaactatacggcagaacctgaactcttacaca

SEQ ID NO: 21671 - DNA, 391 bp, Oryza sativa
  unsure (1)..(391): unsure at all n locations
agcttcaaatataatataaccaaattatatatattgcacagttgttcagcgatttattattctagctgggattttcttcaaataaaatataaccaaaaaattgatgccacatcataaatagtgaaccgtggttcggacctatgtataaaacttgagtttctttttgtgagtcgagggacaaatggcatatagttttgtaattggatcactaagtggaccaacatctatagntccttttttgtgtttttacatgtgtttttaggagaggtgccgtgaggacccagctttcataataagccacttctttcttatgtgtttgaattctcttaaaataagattgatagaaccgcaactctggaaggtgagctcctatccgcatcgttcccacctt

SEQ ID NO: 21672 - DNA, 435 bp, Oryza sativa
gtcatcgtcatcattttgtcagattccttatgttccgtacaatacttggctttaattttagcaatcaaagcatttaacaccaatgttgtcttcaactgtgtatgagatttcacaacacacacttccatacatctaagttactaatatatggccacagaatttgtgaattacgggaacttgtcaaatttatttaattttcttatccatctgaggttaaatagaaccaaaaaaacatgaagtttctgactgtcgatgctaatatagtatttatctacctatttatgtcatagttacgacgatgtttacttctattactgaataatgattatcttgattgtcaactgtgatgttgctgatcttcgttgaccgtaggagaaacccagagtatgttaatcagcaatatctatagttactatactaatataagcttataaa

SEQ ID NO: 21673 - DNA, 103 bp, Oryza sativa
  unsure (1)..(103): unsure at all n locations
ctgaccggnacaaaacacgagcgcacngcaaagagagcccttttccacacaagggagcgggaggcgaccgaggaaacccagagggccagaagcccacaaagaa

SEQ ID NO: 21674 - DNA, 383 bp, Oryza sativa
  unsure (1)..(383): unsure at all n locations
acaaaccgagtgcacacttagtgaatgtaagcaagctgccctctctctctctctctctcttcccttgcatacgggacgaaataaggaaatttatcataaacgtggctccaaatcaaacgcgngtatatccttgatcaatttatctaacttaagctatgggaaacctagataaaatgggtctatcaagcaatcaaccctttatagctgttacatataaggagcgatatatgactgccttgtgatgagacaaccacattacaaaatgttcactagggttctctctctagatgaaggaaaaacctgagctttatcttaacaaaagaaaacactcttattactataaagtttggagcaccaacaactacatcccacattcaatgtga

SEQ ID NO: 21675 - DNA, 363 bp, Oryza sativa
aaaaagaaagaaatgtgatcgtgctacaaacataaaataagctaggtagtccgcgtggaaaaaggcggtttgcattggcaaaaccgagcaacaaaagccgggagcgaaacaaaaaagcccctaacggccgcgacagagatccaaaccgattctggcatcgggggaaggcaaaagaacaacaaaaaaaggtgacctgacaagccaaagcactcaacgaagaacgagggagaaaagaaagcagcacaccggcactgaaagacaatcacaagggaaaccactccactataaccaggcaacaagtaaaaaaaaacaatcgcaaggaaagacccgagccagcaaacaaaaactgaagggggaggggag

SEQ ID NO: 21676 - DNA, 393 bp, Oryza sativa
  unsure (1)..(393): unsure at all n locations
gatcttaagtctcctgaagctgcagcttaagaacgcttattttatggttttttcacaccctgcgagcctggacgcattatctggttgaattatactgaacatggactggtgctttcgcctaatatggtacagaagcttacccttttactacagcaaagatcaatgattttaatgaacaggaaaaggcagctatagataataagactattcatagtctgtctggtacacccacccgcgtctactttttcttcatcaagggagacaatggtacagatcgatgacagcgctttattgtcttttaatgatgtacggatccagacattttagctgtgtcttcttgatgatggacccaggtcccatctctacctcgangctagtatgttgactagcttt

SEQ ID NO: 21677 - DNA, 385 bp, Oryza sativa
aaaaatgttttctaggttacacacaacactaaactgatcatctaattaataatgtttcgctaagtaactagtaattcaaagcgtgcatgtcctcccgtatgagcaaggtgaataatatatccaactactaactccaacttatataaagacgatcttatagcacattcatacaataattacataccacactattaatatctgatcccacctgtcatacacacactgaattgtggagaccgagccaaatctgactacatatctatagtccgctgcccttctctctcttgatttatcaccctaaaaaatgctagcgaactggcttataacccgctatagtacctgctctgtaaatactgcagataccgtgcaaatagtaactgcacaa

SEQ ID NO: 21678 - DNA, 395 bp, Oryza sativa
  unsure (1)..(395): unsure at all n locations
aagcttgtaaaagcttttatgttatctaatatctggctagaattatcaagcacagcataaatacaccagtattgtacaagttatgcctccatttgctacatttatgctcagtcagaatcagtcctttcatcatcagagttattactactcggctgaagatcggtgttgcggaattgatctacgacgtcacttgcaatcttgtcagccgcattttgagcattgctgataagatcaagagcagcctctacgcttgtcctgtctgcaaagccatcaatggcgtcaatttcaatcctcgggtacaaggatttggtcatcgccaatgccgtgctagctcccatacttccagctttcttgatattcttgaaatatacatncggagcaactctcagcttgtc

SEQ ID NO: 21679 - DNA, 420 bp, Oryza sativa
taaccaatggtgcaatggtgtgcaagattgtatcatctatcaagtgaaagggttcaaagattctcgtgatgaattatgctaggctgccgcgatgttctgagatcattctttctgcagatttgccatgtcgcagacaatatatcatgctgagattgttaagctgctgatcgaggcaatatgtacgccccttatcatcacttgacaaatcaaactctgattcttcatcctcagacatgttcctgatctgcaccgctcttctcacgtttggcatgggaatgtgcatcatgttcttctgctcccggagcactctgataaccaggaatgtcagtctataacttgtacctgggatccttctacttaatgtaactgatcctcgcagatatattattctgttcacagttaccatgaacaccatttacc

SEQ ID NO: 21680 - DNA, 393 bp, Oryza sativa
atataatactcaagcatactacattcgtgtccacatgtcactgcttatgttatgttttttaacaacccaacaaactcgtgcagtgatccataaaaataagcgacccgcgaaatcgagggaacaagccattgacattaatggcgccgaggataactgcaaaactgtaaattagcatcaagtgaggaagctcaccgaggatcaacccgtcaaatagataaaatagtgtcaagtgaggaaagcgctaggtgatagggcttaccacatttgggcccacattatctctgcatacttcgggaaaagaaaaaacggcccaactatcgaccgaagggagctccaacataacagattgtgccagctcaggcccactgtactgcggaaaaggacaccaaatgg

SEQ ID NO: 21681 - DNA, 418 bp, Oryza sativa
agcttgtcttgcagaatgttactgttgaaattttattgagactccataagccaaacaatgagcttgctgttttgaaggacatggcattcactgtgtacaacaaggctcgccgaattccaaaggccattagcacaagtgacatgtttcagtcacctgcgtacatgggcaggtctcagtccaccatgatgcatgctacatctcctggtcctaccctttggaaagaatgtttagttcctcgaatgtctggatcaactctctctagagaaacagagtttgatgcatccatgaggtcatcagtaacatgggacaactcatggtctggtcgtgctggaggattcatggacccaaataagatcccagatgtatgtgttcaagatgacaggaagtatgcctttgagccacttttcatactagcaga

SEQ ID NO: 21682 - DNA, 399 bp, Oryza sativa
  unsure (1)..(399): unsure at all n locations
agcntgcaagacaagtagaaacaganggatatatgtttacaaatnctgcactgagagaacaacaggtttcaaaaaaaaaaagagagggtcagaagaacaacacgctaaatctatatcatagcagcaagattaaacaaaacaatgctgtagaacgctgtgctgggaaaagggccactagtacaggaatagacggaccggactgataacacaggacaaataaataacatgtaaatgagaacaggtaaaggaattataaactgcgagtgccaataagttggtttaactaaaagacaaagggaggagaacaccgctactactgcaatatctatacagggctcgcaaggagaaccattcggcatagcctacggtcaaagaagctcggataccaactagacacgc

SEQ ID NO: 21683 - DNA, 381 bp, Oryza sativa
  unsure (1)..(381): unsure at all n locations
acccacactgancnttctcaccagaaagatccagagactccatgtcaacagaactaaccttttttgctctcttgcgcttcttccgatgagaagtatggccaactgactgtgtcccctccaagaagctttagctggatttctccaatttacttgtgtcaataccactttcatcatgtcttactttcgaagattctcctgcacaggcaacaacggcagaagaattaaccaaatctcccatggtcggagctttatagaccttatgtacaaggtcatcaacccctttatcagcaactgaattagtagttgcctgcgcatcactcacaaactgaacatgtgtaataccacactgatctctttctccagcaatatccagagacgcca

SEQ ID NO: 21684 - DNA, 404 bp, Oryza sativa
agcttatgggactccttacaatggtctttttatgatgtatatgggtagtcagaccctaaaggagtacctaggctatcaaagggacaacttcaaccatgagggtcttacgtatgttcctccaccaaaaggaaaggtggacaatagtgtgatgatcaataggccccaaggtcttagcaattttgttaaggccaaaagtatccttcctaatgattatgcttcacattgttcttttgatgcatcttatgttcttacgaagaatgctagtggtcgcgttgttgctaagtatgttagtctaaggggcaagaatatttctatcaagagagtactttgggtgcctaaggcacttgttactaacatgagaggactcaagcaagtatgggtacctaaaactagaaattgatctc

SEQ ID NO: 21685 - DNA, 383 bp, Oryza sativa
agcttgcaaccatagttgccaagatatcatatttgtaaattctaactgagagacgtgacatctattatctaagaatgtcacttcggctggaacatcacagttaatcctatattcaagtcaatagttgctatgtgcttttcttatgtagcagggttttgaatatgggtaacaattgatgcggcaaactgactaatagcattggtttcccaggttgcgttcttgtcaaccattgttggttcagatgttgctgtagctgcagggcaagcagctatttctgcacagtcccaggttgatataagtgccagcgagactgattcttctatcaacatcagcaaggaagaaagtaccacctctgctctctaatacatgtgcttggcacttac

SEQ ID NO: 21686 - DNA, 356 bp, Oryza sativa
  unsure (1)..(356): unsure at all n locations
agcgnagcataaggggcgagccatattattataagaccgccccgccgacataaggggtctgggagaagtaccacacactacacccattgagaaaagcacgccatccaggtctaagatctatataaaggcagagccacaaaagtagtcacaagaacgaaatcattcatcattcattcatggcataagacagcaatgttcaaaacatgcctcgagcgcgcaagcctattctgagaagaagagctcggcatatctaaactatataaagcaacaccctaaatagtggcgctaaataaacccttagagaacattacactaaatgtgaaaccacagtcaaagggagctgcggaatgtaacaa

SEQ ID NO: 21687 - DNA, 411 bp, Oryza sativa
  unsure (1)..(411): unsure at all n locations
agcttgcagctcagntattttttttttatgtgtcacaaaaagncacacatgattcatataaactggtgcaatattcataccgggaaaagaagttccatagtccatacataaggaagttgccctattaatgaggatatatcaattggcctcattggtcgagctgctctgggcatgtctttgacaaaatcaaatgagatcttgaggccactggcccttaggtgaaggtatgcatttgaagcctgcaatgtttaaactatatgaaatgcagagcagtgatgaagcataagaaatcatcaaatagctagtaaacagaatagtacacaaatgagtggtaaaatacagatttgagaatggtatgcgtgcaacactgataaggttatatatgcgatgatatatggacacatattcatg

SEQ ID NO: 21688 - DNA, 401 bp, Oryza sativa
agcttgtcctgaacaggatctttataaacttgtggtggatcaggacataccagtctgttgtggcaaatttaaaaatcggacctggaaagcccaatatgagacaactgatactttctctcatttagtgcacacgggacagagggactcaacatggcagattgacattcttccacaagtaggcgaaatttggtgtatctacatgaactggacatctgactggactccttccagcatagatatgtgcgagttcgccatcggcgagatcattgagtgcacggaagcacttataaaagtttctctgctgacccaagttaatggctacagagcggtgtttaagcctgacaagcaaagtggagttctggagatacctaaaagagatcgtttgaagtttctcatcaaat

SEQ ID NO: 21689 - DNA, 255 bp, Oryza sativa
aaccacacagacccaaagacgatccaacccggaccaagaaaagcgccaacagacataccccaacctcaccgaaacaccggaagctgacggagccagcggaggacggacgagagaaagaaccccagaagggcaaacggaagtcctggacaaggaaaggaaccaacggaagccgctggaacacgacaaaagggcgaaggaaccgagagaacaaagcaccacgagaagaagaatgacagtcactgacgagcggggcca

SEQ ID NO: 21690 - DNA, 244 bp, Oryza sativa
ccccacgcaaggagacacacccgcgcacccggtacgaagagaacacgagccagcggccagagaaaccaacccgcagcgaagacgcacacacgcgaacacaaacacaccagccggcgaccgaagacgacgaagcccatcaagagtgagagctgtataaaccacaccgcgaggcgagggcactacgcagcagcgcacgagacgaccggcgatgaagacgacaaggccaaccaccactagccgaacc

SEQ ID NO: 21691 - DNA, 410 bp, Oryza sativa
agcttacacaggtccttgtcattggtttttcatcttttcttcggatcatagttgtaagggggccctccatgtccacaacatgtcatcaatggcttctcaatccctgtacaagaattatattagatgcacaaatctacatatatttttaaggggttacagctgattataagccataaaggtttattagccatccaaaaataatttatgagtaaaacttttgtataaatgcccttagcgacttaaaagcagatgctgaaaaagaaactatgttgagaaaacatcaaattaacttcaaaactaaatttttaaatttaaattttggcagcaacttataagccatagggcaaacatgaggccccttgcttgaactgacaaataatattagttatagaccactcattggtttgaaa

SEQ ID NO: 21692 - DNA, 406 bp, Oryza sativa
agcttgtcgtaccttacctttatgtatgtttgcatgaacaaaggttcgcggaagctatgaagaactctatgaagattaatcatgtttatccttatatgtatggatcggatggtgaggatgatgattctgaaatagctgcagctgagtgggttaggagcaaaaaggttataccttaccaatgggtgaaaaactcacgaaaagaggagaggtatgactttgacataactaaggctgataagatatttgatttgctagttcgagaaaaacagattcaacttcctgctggacatacaattccatcggctgaagagttgggcaaaaagaggtattgtaagtggcataattctgggtctcatacgactaatgactgcaaggtcttcaggcagcagatccaaacggatattga

SEQ ID NO: 21693 - DNA, 288 bp, Oryza sativa
  unsure (1)..(288): unsure at all n locations
agcttcggcccgtctggaatttatacctatgaaaatcacgattttcgcgtgcagtggcacccgcacacgaaaatcagattttcacgtgcggtcgcttatgccgcccgcacggaaaaacaaaacaccgaaaaataaaataaaatttcaaaaaaaaaaaccctaaatcaggtcggcggtggtggcncttctccccttatactttattcctcattcattatattcttctaattccaacactttatatcattatcactctcttcgcttactcttatttatgtccataagccg

SEQ ID NO: 21694 - DNA, 408 bp, Oryza sativa
agcttcagggcaagtcttcttggatgttttctaaatccacttctaacaagaaatgtaccaacatcattatcaacggtccataagctaaaactttcagatgttctagcaccagatgagtcccacacgctttcctccgaaaattggcctcccttcaccatgtcacttctaatacatcttaagaaatgcaagtcctctttcgctggtgaacttttagatgcaacacatcctaaagcaacaaaacctggtggagcttgaggaaaccaaaacgatacaccctcagtacccctgtgcttcttaattctaccaacaagctgataaccttcaggagctctgagaaaggtatcatcgccagaatttcgaagtacaacagctgaatttggtggctcatacctacaaccaaaaagtatt

SEQ ID NO: 21695 - DNA, 383 bp, Oryza sativa
  unsure (1)..(383): unsure at all n locations
agctntctatgagtctatctctctcttcctttttctacggaccacataaacggccattcctgtatatctttttctatatggctcactattctctatcctatacttcaacttctatgcaaaactttatgcctctattttttcaatcctacggctcagagaaaacccaaaccacacatggatggacggaatattggttacgtgggtctgatacaaatctctcaccccgggtggggagccaaaacaagcacaaaaccgtactaccaccccaagcagcaacaaacaaagtgtgatgcgcgtgagcgagcacgttcgtgcgtccatctatcaatccatgcctgcactttgcatcggattctcttctatgcggtcttgtcacacggcat

SEQ ID NO: 21696 - DNA, 127 bp, Oryza sativa
  unsure (1)..(127): unsure at all n locations
gacccagacgccgaggcagagccggaggccaaagaggactattacattaangcgggcgcgcaagcgcggcgccaggcgggaaacccgccccgccacccgcatcaaagagaacggccaacgcgaaccc

SEQ ID NO: 21697 - DNA, 408 bp, Oryza sativa
agcttgataatactcctctacagtatttgtttccctgtctaagttgttgcaatttgtgcagcaaatcacgtgcatgatatgaaggaacaaatctagctcgcatgactcttttcattgcatcccaggtttggggagtgttatttggattggaacgaacaaattcactccaccaaatggatgcaaaatcagtgaactcactagtagcagccctaacacgtttattctcaggaaaatcatggcaagcaaatttctgatcaatggctaactcccaagtaagatatgcatcagggtcatattttccatcaaagcaaggaatggtaaacttgatcttgcctaaagaatcatcattatcacgtacctcccgccgtggtggagcgcccatgccatggcgctgccggcgctgttgtc

SEQ ID NO: 21698 - DNA, 400 bp, Oryza sativa
agcttcaactcttgatttggaaagcttgtgtgccagggaaatgcaaattccatgctgggcttatcattcagaacagggtctggacatctaaccggctcgcgatcaggggttggaaaacaacggccaatgccccctctaccggtgcgaagctgagatagccttgcatcttgtcgccacgtgtagatacaccagcaggatctggcatcttgtagctagatgggtgggctaccagcaaatgcaaccgggtcaatgggaggaggcccagtcagtcgaacagtggtgagagaacctagcaaatacgtacagtatcccaaaaaaaaggacttcgatccctgattctgctagttgtatgggagatctaaaaggagaggaatccgcggattttcaaccacaaacagat

SEQ ID NO: 21699 - DNA, 408 bp, Oryza sativa
agcttgctgatctcgttggagtcacccttttccaattgacggaatgttgtccttgagagcaagtatggatcacctaaaattgtcaatgatggtgttaccgttgcaaaggaggtatgccacgtatagtaaactgttcgtgttcttatgatgcaatcctatcattgcttaaattcagagttttctgaaaaatgactgaacatttggcataaactgtttgttttcttatgatgcaatcctatcatagcttaaattcagagttttctgaaaaatgagtgaacatttggcatgcaccaggttgagctggaggaccctgttgaaaatattggagccaaattagtccggcaagctgcagccaagacaaatgatttggctggtgatgggacaacgacttctgttgtccttgctcaa

SEQ ID NO: 21700 - DNA, 413 bp, Oryza sativa
  unsure (1)..(413): unsure at all n locations
agcttaatagattcgtcttgcattttactatgtttaatttataactcatttcattattagtctacgtttaatacttcaaatatgtgtatacgtcttttggccaaacaactaaacacggccaatgcctcaatataggctcaaactctagatagactgttatcggacaccattattattatatcgttcatgttccaccattactattatattgctcatgttctgttgcagccatcgtaaagtagtgtcataaagtagtgtaattcgaacggtataatagtcatgatgtccgacagtaacaacatgattcttatttttgtgtgatgtcgttaactttgaacatacatctgactatntgtcgtattacaaaatgtataatatatatatataagtcatgtttaaaatagctttaatat

SEQ ID NO: 21701 - DNA, 406 bp, Oryza sativa
agcttgacattacagaccactgggctagtttctggggtaccgccccgggaggaccactcgggcaggatgatccgagcggtcaaacctgattgcaatctctgaccatcgaagatactggggtgtgtcgggctgaacagcattgatcccccgttcggtcagcttttgcttccttgtaaactcataagccatggggccgccgaaaatatgattgagctccttacggtggtcttgaaatccaaccagagtgtcgccgtcgaccttcttccttgacgagctttgttcctcgtcagagttcttccgagtagactcggtgtactgctccgcgaactgcttgtatatgaagcattctttggccacgtggttggagcttggatgatgcgggcattgagagtccatgatcttgtcg

SEQ ID NO: 21702 - DNA, 344 bp, Oryza sativa
atatcttacaatcctgttcaaggccactaagtgacactccttaggagcggcttgaaatcgtgcacacatgcaaacactaaacatgatatccggcctagatgcggtaaggtaaagcaagctaccaatcatagaacgataaagctctaaatctaccggtttacctccctcatcaaggtcaagatacccgttggttgccataggtgtctagatgggcttcgcatcctccaagccaaacctcttgagtagatccttgatgtacttggttctgctcacgaacgtcccatccttgagttgcttaatttgaagtccaaggaagaagctcaactctccaatcatggacatct

SEQ ID NO: 21703 - DNA, 418 bp, Oryza sativa
  unsure (1)..(418): unsure at all n locations
agcttcactgacatcctcctcagagacatgtttatgtgtatgtttagctcgctctggaggtgtgattaaactgggaattatttcaaagggttggctcgaaccactatgtgtntccttcattgggaaaaagctctcaaagaaggtagcatcatgagactccataattgtaccaacatgcatgtcaggtacctcggatttaactattaaaaatctataggccatgctgtgattagcactatttnnttttacacagtccacagtcttaaggccaagttcgcgcctcttcggtattggtacattgactttccccaagcacccccatgtgcgcaaataagaaagtaatgggtttctcccaatccatatcnnnnnnggtggtttggccttaattctggtaggaactctgttaacacatgattcc

SEQ ID NO: 21704 - DNA, 366 bp, Oryza sativa
  unsure (1)..(366): unsure at all n locations
naagctatcaagactacgttcacaagttattagtcacatgtccatatctattctggagcggccgcagtagtcatcatactcccaactattgtgtggccatggtgctgcgtcacctcttttggcccaaagggctgtgtatacatgttgggcccattaggggcgcgtcctagggttagagcacgaccctatgggcgctcttcccctctttttatacctctagtcgccgccaagaacaggcgggtctcgatgatagagatagctccttgctaccgagccgcagcgcgcgtggcgggctaaatcgcccgactgcctagaatcggaaccccaccataccgcgctggacagagaaacctacatactcatcaa

SEQ ID NO: 21705 - DNA, 312 bp, Oryza sativa
agctaattgcatgctcatgactctttattatatgtgttgaatatatttgccagattgatgattatcagcacctgctcgcccaacatcaacagaactaaaaagaccaggcaaatctaagtcgaatttcaagtttaaaccacagagcatctgccaggtttggccactgacaggtgattgaaagcaccaccagtttcccaaatcacaatcaccaaacttgccgttatctatatcttcagtttactatttacaatacaggaattaagcattggtcactttactacttactacttcctccgtcccataatataaggg

SEQ ID NO: 21706 - DNA, 406 bp, Oryza sativa
agcttagaagagaagaccctgccaagttttgtgaactttatccatgttacggtggtagcaaatgccatgacacagagggtgattacaggtgcaaatgccgtttgggacgtaaaggggacggcaaaatcgataatggatgtcaacccataattcccccacctgtaattgggattcttggtgagccatgaccattgttcatacttatagcgttttttaatagaaattagagtaaattttagaaaacctcacgcttttatgatcaaggttaaataaagccacatatattatgatgcgtgtcacataatctcacaggtttaatgtatgatctttgtgttttataataagacttcacctttattaaaatcttgattaattacagtatatatatttgaaacaattctttcac

SEQ ID NO: 21707 - DNA, 409 bp, Oryza sativa
agcttcaatttgaaaaaacaaaggctttattactaaccctaaaaagaagaggtaaaatcacaattgaatcagaaagcaagggcaggaacacaattgccccaatcttaacacaattgaatcaggaatgggcaacgctaatgggtgggtgatcaccccccctccatcccccttctcatcccctcttctcttcctactacaccataaatttgaaaaaaaaataagaaaacaaagttagaaaaatttatgtacggaaatactatatatatataaatatttgaattcaaattcaaatttgaatatggtatataaacttttgacttataaactttgtgtctataaactatatgtgtataaactttagatgattagaaatactatatataaaaaatagttaaattccaaattaaat

SEQ ID NO: 21708 - DNA, 384 bp, Oryza sativa
agcttagcttgagcaagaagattggtgattatttgttcgtgtcgagaggtcatttgtttacggcagtaatcacaatgtgtcttaatcttgccggccgctattgactgcttatgtgtgggatccataaccgaggctatagctatcaatataatgtaatttactactagtagtaacttaaaaaacaatatgaattatttagtgtttagtggatacacacagaaaagcttgccacctttgagtatgtctttcttgtttatccctacattctttgattatgacattagactatttgacatttatgcttctagcattcaaataacagtaaataataataaagcctatgcaaaatctgcacaataatataacccaaacgagtagtctgat

SEQ ID NO: 21709 - DNA, 411 bp, Oryza sativa
agcttcctgaatatgggaaacacgcaagctttccccttcttttctatctatccacctcactgaatttggattgttctttatcagttaataaagatggcacgaaaagttgcagtttaagctggtttttgtcttctttttattcttttttcaaaaatattgcttctttttctgtgagggcaatttagtccccaagctacatacctatctgcagaagtttagtcatatttttttttatcccgaataatttcaaccacagctatttattgttcaaccctactaataatacttgccccaaatgatccggcaatgcagctggatgaacacaagcgtcgatgataaatatggttcatatggatttagccgtccttcagttaaacctgatgttgagggttttaaagaagccactgagca

SEQ ID NO: 21710 - DNA, 414 bp, Oryza sativa
agcaagcttgaagttgccacctccttactttctattttaataaagtgttcagattctttaactctcgtgtagctccatccactttggattttgcacttggcaatttagattctgaaaaaaactatacatatagagcattctaaggtacgtttacatgcagatatgatcaatttgtgctatacgagaaagaaaactaaatcgtcttatctttcatcaaagaaagaaagctgatctatctttacataatttttgttgcacacctatacatgattatatctttacataattttgtgtgtgaatataggtcaacatgctataaatgtttttattttcagaatttcctaaagtcacaatgtgcaagaattgaaaaatggctgtagctacacatgggtatagcaggatctttatctttaa

SEQ ID NO: 21711 - DNA, 407 bp, Oryza sativa
  unsure (1)..(407): unsure at all n locations
agcttctccacttcatcaaaatcctcaattgtttctccaatatcgaccttngtaaaccgatattcttgcaccctcttttgtaaccactctaaactagcctctttactcattatacaaatttatatggcttagccgtgctacactagccggctttacagagataggtacaaatttgccatcggagatactaataaaatcataactagaaaaatccctccccggtaagcattggatattcccatgacgccactcaaaaatagcatcggccattgcaacctcggccgatgtatccgcttgaacaatttcaacatcatcgccgtcccattgtattaaacattgatgcaaggaagaagccacacaacaataggcatatatccaacaacgacccataataacattgtagttac

SEQ ID NO: 21712 - DNA, 249 bp, Oryza sativa
ccacacacgccatcgacaacaactcgcgcacacctacgaaaccccccggcgtcatagagcagataaagagctccccctctgactcacacacacaacaccgagaagcacagcaagtgcaaccccctctcccaccaaatgattcgaaatccctaaacccccaagacgtagacgccacaaaccccggcgaccaccaagggctgctccctcctatcctccacaaaacgctccagcgacaccaacgcaaacccc

SEQ ID NO: 21713 - DNA, 409 bp, Oryza sativa
agctttcctacctggttaaagggcattgttttctgtctccctaatcttgtcaaaattaagatagtggatttgtcgaaatgcagcatactaccacttggtcagttaccaaaccttaaacaactggttctcggtagaatgaagagcataacaaagatcgatgcggacttctgtggtggtgcgagagcatttcctcagctgaagacatttgacatatacagcatggaaaggttgcaagagtggaatacaacatactcttgtggtgaggatggtgtgactgagttcatgttccccaaccttcagtggttaagcataagtgactgccccaatttggttgtgaaaccactcccgcctagagttacgtggtggaaaatagagggcggtgaaagtgtcatatcatcatggggaggga

SEQ ID NO: 21714 - DNA, 350 bp, Oryza sativa
aaacataaacacggaatccaaagccacatgtaacaaccaaaatatcccagggagagaaagcgtataccaacctctgctgaaatctagccgtagtagagcacaagccgtagcatgaagcccctaaatcgatgagtgcggccagcaattaccatcttcatgacaacctgtgcgcaccatgtgaactgagaactcaacacgatccacgggtagccagagcatggcaattcccatggaactcagaagggaaactaattgagacgtggtgagcgggcctatccctactacccatataattgggacccaccacaagccaatgattgttataaaacaagcaccacatgaagccacgc

SEQ ID NO: 21715 - DNA, 399 bp, Oryza sativa
atctttgatggaaaagaataatatattttctagcgaagcgggtttgtaggtcttgaggcccactaagccgtaattgtcattatctttttatctggtatatactagtgggtgaaaaataaactgatgtgtatgtcttacccatgataacatgctgcccgcttgcattcctaaaaaatacttcctccggttctccgtttcttaatgtaagtcattctagcattctcatattcatattgatgttaatgaatctagacatatatatttatttagattcattaacattaatatgaatgtggaaacatgtagaatgacttatattgtgaaacggatgaagtacttttgaagagataatatatattattgggacaatcgactcttggaaagaaaaattcaccaagt

SEQ ID NO: 21716 - DNA, 149 bp, Oryza sativa
accaacacgagagcacaacgagcaatttttactgaccgtgggaaggggcccccggcaaccccacaccaccgacgacccttcagcgaggcggcggaggaaaaaaaaaacgacgaccacccaaatggaggaaaaaaggaaacgaaatgaag

SEQ ID NO: 21717 - DNA, 417 bp, Oryza sativa
agcttgacgacgtcgcgaccgctactcctctttttttattgacaacaccgccggggagcacgtcgtccagccgacagagccgcgggcgcgggccttctcctgtggcttccggcgttcgtcgaccggaactccacggcttccaccctccgaggcaacgtcaggtggctcagagatgtcaccgtcggcgccatacaagcagcggtggaggcctcctcctcctccaagccggagcccgccaccttagttcatccacatccgcggacccagaaccgaacgcaggttggggttcttgatttttttttcttttctagataatgaagttggcgttcttgatttgctacgccatgcttgtgattcaatcttgtttctgtagcttacccaatataaaggaccttgatcttgtgcaatggtgcaatc

SEQ ID NO: 21718 - DNA, 375 bp, Oryza sativa
  unsure (1)..(375): unsure at all n locations
cccccccccagccccccgcccctgagccgtgcacgcgggaccccaagcgacgcagcagcaagcngccaccnaaaacggcacactatttactacatacgagacacggcggtcagggagcaccggaagaacaaaggcgagaaaaggacgtgctttacgcagaacattcacatgtcgacttacttcatcacggctcgccagcctcagacataccagaaaaaccgccacgggggaaaggcaaacagacattccagcggtccgcaaggacacaaagaagtacaagcaacaagagagccctccaactaaggaaacccgaaagaacggcactccaatggcaattaccaaaacaataagctatccacttgccatcactatcac

SEQ ID NO: 21719 - DNA, 407 bp, Oryza sativa
  unsure (1)..(407): unsure at all n locations
agcttgtaaaatttatgatccattnnatcgtttacatgctcttcaattccaatttataaaatcaaggtgcaagactgcaaattcattttgtctacaaaaatgtcatgtgttttgtaaaaagcgtacgatccatttcatacaagattctttcaggaggcaatcatgcctttggaggaaaactgcaaggaaggaatcatacaagaaaactatcaacatgaacaaccggcacaaagatcaatgaagatgacaaaagatgcacctttttgcagttccataaaatcaaataaccttgcaaccagaccagataaagaatctattctgatttgattgcacaaaaaggaataatcaagctggaattgtgacgcttatggtagctctctgtatattgcctaccttccaagataccc

SEQ ID NO: 21720 - DNA, 203 bp, Oryza sativa
  unsure (1)..(203): unsure at all n locations
agcncgngagaggcaaaacagaagacttttatggtgagaagaccagcaacaacgagccgaacgacaacaagtcgaagagcccgaaccaagggaggaacacggagcaacctaagaaggcgtcgaacaagtaagcgccgccatcgggccaccaagagaggcagaaggggaaagcggagatgatgacaagggaaagaacgccgccg

SEQ ID NO: 21721 - DNA, 381 bp, Oryza sativa
agcctgggagaggcaaaagattatacatatatggtgagaagaccaacaataacaagcccaacaacaacaagccaaaggggtcttaccaagggaggaagaaggagaatcttaggaaggcttttcaacaagtttgcgccgccttcgagccactaattgatgtagacggtgaaagtggagatgatgaccaaagaaagaacatctccgatttttgcttcatggcgcgtggtgaatctgacacagagtatgaagataatgaggcgagtgatcctgacgaagctattaatattttgagtgcaaaaaataagaagtgtgagaagatatatagaaaacaggaatttatcattgaatctcttaaatctgaaatcgaaaattaaaacctct

SEQ ID NO: 21722 - DNA, 406 bp, Oryza sativa
  unsure (1)..(406): unsure at all n locations
agccncgnctcaacggggggagaatgttttgttattgtcaccgccannccccgcgggcgaggagacaagcgacgcacctcctccgccggaccaagatgggcccagaaagtcgcactgtgaacgacggcccaacgcggccgataacaggagcgaggggacccagcagagacgggctgggccacacggaagggagagagatccacgggctcatcgcatacaaagaccggcagagaagagatgtgacttgaacaatgcacaaacagaatcccccatcaaaagcaagcctcggcggctccatgccaagcgccctgagcgctaccggcgcccgtccaaacgcccccaaaaggcgcacgacggccgcagcggggcggccccaacgcggcggagccgggacacacgcgagcac

SEQ ID NO: 21723 - DNA, 284 bp, Oryza sativa
gcgcccataaaggcacctaacgtaacattcaacaaacctcgctctcaaagaaagaaaagagatgcaaaatcatgcagctgcggcgccataagcacgaacgtctgcagccacccaaaagttagaaacaaacctcaaactttcttcatcacattaacccattatacacacataacttttcagccacatcatccataattgtaaccaaaaaccaaacttttgtactgaactaaacacagccaaaaagaagaagacagcggtcgtccctccacgcaagcaagcaaaaa

SEQ ID NO: 21724 - DNA, 408 bp, Oryza sativa
  unsure (1)..(408): unsure at all n locations
agcttggaaaagcggcatatagctgttantatgcttgaatatccactttctatggttgatcatgtgtatttcaatgagttcatccactctcttcggcctagttttgaattcaagcgtcgcattaccactagtaaagctatattagagatatttgaagttagaaagagaattttgtatgatgagctgaaatctggttctagtcgaatttctacaaccatggatatgtggacatcaaatcagaacaaagcttatatgtgcatcactgctcattggattgatgaaaattggctgatgcaaaagagaattcttaagttcattcatatagatgggaaacatacaggaaccaggctagcaaatgcatttgtcaagggagtaatgtctatgaatatcgagaaaaaattatttgct

SEQ ID NO: 21725 - DNA, 403 bp, Oryza sativa
  unsure (1)..(403): unsure at all n locations
agctagaaaacataagaaattatattatttaattttgtaaagncacaaataacttttattcgttataatataattattcacaaataatttgtgatcgaagtaagatgagtagatgatgataataattaacagtcaggttattcgagaatggaagaaatactctttcctcgactcatccgcttttgtacgtgtatatcaataaatatactttctctgttttacaatgtaaaatgtaagtcattctagcatttcacatatttaattcattaacattaatatatgtctagattcattaacatcaataaaaatgtagaaaatgctaaaatgacttatattatgaaacgcaggggtagtatataagtgctaacacgattattatgaatggtcttctcgctttcaaaat

SEQ ID NO: 21726 - DNA, 330 bp, Oryza sativa
agcttctcaggccagagcacgttatgatctgctcccatcgcccaccgcgaggagagggtgcaacaagagcaccaagctcggtcagggcgacactagaaccggaggtcactgccgacggggaccacgcacgaaggctcggccaaagcggagctcggcggcggcgcaatgagaaagagatgaaccgaccaagaaaggaagaagaaccagataagagagattgacaagggggcccatggcaaacttgtctttaaccacaagttctctctccattttgaccggaaataataaaacaatgggaggagcgtccagcagctaattaccactcttttc

SEQ ID NO: 21727 - DNA, 389 bp, Oryza sativa
  unsure (1)..(389): unsure at all n locations
ctctaagcgacctgctgcatgaagcctacactgggctcttgaccgctgtttatgcncgacccaacggcgctccatgggaagccacttgagcaccctcccgtccgacacgcccgcgtacgggccctcgccgtctccgtcgaacgccacgctctcctggccgaccgcgccgtcggcgttcacggtgatcagctcgacgtcgcgctcccgtatcttcagcactggcacgtcgtccctccgggggtccagggacaccaacaacgccgccgccgccgccacggtggccgcgagcaccacaaaactggctttcatcggaaccagaagtccagaacctatgtgaataactgcgattaatgaaattgccacgcgtgaacagcttccgatttgtttat

SEQ ID NO: 21728 - DNA, 408 bp, Oryza sativa
agcttgccgttttacttgatgaccgggactttgtcttatacccactcagcatatcggcacggcctaataaaaccagcataatataaatgagtaatttcagccttgatagcatcatacatatcggctttacatctccttgggggttgctgatatggtttgtatcctggtttaataggaagccaatgttcaacaatcgatcaggtgagtcctggcatctcataatactcccaagcaaagcaatctctatattctttcaaattctctatcaacttggttctgaattctgcagataaattcttaccgataaatgtcggccttggcctatcgcccctggacctatatcaacttcttccagattgtcagccaacatgaaaccctgtcctagcttgccatcgagatcatccaccg

SEQ ID NO: 21729 - DNA, 409 bp, Oryza sativa
  unsure (1)..(409): unsure at all n locations
caggcaagcaagccccanacctcgtcgagaagacgacgtgttttttttcataaactcgagaggagttcctggctaaataagcaatagcttgaccaaagcgcctataactaaatataaaccaaaacacttaattagcagcggagaaaatagaacccacaacaaacaaggcacacatcccctgaatgactcaaaagaaaagcctagaaaaattaactctaaacccaagtcgtaaaagacaaactctgacatcagcttataagcggaaaaacaaagaacggtcgccacatccgtccgacccacagaaacggcagaaggcccttgtacaatccgtaccggcggatcatcgcgtgatcggcactctgctgacgaaatctccgcatagaaacggataacacaccgatgatccata

SEQ ID NO: 21730 - DNA, 381 bp, Oryza sativa
  unsure (1)..(381): unsure at all n locations
cgacccaancaccgagctgcaccgggagcgcggagcaaatctttctgtttatggcgcaggcacagacgaacaacggacaagagtcaaaggctgaccgcgcactccacaaagggctgcacacccggggacaacatgaccagcaggtctagatctgggccagcgaggcgagagaactaccctacgacctcgaggaagccaccgacaccttcacgtcaaagtgcaacgagcatgaacctgccacgagccccaagaacgccaccaattcgttcaacaagaccacaaccaaccatcagattcaccgggccaccaaagacaccatggaccagctcaagatagntaccggagcgccagacaggagccgacgcgacgacatcgctgcca

SEQ ID NO: 21731 - DNA, 406 bp, Oryza sativa
  unsure (1)..(406): unsure at all n locations
agctntttgacaagcactcgctgttattgtgtcgtgtaaccaaaagcctatcaataaataggaacacattcccacaagctcccaaaaaaaataaatttgtatcaaattggaactagtaaccaatcccaacatggaagtattgaaaaaacttatataaacaaaaaatctcaaatatccctcatcgtgagacatataatcatcactataaataagaaccaggattcctacagtagtaattagtattaacataatagaagtaagcgggtcgattaagtatccaaattctaaggaaaaatcattattgacggtccaagaccatagatattgatagatagaacttccatttatttgctgaatagacaggtgaactgagaataccatagctatacttaaaagtaaaacacta

SEQ ID NO: 21732 - DNA, 404 bp, Oryza sativa
  unsure (1)..(404): unsure at all n locations
agcttcctgtgcatggagggcatgtttggtggtatcaattngatgttgccccaaaacctttggaaggtatgtagactactaagctgaaacataatagtaccttgtgtattcttggtatttacagtaagagactaagagttacactgctatagctgtccttcagcaaatgagggagatggttcacatgaaagcaaagctgtttgctcatcccagtccggctaagcaaaaggaagttctttttgaaggaatgctgctcatatcaaatagcccagattctgtgttgactcaatctagcttgtcagtaagcagctcgagtcctgaaattggagaccccaatgaccacctgcaggtggattcaagtcaagacatagtgcatattgaggatcgtagcaagtcatattctg

SEQ ID NO: 21733 - DNA, 396 bp, Oryza sativa
  unsure (1)..(396): unsure at all n locations
caagcaggcaagcnnccacaaacagagccaagcccttttcgtttccacccccaacaggaaactagagcgaaggacaggggaaaaaaaataaaagcgcggaaccacccagggttccatcaacagccgaaagaacatatgcgagaaaacaagagaacagctagaaccgctaatacataccatacgaacaacgccaagcgaaaaaacgccgaagatatctacccacaaacatgggaaaaaaacgggccctaatctcaacacacccgcgcaagggaaggtggccacgcgaccggaaccacgccggggaagcccaccgacatcggaccgagagggggcgcgaccactgcagaagcccaaagctgatcccagaaacagagcccgccagcgcgcacccgacga

SEQ ID NO: 21734 - DNA, 406 bp, Oryza sativa
agctcggctttctcttcatgaacattctgtcgataggttcggatagtggcctcgatgtccctgcgctcccagagatcggctaacctcagtctggctttctctaaattgaacggatgctgctcaaagtacacagctggagtaagagcatcaactaactcgtctgaaagagaggctcggatatctgcaaatcttgcccggatcgaaccacagttggtcaccgggttatctagcgatgctcctaaccgaagggagaagtctttgagtgttttcttcacatcatcgagcaggagagctatcgctctacttgcggcgtcttcttctgtttcatcgaagtaatctttgatgtcaaaggagaacagatccgctaagacctgcacgaaacaatatcatggatgacaaaggatca

SEQ ID NO: 21735 - DNA, 400 bp, Oryza sativa
gcaagtcttcaactcctccagcatttattattcttttctatccatggaaggctgacattttaaaaggatctgcgtcctcaagattagcaggaaaccgtcctagaagaactcgtactcctaccgcagatgctttgctcgagaagatctcgaagctagatctcttggctgaaatcagtgcaatcagaagcaggtctgactcgaacttcagaggaaatgtgagagatgttgtttcattgtcaaggagtgcacctcctgtaccaccgcctctgtgttcaatttgtcagcataaaacacctgtatttgggaaacctccacggtggttcagctacgcggaactggaacttgcaactggtggcttctcccaagcaaatttctcggctgagggtggagttgggtctgt

SEQ ID NO: 21736 - DNA, 62 bp, Oryza sativa
gacctccaagccaccgcagcagcaactcggagagcaggccattgtttttttagagtcgacaa

SEQ ID NO: 21737 - DNA, 382 bp, Oryza sativa
caagcaagccatcaatgccaaatttttctgtagacagcacgacggggggcggagcactcaccttcagcgtcgcgcggcgccaactccacgtcacaaaaaatcccccaccccacggcgcggcgcatccggagaacacggagttcgccggcgcaatcgacagccgcggcggcggcgggacgtctcgactccaccgaccacgcggcccattttatcggcccaattatccacgaagaccatgatgtaataggcccactcactcgtaataggccgtcctatccggcccaagacccaacgtggcccaatcaatgtagcggggcccatcagagatgggccatatggggcccaatcttccggacccacccgcgccggccctaataaaaaa

SEQ ID NO: 21738 - DNA, 325 bp, Oryza sativa
  unsure (1)..(325): unsure at all n locations
cactgtatcttggtcaaccctgaaaaccatgggctggttggcacacangatgaagtgatgatttgtcattctcatgtttgttgaaatcttgcatccaagtttcacatttaagggaacttgttgcatcatggatgactatgatatcagaagagtgcaaattgtggactgcttctgctctatccaaacaaagggaagactttcagatatcctaatatgcatatatggtcactaattgaatttttagaaataaaattttcagctcctttaactttctgcttcagaaatgcacgattcccattccgatgctcctaatnggatatatttt

SEQ ID NO: 21739 - DNA, 447 bp, Oryza sativa
  unsure (1)..(447): unsure at all n locations
tattngatatctagtactctgtccacatcgaacaaactgtctatatatacacaacactaccgaattttctacaagtaggtggagaatcactttgtgacacctagccagctgatcagatcagccaaaatatctacatcatgcattttgagcatgacatgttacgatgattgggaagggatctctattctccgtcgattcggcgatcgacggctgcggctgcttctctagaaggaagatgagctcaaacctttcccccctcttttatattcctcagctgtttggtgaccaagtttagagcttgctagcatcacccgccactactagaggagggtcaccaacaccctgttctaagtgcacataattatgccgtagcggctatcagtcggtgctatgcgtacgtaagaacaaatcttcgtcagagaattaatttctgttctagcatatgta

SEQ ID NO: 21740 - DNA, 354 bp, Oryza sativa
  unsure (1)..(354): unsure at all n locations
aaatggtcttcccaagctcgaccttcttaaccagccgcaaggtgttgtggaagatggaatccagtattccagcaacctagaattcgcatgtcatttcattagccatgtacacttgatggattcagagaaaaggaaaagattaaaaaagggtgtgtgctctcaccgtgaaaactcctccaatgatagcacaaacatttgtgatgaaatgggagaaggattttggaagttcagttaccaagaccttggaagtgatgataaaataagaattagttnttctttcagttatgaaccaaacgaagaaaaggtgagatgccaacctgcatgggagaaggttcaaaatggaatttcacaaca

SEQ ID NO: 21741 - DNA, 189 bp, Oryza sativa
tgaccatcaaactaagctgacatacttcttacagtcagaactactacggtattctgggctcatagctcgatatcgaatccaagttcaactggggatcaagttggatcttttgggaaaaacttccttgttcaagaactcaatattggcgagaacccattggggccacttatacagtccgtctgattattt

SEQ ID NO: 21742 - DNA, 306 bp, Oryza sativa
tatgctcacgggggaacccccaacccaagtgatggcttcctggtcttcaacgaacaaatacccgaggctgcgaattcactaacggatgcagtggaaaccccttctaaagcacattccgaccccacagagagaatgacgagctgtcactcgccctacagactcccgagcattcaggaccaacacgagggacaggcgtgattccctaaaagatgggattcaaagaggacatcccacccgacaggagtcggatgaagagcaagagagattccgaagccaatattgcctatcctgatgacagggtatcaa

SEQ ID NO: 21743 - DNA, 439 bp, Oryza sativa
  unsure (1)..(439): unsure at all n locations
ttctgagtataggagacatgaagcagagcactatgggtttgtctgccactcanagaggtgccgcatcaatcagatccatatcgccatattcttttcccggtgttctcttaaagaatacatatcctcggtgatctgtggcgctgtaacaatattataagtgctaggatatgttttactactagcacataaatggatgggtacacatgggccatgcatggtgataccacgacgatacaatatgtcacagtatgttggtaggtgcaaactgtccagtagagcggctaatgaagctcctgtcctagaatgggctctgctgaatgttgaccctcttctacgacgatgctgcttaaattcccgggaaatcaaataatttgcctggaatgctcgagggaatagcttttgaaatgcctataatggtctactctaccaccaaaccatc

SEQ ID NO: 21744 - DNA, 458 bp, Oryza sativa
  unsure (1)..(458): unsure at all n locations
tgacacttctgtggtgaaagtntatntagtactgctatatgctgtatgccatctgccatatattatatacacaacttgatcgagcattttttctgcaccacctactccgattgggcttaatttcacaagaagatttagctagcagttagcacaatttttggggcattaatagttactcgtcacatggaactgctgatttgaggtttaagattgagcttgaagctaccacaagtttaccaggccagaacgtgatactggggccacttttcctataagtttgatgccataaaaattgagaatatgaaatcagctttcggctttccttcacttatgagcaaatggggcttaatatcttaagcatgtccaaacaagtcaaatgtccttaatcaattatcttttcatttgtcaacattngattntattaccgaatataatgtcggttcgtctgctgcatacct

SEQ ID NO: 21745 - DNA, 397 bp, Oryza sativa
  unsure (1)..(397): unsure at all n locations
catgcaagcttagtaaattatttatgaattattctttctttctggcaggccggagtgnatgagttagtccataattctgaggaattagtcattgattcagaagaacttcctatttaccccgacgtggtagtttatgtgactaaatctgtccaatacaactgtattgtgccacgtgggtgggttcccgttgcgtccgccaccacggcgttaagtttaaagcgtgggcccgccacttaacggttctaggtcatatatcgagtatggcttatgatggagtaacacgtatcgtgctggtgtaaggctaaatcatgaatcttggaaaggctttgttgtgagtaaaaaatcgggtacttatgtatcgcgtgccatgcttttgcatgattatgattacacatca

SEQ ID NO: 21746 - DNA, 445 bp, Oryza sativa
  unsure (1)..(445): unsure at all n locations
tagctcgcatcgcatataggcatacatatagttcttgtgtgangcagcagctactaaacttgtcttcaacaaaaactagataaacttttgcgataaagtggcacgcttttcgaactgctaaacggtgcgttttgtgcgaaaacattctatattaaagttggtctaaaatatgacattaatctatctttcaagtttgtaataattaaaactcaattaatcacacgttattaccacctcattttgcgtgaaacactgaatcttcatcttcaggagattcaaacaccaccttgttggctaagaaagcttactgtgtaagactacttgacttgctgaccaaggaaaaacatacgtgacttactagcaggactagcttattggagaaggaaaaacgtctactgacctatactatgcttactagctaagggagaactactaatagtactga

SEQ ID NO: 21747 - DNA, 395 bp, Oryza sativa
  unsure (1)..(395): unsure at all n locations
cagctgcagcttagcctgaggactatgaaaatttttgctcggctngctgctaaaggctatactcagaaagaaggcgaagatttctttgacacttactcacctgttgctagattgaccacaattcgtgtgctactttccctaacagcctcacatggtcttctcgttcatcaaatggacgttaagacagctnttcttaatggagagctggatgaggagatctatatgtatcaacctgatgggtttgtagttgaaggtcaagaaggcaaagtgtgcaaattgttgaagtctttgcatggtctgaaacaagctattaagcaatggcatgagaaatttgacaaaacattgacatctgcaggctntgcagtcaatgaggcagataaatgtgtgtactatcc

SEQ ID NO: 21748 - DNA, 341 bp, Oryza sativa
gctttactagtatatacacactcttattagctagcttttctttgtataagaactatctcctattatttccataagtgggaatttcttttggtcctcctagatgttggtacatggatatgcttgacattgccagatgaaagatgattgcttttaagttattaattatattcctaaatatttgggttaagagagggtatactacggttcgttggaatattatattcataacaagccatgtttgtggtaacatctcttctttttcatgaatgcaggccgattacagaaattgccggctttaataataaaatagctttagtgcataatagattaatgcttggcgc

SEQ ID NO: 21749 - DNA, 390 bp, Oryza sativa
agcttccaattctaaaattcaccgtttcttaatatcagtgaaaaacacataacaaaacaaccagtaaaaggggaaagaaccaaatagccggtgatgatggactgtacgcgttgggcttggtagccggcggagaagctgcgcctggtgacggagatgccgcgactaccgacggcggaggccctgcgcccaggggaccaggggtggcgacgtgacgcacggctggcggtggaggccctgctcctcaggtggcgagcggcggcggaacccggcggccaacccgtggaggccctgtgcagtgtgcccctggtagcgatgcaagcggcgctgcaggaggattcgatctgcgcttctgtgctgcgtgcgtgggtttgttagttcagaagtattggg

SEQ ID NO: 21750 - DNA, 386 bp, Oryza sativa
  unsure (1)..(386): unsure at all n locations
agctttttcatgttcccaggagtttgtatgttactcttactgttcacctgagcaaatggnccaataatgaatatatgatatgattttttttgctttgtcatggtacgttgctaaccttctggtgcagttttcttattaaaatattttgtgcagtgaagaaatgcatgtttgtgttgtaagatgcttttaaatttattttacaaatggaatgtatgaactatgaacacgtcaataatagtgtactgttaagtattggctatattttttattttaaaagttcagcgtgttaaatgaggtttcaaagatgctttgaaatttattgtgttatatgaaatatgttgccgcaacaatcataagatatcaatatacgtgtcatctaggtgcac

SEQ ID NO: 21751 - DNA, 393 bp, Oryza sativa
agcttgagacctgctaaaaggaacatgtcttcttagattgaactaactgatggatggtatgtgggtgctttctctgtattgcacgagttgaagctgaaagatgttagaaccttttccttttcgcaggtattctctagatgcgtcattagatctggcacttttggagcaactagagaaaagaaaactttttataagacagaagcttcgggtactgtgctatttcaactagtcatgagacatgactataatttactcatagcacctaatatgtatttcatcttggcagatatggggagcttcactatgtgggtgggctgggcctgtgtcatttcatgaggtttgactaatcttctaagtcttttaacctcattagctgtgaacattgactaccat

SEQ ID NO: 21752 - DNA, 391 bp, Oryza sativa
catgcaagctttgaagaaaaccaaacgtgcattggtgatgatggactatagaaatgccttgaatcatcttaatggaaacggatgttttttctttctaaattcggacaggtttttttcacattgcacggtgccaaaccagattttttttttttttacaaacggcggcgtttttctcgcgttgagtcggacagttttttcaaagcggctcttttataaatggcgatgttttttcgcgttgaatcgtacggattatcaatgggttttttttctcgcattgagtcggacgttttttctaaacggcgtattattctaacagttaattcggagcgtttattctaacagtttcttcggagtgttttttataagggatttttttctcgtgcggcttata

SEQ ID NO: 21753 - DNA, 287 bp, Oryza sativa
  unsure (1)..(287): unsure at all n locations
aaaaataagggaaaaaaggaggggagataaaaaggaagggaggagagaaaaaagaagggagaaagaaaggggtgaagagaggggaagagatatgaaaggaagaggaggaataatggggaagagagtggagagaaagagggaaaaaaaggagagaaangagagaaaaggggagagaaaagagtgaagaaaagagggaagaaggggaaaagtgaagagagagagggaaaaaaaaggaagaaagaggggaaaagagggggaaaaagggaaaaaaaggggagaaaaagggg

SEQ ID NO: 21754 - DNA, 384 bp, Oryza sativa
  unsure (1)..(384): unsure at all n locations
agcttctgcgtgcaaagaaatggattgagtttctctatagntatagggctgttagtgcgtgccataaaatgggtctagtttaaaagtcctctgtagattcttggtaaagtaaaggctctctcacgctgctctgccacgtagctctgtcctccacactaatttccctgtagattatactgtatctgtatgacgcctggtccgttcaattttttttcaactctacttccttcatctcaatatattactactacctagcttcgatgaaacacttgttagtccaatgaacatagatatgaatatgtcttgcactagaaaatatctcatcgaaaagtagtactccctccgtttcacaatataagccgtttgagttttttcctaatcaaa

SEQ ID NO: 21755 - DNA, 447 bp, Oryza sativa
  unsure (1)..(447): unsure at all n locations
cggaatcaattgaatatatagccacatgatgcattaatggttatncngaccgaaacagtgacatgggtcaaacttagcaatcgctgaactaaaaatatatggatacacacctgaatggtgaaggtaaatggaatgaacactagatcaccaaagaccagcatgaaacccagcctttccgcaataatgtcccatctggaaataataaaaaaaaataaactgtacagaaaaacaatgaggtatgaactccgtccttgctgatcagcacatgcatttcagacgatcattcaggcacactggattgaaattaacatatctttatattataggacaaaatgatatacttacgttgaagtcatgaattcttcatgaacgaagaaatctacaatataccactgcatgaagatacataactaggatcatgaactatggaggatatgatgatcaaaa

SEQ ID NO: 21756 - DNA, 388 bp, Oryza sativa
gcttgtagacaacttctgagttccgtttatgtgatgatgtttgggattataggtctaccttaatttatctttggttaaataacttattgtcttgcaataccttttgttgctagaatcgccacccgccaattacccacaattattacccctgtaccatgctagctagtataatttgtcctctggggaaacagctctttttatttctcatccaacctgtcaaaataacccaaggggttggttcctagaaaagaaatgctcagtgataatattgacacatctccccctcacaattcatgtttctacgtggaagacttcatcctttatctgattctattacacaagaattaaataaacatagtactgtacttaaaccactaaaagctaatgc

SEQ ID NO: 21757 - DNA, 437 bp, Oryza sativa
  unsure (1)..(437): unsure at all n locations
ctatagcacanattcttacagttgggggcttcccctgctacgttcttttaaaagaaaaaggagcagctatagcacaaattcttaatctcatgattgattacattctttactctcggtaccgcgcgctccgattcccaatcaccagcaaacacatactccccgtcccataaaaaaaccaatatattactgatgtgacacattacatactcccttcattcaaaaaataataattcttagcatctctaggtagaattagtggagagtgagaatgactataataccttaatcattaaaaaaataataagagtgataggtagacagagggtattgaaggaataaacttctcgttctacgtgttgagggtagttatgatgcagaaagttggtttttatgggacaaaattcaaactctagaggttaaggtttcttttgaacgga

SEQ ID NO: 21758 - DNA, 401 bp, Oryza sativa
ctgcaagcttacagagctgcaagtatcttcctgtttgatcggagtcgctcaaatcgcagcctcacagggattctgtcgctacatgtatgtatgaagtggtttattgagtatttgagtttaacacagtaacggtaaaatgacaatatttattgtattttttcgcataaaaccgttgtacataaatatactgtattagacaatattcactgtagcaaatggtaaaccatatatactcagtagtcccttcgtttcgtgttataagatgtttaaattttgtttaaagttaaattcttttacgtttgatcaagtttataaaaaaagtaacaatattttcaataccaaacaaactaactaaaatatatttaatgtttatgttaatgaactaatttggtattataaaa

SEQ ID NO: 21759 - DNA, 449 bp, Oryza sativa
  unsure (1)..(449): unsure at all n locations
nggaatatcatggatgtgctatggggacaacgacccaatctgttacggcacggngaagaagaaaggaatatggggtatatacatggcgagtccaggggaggcaaaccacacgtatcctcgtgtccggcctgtcgcccgatgccacgttcgcgtatggtagcttgcttggattagcatagctntagcttaattaaggatcaactaatcatccttttgtgggctaattatctggtgcagtacgcattggttattctttgattccatcttccttgtccttgttgaaaaaggtaatgcatacaaacagtagaatagactttgagagtcagagtgggagtgcagggaagtagtatgtagttatgtgctcttgatcagggtccctgtagtcttgcacccttttttgcgagaaaaagaaatgcttaacgaattgattgtgggtgtacccccacgta

SEQ ID NO: 21760 - DNA, 371 bp, Oryza sativa
cagcaaccaagcccaactagaaaagaatatagtcgtttatacgaacctgtactttatacgaacgggaattagttagggtatgtagtgaactcaccagtttctgatagacgacggcatcacttttgttctcaaatgtgacagaaccgtccgggttgaccttacccctttgccgcgcccagttgcgagctctttgttcagggatgtctgaaaacggggcagggacattcgctgctacagcggctgcatcttcttgggcccatattgcctccttgccgatgtaccctgcggtgcccagccgatgcgggtgctcattccgctgttgcagtacgcgatgtgcctcgctggattccctaaactcttgggtggtcttg

SEQ ID NO: 21761 - DNA, 477 bp, Oryza sativa
  unsure (1)..(477): unsure at all n locations
cattcgtgccttaaaactaagcttgtcgntacgaatggcaaccattggaagtggtcggatgctatctttactagcccatatagtcaacatatgatcatcaaaagcaaccgtaataatatatatatgaatcgatcattgggacagggacaccttgatccataccatccatcgattcgatcatatctctctcgagatcatgagatgattgaaattaacatcatcttgatttctcaagtgatgtttggatacatggactaaatgtcacatcggatgtttgacactaattagaagtattaaacatagactactaataaaactaattgcataaatttgcgagataatntttttaagcctaattaatttataactagcacatgtttaatgtagcatcacatatactaatcatggattatttaggctaaatagattcgtctcttgaattagtctagagntatggaatagggttctttcgcgaac

SEQ ID NO: 21762 - DNA, 386 bp, Oryza sativa
ttctcctgtgaatgatagcaatacgcatttctaccacatcatcacagaaccaatcaaggatgctgtcattaggacaatgccagctatatctctcctgaatcaaaatgagcagccccgttcgtggttttcagttcgctacttatcatggggtaatcgaaagcttgcagcaatcatgtaatacatgaatatattcatgtctataaccagtgagcttgctatgcttatggatgattcatattgaggatacaatgtaccgatgttaagcaccgtcccttttttgttaaggcagtgccttgtattcatgtaataagggagacatgtgtaataaaagcaacgtctaggagggtcattttggaagatgctgatatggaattatgtgtattatt

SEQ ID NO: 21763 - DNA, 440 bp, Oryza sativa
  unsure (1)..(440): unsure at all n locations
accagtgtgcggcacttaacaacatttgttttcgttccagctttccaaaaaacccagtctcgcagagcaccaattaactcttttaggccagtctcaggagtttatttatttgagcctctgtctcggataagattagtgcgagccacatccaaatacctcggtcaaattattctgtttattattatattaggccgcaggtggtagaatccctctgtctcacgagcaaaacagccaagtaagctaagtttggatctgataaggttgggttaaagccaaagttaggaatgaatggagaagcacagtctggctctataagtaaggaaatatctctatccggntatttgtagtgaaaatcagtctcgaggggagcaagcaaactccaaattaatatgaatacgaacctggttcaacaagtcgaaagtcataggaacttagagatt

SEQ ID NO: 21764 - DNA, 395 bp, Oryza sativa
agctttcttttctgaagagatgcaagataaattattgggacctctggacatgcgggttctttcagtagattctcgcattttctcgtaggtccaacacttatataacattttatcccctactttcagctattttgtgagcatcagagtagcaaaaaacagttatttggctcgatgatgactactcttgctttaaccacaccgaatttgaagaccggaggaagtgtaaaatctcatttctttcattactctttgctcttccttctcggtgattccttatgaaatctcttccttttggtgaagaactactacggaatttattttcgtaaggtttggcctttatcaaaagattgcgattgaaagatgcagcgagatagtggagcatagtgtaaaaggaa

SEQ ID NO: 21765 - DNA, 449 bp, Oryza sativa
ctgatgcatataaggtttgaccgacgattacttctattttactccgcctgcgcgaactacactacaataccggacatttgacacctgcaagctattgaatctggacaaattacccccctggctaaaaacggagtggttttgatactacatggtgttaatttggtcacatggcaatccactcagcaagattatgaaataattttacaaaatccgactgtccccatttgccagcatatattccttcttaccccttctctctctcttggatccaggcgacatcgccatctactccttgcagccaccaccttggcctctctgctcactgccttcatatcgacggaaggaaggggaatgcaagcgacatgagtggagggaggggaagcgacggacgacaatggcacgaccttgtggatgatatcggtggaccgagctcatccataaggggaagc

SEQ ID NO: 21766 - DNA, 303 bp, Oryza sativa
  unsure (1)..(303): unsure at all n locations
tcccgcggcattatttactggtgtaacctcaatatgcgatcccagaaatgaacatatttcctgaacatacatntcctggatatgatcgagcagattttgacggttaacgagacatgccgtgactgtgctaagctgacatatgatactttcttccacgaactccactgtaactaaatacttcgtgcaagagcggaacctaactgagcttggactttcagaccttcgacaatagtaaggatggaaccgaaaatcctatgctcataatgtcttagagagatattgtactngatggatcacaatcca

SEQ ID NO: 21767 - DNA, 453 bp, Oryza sativa
tccagaatcttctagaccctgctcagccgaaagctctttatggtctctcatcaccgcgggttcgtgttggctctcgtccgtgtctggtgctgacgtcacgtacctcgtggactcatcctctgttttgagttttttttataaaaaaaatcagtaattaatattgagtgaactatatagaactgtagatttttttgcatgagggaataaatgccattattttagatagctgtcataatttggcatatattcatgtatggatgtcatctgcatgttattcttctcgaattaatgaggggatagcattgacataaaaaagaatctccatatataaagtaacttttgcaaaaatacaaatactctgaccttagtatagaaaaactacttcacattttcaaaatgttactacctagtatgatattagatatttcataatacaataaatttgaatactag

SEQ ID NO: 21768 - DNA, 392 bp, Oryza sativa
agcttcaagacacttatccccagcgtgaatgttttgggtctctctggtcatttcggagtacgaaaggaggctttgatgtccatcaacttccttaggtgttttccagaggttgagacactacatataactgtgagatttctttccttctttcattcccgacatatatatacataaatgtgagattgcgagatagctgtctttcttctttcattcctgacatatgcatcattttacacactcactgcagccattctttcattcccgacatatgcatcattttacacactcactgcagccatatgttcctttgatagctggaggtgatcaatttttcttcttgtgcagagcaaaacggacaaggcttcagaagccgaacaattcagtttctgggg

SEQ ID NO: 21769 - DNA, 457 bp, Oryza sativa
gctgtagctagtggttgctgaataacatacaaaatttattaagtattaagtacatggagtataagttatgtagctaggaccacaaacaacacatgatctatgcatggtatgcatgcaaaccatgcacttactgcaagcaagtatgccagccaaagtccatcatgcatatatgtatggacatcatggtttattattaaataggtcattagacaattgcttgcgttacacaatgtacaaaagaaatgtaggatattaagctaaaatacaaaattctccagcaggaaaggcgccgaaagtacacttagtttgctagcaatggatcgagtacttatctactgatctagtcatcaatccatgcatccatccatcattaaaccacgtagcatgtattggctggaatcaagctatcacatatatgcgtgaatctaaagcaaaacaaactcctcgatatatcttg

SEQ ID NO: 21770 - DNA, 390 bp, Oryza sativa
agcttatgctctgcaatcttcacttttcctatgagccaatacctaaagttcttccaagattgtagttcttcagtgcctcagaatgcccaccgcctttagcatttccatccattttcactggtaatatgaaagaaaataactgaggtctagcattccacaaacaattttacactttggatggcatatttatgacatgatgcacacctttgaaccaacgcaaaacatgacgcaagatccaagctgtgctaaacagcttgttcataatactaggatgatgtatacggtgtgtcacagaaaccatgcaatatgtaattgttcgagttaacatgttcacctcaaagatgagctatgtatatcaattcatagtaacaacccttcatctctaactgg

SEQ ID NO: 21771 - DNA, 450 bp, Oryza sativa
  unsure (1)..(450): unsure at all n locations
tttaaacttttggatccaccaaatgaagggcttgtttttactttttatgagaatttctatcatatttattatacttttatctatcaactgtaaatcacctgcagtcaaattttattgtacacaagcaaatagacataatgtgcgttgatgccccttattgcttttacaggctgttgaaaactggttagctgacagggcagtattgccacttgagaattcattgggtggtagcatacataggaactttgaccttttacttcgtcatagattgcacattgttggagaggtccgtcttgctgttcgtcattgcctgttagccaatcccggtgtcaagattgaaaacttgaaaagtgcaatgagccatccccaggtcaaactcttgcacaagatggcctaaatattctttattttttggtgtactagacatgcagacatattantttaattctc

SEQ ID NO: 21772 - DNA, 389 bp, Oryza sativa
  unsure (1)..(389): unsure at all n locations
agcttgcttgagaggggtatcaaaccggctctcgttaaatggcctgatcgatcgaagttctggtactatgctcatggnggaacgctcaacccaattgatggctccttggtctttagcgatcagatacgcgaggctgcgaatcgactaacggacgcagtggaagcctcttctcagggcacattccgacccgacagagagaaggacgagctgtcactcgccctacagactcccgagcatccaagacgaacacgagggaaaggcgtgattccctggaagatgggattcaaggaggacatccacacgtacaggagtcggatgaggagcaagagagataccgaggcgaagattgcagatcttgagtacagggtatcgagctaagagctcagcat

SEQ ID NO: 21773 - DNA, 435 bp, Oryza sativa
  unsure (1)..(435): unsure at all n locations
ggtggataatgatgagtatagtgaatctggtcgtggtgtttatcctgatgggctgttccgcatccttgatcaattcaatgaacgatataagagattaaatataccttntgtcattactgaaaatggagtttctgatgagactgatctgatacggaaaccatatatactggaacacttgttagccacatacgctgccatcattatggtcctttcttaacctttaaacaaacatgttttagtctgtgctcatggagatggaacttccaacacttaaacaacataatgttttatagggtgtccgagtacttggttatttggtttggacaacatcagataattgggaatgggcggatggctatggtcccaagtttgggcttgttgctgttgaccgtgctaataacctagcacggaaacctcggncttcatactntttat

SEQ ID NO: 21774 - DNA, 395 bp, Oryza sativa
  unsure (1)..(395): unsure at all n locations
agcttcctcctttgctttaccaaaagtctgtattgctgcanggctagttctcttgaagagcacgaaaaatttgaatattttttcctgaatactgagacgctcttttgatgggactaaaacttttaattacttatcacatcggatgtttggacactaattataaatattaaacgtagaccattaataaacccatccataatcttagaataattcacgagacgaatctattgaacctaattaattcatgattagcctatgtgatgctacagtaaacattatttaattatggattaattaggcttaaaaatttgtctcgcaaattagctttcatttatataattagttttataagtagtttatatttaatactctaaattagtgtacagagactaaag

SEQ ID NO: 21775 - DNA, 456 bp, Oryza sativa
  unsure (1)..(456): unsure at all n locations
tcatcttcgagtacagcaaatattttacctacttatattttttanaaatcatcgaaatgctcttagattattctacgttttggttacaagttatagctagtacagtcatgagttctgcaaacttcttcaaacgatcatcatctatcacgtttactttgtagtagatgaaagaaattagtacaggtttgttcagctaatcggtgactgccaaattttgtctcagattgcacacttatccctggtttacatgtaatatagatgtgaaatttgcaatttgtgctacgcaatgctgcaggcaaattggcaaggttcatcactaaaactagtaggttgataggaaagaatctcacaaaggacaagacgatgagaaggtaatggctagaattatcgtgcaagtgaaagtgaaagtgaggatattttcagggcgtgttaggttcgacttgtctctaacgatgc

SEQ ID NO: 21776 - DNA, 390 bp, Oryza sativa
  unsure (1)..(390): unsure at all n locations
agctttaaagctgacttgtaataaataaattagaattcgnaaatgacatgcttgcctaaaaaaggtggtcaaggatcaataccatggcttacatggttggggtttttttccccaattatttcgacagcatactgtcattgtaagcttctattgtaatgatcctttctcccaatcttaatgaaattggtcgaccgaacttttggccgacctggaaaaaaaaaggatcaataccatggcactatagcctctactgaagccaacaggttgtagaaagtgaaaaggccagtttcacttatgcttacatatgccaattgccaggcaaatttattaagccgtcctataagaaataatattgcaataatgggtgaacactagggctaaattttcaca

SEQ ID NO: 21777 - DNA, 446 bp, Oryza sativa
tacccggtcgtcaagatcgacagcatttcgttctcatttcatcatgggcatcacgtctcgattcagagtgcccaaccgtatcattacagataacggcacccagttcactagtgagctgttcggcgactattgcgacaacatgggcatcaaattgtgctttgcctcgcccgcccaccccaagagcaacggccaagtcaagcgagccaacgccgaaatcctcaaaggcctcaagactaagacgtacaacgtcctgaagaaacacggcgattcgtggctcgaggagttgcccgccgtgttgtgggcaaatcggaccactccaagtcgcgccacggtggaaacgccctttttcctaatgtatggcgccgaggcggtcctgccttcggagctttccctgagatcacctcgcgttgcgctgtacgatgaggccaaccatgatgatcttcgcc

SEQ ID NO: 21778 - DNA, 377 bp, Oryza sativa
  unsure (1)..(377): unsure at all n locations
agcttgagtgtgtgataattcagctgtctttttctannacntgataggagcgtgcatattcatttgtatgtttcttgtttgctactaaccatggtgggattgagcaagcagaaacaagatggtcatgctcaacattgacttcttcaccatcaacgagatatagcgacttctttacgcattgtatatgaggtacatgataatgatcttgcaagggtaggatctaatttgccactgattgtaagtatgattccgccgcttatgttaattaggagctagcagtatacaaacaatttgatgagtatgatttctctaatgctgaaatggttaaggctgctactaataagtgtaccggttctacgtctttttggtggaatact

SEQ ID NO: 21779 - DNA, 444 bp, Oryza sativa
  unsure (1)..(444): unsure at all n locations
tgcactcactgtatggatgatactgatatttcttatctgatatcatgcangaacgatgcttacatgggccatcgtcaatccttgctgcataccaccctgtacggaaaaatagcaagcacttcgaacagaaagcaaaccatcgtactaagcctaaacatcacaacgggaaagcagtgttcgaaatggtgaaggatctaaaagtagtatctggaaaggggcctggcagccaacccatatagagtgaatatggtcacgtggcgatgtagaacaactctttcttttgtgagctactgtattgggaagtcttggacgtccgccacgcaatcgacgtgatgcacctcactaagaacctttgcgtaaacctgctgcgcttataaggtgtatatgagaagtccaaagatacacttgaagcacgcaatgatctgaagcatatggaacaacgcg

SEQ ID NO: 21780 - DNA, 374 bp, Oryza sativa
attgatccctgaccagccatccgataagaccacaatgcttcggctaaacgaatatgccatttgccgagggaatcaaaaatcttccttttaatcaacttaatcaagcttttgttaaatgcctcagcttgcccattagcttgtgcataatacggtgaagaattcaagaatttaatacccctgctatcggcaaattgaacaaactcatcggacccaaatatggaaccttgatcagttgtaatagtctgaagaataccaaatcggtagatgatatgttcttgaacaaattgtatcgcatccccagaatcaaccttcttcaaaggaatcgcctctacccacttggtgaaataatcggtcgccaccagtataaacttatg

SEQ ID NO: 21781 - DNA, 441 bp, Oryza sativa
  unsure (1)..(441): unsure at all n locations
cctactcacacatttaatttatggtttgttattagacaatcattcatttactnttctttggtttcaattactagggagaagctactgaaccaagctctagagaaagctcgctctcttgttctattgctcgccactctggcagcaaccataacttaccaagcagtgcttgacccgccgggtggttattggcaggttgacaaggatggccacaaggctggtgacccaattctcctaacaattaatgctaagcggtataagacatntttctatttcaactcaactgccttcgtggcatccttactcgccatcatcctggtgcagagcaagtctctgcttaagcgccatgcactggaggcagccatgattntagacttatttgggctcatgggtgcatatgcagctggtagctgccgggatgcaagcacctncataaatgtcatg

SEQ ID NO: 21782 - DNA, 371 bp, Oryza sativa
  unsure (1)..(371): unsure at all n locations
ccgctgcatcttgcacagtctgaagtgcccaattgatgttaagaagtccaaaaaaatgactccgggtcaaatgcgatctatatcagnttgcttgcttttcctttaacaaatctacacctatacattttatgcctaacatgctgaaaggactgcagtatctcagcatcgattgtgctccgtttgcttttggggtttcgctgtgttgatcatttgaaaattcttcagcagatgggcgataagtgcatctccaggtctctatatgcatgttcacttgtgtcaactatcggcttctatgcccattccaactgcttaaaggttcacatgcatcctgatgaatagaagatgggcaagttgcttcaatgcctttaact

SEQ ID NO: 21783 - DNA, 431 bp, Oryza sativa
  unsure (1)..(431): unsure at all n locations
tactaagcttctagcaccccctgccatcacggcagcggcagcatgcttactctcacttagcccatgtcccaccttcttctccttcttttccttcaccttccccctctcctcctccatcctcagcctcaatgccgcaacctcgtcctcagttccgttgagcggcatcttgtccgcctcatcaaactccttatggcataccaagcacgccgaggtcttcacctccttgagagccttcacgctgagcacatggccacacttgcgaagcgcgaggaattggtacttcccattgaaatcgagcccggtgaccgggcactggaaccggacctcctcaccagccgcatcggcatcaggcttatgatgcatgtggatggggatcatgtccttgagacccctgatgtgtgagagcgcactggggaggcgctngtggagga

SEQ ID NO: 21784 - DNA, 393 bp, Oryza sativa
agcttatatttatgcaaccaacttttacaaatgttaattatggaataatattcaaatgtgatttgcagtgcctggctatttggcctgtatgcaaatagaaaaagcatttgctcaactcgtaaccccttgcaccatataatgttttacaaaccccaaggttcaagcactaaatgcacttctggttaccaaatgacacctgtgtgagaacctggaaaaaacttatctggattctggtgcttcagagagactcgctacatggtaattcataagctaaaatatccacaacgaaggtacttcgtgtggtcctgctcatattgtacgagtaattatatataaagtcacataaaaaagagaaaaaattccatcaattgtagttactcaaggaggatacat

SEQ ID NO: 21785 - DNA, 407 bp, Oryza sativa
cacaacagagccatggctgagctcgaactcaagctcaccgacgggcaaacagttgcgcgaatgggggcgacatcaaaagagaacatgtagagcaagacattgtgattccattcctctacttttcccagatagtggtggctgaacccgcgcaggcggtggctgcaagtggcagcgagttcgtgacaccatgcatgcagcgttgcgacactggatggctcgatctattgcatgcatgtagagaacatcacatgcaagaaaaacatacattaaggactttatcctactgctaagaagccacatttcagcttgaggtgaagggctaagacctcaccataacagggaagcaaagaaaccgagctctgtcagtcaagtaaagaagaacagcttgcaatctgctcctagccttg

SEQ ID NO: 21786 - DNA, 388 bp, Oryza sativa
  unsure (1)..(388): unsure at all n locations
agcttctttacgngcaccatgangattttttatggtgtttatcatgtctactctaaatttgtagatcatatactatttcatcccaaaataataggataagtcttcgaaatctcaaatcccaccgcattatatatttattactcgcgttcatcctcatgagcgcaaaaccctaattatccccccccccccccacctttcaaatttgttcgcagtcttaattaacatgttcttttttaccactggaagaagactcgatcggtcaggtaccagagccccaatctgttctttaatgacgctagaggtgcaccttttcagcaatatttcgtaacgtcactgaccgtgatgttaacccactatacatgtgctaattattggaatacgaaaatga

SEQ ID NO: 21787 - DNA, 452 bp, Oryza sativa
tatagcggtagaaatacctgacgaagatgtcactacggttatgtcgacctcctcctcttgtgtgcaattgggcgtccctgtgtcttggctggaacagactcagcagcaatagggcgaagagacagattctgaatgtctttggaaagatccaaacccaaaggaggaacaatgtcatcagggcaggatgagagggtcaaggacgagaggagcttcttgctgtgcatgttaaggctgaccatgtacagctctgcatcggcatcgttgagcatgaaactaatgacaccatcttcctgagggttcatgacagggctaattggtatggccttgggcaacctcgccttgtcgaagccctccagctcccacagatctgccaccatgagttgtgcatctttcagccactccccggttgcgagggtcagtgtccacatcgttatcgcacgatcgccggtgtg

SEQ ID NO: 21788 - DNA, 394 bp, Oryza sativa
agcttgcagaagcatgtttaagaatattatgtgtgaaaggcctacaatgaggcaagtggagacaacacttgaagatgtgcataggtcaaaagtccaacttaatcatcagattgcaagagtgagcaatagtaatacactaaaaaatcagacgtacgagggaagtaagtgctatgaaggaactatacaatatagctcggaaaaggagttcattcaatcatctgaatttccaagataattttgctttcatggaggaaaaaaatgttgagtgaatatattactactacttagggtgccatactacaactagatgtcatttgggaattacggcatataacgtttaattgaaaataaatgaattcaatattcctacttgtaaacatcactgtaatgcaat

SEQ ID NO: 21789 - DNA, 449 bp, Oryza sativa
ctaatagcagcaggttcgatgctagtccttcctctatttagtgtgcatagtggtgatggtttgtttctctttttctgattatgtaatcttttaaggctatattcttgtaatattttcatgctttgggcctgttcgacagttgatttcacgactgtgccgcagtcaaaaccaacagtaccacacgcacgcatcctagctgcatgccgcagttgctgatctacttaacgggccctatatttcatgaaacttcagactttctaagtaccagctcgtttgaaaaaaaattctatcaaaggtttatactccctccgtttcacaatgcaagtcattctagcatttcttatatttatattgatgttaatgaatctagatagacaacatcaatataaatgtgggaaatgctagaatgacttacattgttaaacagaggaagtacatgaaaatattat

SEQ ID NO: 21790 - DNA, 394 bp, Oryza sativa
agcttggattttccaaccatagctgagggaagtattatagactttttcctcaatgaatttagctgaaataacggcacaccatcgcttttgtagttctgttttgaacggatttaacacagcctacaataaattcacgtccatcccagaaataaaaagtcgataagcaccatggcccgaaaagaaagaagcccatagcataaatacggcccacgtaagtgcaaacatatagaaggaaaaaagtttacttagatccctcgtattgtcatcgagtttacttacaatgagttctgaactaaaggtgaggaacaagagtttaagattgttgatttactgcccgcccgtgatcaaacaatctgaagtttatttgcaactctatatatcgtagtttatttta

SEQ ID NO: 21791 - DNA, 369 bp, Oryza sativa
  unsure (1)..(369): unsure at all n locations
tccaccctgcctnctcagcttgccggataaaatgtgctagtttatctactgcatcacactgaanatagcttggtatgatggaccgcatcacctgcacggtggtgacaatggtattgcgctccagtgcctcagcaatccactgctccatcctctcaaccaatccttcctgcgcgtatgcccggatcagcagtacagctaaccatggtctatagtcatcaagacccaacttctgcaataactcctcgatcttttgaatcctatctacctgtttgaacttgcagtatgcgcatatcattgcacgtatatggaccatgtcaacctgaccaacatgctggcgtgctcgctcataagccaactccatcttgtata

SEQ ID NO: 21792 - DNA, 387 bp, Oryza sativa
  unsure (1)..(387): unsure at all n locations
agctntggcaacgggttatttgtaaaaatattttttgcaaagggtcaaattgtcaaaatttgtgttccttagaaccagtaagctgagatgtcccaactaaacattacatacgtgttgttttaccatgggcttttaatatcttcttggaatattcatctacgttgcaggagccctcgaattgactcttagctgccttcggttggcgcacatctaagtgttataagtcagagacatccaagttggctttgatcacctcctcttgcccttctggatccaacggttctttgaacaccttggcacaccatccgtgcaccttccaagcatgtggtattactatcgaagacttccaccttgttcgaagactactagcggcgccttggattgaag

SEQ ID NO: 21793 - DNA, 449 bp, Oryza sativa
  unsure (1)..(449): unsure at all n locations
tgttgggcaaggacgtggccagcaaagagcactgtattctatttctnctncaccacgaaaaacgcgaacggatggttcgcgacgaagtccacaggagagggtaaaagttaacacaagaacttcatcgtgcaggccgtggccgtcgccgcctccgtgccttcctcgttcacctccacgaccgccctgtgcatcaacttctccaccaccaccagctcgccgtcgatcatgccggataggtcgaccttgccgacgtctaaggcggccccaatccccatccccttcagaacctcgttcatctcgctgtagaacgacaccttgaacctcggcaccctcaggtcgccgaccttgatccgccgtcgccccggccggtggtcacgcatgaaggaggaggaggccgtgccggacgacgccactgccatcttgtcgacgagcgccggcaggccgtcgcg

SEQ ID NO: 21794 - DNA, 389 bp, Oryza sativa
agcttgatagtgacttgtaaaacgctgacttctgtcgccatcagcccaaaactgagcaagtcaattgcccatgtggattaaatccgtttactgactcgtcctgcgctagggctcatccaacatccatggtttaagagtaaaacttgcggggaaatcagaacacccctgagtttttttttattccaacattagagagggcaattcagaagagaactgattagagaaacacattcgagatatgcggtttgcatccgtaggagtgcagaccttagggttgcggggctgacgaagaacacgccaccttccgcatcgtcggcagccgcctcctccacgcgcggttgctcgccgtccaccggtcccccgcagtgcgatggatcgcgccggcggcc

SEQ ID NO: 21795 - DNA, 451 bp, Oryza sativa
  unsure (1)..(451): unsure at all n locations
actaagcttaactttaaaggtgatggatcgagcgcgtgaagtacttgttattgtccacctctgcatggaaggtggcgccactgagcattccaacctcatcgataaccagtaatgggaagttntatagtggatgtgaaatttagttcacatcatcaactcattaattataagagacaatatatataaaacaaattacctctaacacatttgccccaatacatcatattaatttactntatttgattcctatcaattcatcggtctcttgttctcatctctcttggagattgtgtagagatagccccttgcatgataggtggcaccttctctcacacctttcatatatctcttccacgtcatcacgtgagcttacatggaacctgatgacaagtgggtagaggcttataatacttgcccttagaacgtgactgctcttttcaagccgcgaatc

SEQ ID NO: 21796 - DNA, 369 bp, Oryza sativa
  unsure (1)..(369): unsure at all n locations
agctntggggccttcttgtacccattggtcttttcaagcctaagtcaacaaagtctaatcctacaaaagtctaatccatattcctccctttatccattagcttacacaaacgacaacttcaaaaaaattcctccatcttttaatcttactagatgctgggacgcgccantggnncgccgnctgtacataaattttattatctgtcgtttacacggtcgaacgatgtactctatttgagaatatgtgcatttcatttaatataaaaggtgaggtacgcatgatggatcactaaattgtgctaaacctattgaggataagcatatatatgcaatatcccatttctgacgcttatactacaagcataatgct

SEQ ID NO: 21797 - DNA, 456 bp, Oryza sativa
  unsure (1)..(456): unsure at all n locations
actcaactgttactttgcaagtctgcttgggaacattatttgttgctacactntagtgcataatggcaagagaattactttgctacctttgacccctgctgaaattgtagaagctgataaagagcgagctgctagtttgaaacttgatgaatctgaaaattcagcagtggctaaatctatattcctacctaaaaaggatatgctttcacctagttctaaggttgagggaattaagttgaagggtggtgttatgcttgcaacaaaatgtgacattgctgaaatttcagatgatgatatttgctatgtcttgatatgcaaacaagccttagtttctctatatgatattgctagttcgatacctcgtgttggtactaacctttcgcaagagtatgaggatgtatttccagctgagatacccccgggattgccacctatgagagggatatagcatcaaat

SEQ ID NO: 21798 - DNA, 388 bp, Oryza sativa
agcttgagcaaaactgcaacttaactatctgaactgactttgttatcatatcagcacgattatcatgagtgcttatcttgtgtacatttagcttaccttgtgcgactacatcgcgaacataatggtacttgatatcaatatgctttgtcctctcatggaacatttgatctttaatgaagtatatggcactttgactctcacaacacaggttaatgcaagaatcaactcctttttgtttgatcaaacaatgatgcgtcacgctcaaaagctaaaatgcttattgggtcactcgaactatgctagaggcctcatactagatacttttttgaaaagcatgataatgctaaagaaaataaaatgaatttttttcatgggcatgcatgtatat

SEQ ID NO: 21799 - DNA, 433 bp, Oryza sativa
  unsure (1)..(433): unsure at all n locations
tnggagatggctgtcagccaccagcgtttttgtaatttgttaggaatgtgtggaataagtctaggagaacctagcatctcttcgacaaggcctacacttcaagtatggaggcacaagatcgtacccaagttccctgacaagactacggtcttggggtccctgggcaccctgatctgcaaactggaggctacactattcaaacacgccgctcacgccgtcaaggagatgcacaccgatcgatggacgagcacttgcgatgtccttgtgtgtatcaagctcacacacccacatatcaacctggaataggtgctatccaagaacggggcggagaagacacacgagggcataaaatactttcccgagtcatagctatctgtatgcggcgagtcataactagatcgaaggtggcgcatcaagcgagctcgatggacaa

SEQ ID NO: 21800 - DNA, 381 bp, Oryza sativa
agcttcttgctttgcgcatcgagagcctttttcattgagagttcatccctctccatcactctaaggtccctgtccatatctttgttagccatcataccttgcctccattctaacctgtgcttctcccaaaggtgcaggacacttgaggcaaaagcctgcattttgtctactacttccttctccgatattcttcccgtgccgattgcccaattattacagatgatgaaaatggggggcgctcctaagcgtcctggagaaaaggggggagtcccgtcatcggtaacttcgggcacatagtcaattcccctcttgagccactcatttaaagtgccaacaaagctcttttgagcattgacccatgtagcaaaactagaaatcaac

SEQ ID NO: 21801 - DNA, 449 bp, Oryza sativa
  unsure (1)..(449): unsure at all n locations
tgcgagtcactctcatcaactgctgcctcttgcataattgtctctcctttactatcctctttgtttacacacttatcatcgtgcattagctccagaggataaggtagagagaaatttttgctatttttaaccttttaaatttttatttttcaaatataatatatatttatttaaaaaaaatctagagcttctaaccacaccacctccagccactcgtacttaccaatgttgttttcacattattccaactggtgtgcaggggcggcactagaacaaaatgaagagaataagagatgtaccactcgcttaatttactctactttcgattaagtttacgctaataggaatgctttattttgaattgaggcggtgcatatatgggtgaaaatagatgaactatagcttanaaaaattcttgaccgtgttcctaagcacccctctcctatgta

SEQ ID NO: 21802 - DNA, 411 bp, Oryza sativa
cggacctctaagcacctgagctgcagcttttaaacgagaagagatgagccattttttttaaaaccaaacatcagtattctcaaattttatcaagaatcttaaatggtatggttattttccatacaaatttatgttattatgaaacaaataaattaatgtgtatagctgaaattttcgaagcacattgaaattttttgaaaatggttgaatattttaaattttgggttgaacatttcaattgaaagtttttaaaaatttgagtggttctttttcagaattgaatttttttatttgtttgtttgtggaccatttaaggacccgcatggaaaaatcaatttttccatacggatgacttaagaagccgtatgcaaaaataaaatttgaaaatttgaaactaatttatctcactca

SEQ ID NO: 21803 - DNA, 452 bp, Oryza sativa
  unsure (1)..(452): unsure at all n locations
ntgcaggtngctagagataatccaagaatgaatagtatgtacataatatagcaccacgacaggattatcaaaatctacaatttctgatcaggcagctngaagagcttcataactaagagaacaattgtttgtttttctttttcctaaagtagtacaggctgatttagtcattgatctttacttgacgatggcatgtcagccttagcttcacttggagcaatatccttttcgttggcagtaaataacggatgtagatgaacatcatttcgaattcgagtatacgtaagtgaaaatgcttatacctttcaatgctctatgtatgttcaaagcacatgatggtagagtcgctcatacgcgcgacttcataaactgctaagtttgggacaagaatatatatgtggttgttttatcagagaacccttctagtttttatgattacaacactacctcta

SEQ ID NO: 21804 - DNA, 389 bp, Oryza sativa
gcttccgaccaatgatataatgctcccttatgttttctgtcttccgcccaaagacattgatagatgtatgatccaacccccgcctgagaatactagcagcagtaggcttgaaagtgttcacctcaggccaagtatcatcgaacttcttcaagtccaagtagctatccccctgaacgtacccaacggcatgctcccttgggaaccgattgtggtaatcactcccaagagtcccgttctggcactgattccccattccaagaactccttatgcaaaccaattccaaagttcccagcctcaaaacaattgtatccttcccagggatgcagatttccacttatatagccgcaccgctacgcgcaaacccgtccaattggaagagttcctcgct

SEQ ID NO: 21805 - DNA, 455 bp, Oryza sativa
  unsure (1)..(455): unsure at all n locations
tcgggcgnctgaacagtgaacacgacgagctcgatcctatgattgattcttcagcgtctgttcggttgcagtcttgcagatgggagagcctcaacttttgactaggtttttattcaccgagaatgagatgcgaattctaaaacgtgtagacgccaccaaaccgcactatctagttaagtccatgccccatgcatatgtggctntgtgcccatcgatccgttcgccattatcgcagtttgcaacgtaactggaacagaccaacatatatattactagctagcttccgtccaaatctccacccataatctgccagagccccgagacaaatgttagcgtgatacacacacatgagcgacgcgcgtgctacatgcccagtctcattgccagtcagccttgcattattgaaggcgacgtcgattgccaagtcgcgacttgtgaggaataattgggacttt

SEQ ID NO: 21806 - DNA, 410 bp, Oryza sativa
ggaccttaagcgactgagctgcagctaatatgaataagggaaccttctcatttctcttgttttgaatatatatactccctccggtccataatgtaagactttgtaacattgcccacattcatatagatactaatgaatttacacacacacatagataaatagatagatatattcattaacatctatatgaatatgagcaatgctaaaaagtcttacattataaaacggatgaagtatttgttatgcccgcggcaacgcgcggggtcccggctagttattaataaattcagaggtgtaaacaattatctggggtgtgctcatattattaataaatttattaataaccatataggcagaaaaacgagttcacgttaagtcggttaatttgattcatttctgctttaaaggta

SEQ ID NO: 21807 - DNA, 447 bp, Oryza sativa
  unsure (1)..(447): unsure at all n locations
actcagcttacaaggtggtggactagacgacctgtgttcgaagccttatttgctgactcaantatttgattagccaatgaaccacttcagcaaaaatagctcacaaaaccatcaaggaagttaaattataccggttntaatagtagagggggttaggatatctggtacaattgttgaggggcacgaatcaaatagagggactcaaagtaagacttattccattcatggatagcgatccaacgggaccgcaatcgtcggtagccggaataagttcactttgggtncctttatttgtcagccaatctgattttcgttccttgatcgtaaaactgggttcgacatgtccttcttcttacgaaaccatttatattaagatctttagcattatttgaccccagttttagctaaggtgtgcgcttattaggcatattgactctgtcttcatct

SEQ ID NO: 21808 - DNA, 394 bp, Oryza sativa
  unsure (1)..(394): unsure at all n locations
agctngtcatttattatagcaaacaactccttatgactgcaaccaagtcttcgggccaataggtggccatactccccaagaaggtatgcactcacctgtaaaagtacagggtgacatgaacaaataaagcatgataaaaacaatagagaatagttgctaagaaaatggattcaattacaaacaaacaaatacagaaaaaggtccccgtttaatcaaagtcattgaatagtgtttatcataactaggcacattctttatttttcattgcaaggctagcacacagcactgcctggtgaaagtgtttgttaggtgtagagcagaattcataaaatcaaagtcacttagaaatactgaaaaattagacctcacagaatcatgatacaactgtatgagt

SEQ ID NO: 21809 - DNA, 430 bp, Oryza sativa
  unsure (1)..(430): unsure at all n locations
accttaaatactaagcttttatgctaggacttgcaaccaactacttcgaagattatttatgttagattcatctgttttcttatgcatactctgctatctactttgtcgtagtccgaatgtctgtagattgaaatcattctgtgctttccttattttctgtgctgagcagttttatcaagtactaagctgactgctgtgctcactgttcagtaagatctttggtaatgacaaatttactgtaaaaataccaagctattggacatatcataaaaatcgtattgtacattgcgatggtgtggtccctttgctttagtgagtattgaacaaatatattctttacatttctcggagttttgacagcctataagggtgtgttctgtactagcatngataccctttgttctgaaataccacaggcagatgatgtggt

SEQ ID NO: 21810 - DNA, 396 bp, Oryza sativa
gcttgatggaaccgagcacattgctggtgcgaaggtgatatacattatgcccttttcccttcttctgggacttgaaattgggcagaaaatgcaaattatgttcttgtttgatgtgtcaaaaaaacagattaactcatcaagtcatcgctcatttcagtaaaattttctgcaaatttctgctcttttcccttcttctcctggactagaaattgtgcagaaaaatacaaattctgtccttgttcgatttgtcagaaataacaaattggcagaatactccatcgtttcatcgtttatttcagcaaattttctgcaagttctgttcttgtttgatgtgttagaaataacaattttttttgttagataatgggttagaaataacaattgggcagcagaatg

SEQ ID NO: 21811 - DNA, 419 bp, Oryza sativa
tatgtatcttagaatgtgttcttagtcatttcccgggcttggtggttggtggagaccggcattgctagataggcgctgtactatcaagaggggtctatgaagcgagccttgggatgaactattggcatattagttcatatgcatgtaagtgcattttgtgggcttgtctaaccaagtgtgatgagtgttctcaagtcctaaaccaagagagaagtgggcatgtcccatacgagtgagtgacatcttgtacgtatgtccggtggatatcctttggagtgtgagccctttatccttgacttaagttgtgcttcttggatggatttatcatgggttggatggccctttgaataagctttccatagagtccaagaacgccaaattccgagacccgagtcaagagatatcaccgttgtactaac

SEQ ID NO: 21812 - DNA, 395 bp, Oryza sativa
ctcagctagcaacagatggcggagcgagtggttttttatcagcctcttatattatcggaggggccggggcgagggccatgcttcagaaagacgtgggatcacaaagaaaagtcttccattttcaggatgagaatatatatgagatgaacggaaactttgatgagttcaacagaacagcatggagaaaggagcgtccaaaatctgaatggcccatggcaagatctagcgaacaaataaaacaatggaagtgctacaaacaccgaaaaacgtagccgtaacccatcgtcactctcagcctcagtacaaacacgaaaaggacctgatgccaccagaggatcttttccatttgacccacagtactagtagatatcgtctataccctcaacggtcatgtg

SEQ ID NO: 21813 - DNA, 389 bp, Oryza sativa
agcctactgcacttacatggggtttatgttctccgtacaattctaacgctggcatggtgacactaataaaaacaccataaatttaagggattgatagttatgtcctcttcacttgcagaaaagtagattacatatttatttatttttaacaagcatcccttgttttttactcaacaattcccttcttgattttgtatataagtgacactaaccttctgaagaaatgatgcacaccaactgtgtatcgagtacattggtagctttctgaggttcactcacatatttaaggtctcatatgattgcagaaatggaccttcgatacaaggcatttcttgatgaatgggaaacaaatccaagtgtcaagtgtgttcttgtggaaagcagttcac

SEQ ID NO: 21814 - DNA, 389 bp, Oryza sativa
agcttcatgagttccaacacgcatgacatcttgctgtgcttcgacttgcatccatcatacaacggcatctggcaatcttccaccaacttactaaacttctcataatctctgtcgttgtcctctgcgtcttcaatgtcatgcaacattgtagatagacattgagtgtccaaatctatgggctctccacctaaaggagaaggtacgaacatgccttctcgagttgcggcggtgttctctacatcctgatccaacacttcttcagctgcgacatcaggcgcctcttgctctccatgctttgtccagcaagtatatttcttcatgaatccattcattatcaaatgagcatgcacttcatccttgtcttcgatcatctgttcattcttacagtc

SEQ ID NO: 21815 - DNA, 431 bp, Oryza sativa
tatcgtctgatatgtgccatcaacatcgtccttctgtctagcagccctcggcgccacagagctcatcagcccactgcacaaactccatggagggctgctcacgatccgtcatccgtgttaccacaagcccttcaatcgtgggaggggacggtggaagtggggaggtggtggtgattggtgaagagtgatgactcaaagctttaaagtaaatgaggatggcagcattcacagtgaatggaagtagttggaggcggaagtggcgatggtgatttgggagtagaggaggacaacgacggtccagacgtgtgagggtagatgagtatgcacggttatgggtaggctatgatagtttaaaagaaaatttcctaccatataaaacacgaaccatgagatgctgagcagcggtacatgatttgagcacagcaaactgg

SEQ ID NO: 21816 - DNA, 353 bp, Oryza sativa
tcagcttcaaaaacatatgttggcaagtctttcccatcatcatattctttgacaacactgagaaaagggtcattgtaattcttcatctgcattttgtgggaaaaccaaaatgatccggtaacaaatatgacataaaaaaaagtggtttacccatgcattaaatgaaacatcagacacttaagtgcagagcccagctagatgaattatatgaagcaagatttcacgtacaaatggattccaaaaagataactacacgacaagtacagtgacaaaaagaagatactggcatggacagtccaatttgtagaaacactttatcatacgttctatctatttctggtacagttgtcgta

SEQ ID NO: 21817 - DNA, 425 bp, Oryza sativa
  unsure (1)..(425): unsure at all n locations
tgagcgcnaatgggcaagcagagtggctatcttttctctttcttntggagaagatcggcagtccagcagcgctgctgaaatgcaaaccaaaggaagaacttgcatttatcagggcccttcgcgtgccagagtatgtcggcacaagcaaaagagtgctggccaaggaagaacgcccgatacgtcgattgcgttgagtagcactggtcacccgtccaacgccaggcgaggtgatcctcaacacccgatgagagctgggtaggaagcaccgcatcccagactaacaggaactgagagatgaccgggacagtgagggcgccacatatgtcaccaacccaagagttgttcgctaacccaacggcaaccgtgcgcgatccccgaaagcgtggaagcacggcgtggaggaagtcangagctatagaagctat

SEQ ID NO: 21818 - DNA, 390 bp, Oryza sativa
agcttctggacttggaataaactttaccaagcaatccataatccctaaaagagcaaggcgaagcacttcagcttaggaatagataatactctgcagatttatgataaaccttgaatggccttagggatacttaggtatatcaaacaatataaacgtaaaggaaagaatactcaaattggggtcctaaaagaaatagagaactgtagagaagatagctcaatactgacatccaaccgtgacaacccatttcccaaacagtagagccatcaggacctcataagatcggctccatgcactaccagcactttttccaacgataacatgggtcacattttcagtccactcgttgaccacagttgcatctgtccaagacgcaaactcttgcaagga

SEQ ID NO: 21819 - DNA, 447 bp, Oryza sativa
tcgtgcactaacaactgcacgtcattgtcatggaaaccataaatgctgacctttcttgttaagtttgcatttctggcttccagttgcagaaccctctaaggctctaccgttgaacttcaaggtgagcagaattcagatataaaataggtttgcataaatgttcttaatgtgattgaaggaatgaaattcagctgaaaatcacaaaagtttgtactcattcgtgagaaagaagtcgatcgaagccagacaagaagaccatggtgcacttggccaggtgaccaaaattatactgaacaaaaaggaaaatttacagacgtagctcaggtgaaacatccactgtacattgtaatcatacttaatttgtgtttatccatgagatagtcacataataatcggcaaatcaaagacaattatgagatagatagatagatagatagataacataat

SEQ ID NO: 21820 - DNA, 383 bp, Oryza sativa
agcttgagcaaaactcaaacttaacaatatgaactgactttgttatcatatcagcatgattatcatgagtgcttatcttgtatacatttagcttaccttgtgcgactacatcgcgaacataatggtacttgatatcaatatgctttgtcctctcatggaacatttgatctttagtgaggtatatggcactttgactctcacaaaacaggttaatgcaagaatcaactcctttttgtttgatcaagcaatgatgcgtcacgctcaaaagttaaaatgcttagtgggtcactcgaactatgctagaggcctcatactagatacttttttgaaatgcatgataatgctaaagaaaataaaatgaatttttttcaggggcatgcatg

SEQ ID NO: 21821 - DNA, 435 bp, Oryza sativa
tcggagatggttgtcggccacgagcggtagtgtgctatggtgggaggaatgtgtggaataagtctaggagaacctagcatctcttcgacaaggcctccacttcaagtagggaggcacaagaaggtacccaagttccctgacaagactacggtcttggggtccctgggcaccctgatcggcaaactggaggctacagtatccaagcacgccgctcaagccgccaaggagatgcacaccgatcgatggacgagcacttgcgatgtccttgtgtgtatcaagctcacacaccccgagatcaacctggaagaggtgctatccaagagcggtgcggagaagacacacgagggcataaaatactttcccgagtcagagctatctgtatgcggcgagtcagaacgagatcgagggtggcgcaacaagcgagctcgatggaca

SEQ ID NO: 21822 - DNA, 396 bp, Oryza sativa
gcagctttcttttctgtgacagtgcgtgttggtacctgcgtgcatggtaataagaagttatatccctctagcgcaggggaacagtgaaacataggcaaatcttcatttcaagatatttttgagataacataagtacgcttacttttgaatttcttctctctttttcctcagcttttcaagctcaacttctgcattgagagctccttggagttgaaggtatacagacaaatctttgtttacaacagctgttgcacagtcaggtggcgtttcatcattctctgtcaggatctgaatggtttcaaatatcagatcagttcttctgtcaagatctttcaactcatgcaggacttttggggaattttcaaacgcatggatggtaagaaacataagttttat

SEQ ID NO: 21823 - DNA, 390 bp, Oryza sativa
agcttgcccgcggtacaccgaacacgcacttatcgttgttcagttttatgcgggcggagcggagactctcaaaagtttccgctagatccgagagtaaggtctcttggttgcgcgtctttacaaccaagtcatcgacataagcctcaacattacgtcctatttggctacccaaagaaattcgagtagtgcgttgaaaagtaggacctgcattctttaacccgaagggcattgtcgtataacaataagttcctatgggggtaatgaatgcagttttttcctcatcctccctagccatgcgaatctgatggtaaccagagtatgcatctagaaaacacaaaaggtcgcaccccgctgtggagtcgacaatctgatctatgcgaggcagggggt

SEQ ID NO: 21824 - DNA, 458 bp, Oryza sativa
tactaagctagctatatagtttttctgaagctgcaagagagttgtatgatagtgtctcgccactacgggcgcctatctgaattctgaatgtagcctcagtacttttgtgtatgccactatatatttgtaacgtccagtcccaacaccgagctaaattagaggtcaaattctctctgcatttcgaggctataattcgaggccaagaattcggccgccttcaaatcgcatgggaaagtgagtcgagttttaatggcctcgtgcctttttggccgctgcccagcagcagcttctgctatcgctgtagcatttcaacgcctcacagccgcagatactacagagatttgttgtgttcgacttcgaccgaagcagattgatgggaaaagttccagggcctttgttccatgggctaattattagccctgaccttttagccctgaattatccttaagaatctaaat

SEQ ID NO: 21825 - DNA, 424 bp, Oryza sativa
actaactgcaggggatcgtcaatgcactgtgtttgtcctcatgcccgattaggccccatgcgtaatcaaatcttgacaccaggcggccaaaacagagcaagatctgtgggagtgaacacacattatggttggttcctggaggttgaagatcccttaaaaaacaatacatgttctggaatttttattcagtaatatgtgtgtcagcattaacaccttaatctattctccccccatacatgctactaaaaagtgcaattattagtggtgacatatcctgtatagatgtagaagtatatgcgatcacaatacccaagttaccaggcaataatgcctcagagctagggagaccaacctgcatgcactgctttgaattgtgtccaaacaacccacatacaaaagcaggcttctttcgccttttcattgg

SEQ ID NO: 21826 - DNA, 387 bp, Oryza sativa
agctttgcattttgactaaggtgatagctgtattctattacaatgtgcaattctcaaatgaactgacagacctgggtactgctggtttcaggcttattcctctgaactggtctatcggaatgccaggaattttagcggcaacaatggagggtatttgtcgcgttagtaatcacatctctcccaaatttctaactatttctcgggaactaattcaaggtcttattcgtctgtttgcgccacactctctcattcagattaagccacaaatttgttctgaatttcaccacatatttgctacatgcagtaaagccaacttggaaaatgaaggttggtgttgggcacttgtgcccaccacgaggcaaggatgtccttactgttgttgctata

SEQ ID NO: 21827 - DNA, 439 bp, Oryza sativa
  unsure (1)..(439): unsure at all n locations
gctagaaatatggngaggaatcaaggatgtgattcttagtgagaatttgatattntgaagttgtgtggaatatagagggattgaatttggaatttgattattgagacttgattttggaatagaaattttgaggagtcgatattggatatcaaggagggaacaaggagagatttaaattgagatctatggaatgacagactcacaaccaaagaatgaaattgttaacgacaaaatttggcatagtcatcggataatgcaagtcaataagagtaactgacactgttggttgagttcgattcggttggaacaggttgtttatgtaagccttatatttttttttggaattagctgtcgtattacgacatatttttaagatttgctttttctttctagaagataagatttcagccgatcgaatcgtgtcaagtcaaactaaact

SEQ ID NO: 21828 - DNA, 388 bp, Oryza sativa
  unsure (1)..(388): unsure at all n locations
agcttctggtgcttatgctgcttgcttcctgttttttttcgacaacaccaacttgagaagaaatgatgcttcttttgtcagcttggggaaatccgaatgagatcatgaatgggaataaacttatggctgattattgtggtattttgaaaatgtgactaccacttttggtgcatttttttatgtcaattgaatatgacaattaagaaaaaagtgtaatgctctgaacagatgctcgaagtgataggtgtgtttgtacagattgaaattggtttttgctgcttgaaatgtcatggtctgtacagttttagactgatatgcagtatgtcacttggaacaaatatatatgtacatncacttgcatactgtttcaccaggaaacttactggat

SEQ ID NO: 21829 - DNA, 391 bp, Oryza sativa
  unsure (1)..(391): unsure at all n locations
agcttaaaatatgtgcttctaagaaaactattctttaactacgttatataaactggcctatggagaggattaaacaaagttttcaggacagaggtttagccatctttaaaaaggcaagcttaacattttctgcattcatgataacatgaacttcagttctgcaacataaattggcttttaacttttgtgcatttatgacaactaaacgttagttgtgctatataaatttgtctaaggagattccataataaggattaaacaaaattttagtgatagaggtttggtcatctctgtaaaggaaagcttaaccttttgtgcattcatgataacctgaacttcaattctgcaacataaactggcttagatcattgccaattangaacttagcttg

SEQ ID NO: 21830 - DNA, 450 bp, Oryza sativa
ctaagctttatgatgatctgatgatataaagaattgttttgcatttagtggtgaaaatgtgagcaggctcttcattatgatttatcactggattgggaatttcaagaatctcatcctggaaaaaaatactgaaacttgagttgtgactgtaatgtagctatatgtcttgagttaaggagctttatggctactggaattttgattctgaggtacttggcactgccgcattatttttttaaagatgggattcccttatatggtactgaatagtgaataatgtccaaagggttcatatcatgaatctcccttgcattggttgatttctagtcccaagcatcgttttatagaactactcgaacactcgtcgctgttcagcaaattaattaatgctttgtgctgtctgtcgacctgtgccgtattcagtggacatcatcacaagcctgagaagca

SEQ ID NO: 21831 - DNA, 388 bp, Oryza sativa
agcttgtcatgatggcttgcgttctgagggattagtgcttctatctttatgatactctaatcttgtttatgtaaatcgtcaagttatcatatatgctttataatctttatcagtttcacaacctaacctgcaatcggttgatacttatctttggagagtagccgatagagttagcatatctaccatcttttagaagttttcatcatcttgcctagatctttatttattcttatgcttattgctgcatcggttgggttcgatctattaagtaatattcataactacaatatctagcttgttttatgatcatcaatagagatagtatcggggttttagccgattttacctgatttagctactttattccctatatgcttacctgatatgc

SEQ ID NO: 21832 - DNA, 311 bp, Oryza sativa
tttgacggtatgtttgttttctttagtagcctgcaactactacccaaataaatatgttctgcgaatactgagaaaccggtgaaaaatcattcctatttctccatttcactctggaaacttcaaggttggacagaccggctggttcagatgatacgcttgctcgctgcacacatcacatagagcaatattcagtatcttcggttatgctggcccccagaatagtggtctatgtcgtgtacatcttagtgttccacgataatggaataaaagttcatagcttcttcatgataatatcctcaatacttattatg

SEQ ID NO: 21833 - DNA, 389 bp, Oryza sativa
agctttctagaccatgtgcatagtatcttgtgaatatttctagggaagcctttgaaaagctatttgaggatttctagttcggatttgaatacaacattgatatttgaactcaacaaattaaggggattcgaaggaaaggaactcaaggaatttgttagaatttgataatgagaaattcaagaggatttgaaatacagaaagtaattttggatcggggtttttgtggtcgagggagagattcaattgagacctttggcacctatgtccttaatcacacacaatatttcactaatgtggtaatgggcaattgcatccattcccccactttcaatcccaactgttgttttacccccactttctatggtttgcaaatttgcccccactttttt

SEQ ID NO: 21834 - DNA, 451 bp, Oryza sativa
tagggtccagctacccctactagtgtaggacagttgaatttcttcgttttctgccgccacatgagccatgaacgaccactcgaagttctcagataacacgcaagccaaattaatttgaaacctctgagagcaaatataatagtaggctataaactgactaaatgctgaagtggaagaaaaaagagatgagagagagaagaagtgggctgtaaacttacagtcggcttatacacaagaaccaagaaactgtgtgagagagacaagtgagtcatatattaattgcaaagagctaactaaattatatgggtgagctgaaagaaggctacaaagaaccttatacccaacaagtcggctgtattattagtcttgctcttaggagcatccagaacacggaatcgaatgtaatcactttatcgccagattagtagatcgaccatgcatgcctatgatg

SEQ ID NO: 21835 - DNA, 384 bp, Oryza sativa
agcttagaagagtattggaacacttatttttattcaagaaggtcaaggaaaaactacctcagtagaggggaagtaataaccagctcaatcttttgtgcaagtccactttttttcacgtgctcacgcaggcagtcaacctacaaatgtacacaaacaaactaataatggaacttgcaattatttttttttgcgctgttttcctgcaggtaggggctaggagatatatatacactaacataacattttgcatctgatatgcctggagtaccagacatttctactttgtataagaacatgaataccattcatgactaaaaatataaccttccatgcttcatccatccacatggaagtttcacacaaaatcagtaaacgcaatacagt

SEQ ID NO: 21836 - DNA, 434 bp, Oryza sativa
  unsure (1)..(434): unsure at all n locations
tctatagaagatcctacacatattattacatggattgtatttactacagctnttagagatgcttttatacctacagctgtgattaggatgaaaaagaatgaatttcgaagattgaggcaaggctttatgacagtacaagaatatttgaataaatttacacaacttgctcgatatgctgcctcggatattcaagatgaaaaagagaagattgaaagatttatagaaggtctacgtgatgaactttgatgaccaatgattagtcaagatcatgaaaattttcaaagcctagtcaataaagtggttaggctagaaaatgatcgtagaatggtggaaggactccgtaagaaaagaatgaatttacaatgacaattaccaactagaagttcactaaaagttcggaggccttatccatttaagccatctctacccaatgc

SEQ ID NO: 21837 - DNA, 393 bp, Oryza sativa
agcttgtaaaggagaaagagatgtactcttttatacagcacgtaccatcattggtttgctgccattgcttctaatgtatcgatacaggttatatgaggtgtggggtccactggtcatttagtcatgctaattaagattaaggagggagatcaacgcgtagattgttaatttgtgctgaaatttgggaggaattacaggaggtagttgctgtcgtcgctgcctatataaggcacgcggaagattaggaggcacccatctattattttcattcatcccatctttcttattgctggtagattaggaaatcagaagatcgaagcgtgccggtgatagcagaaccggtgccgctgcggagaaaattaaacaccgcagccggcgtccttcatcaagtcg

SEQ ID NO: 21838 - DNA, 455 bp, Oryza sativa
  unsure (1)..(455): unsure at all n locations
ntgtacatggctactcgtgcacaaagcgcaccttccttatctgtcccggtagctagaccaaaaatgctagcattgtgaacgatgttgccaccggctgtcgaggccatgtgcatgccatggccatgcacatccctaggagatagaatttcattcttgctcatgctatctagattatcgtcatcgatgtaccaccgtgcaccgataagttttcggttgcaacttttgccctcaaacgaggggccgacttggcaaattccttttcatttggatggaggagggccatatccatcatcagcgaagctgggtgactcgggcgtaatacctgcaagataatagaagatatgactatatacccttgagaatttggtcaatctcttgtgtgcccctgaattttacctcatcccttacatatccctaagattgtcatttgattgctcattctgttagttgaccat

SEQ ID NO: 21839 - DNA, 387 bp, Oryza sativa
agcttatttaccatataaactaatgtcttgtgtttcattcatctgcctgagacaagtctttatctatgcaattgcaaatgctaaccatgcttttgttttgctgatcaaccacccaaacttttgtagattaaagatgccaagcacttatagggattctcgattcagctagttgttcttgcaacctggaagcaagcaatttacatctgcacttcttatgcatcttctgccacaagagagaatccttcccatgatgtcaccgcgaagggttttggctcaaatgctccccatttgcttgcaaactctcaactgttatatgatacatgcatggagatagagagtcagtttttggttcaaatggaatatgctgaagaacttgccaacactata

SEQ ID NO: 21840 - DNA, 451 bp, Oryza sativa
  unsure (1)..(451): unsure at all n locations
gctaagcttgcagatattggagctgaggaggtgtttcttcagtgaacgtgcattggctggtgctgttttacaacttanatcactgagatacctatgggtgcaaggatacaaggcatctcccaatggcactgatctaatggcaatggtgcgacccttctggaacattgagattattgccccgaatcaagatgaagtttgcccggacggtcatgcacagattcttgcatattactcacttgcaggaatgagatcagattaccctcactcagtaattcccctctatccttcggtttgagtgtatatgtctgataccaggttgcgaaactcacactctagtataggccgatattgttccaaattctacagtttgctgctcttattctgtttagcaatgagcacagaacaaatgacaaataaaagcaggatagctgttagttcgaggaacatatta

SEQ ID NO: 21841 - DNA, 380 bp, Oryza sativa
  unsure (1)..(380): unsure at all n locations
agctggaaaatttaccttctcttttcttataagattaantggaccatcaaccacttatactactatgattaacacccgggtggcatgattaaatacttagcactctctttcttaagatggcatcgttgattcttatataacgtttaactatccgttattttcaagaaaatactccatccgtctaaattatagtactaaaattaatgtgtcgtagatagataaagtattatataagtgtcattttatatgtgaaaacttgtttaaccatcataaaaatctttaagaatgacagaaacaatcaaacgttatataaaaaatcaacaaagaaatctattaaaaatattaaaaaatagagatagtacaacattacaataagttta

SEQ ID NO: 21842 - DNA, 447 bp, Oryza sativa
  unsure (1)..(447): unsure at all n locations
tcttacaagtgctatcaaattaaatgagacccatcatgtgtagataattctattgcacaggcgcatttacatgttcaaactatgtggattctcttattatgctaataatgaagaaacaaataacatggtatgctcttttcataagctagagaatctaacctagtaaaaaaagtgaactgccattntgtttcaaacagtactaccatacaaaggtaatcattgtcttcataccccccccattctcaggtgggttgctccagatcgccctctgttctgcaaaaccactaataacggcagaccgttccttgtcgcctagagaattggccacccgtttataatattcttcactattgaaatcgagtaatacttttaccaaatttgcactctggttgtcaactacagtctgcccatcaatgcttgtattactggtagcaacattgcttattg

SEQ ID NO: 21843 - DNA, 391 bp, Oryza sativa
  unsure (1)..(391): unsure at all n locations
gcttttctgtcctggatcggaaactggactctctagactttgtngatattcaacgcaaggcgcctgttgctatctgcgactgcgagagtggcaaaactggcgaagcatgtgcgaaacacccacaccaaatcagccgaaagaaacagtgcgcctaacgacctaagcggagcctttgcctctagttntcaccatctccactgaccagtgctatcaggtacagtactaggtaatttagacacatggattatcctactagctactgatcactagtcttgtccactgtggtacaatgatgaacttgcttggtgtcttgtgacagctatttcaattcctctctcctcttcgatctaggagtatatgcatgttgttcagagctgcggctaatccgatc

SEQ ID NO: 21844 - DNA, 446 bp, Oryza sativa
  unsure (1)..(446): unsure at all n locations
gttggcatcagtgagaagtccaaccccgtgtatattcaacagtggactgagaggtactcggagggatagcatcacttgacgacatgagccagctccaagaagagacaacaacgcatgctacgagagagaaaaggcattagaagctgtgcttatggagaatgaacataaggaagcagaactccaaaggagaattgaggagtcgaagcataaggaagccttcttggaaagtgaacttgcaaacatgtgggttctagtggcaaaactgaaaaagtctcaaggccatgatcttgaggattttgacaccaaatatttnggcttcgaacatcataactcttggctgattaattaatactagtgcgactggcttgggtacgtctgtattgtagataatagatttataccacgtttcctggttgcagcgctgattatgttcccatcttgtttat

SEQ ID NO: 21845 - DNA, 389 bp, Oryza sativa
ctgcagctggatagcaggatggatctcattttttacatgattcccctgtaaaagttgccactccttttgatattcatcctgctggagggcacatttcaggagatagaatatctgagcaagatggcctgatgggaacaaagaagtttaatggttcttcagatgatatagattgtaacgagaaaacgaatgatgcatctgttggttcctttggaccacatggtcatggtgcagttttaacttgtggaccttctcaatcagttgcttcttctgcaaatggttctgatcctcataagatgcaaaggtcaggccgtgcatcaatacctcaatcagacatggataaatcatctctgggtgctcatcaaagtctttcgagtcaacctccaggaatc

SEQ ID NO: 21846 - DNA, 464 bp, Oryza sativa
ctaagcttgcgcgcagggaggtaatcatcgccatcatttcggggtatttttgtcttgaagtggttgtatgtctcctgatctgctctgctatcttgctttggtcaggagcaatgccagagcatgcttctatcggcctatagggagatggtaagggcgtaaggctgtgcttggtcgaaactctcattgactgttcaatccaaagattggataccgcaaagcatggccggttcatgtgatagttcttcttgtttcacctgttaacaggtccttgctacggccgagttggttaaagcttctcactctattgcgtgtttttccaaagtagccgcgaatagtccgttgatacaggttactgagcgccaagatgatatgaatgattctgtggacggaggaggatcccctgtattcaaatggttctccgtattagaattcagtgggttaattcattttgttcaatgcaaaac

SEQ ID NO: 21847 - DNA, 395 bp, Oryza sativa
cagcttcctacgcgcaggttcatttcgcagttcttttacatatggctgaagtaaccccatactttgagaagcatttagcgaaggtccgacaggacaatattggtcgatcagatatttggatcaacagagaacatggtgctcgcttcaacgaatggttcaaggatcgtgtagcacagtcgaccgatggcccaagtgagatattacaaaggttggcaaggggtccatcttgggatgttgacacatggcaagggtacgatatcaatggatacacattttacaccgtcacacaagatgagaaaagcacagtgcaaaacagtggagtccgtatagatgcatatcaggatcaagctggatcgagcacatactttggccgcatagagcagatatgggagctg

SEQ ID NO: 21848 - DNA, 458 bp, Oryza sativa
tgtcattgaggtgacacatcagcccacacatgttatcgtcgttgagcttgccacccaagcgacacggcaactttgacttcagtgcgatgctacccaaatgccaaaaaaatgaacaaacataatcgatacccacgaaggacattggcccatactaccaaggaatcacttcctacacacagctagcatcaacaaccatataaagtgattgcagtgtgtcatcatttttaagcttcgtcgcaccccagcagctaagcagctctgactctacccagcagtaaccaaataagaatgatgaacacccgtcgtagagcaaggaacgaaaccaaggtagcgaaggcctcgtcaaacaccctatgtttgtagagcttcagaggcattgtaggagtccaccattagcgaccgttgcatgcgaaaggttcttggtgctatgagaggtcaacgctagaacgacgcttgca

SEQ ID NO: 21849 - DNA, 342 bp, Oryza sativa
  unsure (1)..(342): unsure at all n locations
gcgtcgcatcgagtccggcgctggcgccgtcacgtcgcatcgagtccgcccgggccaccgtcgcgtcgcatcgaatccgctgctgccgccgttgcatcgcatcgagtccgccgcggccgccgccgcgtcgcatcgagtccgctgcggcagccatcgcgtcgagcttccgacgaatcgccgccgtaaccatcgtcaagctcccgatgaatggccgttgcaaccatcgccggccttaccctcttcccctctcttctctttgccgcatccccgtgccggcgtcgcatcaagttcgccgcggccaccgtcacatcgagcttncgacaaatcaccgccgcaaccatc

SEQ ID NO: 21850 - DNA, 274 bp, Oryza sativa
aagctaggcacacactcaagacactcgatgaaaggctggcactccctttccctaggatggaaccctccatctccacctcatgaaagagtacgccaaaaatatctggggcctcgaaacatactctatccgcgttaaaaaatagcaacttaacaatgaactagaagtagcccaccacgaatatggacacattatggctaatcgaggactagctagctataatgcgcctatattcaatgactacaacacaacgcagtactgcgaatctggacataca

SEQ ID NO: 21851 - DNA, 400 bp, Oryza sativa
  unsure (1)..(400): unsure at all n locations
agcttgaatcaaagtgggaaagaccgtacctcattttttcaagtccaggatgggatcttttcgcctaacgacactcgaaggcgaggagttcgaccattcctggaacgccgcctctctcaagcgcttctatgtctaaaatggggggcacccaaatcgccaacttgtaaaaatatacataccgccatgtaagcccttcggcactatgtaagcttttcggcccggaaanacatgagaaccaaaaagagaaaaaaaaactggatgtagggctattatccaccatggaggcccgaaccagtataaaatctctgtgtcctccgccttctttttatttttcgtgtgattgataatttgtggaaaaaccccaaggcaaacgcctgatcagcgaanaaggccagggggg

SEQ ID NO: 21852 - DNA, 458 bp, Oryza sativa
  unsure (1)..(458): unsure at all n locations
tgtcatgttgtgtgaatgcttgcgtgtgagtgatgcacttcattctatgaaggtgtatgtaggccgcgtgagccgtatggagggcgaagcccctgggtctgcggtgtatatggcgtaaccaggaccgcgtgagccatacaagggtgtagcccccgggcatgcggtgtatatggcatatccaggttgggtgtaacctatgccgcatgagtcatacaagagacaagcccctggccatgcagagtagatggcgttgccgaagagggtgtagccagggccgcatgagccgtgcaagggtaaagtccccaggcaggcagtgtacatggcgtagccgggtaggttttagccaggaccacgtgaaccatacaagggcatgcagtgtatacggcgtanctgggtatggcatatccggngcagcgtgagccatataatggcgaagcccccacgcatgcggtgtatat

SEQ ID NO: 21853 - DNA, 387 bp, Oryza sativa
agcttgacccgtgcttttgcaatgatgtatgttatcttgctttcccccaccatgttctccatgcctttcctacagggccatccgaccattgccctcttgtactgtccaacccgcaaggcccacatcgttcgaggaccttcaagtttgaaaacttttggacacgggtcccggggttcaaggacaaagtcaaggacatttggagccaaccttcttcgcacactgagcctatgcaccacctgaatcaaaagctgcaacgtacggcggtcggccttagagattggacaaaaggcatctgctcagaggctaaattgcaattccatatggcactcaatgtcatccaaagactcgacgtggcacaagagcacagagaactctcccccccggaaa

SEQ ID NO: 21854 - DNA, 443 bp, Oryza sativa
  unsure (1)..(443): unsure at all n locations
cgccatgctaatagaatcagcattgtctaacattttgttattgctttacaatgatggctattgtcttcctgagttgcattccagggggagctctgtacttggctnttcttggtctctccttttgtttttgagggccacaaatgagtgagcatcaatattttgtgctttgtgatagaccatatgaattgaagaacagttgtagtaaatttgttcaagtatgctaaacttcctaatggcaatgaatttctgttaatgtttgatcacctgtgtctaaattgtcaatgcctttattgaactatgcctgaaatgtctgaaagcttgcacataaattacaatgttatggtgtacatataactctgctaattttgtttgctgaatatcacaatataccataactgataataacttgcatctattgaagaatgtcttattcaatactttga

SEQ ID NO: 21855 - DNA, 387 bp, Oryza sativa
  unsure (1)..(387): unsure at all n locations
agcttctgaagatgatctntgaaagtgctcttgttgtgatgtcttcatattagttctagcatatatagtcgatagaagtgatcatgaagcctaatttgatatagtacagaaaacaaccaagaaactcttcctttgtttttttttgttctgattgcctttttggtaagtaataaaacccataagcaatagcaagaaattgcaaatatgcaaatatgaaaagcttaaggtggtgttatggcattattaggataagccctaaatgctgaaacttcagagaaaccaatatgtgcaaataaagctagcattataacatagtggagactggtggaagtctcgtaacatgaccagaagtataacatagtggagactggtggaagtccgtaacac

SEQ ID NO: 21856 - DNA, 407 bp, Oryza sativa
  unsure (1)..(407): unsure at all n locations
ttagaccgacctgaggcatgcaagcttaaggatgtgcagtgcgtctttggattttggccgccctaagtcgattcatatcgaggctgggagagagggcgctgcccctatttaagctcctcagacgccctgtgccatttgtatggatgaaggaagcggagttgcctaacccctgtaatatcgaacacctccgccgtttctatccatagggtcgtgcattttttgctttcttggagctcggacctacccccgcacatccctcggcctgtgcgggcttggacgggggatgccacctgttaaatttgttgtatctagtcctttcctcagtaataaattttcctgcttaagcggaagccgntgccgccctttcttactccttcctatggctcggcctggctcaaaggacgatt

SEQ ID NO: 21857 - DNA, 443 bp, Oryza sativa
  unsure (1)..(443): unsure at all n locations
ntactaagaaataaagataatcgctccatgatcttatgtttgtcgagggctgataggtctgctctctttctcacactgaaactaaaaaaaatcgcgttgttcctattttctgaatgtatgtgtccactatattatcgacaaagtagactatttgattacctggaacccaaatcacaaatactggtatgcaatctacatttggccataggttcagttcttgcagttactaatttactccgttgcaactgaaacactcacagatttttagttgattagcatttagtcgtaaacttagaggtataattgctcagctgctaagatctgttttatagatcagttaataattaatatcttttggattcagcagtagtgccagaccgattggcatgacatgtttgcctccattcagtaaaattcatctgaattctaagtgtttcaactgt

SEQ ID NO: 21858 - DNA, 389 bp, Oryza sativa
agcttcatgatgctgaaatctggcttgttgtatcgcatgcgactgaggaggagcgcatgcctacctggaagggctgtagcatctcccactttggggagcaaagaccacctgaagatataatacaacattctatagtatggacgcaacccacgagtagtccccaaacaatccttgggagcatccttctcatacaagaaagtagtgctggtcgatgacagagcatcctctacaaagatatgtggacgactcaggtcatcatcatctaaccccaaagctgcagcaaactgtgccatagagaccctatactgctgcccctgaatggtccacttcacaaaatcaagccccttcttggtggtgccaaagaaagcagtggagtagaactgtccaat

SEQ ID NO: 21859 - DNA, 411 bp, Oryza sativa
  unsure (1)..(411): unsure at all n locations
tctctntagtcgtgtactgcatatgtcttgagatatgtactttgcatgcaatcagagcagaacaaccatttatatgggccgcagaataatgtatgataaataaaacctttataacgaactatagaaatatagaattatgctttaaaatctaaaattttggctgtgtttgattagtcaatgatgaaaattgatattcgcgcttgtgctactttttcgcgctttcgatctccttgcgagatactcctatatcgttgcatagtcttttggaggaatttcatattgttgcacattccaacattcgctgcattttatatgcatcttttcttaaacattcgtttttgtttaatgggccaatgagaagtactgccgaatttgttactcaaccatagcctaacccggtcttcaccttac

SEQ ID NO: 21860 - DNA, 391 bp, Oryza sativa
agcttgtcgcacgaaaattactactttctcttccagtcggcaaccctgatcctaccgagttcatcattggtgaaaccaataggattcccttcagattggccaacccagatctaagtcactggaaaaacaccttcaaatcctggccatctctcgagaaaactccacccgagaaaagttggatcacatggttcaagcgcatgtcggctagcaaaagagttcattgggacgaaatcggaatcggccaagcacttgacctaaccatagccaactcacctaaggacgagaccttaatggcagccgcttcttatttttggtccaacaccattaatgccttcttgttcaatcaatggccgatgaccccaactctagtagacatcaccatgatcaccgg

SEQ ID NO: 21861 - DNA, 474 bp, Oryza sativa
  unsure (1)..(474): unsure at all n locations
ggacctataaaactcaagctgttgagcgtctngcacacaaaagcnaggcttgtttatgtaccgatctatggcaaggtaaggtgaaggacagagagtgagagagattctgtgaaatgacataagatactagcaagggaagagaaatgttgccaatctgaatatgctaaaatgaacatcaccataaaccaatagtgaaggagaaaaaggtggtgatgataaatggggtgcgagaaacaatggtagagagagtgtgtgacaatgatggtcaaaatagggaagagggatgatgtggcagctgatgaggggaaatggcatggcaactaattgacgtgtgtaaagagggggatacgacattagccgaagaatctcctttctnccttcatttccgtgtctctagttgtcgatggggaaggagggttgaaaaagcagccgtgttggtcccatggtcgggttaatcccgatgttcctcaccat

SEQ ID NO: 21862 - DNA, 383 bp, Oryza sativa
agcttctagccgatgtgagatatcttcttgtgttcttttcacatcgtcagatagaggagctagagctttgcttgaagtatcttcttctgcctcatcaaggtaatctttgatgtcaaaagagaagagatcggctagaacctgcaggtatagtttcaagaagtttgagagctaagtcaatatagccgatctaagttcttgaatcaaaaggaaacttactgggatagtaggagcagctggttgttcttcctcctcgatgtgatgactccccacagccgacggagtctagttacttgacgattgctgtacaggaggggaaagaggaggaggaggctgtataatagacaagtgttatagagagtcggttgagattgattaagtaaaag

SEQ ID NO: 21863 - DNA, 436 bp, Oryza sativa
  unsure (1)..(436): unsure at all n locations
atctgaattataaaaggctatattgtattatttgttctctagaattaggaagagagtagagtagaagaagtcggtggaattccggagctgtcggtaatcctctcctgtttattttattttgtttattactctgatatcaatagaattatcttcctgagtaatttagatttatcttgtgagaattacttcttggttagttcctaatcagcatatgggattattgttcactataatcaactaaaatatagtgattgcttagtgagttataaacactaaagtagatattaattgcttagacgtggtgtttaggtaattgttatcctgtaattgctgcgtatcccacagtatgtttgaagtgggtgtagaggtggtgacatccctcaagagcactctaggngctgtttggttgcctggatctaccctggctcgcatggga

SEQ ID NO: 21864 - DNA, 387 bp, Oryza sativa
agcttcactgacaaactcaaattgcacattttgaacctccgaagcaacaacaactacacgaacaacaaaataaggctaaaactcttaacaacgaaacgataacagcacataaaaacaacatatgatggttcttttaagttataacatcaacttgtagctcatagaaccgatatatgactattcgaaatttaactgcatttcaaatagagattttttaattgtttaatgcaacatcgctcgagaagagaaatgatcgagcgactggcagctgagaccccacaggacaaacggctatttcaccgtggaccgggttcaccgagacagtctaccggaaaagtaaagcgagacccacttgtaagtcttggagaagagaccgacaagtggatc

SEQ ID NO: 21865 - DNA, 420 bp, Oryza sativa
tgacatacaggtatcacaaatggtcagtgtgttctgtgtccacttattcaccatgagtgctgtcatgtctaaagagatctccttgacccacagggtgccctatccgcatattgactaattcaaagatcttctggagtggaacactgctatgctataatgtacctagatgacgttatatgaagtgacaatgtaaaaaaatattgtaatatatatattttggcaacacttttgagttatgcaatatatgtagatttctcagtaccaaatgcttgataatcttccaatatatgttcattaaaatctacctgccagaatttctattaaataatttaaaagtaatttaccgccaaattgtaattaaatttcaatattctctacctatcttcgcaagcggaaatttttatttctttgcaagcggac

SEQ ID NO: 21866 - DNA, 392 bp, Oryza sativa
agcttggccgaagccatgttgctaatatttctattgttgttgaagctctctgcaacattgcccgttcttcaaatgactggcaatacatggctgttgattgtttactttggttggtgcaggattcaaatacatgtcataaggtaggacattcttaaatacatcacatgcatcacttaaagggactctacagcacgaccaatttttttttttgtcttgtcttaataacttggggtctactcagttaattttttccagattatagctattttttaattagggttgcttaagatctacgccagtaaaaaatgcaaaaactatatggaacatatactctgatgttaaattttagtttctgtcaatggactaatggaggcacacacactgtgttttaa

SEQ ID NO: 21867 - DNA, 404 bp, Oryza sativa
  unsure (1)..(404): unsure at all n locations
agagagagcaaacatttcttcacgaaaaatgattcacggcagcattcgtccttccgacttgtgctctggcggtttcactgattctctccgagattgatgcggcgaaactttcgtactacattacggatatgtcattgttatctggtagttactgatagttactacattacggccgtgtctagttcactctcaactatccaaaacttctaagtttctatcacatcacatctaaaatttttctacacacataaacttctaactttttttctaaactttcaactttcctccaacttcaactttttttcaggaactaaacacagtctacacgtaatagtagtaactaattatggccccctttgaatcataggatttatataggaatntcataggattcaaatcctata

SEQ ID NO: 21868 - DNA, 338 bp, Oryza sativa
ttttcatactatagacgtgctctccttgagaaatgggaacatctaaaacaaggtgacaaaactgttagggagtacttttatgattttaaaatttgcatcacttatagtggtttacaagaatctaatgagaacacaatgactagatttttcagagggcttaatttcaatattcaggctgggcttgttaatgtgacatataatcatataggccaattgttcatgcttgcttgcattgttgagcgcaaaattttggagaatccaatggagcaacaagatatgcttgtgcctcctatcactgatgttttgcacgaagttcagaaaagtctccacaatgagaa

SEQ ID NO: 21869 - DNA, 391 bp, Oryza sativa
agctgcccgctattctatatctttatatcgtctgtccgtctatgtaaccatgaaggacgtgtgatttagattattctcgccttaagtgtattctgctatgtatttccatgcttaagatgaaagtgtgaatctagggcacatcttgggaagtagattcacatgagtttgtgttacgaatatttgagatgttgtaaatctttagccattttagtcaagtcttctgaatgtgtaacacatctggtcgccgccttcgagtggtttgacgggcacatctcaagctgaagttgactggcaggctaaaagcccagcaatgtctccaatattcttctctcgaggcgtcaaatgtttcattatgtttctttgatgacttgaattattcacttcatctctc

SEQ ID NO: 21870 - DNA, 435 bp, Oryza sativa
  unsure (1)..(435): unsure at all n locations
ctaagctgtangacgacttgatcatcctgaaggcattcatttattctagcttcntcatcttgatgccatgccgagaaaacagaaatttttcttgacaattaattaagctcttgttagatgcctcggcttgcccattagcttgcgcgtaatatggtgaagaattcaacaatttgatacccatgctatatgcaaactggacaaattcatcatatacaaaaattgatccctgatcggttgtgatagtctgaggaatcccaaatccatagatgatatattcctttacgaactgtattgcatccccagaatcaacttttttcaatggaactgcctgcacccacttggtaaaataatcggtttccactaatataaacttatgtcccttgctcgaaggtggattaatctgaccgatcatatcaattccccatgctctgaatg

SEQ ID NO: 21871 - DNA, 392 bp, Oryza sativa
agcttggatcgacatctcgatggattttattgattttttgtccaaatctgatgggtacactgttatacttgttgtggtggatcgtttcactaaatttgctagtttcattcctttgagacacccttatactgcttcacaagtagcggtcacagtggataaatttgtgtttaagacccatggcttaccacagtcaattgtgtcggatcatgacaaagtgttcactagtcgtttttggggtgatttgtttaaagtatggaacactcaattgaacatgagtacggcatatcatcctcaaaccgacgggcaaaccgaaagagtgaatcagtgtctcgagatgtatttgaggtgcatgattcaagctactcccaccaaatggaacagttggctgcatt

SEQ ID NO: 21872 - DNA, 427 bp, Oryza sativa
ctatggcaaccctaggcaatggtagtatattaatccaacagcccctagtgtcactttctcattggtgccatctattatgtccacggctctacgctgatggcacacagtaagccgtatttgcaattttgcatattggttgaattaaaggtatcggccggtgaatacaatggtgcatttatctaaaacgctcgtgctgacgcgagttcctctaaacttttactctacttaagtatatatattaccttcatttaaaaatataataatttttagctatatatataaacatatacccttattcagatatagagctacaaaatattatatattttcaaacgggtcaccaggatcaactcgtaactaaaactctattaacatattgacgcataatccttttacgcggtcgcgttaagatcaacatcgtagtgct

SEQ ID NO: 21873 - DNA, 406 bp, Oryza sativa
gcgtgcgcatgcgaacacgcagctgaaggatacggccttttttttttcttatctccgccctctctgttccttgtgcatatcagtacgtgagcttggagccttggagcatgtctagtactactaggatttcgcttttgactcccgtctcccgcggacaggatcgcttgaccaacgcctgatgatgataattaagacctgcctaagcaacacctgggacatccgtattatgatattatctgcactgcgggttacttctaaatgatcaccgcaccccctcgtcggtaccaggctgcctcgtgcatgctcatcacaaaaaggcgtgctttgacgtccctcgcgagacacatcgcatgcagctgcggccagtctcagtctgccatgtgcccatgttcttcctcgaatgcgt

SEQ ID NO: 21874 - DNA, 458 bp, Oryza sativa
  unsure (1)..(458): unsure at all n locations
ttggaagccgtctctgacaacctacatcgacacatattccatgttctacacatggatagtccacatcctctgcgcaactacaggaggaagtaccacaaggtgcagcgtctacatcaactggttagttcgcgcatcgcccaaagttctgtcccggaggaagattggtctcttgacacatccatcctcatcggcaaggtgtgcaaatatccgagcatcttggaaccaccctatgacttgttccctgatgaatgggcacatgagccaaccaagatcaaggagaaagtcaggcgcgccatcatgaaggagtattggaagcggcgttatggggagcacattctccttccctgaccaacgatctccttcgactacaacacatacgccccttgccagcagagcacatgggagccatgcctccacttgtccgcggtatgaggatcgtncgactacaacaacaacag

SEQ ID NO: 21875 - DNA, 387 bp, Oryza sativa
agcttgccgccgcctctctcaatctttttttttggcctgacgttcttcggccccctcaacttctgcaaaatcttgcccttgcgaccgatcctcacggcgaggaggtgggtgtccgagccgtacggcgactccgtcttctcacggtgcagcgccacccagtagcctccctttccgtcgggcctcacgttgtccgggtagcccggcagctcggcgaatggctccgacgtaccggccttggggccatcgatccagtgcctcaccagcttgcacggccccgtaagcgccaccacgaggtgactccgatcggcgctaagggcgaggccgttggggtacgtcattccggactggagcacgtcgaggtagcccgtcgtcgcgtcgtacttcatc

SEQ ID NO: 21876 - DNA, 425 bp, Oryza sativa
  unsure (1)..(425): unsure at all n locations
tcaagtgttctgcttaattacaatgtcccaactatactgttcttgacgtnccgagtttggtcttgcccgaagagcctatcaaggccaaagtccccaatcttggggttcaagtctgcatctagcaagacgttgcttgccttcatgtcgcggtgaacaatcttcttctgggagtcttgatgaagatactgcaatccacgagcgacgccttctatgatcctaaatcgtgttgcccaatctagttgtcttcgttgctccacgtctaattagccccaaatgaagacatcattgtaattgttgcacaccatcacatgataaagaagtgcatgaccatatatactgaaaggaggtgttaatattaccgaaaagaaatgtgtcgagacttttattgtgcatatactcatagacaagcaacctctctccatctt

SEQ ID NO: 21877 - DNA, 392 bp, Oryza sativa
caagctttaaaagtcactaaagcatttttatttatacatttgttggaccgaaaagcaagatgttttgagatcccatgccgaacagcgaattgccatttgctagattacaaaccacgtagaatgggaaattgaatatgcaaaaagtaggtacccccaagttcagtgagatcaatgtagacatcatacatatgactattattccttctctagaacagtcttttcttaaattgctatatccatcaataaaaatcaaagaagggtaactctgcataagatattgataatgcaaggaggtcaaaatatccaactaccatcgcacaaaaaaaatgcatatgcactactgacagctcagttacaggttctatataagttaaaatacataaatacacatt

SEQ ID NO: 21878 - DNA, 452 bp, Oryza sativa
  unsure (1)..(452): unsure at all n locations
tcatcgagaatntttatattaaaaggatctaatattgtttattatgcactcatgattagtgtcctgctcagtgcatgaaatcatgtgtgcatgacctcttgaaaagtcaaaaagatgcaacttgacactagagaataatgtcattgagttcatcttgcaaattaatatatttcatcatttgtactagtataatataagaagaaaaaattttagtcaaaacctttcattccgaatatgtttatctcttacccacaaacatatccaaaatgttatttgtgcagcctacatactctagaggatatgtttagtcaaagatggtttgcccgttggactgcagatattctacagtggtactttctttgacaggagggagcatatgtgctgaaattcttgtaaaataattgacaagaattatagaagttgtcttatcttcctaagaattgaatgtgaat

SEQ ID NO: 21879 - DNA, 389 bp, Oryza sativa
  unsure (1)..(389): unsure at all n locations
agctntcatgtcggctgagaatatggtatatttggatattggnccacgagatagacctaggccgacatttatcagtaaaaatttatcatctgaatttaaaaccaagttaattgaattattgaaggaacatagagattgctttgcttgggaatattttgagatatcaggactcagccgatcgattgttgaacatcagttacctatcaagccaggatattggccacacaaacaaccacctagaagatgtaaagccgatatgtatgatgcaattaaagctgaaattacacgattatataatgttggttctattcgtccatgccgatatgttgagtaggtttctaatatagttctagttatcaagaaaaatggcaaacttatggtttgtattg

SEQ ID NO: 21880 - DNA, 436 bp, Oryza sativa
  unsure (1)..(436): unsure at all n locations
tggatacatacggtatgttcatctgttagagccgttgtttgctcccaaatttagcacctatggatgaaatatgggaaaattgtcaaagtttggaaagcgtcgggtttccttcacagggccggtcataccacaggtatgtgggtggtttgaccggntagtagggccggtctgaccgcagtcagggtccgagcccgaatttggtttcatcgggtctcggtttccttgctcgggaaggctatgtttcgtgtttcctttggtttctatcccgagttggatgtggacaatggtctgtagagggcaagaccaacccctatttaagggacaatgccggttcattgtaaatccctcgaatacaatttacttgaattgttcttttatcatgttttctatatgacccctattttagtccatctttgacgattggcgttgtaattgt

SEQ ID NO: 21881 - DNA, 310 bp, Oryza sativa
ttatggagaaccatatttgcttttggattttcttttaaaccgacgtgagcgtcatcaatcgacctgtaataaaagtaaaattgaactgtattctcttgttgggagctgttgggcttgcatagactgtctatgatagacataccgtagtgatcagcatatataattaaagtctaactccaggtgttttgattaaaaatcaatgataacaacagatattttttaatgtaccgctctcgaataatatgactgttctgatttctttctacgagtacaattcctgcgatataggttactcctgcttctacatgtt

SEQ ID NO: 21882 - DNA, 437 bp, Oryza sativa
  unsure (1)..(437): unsure at all n locations
gtcagctgcttcagcccaccaagttgagatggaattggtccttctatgaagntatgtgacatatttattccatgagttaaaacacgttccccaacaatctctgggatgctaccattgaatgcattattggagaaatcaatgaatacaagggttcttattatttgagcaagtgcggtgtcatgacctcttgatgtgagtgaggctttatatctatatactaattctacacttggcacagcatgatccatgaccaatgatgtatttgtgtctatatgtagcatctactccaacttcttaaaccacttgtctttgggcaaccgaccagatatagtatttgaggatatgttcataattattgcattttgaaatgcacatgtgctttttcatctgggaagattgaccacatgtcaaattactattgaattcaatacatgcac

SEQ ID NO: 21883 - DNA, 390 bp, Oryza sativa
agcttgcatcaaaacttcttatggatattttcttcaacccatctctgctgtaaggagcattgtacatttaaatgctgcttatgtctaccatactgtaacccattggtgttttaatgcacactgctattcactttttgctcctgtatttatcccctgattaaatcattattttcttctaccaacttatggaattgatagtgtcccatttttgcttgcaggctgatgtttacactgatcaatcatgaggatgtgttgcattcctttctaatgttgattcagaaaaggacaaagttgttactttccagagccggtcgtatgatcttcctgcttggtcggtcagtatcctgcctgactgcaagaatgtggcgttcaacactgcaaaggtatttg

SEQ ID NO: 21884 - DNA, 417 bp, Oryza sativa
cgctgcatgctatcctgatatcagagtttctctttttcttatcacatcgcatgtgagggtgttgtactatataagagtaaacttcttgcgagcagccaggtaactgacattgcagcatgatgcccatcataggttgattggtccctgcacaaaggccacacaaaacattcctcctttccacgaacgctgcttattacctccttgcagttgctcattcttttgctttccctttggcttggcttggctaaatagcccctttgaatcattcctacacttacacactgcactaacgcttttggaggatcattgggctgctatactgtgtgagtgtgctgatgggagtgggagccacctttgatgtgccaacatgatccagattattttgaccaacttgcagcttccttccatcactgtgaa

SEQ ID NO: 21885 - DNA, 357 bp, Oryza sativa
  unsure (1)..(357): unsure at all n locations
gcttttgttaactctaaattatactttttttttgattgggttgggcgacgcaagacgcatccttagatgaagaagggggggggtggtggtgtttttttttttttttttttttttttttttttttttttttttttgttttttatttgttttttttttttttttanttttttttttgttatttttttattgtattttttatttttatttatttttttttattagttttattttttttattttattttttttttatttatttagtttttattgtttttttatattttttttgattttttatttttttttattcttttttttttattatttttttattttattattnttttattatatttt

SEQ ID NO: 21886 - DNA, 409 bp, Oryza sativa
  unsure (1)..(409): unsure at all n locations
ngggatacatcatcatcaccatcgacatctcttttatttaagaatggcgagcgcgncgaatcgaggcacatctgatgtgtgaagccgcgctctagtgcattgctgatagccaacccgacgtatacatgctccgatttggatttggacgacgtatagttctattcggtcgcaagacacgctgtaatattaacaactatgctcattgagaatattttaccttccctcaatcttatgggtgtgtttagttcctaaaaaaaatcggaagtttaaggaaacgggaaagtttgaaaaaaaagttaagacgctatgtgtgcagaaaaataatggacgtgacgcgatgcgatggaaagctgaacgttagggtaattggtggtgaaccaaacacggcctaaaaaattaagccagacat

SEQ ID NO: 21887 - DNA, 401 bp, Oryza sativa
cgacccgccgcatgcaagctttgagctatatctgccaagtctttattttctccaccgggagaatgaggtactgacaatgccggtccacggggagcctcaattgatagcttagacttgggaggtgtaagctccgtcggtcgacttggacgaggagtcatcttcacaactatgtcttctttgggccattgtatgaacgtcttgcgcgcatcgcccaaagtcatgatttcatcatttgggggcacgggcagcggatagcctgaccaggtgtcctttactgtatcgatggacaccttggcatacccagctagcaggtctgcgccgtggaccttgtctgtaaccgagggcttgaaagccatgccctcagcgacttcaggagcgaaaagtgggtggactctcgctag

SEQ ID NO: 21888 - DNA, 443 bp, Oryza sativa
  unsure (1)..(443): unsure at all n locations
ggtcttgaatcaatctcatgatgtaaggggtataatattatccctgagtgaaggtccccttagagatggcaatctcttgcatcatgagagttacagtgtcgaactgacggccctgaatgatggcatcgataacgtgccaagccacccccctaatgtcatcattgttacccaggcgagggaggatggtagctctcacaatcctgttaaccacacttgggatggtcctcaagccggcaaccttcccatgtatgtaccgcgctccatcttcataaaactgagagaggtagtctatggagagcggattatgggtgtgctcctcatgcaagtcatctccaaagtccaagcgaacattgaggagccgccggaattgcctnctatagatagaacactggagggtgtcggacatccacttcatctcattatagtcctcggncaaccacact

SEQ ID NO: 21889 - DNA, 346 bp, Oryza sativa
  unsure (1)..(346): unsure at all n locations
atgctcagcagtaagcttctatactctattaagttccagatgatattttggtgacactgaacttgcgaccattgggattgtgagatgttattntggtgctgttgtgcttctggccgttgtgctgttgctattgtgcttttggtcattgcgatgctgctgctgtgaagctattgcagatgtgctgctgttgctctcgatgtatgaggaagatgaaatttgagactttggatatgtattgaattagcggatggatatactgatattgcattttcagacttgtggaatgtgaaatgcatatgacattgcaatcatttgtggaatgttaattcatttgaatctgattttg

SEQ ID NO: 21890 - DNA, 457 bp, Oryza sativa
  unsure (1)..(457): unsure at all n locations
taagtgtgtacaaactntatgagtataaactttaatagttttaactctatgtatgtaaacatacttaaaaatgaaaagcacgagatggaaaaaaaacagtgccaaaaatgcaaagggaaccaatcgtgcaacttgtcggaaccaatcgtgttacctgtcagacacgcgagcaccgcacggactatcattatccggaaacgaccgcgtcgactttatccaagcgagcgatcgtccattaagaatttngggatatatatagcccattataaacccataacaaccatttggttatggtatacagaggcagagagccccatacggcagggtgacccacctgccgtacccccggccccgcccgcccgttccttcttcagcgaacaaatgagttgttgctgaccccgtgaacaaaccatgagcggtatagcctgtatgcagncgagcttcaaactcgagcttt

SEQ ID NO: 21891 - DNA, 405 bp, Oryza sativa
ttaagtcaccgcagcatgcacttactaagatacccatgtgacctttttttctcttggaaatgaaggaatgggttgcaccataatcaaacaatatttttgccggtgtcgagtcgacaggaaatgtgcccaatataacctctggtgctgactgcgcctcctctgctgacgcatgattgacacgggcctgaacaaacttgggtccagcacgtcttgacttctggcaccttccgaccgtgtgtccgggctcgttacaattgaaacacagttcgggcttttctccaaacttcttgggctgttctggctgaactggcagagctggctgagctggaatcattaatggacttggagtaagcttgagcctgtgctgctcactgtagttgtgactgccactatggtgggtcttgt

SEQ ID NO: 21892 - DNA, 455 bp, Oryza sativa
tgcatatttgcagctcacactccattcgatcattagtcgcttgtagtgtgggaatagccaactccactttgtagagtaggagttgagttgatcatcaagtcgcgtcttgaatgtgccatagtccataagcctgttctccgatcagaagattagctaatagtatttatactattacaaaagcacctcaggcctgactaacaaaattaaacagtagcagattagtagttctacagcttctccttcacaggtgcacaaccacagtatgagccagacttcacctaagactttttctcaaagcgtctcttactgaagggaggcggattgagcaagaataagtataactacaatacgcagcaaatcatactatgagatgcatgattaatgcagcacaaagaagagtattatagggccaagttttatagcaaacaaacatctcagaccaactttagatacac

SEQ ID NO: 21893 - DNA, 383 bp, Oryza sativa
ttggtttgcagacgtttacctatttttttttttctacaagacaagagatatttctacattacagtgttaacaaaaaaaaagtaaatgggggagaatttactttagtttggagagaagtcttgctccaaaactatcaaaacgatttactgaggaaagtacctgcagggatatacaagtacttaagactagcgacgcacccatgccttgacgacagccaccagacaaatatagtaacatactatatgatctatagtttcaatgtatttatacacattgacccaaaaactaagtatacacatatacaaagaatgtagtttctttcacacaacacattgcaaacatcctcagccttgtacacatactaatatctagcacggtttaca

SEQ ID NO: 21894 - DNA, 332 bp, Oryza sativa
ttacaaaggtgagcaaagaacatacagtaacaaaactaccagcgaaagatataccagctaaaacagcagtgtttatagaagaatggatgaaaatccagcccctatatccaaagtgggtatacacagccaaagctaagctatcaggggaagtattactgaaacaatatgtacatatctactagagacgtatatgcagattaccgagataccactcggggacgacggtagaaaaggtctgcacacacacgcgcatgaaagggcaatataaatgacctaatcagctatgagggaagaaagaagaacaaaaatcggggtcaagtaaagaaacgcca

SEQ ID NO: 21895 - DNA, 394 bp, Oryza sativa
  unsure (1)..(394): unsure at all n locations
agcttcagcatcagttgcctagctataaatttctttttttcctgaaattttccctatcacatctcacatcttaattcctcttctgaccaagatccaaagaaagttacaaagcccatatgatggtggcctcccctgtgaaggtggccgtcgtccccgccgtgtgcgtcgtgctggacgtgctgtcttcttccccggcgccggcggcggcgcagatgatctgcagcaagtgtgaccagcactgcaactcttcntgcgccggtgggatgggtggctgcagcggcgcctgcactgacccatcgttcttctcatgcacgagctgcaagcaggcctactactacaagtgcatgaactactgcggctcctactgccgctccaactgcgtcaacagctgaac

SEQ ID NO: 21896 - DNA, 349 bp, Oryza sativa
  unsure (1)..(349): unsure at all n locations
cacgctagacagggtcgacgtgcactacccgaacatcatgagtatgatgcggaggatgagagtctangctcgtgttctgatgaaggtgatcatcatcggcgtcctcgacatcctcctcgccgaggacctgcttttatggatagggatggtgatgataaacaccgtgacaatcggaatcgtcgtgctgctcgagatccgccggatgaagggctcggtaagaaaaaaatatccatgcctgctatattatgctctggagaaccggaggattattcgcagcgggagatgcgctgcgatcagatctttaatagtcacaactatttagaggataagaaggcacgccttgcatcca

SEQ ID NO: 21897 - DNA, 387 bp, Oryza sativa
agcttgcttctccatgcaatcaagatattttttttgcccccaccgaaggaactttaacaaaattgttatcaaaatcagacccaagcatagccaagatagtgaaatgaaggaagattgtcatgtttatagagttgggatgatctaagtgacaattaattgtttgttttttaaaaaacaatagaaattttgatagagatggaaatatttgagttgcaaatatgcgtgtcatatcaggtattatatagggtgtcgcatggagtgttcagacactaataaaaaaaactaattacaaaatccgtcagtaaaccgcgaaacgaatttattaagcctaattaatccgtcattagtaaatgtttactgtagcaccacattgtcaaattatggagc

SEQ ID NO: 21898 - DNA, 451 bp, Oryza sativa
tctcccacaatgtgttcgcaccccttactaactctcttatttgtcggtctgcatggagcgtagcaacaatgttagaaagtggaaccccatgtatgaggacacaccgatgcaacaaaatatttaaatgctagtagtaccgtcaagtgagcggggggtgctagatgcatatcatatatttggtcaatcggtggtggaccttgctcgtcgggatccttgggtgcaagcagccggatgcgagtctgcgatgagtaccaggccatgtattgttcgtaagtgttgtggtcgtatggcctggtctcctggacgacatcattcaaggcctgtgaccacgcctctatccatggggtcatccttgagtgcatagatcgacgatacctgttgtcagcttgcctcttttgcatgcaatgcctcttttgcctgcaacaaaaatacaacaattagctgttagtta

SEQ ID NO: 21899 - DNA, 390 bp, Oryza sativa
agcttgccttccatgggaaatccatctctgtactcgacctatatatgcccccattttcatttcagcaatcgaagtaataataatagattattgtcaacttaactgtactagatcgagctttgtgattactactacgaaaatagattgctatatatgggcatgttcaccaaaatttgacaatatttctgttcaaaaaaatttagcaataccaaattttcggtagatttggtagaattgtcaaatttcagtaggatggaacaaatatgctgtgccaaatttccctatgcattactaatatttagtagtaacaaattaaatacaattaaccatatatttatcaattttgcaacagtacgtacctcgctgggcaagccattggcgatgacccac

SEQ ID NO: 21900 - DNA, 439 bp, Oryza sativa
gctggagatcatctcggtgaacgggaggatgttgatccatgcagttgtatgttcacctgtgttctgttatacaactaatatgcagtgatagatgcactgtagtatatcatcgtcagatcttacttcaaagaggatgggagctatctgtgcagataggttgacaaaaaattgcatgcccatgttcagatttcataatcaatacatgtgcaagtttaagactattaaagttcagaacattttatgcatgacatcacacattactagcttaatttatctcaaaacgcaggcctgcacaagcccaagttttagatccaaaccataaaactgcaaaattttgtttgccatacaatctgactatattctaattgcatactttctataattcgctccccaaaggcaatctattattaatcattaaatccattgtatatgctttgca

SEQ ID NO: 21901 - DNA, 390 bp, Oryza sativa
  unsure (1)..(390): unsure at all n locations
agctntaggagttattgggaacatggttttatattttgaaattgctatttctgccgggagcaccgaaattaccgaaatttcgaaaattttggccgaaaatatttgaaattttgactgattttgaatgaatttaaataaaatttgaccaaattcacaaaaaaatgtaaaacaaccaaaaatttcgggcaagatatgagcttgtcggtgggggcgaaattaccaaaatttcaaaaatttcgaaacgaaatttcaaatcctgattggtcatcaactttgtagtaagatagaataagtagctttgacttgatcaagtttatataaaatttaagcaacatttaaaataccaaattagttttattaaatgtaatattgaatatattttgataatat

SEQ ID NO: 21902 - DNA, 426 bp, Oryza sativa
tgtcagaactgaaggttgttcttgctctctggagcgccggccgacagactacatgagcagccaggtcgatgtgaaccccaagatgagggccatcctggcagactggatcatcgatgtgcactacaaattcgagctgatgccggagaccctctacctcaccatgtacggtatcgaccggtacctctcgctgcaacccgtgctgcgcaaggagctgcagctcgtcggcgtcgcgggcatgctcatcgtcttcaagtacgaggagatgtgggcgccggaagttacgcagattcgattgattcaacaagacgaacaagaatcccaatctctgcttcacacttgtgatgtaactgaacaaaactctgcttcgctgcggtgaacggattttctcatgttcaggacctcaatcacgtctgtgacaacgcctac

SEQ ID NO: 21903 - DNA, 445 bp, Oryza sativa
  unsure (1)..(445): unsure at all n locations
tatgaaacacgcagaattccagaaaagtgtttcttttgtgtgcaatggctacttggctagtggcgcgcatatagattgatcgtattgtagctagatcccattatatggtcctacttgtactatgtccagtagttacccagtcgataccaacgggacccgcgatgtcgtatctcgtatgtgttccaactggcatgacatgattattggaagcgacttctgctatgttggtcaccacttcaccagatactcctcccgtctcgaaaagaaacaacgattgacttgattcgtaccgcgaatttaaaccttgttctttttttagacggagtaagtaggcaattccgcaattaaattagctgagcagtgcactgcgtgcatacacttatgtcttccgcatgcgaaaacaaaaatcacaaaaataatataaanatccccagaatcaaacctg

SEQ ID NO: 21904 - DNA, 388 bp, Oryza sativa
agcttgctagtacgtactattgccttttattattgaaagcctgttcagattgtaattaaaacaaaccttactaaaatttggtaatcttgctaaatactgcatcaatttagttttttaccaaactctagtaaatacatagaaaatcctgtcaaaacttgacaatattaccaaattaaaaaaatggtattgctaaaatttggtaaggtttattttggctacaatttgaacatgccataagattattaaaaattgctccgtatttcgaacgaatttgtaccaaattaactgaaatatgttcaaatggatcatctgaaacctctggggtataacattatctaagtgaaaggaattgatttgcgagatgtgcatacgtatacgtgccattaaa

SEQ ID NO: 21905 - DNA, 354 bp, Oryza sativa
  unsure (1)..(354): unsure at all n locations
tagaatgtgtgcatgcctatatgtgacatgttctaattgttatatgcaccggctgtacaaaccgagtagtgtattattatgggtgtntggcaggagactgtacanggtgataaggtatttggacctaaatntaccagatagtcttgatttgttgcgtccaacatgatcacatagaatattggtgaatccatgattgtatctgcagaacgtatggttgtagttagatatagaacataaacagatcagtaaggaagatttagcgagtccttggaataattgtaaaaaagatatggttctgaaagatctgaaatgatcttcagtattcgattttaggcatgcagattcagtaaatgc

SEQ ID NO: 21906 - DNA, 387 bp, Oryza sativa
agcttaactaagtttatagacaaatattatttatttataatactaaattaattttatcaaatcaataattgaatatattttcataataatttgtcttggcttgaaaatgttactatttttctccataaacttgctcaaagttaaaacattttgactttgaccaaagtcaaaacgttttataacctgaaatggagggagcattgaaaaaaaaacttttaaaaagtgacgagtaaagaaaaacgaagatatcacttaactaagtggtgtatgttggcagttggcactgagtgcagtgtttgcgttcaccggacatgtcgtttttcgtgattgaaccatgcacaaatagagaagatttctcttgtttttgtatgcacgttttccaaactg

SEQ ID NO: 21907 - DNA, 411 bp, Oryza sativa
  unsure (1)..(411): unsure at all n locations
tcttcatgagcttgtagcctccactcttcttcttggatgacttgtctccatcatcatccttggaagggcacttggaagcaaagtgtcccttctcacaacactcaaaacacctcaagttggagaaagtcttgttgggtcttctatttcttctcctatttgagttcgagccccttcctctctcctttctccttcccaagagatcattgaactttctagcaagaaggaccatctcttcctccaagtcctcattgacttcattcaccttgctcttgctcttgtcttcaacttcagcttggagagcaatgcacttcttggaagatgaggctatctacatctacttcttctttaacttgtacatgtcattggtggtgatcctcccccagaggctngccggtgtcattcttgacatgt

SEQ ID NO: 21908 - DNA, 446 bp, Oryza sativa
  unsure (1)..(446): unsure at all n locations
tagtgcctatctctagctntcctgtaatgatcaaatgttataaattagtaacatactagcatagagcctactgttgctacaatacttaaataaacaattaatatattctatacttgacatatataaattatcaacaagcttggataaaactgtaaacaaaattcaaaatcagatcaagcataaacatgtgagaagagattgcaatcatttatgaaaaatcctacaaataacgtacacgagctaacaaattcagtactatgatgtgttcagactagaattattgagattattgattttgtcagtactagcactaaattccatgtgttgcagcagaaactatttgctttgcacatgagcttttaaaatataagtttagaatggaggaatccttttccaattcccatgggactcacgaacaattggaacaaaactatgtattccaaata

SEQ ID NO: 21909 - DNA, 386 bp, Oryza sativa
  unsure (1)..(386): unsure at all n locations
agctntgcatgatatttattgctgtttaatataccctctaattacaggaagtaattacctttttttttttagttttaacagccgtttgtgttatgtccaggaggctaaaattaacatgtttaggtgaagaacattccatgatttgcctgagttctaaatgatatctcgactgctctttgagcctttgacctctgatgatcttatgttaacattttaaattctgctgaaattaacggtggaagtgtagtttgaagctcttttaattattcatttttctgtgaatattaatcacttgttgaatatgtataaaatttcaggccaaagcatcatcaagtggagcttcaactgcttcaaaggcacctgtgagccatgtaattttattggca

SEQ ID NO: 21910 - DNA, 422 bp, Oryza sativa
ggaacttaaatactcagcttatcgactcagcttgatggcttgccgtcgtcttgtattctcttcgccccttgcgaaaccgtctatgatgctaagcaagtgcacgagtgtttgtggctccttattggcgatattccttgtgagttcgccttcgagcagtgtcacatcctgattttcgtgtcaggatttataaactatttaataaattattattagaatttatattaaatgatctttaatttacaagtgaagttaaatgtgggaaataaaatttcctaaatataaagcatggatggatttaattcttattaaattctccatggttaattatactctctgaaattatctcggatgtttcagagctcaattcttaaataatacaaagaacagttcagtaaatacttgatcattaatgatctaattat

SEQ ID NO: 21911 - DNA, 440 bp, Oryza sativa
  unsure (1)..(440): unsure at all n locations
agcttcatttcgagtttggctgcaaaaatatgttaccatttggaatacaaactttgtacttttgcagccaaatttataaacttgccttttcttttccacatcaaatcctcaccttttggatttttcagcaagtaataaattatttgcgaaaatagtgtgccgagtctgttcatttggctgcaaaacaaatcttgatgcaccatgaagcccatcagtgctacataccaagtagggccaaaggccagtagggttagatctaccacaattcctaagctactacatctgccttctgccatctgaatgtgcatatcatcctccaatccactttctttccattcaccattccaaccaatcgacacaacaacagcagtagcaaaggtatgagaattgagagactctatacacagctcccattcacatggctcanaatcagaacaaat

SEQ ID NO: 21912 - DNA, 412 bp, Oryza sativa
  unsure (1)..(412): unsure at all n locations
ggagatacgcacaccacactntactcgggtcctgcgcctctatagactatactattctatcacacatcaactctntagcatcgttctgtaatctctgagtgtcaccaccagaatacgggacagaacatctcaagatcaagcgtatatcctttggaatacaaatatgcagtcagttcggacatgcattgaattcttctgacctccaggcccaacggacataatacttgcttcgcttcatatgacgtctgaggtaaatagttcccctctggcaacagatacttttacagctcaatgagttctgtaaaactcttgtacgaccagccattactagccttaagcttcatgagttccacacgcatgacaacttgctgagcatcgacttgatacaatcaacaacggcatctggtatctt

SEQ ID NO: 21913 - DNA, 440 bp, Oryza sativa
  unsure (1)..(440): unsure at all n locations
agcttcatttcgagtttggctgcaaaaatagtttaccatttggaatacacactttgtacttttgcagccaaatttataaacttgccttttcttttccacatcaaatcctcaccttttggatttttcagcaagtaataaattatttgcgaaaatagtgtgccgagtctgttcatttggctgcaaaacaaatcttgatgcaccatgaagcccatcagtgctacataccaagtagggccaaaggccagtagggttagatctaccacaattcctaagctactacatctgccttctgccatctgaatgtgcatatcatcctccaatccactttctttccattcaccattccaaccaatcgacacaacaacagcagtagcaaaggtatgagaattgagagactctatacacagctcccattcacatggctcanaatcagaacaaat

SEQ ID NO: 21914 - DNA, 408 bp, Oryza sativa
  unsure (1)..(408): unsure at all n locations
tgttcgcaaaccattctcttcatgcgctcttgtttngtgagataccacaccacctttactgggcctgccctctttgacttacttccttaccttcacttttgctcgtagagtttgatgtcccacagatagggcagacatccaagtcagcgtattccttgtaatacaaaatgcagtcgttcggacatgcatgaattcttctgaccttcaggcccaacggacataatacttgcttcgcttcatatgtcgactgaggtaaaatgttcccctctggcaacagatcctttaacagctcaaggagttctgtaaaactctctgtctaccagccattactagccttaagcttcatgagttccaacacgcatgacaacttgctgtgcttcgacttgcatccatcatacaacagcatct

SEQ ID NO: 21915 - DNA, 435 bp, Oryza sativa
agcttatctgacccctttccatcggtggtatctagatattatcagaattgctccctgatattggtgcaatacaaaagcttttctgacccctttccatcggtgggagacaatacttagccattgtgttaggctgtgtttagatctaaagtttagatccaaacttcagtccttttccatcacatcaacctatcatacatataacttttcagtcacatcatctccaattttaaccaaaatcaaaactttgcgctgaactaaacagtcttagtctatttcactgctagactgtacatgtgtttgttatgctgaaactatttcgttgaattttatgtacgtatatcggaagcatgcgaggatgttggcagggcagttggaccaaacagtttagtaataaaatctcagaaatccactggattcggtaaccttggtgcgtac

SEQ ID NO: 21916 - DNA, 464 bp, Oryza sativa
  unsure (1)..(464): unsure at all n locations
tgcgcgcatctctaagcgggacgtnctcgtagaagggactctctaccggcgtgccgccaacgggatactcttgaagtgtgtttctcgagagcagggcatcgagctcatagccgacacccatcagggcgagtgcggggcccattcggcctcgcgaactttagtcgggaaagcctttcggcaaggcttttattggccgactgcattacaagatgcccaagaatgggtccggcggtgtaaagcgtgccagttccacgccaagcagaaccaccagccggcccaagccttgcaggtcatccccctctcttggccttttgcggtctgggggctagacatccttggacctttcaaagcggctcgaggcgggtatcagcacctgtacgtcgccatcgactaagtcaccaagtggcccgaggcttaccctgtcgtcaagatcgacaaagcatctgccctcaaattcatcaggg

SEQ ID NO: 21917 - DNA, 440 bp, Oryza sativa
agcttgtactatacataactgaagcatgtttttcttttccagctgctaccatgtaaatacctgaatcaagatcgcaggagcggctagcgattgtgtatctgccattggcggtgtgcctaagcgtgatgagcgaccttgttgttgctccacccagcggcagcgagaggcggcgccttcgccgacccgtcggtggacggtgcggcggcgggcttccgttgctgctggtaggcatacctcgtttcggtggcgtcaccaccttggtagctgttgccgctgggcgtggttgagaggggatggtagtcagtgtccctgctggtttcgtcgaagtccagctcgttcttgccgccaaagcatgacgagaacggcaagcacatgctctcgtatagcagctagcctactaggagagacgatcgatcgatcgatctagctagctactgcta

SEQ ID NO: 21918 - DNA, 408 bp, Oryza sativa
gctttccttgacacacgctttcagtgccggatgtttcttgattatactggcgaagaaagtatcagttatgatcacattgccacataaccaaagattattaaagaaaactttgaacaatataaacagatacaatttaaagcaaaagttacctttccgatagatagtaaccccaggtagctagcactgtagttatagattttgggggggaaacactgtaggtgcatgataagtaacatatgatttccctattccacaatggaatttgcttacgacaaagagctaattaagaaaatatgggccacatgcaaatcagagatcagtgacatacaatacaacataacgaagtagaaaactccatcacgagatagatcactttgctccatttgagtacacatatatgggaattac

SEQ ID NO: 21919 - DNA, 391 bp, Oryza sativa
  unsure (1)..(391): unsure at all n locations
ttaataaagcgtccttttggaatacttagacagcgagtattacaacagaaaatgttccattgcctgaatctcaatttaaactgtaaatggctctaaatgcagataatgtaccagctttagttttctgtttaaataaatcatagtgaacaggggttgatatatatattttaaaaaccttttctatttgttccttccaccgtcttaaagatagttgttttggaagttcagaactcaacatggtaatgtgtacacataacgtaacaaaatggaatcagtaaatatctgggacccttatagatccttatgtagatatatatgtggntctgtaaggcatttcatcctttttggtagaaatatgggcctctgtgcccttcagtatctaaaagctgaa

SEQ ID NO: 21920 - DNA, 411 bp, Oryza sativa
ctcagcttcaacatggactacgataaatcatagaatggctggagttgtgtatcattggatactctaacccatctttcttactcgactctatgcaataatggacatatttctttcgtcttaagaaatattcgctcgctttaaaacaaatttacttttattctcttacctattttctatttataaattgatgagctttattctacctattttactcttctttactaataagggacactctagtaccttttttcggtcaaccttgtcttaaatatctagtgccgaacatgaactcaacatttatcttataaaacaaccctgccacttcatttatcttgctataaccttatgctatctctaaacgtatattaactatgcagtatattctcttatatttatataaacctttccgat

SEQ ID NO: 21921 - DNA, 413 bp, Oryza sativa
  unsure (1)..(413): unsure at all n locations
agcttcgaggctggctggangttttttaccctgcgaagaccctaaagttaaaatatctctcgaagtgaacagtattgaacagtaatttgaacagtaaactgaatagtaatcagccgaacaaacagtaaactaaatagtaatcagacgaataaatagtgtttctgaacagtgtatattgtctaaagtataagtgggatcagagccattcatcatagataaatcaaagtcagaagctaatattggaaaggtaattactaccaaagataatctgaatataaggtgtaggctaaatcacattgaagaccatagttggcactctaaaatagtcaattaaatntaattgttgatctgatatataatgtttatataaattgtgataaaaagcaggaagatttagagcgaacgattgaaga

SEQ ID NO: 21922 - DNA, 392 bp, Oryza sativa
  unsure (1)..(392): unsure at all n locations
ntcaatagtggtatcttccttgctccattcaacatatctctctgttttcaagggcaaccttatcctgcactatggggatcttgcatagcacgtagaagaaccaggtaagggtatttcctgtggtgtctttcccagctatcatgaagttgaagactatgtcacgcaagtagcggtcatccattgttccaggatcttgctcacttgctagtacaaatcttgataggatgtcctctttggttatctgcgtgccatacaaaagaattagaaataaaacaatgcaacatgttagctctgtcttatatttttttgtattaagaaaacttagagtgactaaattcagagttcatcttggatctgtggagcacatcagaccacagaactgcattcaagca

SEQ ID NO: 21923 - DNA, 436 bp, Oryza sativa
agcttttctctaccaatccgggatatatttattcatcagcaccacaatattccacagcactaaatctctccccgccaccccgtacctctgataatggtctaaaatcattgaagccacttgcgacgacgttgctcaataaggaaaatttggcgtgaataatattcaacaccagtgcagcatcatcattacatacttacagccgccgactaccgctttcgatatattgactcaattttccagcctggttaaaaatagcgaccagctcagtcgcaaatatagtgactaccctaactaagcaacaataaggaatacactatgactgttcaaacaagtaaaaatccgcaggtcgatattgctgaagataatgcattcttcccttcagaatattcgcttagccaatataccagtcctgtctctgatcttgatggcgtggact

SEQ ID NO: 21924 - DNA, 372 bp, Oryza sativa
cagcttcagcgaaaggcgtattcgtcgcgtcttatttctcactattattctcttagacattcatgctatgaaactgtcgcatagttggtggtgggaactgaagttgcttaaagaagggttcaataattgagtcaaaaaaggaacgcggccgtcagattaaagccgcgggacaaagttcataatttccaagagttgttgaatatcgcagcttttttgaaagcctttgtatcatactaacaagtaaaaaagggttaaataccaaaattaacctgtatttttgataagtcttaccattgtacgatttacacagattctgcttctccttgttgatagtggaaaaggggcaatgtgcacttgcgtaacattaatgac

SEQ ID NO: 21925 - DNA, 438 bp, Oryza sativa
agcttcagcgagtaaagcaaataatgttcttatagtagttcactaacaatttaaccatcggtagtagccaagaatacttgcatagctggcttaaaaatcatcacaaacaaatgtctcaagtctcaacacagtgctccttaccgggaaaaagtctgtcttatatgcagcccagaagaagattactgtcatcattgccaagtatccaccgaggacaactccagttgtaaaaatctcagccagcttccagctgtcaggtagtggagatggttttacccgatcctttgatatagtcatgatggtacctatcgatcacagtacatagttgaatatctttatatgctcataatttctattgtcaaaaagcaagtgtgaacatgtgcaatggttgtgtgcccgcgtgtgtgtgtgacagagagagagaattaccatcatttagaa

SEQ ID NO: 21926 - DNA, 444 bp, Oryza sativa
  unsure (1)..(444): unsure at all n locations
tgtccccctctatggccgtggtaaggaccgcgttgacttattgtcaaagaacgtccctggggctgacattcctaatcgcccagctggacagaggcctgccacggctccgcaggccaatcctaacacccacttccccaatgccaaccccaacccttggttcatgggtggaggcatcccactagccaatgcacggtgggggaattacaccttctcggcggcatttgggggtttgttccccctgctcagcttccaagtccatgggttcccagatgcaaccgcctatgggcagcctgctggttttccctacggatatggacacggccacggtcacggtcatgggcacgcgttccacggcggacatgcccatgctgctgctgctcccctccatggaccgcctgngcaacaacagcaggcggatgtgtacctgaaggcgcttctcatcct

SEQ ID NO: 21927 - DNA, 436 bp, Oryza sativa
  unsure (1)..(436): unsure at all n locations
agcttcttatgttcctcgtatgcttcttcttttgtcggntatactggngagcccagttcacaattgattaagatatagattctaccttggtttggtgtttgttagctagtttttaaatgattaaatggcgtgttttgtgcgaacacattctatataaaagttaatttaaaatattaaataaatacatttttaagctaataataatcaaaacttaattagtcatgcgctaatacttttcttattttccatgtccaaacttcatcttcggtagagacgaacaccatacaaaactatgagcctgattcatttacaagtgattataaaccttaaatacttattagtgataaaaaattatagatataggattttttatatatatttatatatgttcttggcgacctaagagttacggtagaaaataaatacgatgaaaaag

SEQ ID NO: 21928 - DNA, 234 bp, Oryza sativa
  unsure (1)..(234): unsure at all n locations
gacacatgaaactcaactngaaggagatgcatacttaaaagagccactgttttttgacagacagcaaaaaaatatttcttggactaatacgaaaccaactagttgagatggcctctgatagcaccgacacgtcccaacgctgatatctgcccccggactgaaacggcctgctacatacgcgcaatagacttaaaaccgatgacacacaaaaaaaaatgtggcaaaaacacccta

SEQ ID NO: 21929 - DNA, 438 bp, Oryza sativa
  unsure (1)..(438): unsure at all n locations
agcttcttcgtgcacctcgctgcttctgtgcttcttctgaccaanggaggggtgacttccactaacctccttctcctggttcccctccacatacctttccacgtgcccctcctggttcccctctgcattcctctccacgttcccttcctagtacaaatactggtttggatcctcgttcccctcttcttcattccagtactgggtgcttccctccgcgaatatatcgtacaatatctgctcctcatcgctaacagacatttgttcatacaggaaacatctgctaagtcatgagacacttatgttttaacaatcttatattaaaactcaaataatctcatatgctaagactaatatagacctgtatgctaagtgtaactggcgtatattagaaccctacacaatcttacatgctgagtctaattacaaatctaataatct

SEQ ID NO: 21930 - DNA, 435 bp, Oryza sativa
  unsure (1)..(435): unsure at all n locations
tgagtccaaccctctntcctggcgcccagataagtatgtttcttctggtttgttgggctgtgaattcttcagacaccttgatagtcagcgccttgttcctgacaataggaaaatggatgcgggcaaagtgcaatcctgggtcgagatggagtcaagtaatcagcttttgtgattatacacacagcttgctttgaaatttcagttcatacatcgctgaaaatggtaacatcttaaattgattgcacattttatacatgctgatggtgtgaattactacacttactactcattggcttgcttgcactgtaccaaacatgttatggcactagcattgcattcacctgacttgggactggttcttatatctatacatgctgatgtcggaatacctccattacccaatgattgttgctactgcacaataatgctatgcaa

SEQ ID NO: 21931 - DNA, 235 bp, Oryza sativa
agcttggcaaaagaacactgattgtattattgtggctctgacgcagaaacaccgcaggtatatgcttacacggttggcagcatagctcaccaatgaatttgagctgcttaaccatcactgactacgcgatgatatatctgagcggctgacactggactccactgtgcactgactatgcatgaaggtgattaacgcaatgttgtactcttcaactagagttccccagtcattcaac

SEQ ID NO: 21932 - DNA, 282 bp, Oryza sativa
acacatgatactcagctggaagtggaaatgtgattgcatctttttatgtaagcaggctaaagaacagcccggtaataccggccccatacttgtatatatactaaagtcttaagtccacaaacgttcagctgcacgggcgcttgtaatagagagatgcaaaatttagaaaaacaacatcgtcccgtagtctattagtcggggacaatagataaccgtgatggatagcttaactacagacacaggccactctctctaagaaatgactggcgctgactaccaaaa

SEQ ID NO: 21933 - DNA, 434 bp, Oryza sativa
agctttacgattcagcgggtttttatcttatataaggtatagatatacgatgagcttaattattttattcttaacagccatgtcccctaaactacgacaatggagtgtctatttaaaaaaaaacataattggctttgtatgtttgaatctactaactaaaatcatgcctatccacatcagaatggactttgatacctcaagtgaataatggtccctcttgataatttatatctcacatgcatgtaattggttatagttttttttgtataaaaaacatttggcaaacctttatcacttaatgtttaaaatcgaactacacactaagaaatcggtactatctatatgcttggatttatccttttcccccctttatgtgtgttttgtatttaaccttgaaatttctgtggagttgtatatgtacatgaatgttattt

SEQ ID NO: 21934 - DNA, 439 bp, Oryza sativa
  unsure (1)..(439): unsure at all n locations
tganaactgtaccaccacaaaaaggaatattggtgtattactatcttgagccaaaatattaaatacgtaagttgcttgacaaaaaacctaccggagttgttataacatcctaccagatcgttacatctggacgtttgtgctctgaaaaacaacaaaaggaaaaaaaaatcaactataatcaggattgaattgtactatggctagctagctagaaccatatggaccgatcttttaagcttccatcagtttctgaaaaccacgtacacttctgaattcaattaatctcggcgatatatgatatgatctgcctccactccacacccatctaaccacttcagaaaactgcatgagtgagtgagagtgatgcttcaaccgcaatattcttctacctatatatctatcgctccaacacgcggatgataaataaccacttaatagc

SEQ ID NO: 21935 - DNA, 439 bp, Oryza sativa
agctttattatatcaaaatagtaaagtttttttcttatatgatcacgtaaaagagcaatcgtccatcagtgcttccagtttttcttccagacgtttcttttttttttgttggcttcaaaacaaattaagccggaagaaacctttttagtttattttaagaaacaaaatctcttcagatgatgatctaaacatgagcagcagccagtacattggaaggaggaggagaagcatggtgaggcggcggcgcacgtggtggtgatgaagcaggggggagggagatgtggcggcagagagggcaggtgttgcggttggcgagccagcggtagatgcattccttgtggaactcgtgcctgcacgccgccagcgtgcagcacctctccccctcctccagttcccccaggcatatgctgcactccatctgcgacgactcatcccgccg

SEQ ID NO: 21936 - DNA, 461 bp, Oryza sativa
tatttcttgatggctgctagctacttgcacaatgctaatctatttattgtttaattaactaggaagactaaaccaattcaacttgtgaattgacaacaatttccccatcaaccacttctatccctacacatgggtattattgttgttctgaatatcatctgtaccgggcggcccgtattgattgcgtatatagctgccatgtttgtcatcttgaaaaaccaacaattctcttttgaaaagactcagcttacttcagccttcagttgaccatctcttattttcaaaattaaatctctcttttgcataactgaatgttctgaagaactaaacggcaatacaactactcctctcattggtatctttcttgaaacaagactagccacttcattctgaatctggaaggctgctttctattgtgaatatatataaaggtccaatacatcgataaagcttggcactat

SEQ ID NO: 21937 - DNA, 430 bp, Oryza sativa
  unsure (1)..(430): unsure at all n locations
agcttctaggttctcgtactcctcaccgtgatatatgatacaattattcggacatgcgtgaatcttctgaacttccagtcctagagggcagactatcttcttagcctcgtacgttgtctcgggcaatttgtttctctccggaagaatgttcttgaaaagtttcaataaatcgccaaatgccttgtcactaacaccattttttgccttccattgcaagaacttcagagtggtatccaattttttgtgcccctgctcgcaacctgggtacaatgacgttctgtggtcctcccgattgtatataatcaccaaaataaatttactagaaattttggcatgacctcccctcttttttgaagaaattttgaagcttgctgacaaatgttactaaaaatcccattatattccccgcacaanaaaaatcccattatat

SEQ ID NO: 21938 - DNA, 365 bp, Oryza sativa
  unsure (1)..(365): unsure at all n locations
nagnanaatagagataagntaacaaactgtctccagcaactttctataatctatcaacattcacgctctatctgtgactctcagactactttgctaagaaacagaaatgttactctcaaacctcattcatctacgccgctagaaaaggcatttcccccgacgcgggggtcttattttcgcagtctgacatgactctgggagccaaatgaccgcctaaaaaaatataaatcggcatgaagttcattgtccgcctgcgaaaatctattttcgcaggcggaccacttaagcggcgcaggcggaccatataaggagcgcctgcagaaatctattttcttccgcaccttattgggcccgcttgcaaaata

SEQ ID NO: 21939 - DNA, 441 bp, Oryza sativa
  unsure (1)..(441): unsure at all n locations
ctgcagcttcccgtctcccttaccttttttttattttacgagctctncgcgccctcttccatggggaaatgggagagaggaggaaaaaaggagggggtgagaatgacatgtggggtccatgtagggatggcaatttcccccacggggccgagtcacctgcggggacccgaccctacgagggcgagggtgggttaagtttctgacccgcgggggaggcaggggcggggctccgcatttttgcggggaggggacgggggagacagttcacccgcgagtgacccgcgaggccccggggggtgtatattaaccctttaaatgtagctcataggaggcccaaaagagcccaacccaataaaatagagataaaatgaanaggaaccctagccttatcctcaccagtgtcttcccaactcctctcccggctcccgtacgcatcaccca

SEQ ID NO: 21940 - DNA, 470 bp, Oryza sativa
  unsure (1)..(470): unsure at all n locations
acactatgaaactcagcttactgttgaccctttaagatgcttgaccaacttctttaagttgagtaactgcggtataaaggatttaaggtattgggcacttgatcacgcgcactttggcctaagcgaaaagtgcctaagtccctaaaagaacgtgacaggccacacctgaaaatatgggctgcagacatattaggcctaggccaaaaaatatgccttcgacaccctttaaaggatgacgcatgtaacatgctcctgagtaataaatcttccgggtaatatagaccaggtgtagctcatatgaacagtttctgatctgagtgattatcccttaggagatactccaaaatatatataataattgaatcccgactggcgcaagtattcggttgatagcccttacggggaataataattggtccagtctttgagcatagaanatagacccatgatcatgaattcatggtgatata

SEQ ID NO: 21941 - DNA, 440 bp, Oryza sativa
  unsure (1)..(440): unsure at all n locations
gcttagacgcanaatgtgacatcctgactctattataatgtagcatgcgtggtacatgactaccgtgttagtaccgattattagttaagcaaagcaaaactaacttatgaaacattatccctccaactataccactttcgggttaatccttataccgagaatacaattgtaagtgagatgtcacgtggacctacccattggatggttgggttaattatgcggttatagagaacaggctgctaaaaagaagagagttcttttcaaaccctgggccgagccagggtagggcttgaccaaggacagtcttttctagcccggcccagcctgacccggcctctgaacatagtcactcgatcaactcatcctcagcttccatccggttcacctcgcccgccgattggccggagtcgccggcatacacatgtggcaggcatatgcag

SEQ ID NO: 21942 - DNA, 473 bp, Oryza sativa
  unsure (1)..(473): unsure at all n locations
cggacctataaatctcagcttaggaggacggcgcccttcctggtcgtggaaccatggatatggaagcaggaggtactgaaccccagcccgtcttaggtcgcatggttgcgatcgaggactacgttctctgcggttttctccctccaccttccgaatttcttctcttggttttgaacttctatggtctttctttgctccatctgaaccccgattctatagccttccttagtattnttttacatctttgtgaggcctacattggggtagagccctttctcgatctcttccgcttctactacgagttgcgttggatgtaatccaacagggtatcacgatgcgttggattccgacttcgggatggcctgaagtcgcgttatatccccttccagtgtccctcctctcgcagcanatggcggacgaggtggttctatcttcagatagaagattcggaccctgtcttcgcttgtcctgag

SEQ ID NO: 21943 - DNA, 370 bp, Oryza sativa
agcttgattcatgcatgcgccatcccattctgttgtgtgatagaacccatgtgtagtgtgacgaccgatgatgagacgtagactgctatcactactacacaataagttccattccctggagcattgtcataaccgttgctcgctgtgaatgcgaataatgtcacacctgaacctgtctcgctaacttgaacatagtggacaagggctgtgactatattttaaagcccctctctataagttgctcacaccgactgactgataaatgaatatgaacatctgaactgaacatcgtcctgtgcacacatggcgccccaccagcgaacacatggatatctgtgaccccgagcataccttatgcaaatctacatgt

SEQ ID NO: 21944 - DNA, 398 bp, Oryza sativa
tcacacacgttcgaagagaaacatgacaataggggacgtattctatcatgttaagctgtgcatactacgtctgagtaagaaggatgctcaattggacactatttctatcaattcggaccctttttgtagaataaacactgacccactggagaaatactccctacgtatatacacagcaatggtgatctagatactacgagcatatacactgctaattgctggagtagaacttatcacgggactaatgacaatcgttgcgtactgattgctggtggaatgaaagactataatgaggtgtgtgaagaagcgatggctacttataaaggtcaggataagtaaggtgaggaatgtcactgtagaaagatggagtgctaatacatcacttgcatacacatttt

SEQ ID NO: 21945 - DNA, 435 bp, Oryza sativa
  unsure (1)..(435): unsure at all n locations
agcttgntggcagtttttgagaattttatgtgttggtaatctagaattttaccaaagaatagtctttgcaagatggcagtccaaccagcctggttttctggaaattttcttcgtgactgcatggcatatctggaaacagcgtaatggactcatcttcagaaattttcagccttccttccattcttggaaatctctcttcacaaatgagattcttctgcatctttgcagaatgaaagatccactgaagcaatttgtttctaattggttacaaactttataggatttttttcattttcttttgtttcttcatgtaaattttactgtaattattcttttaataaatgaaaatcacactgctgggcaaagacctggcagtattttcagtcaaaaaaaaaaaaacttccaggtagagcaaactgaggtaacacatgataa

SEQ ID NO: 21946 - DNA, 455 bp, Oryza sativa
  unsure (1)..(455): unsure at all n locations
tctcggntntctagtctcgtcatgaggcatagaatcttattccgagaagatacgcgcgataaagaggatgcgccctcagtaagcttatggatgtgcagtgtgtcacgggacgtatggccgccctaagtagatttatatcgaggctaggagagagggcgctacccctattcaagctcctcaagcactcatggccatttgtgtggacggaggaggcttancaagccctcaaccagttgaaggcctacctcacctccccttcgaccctggtggccccagttccagaggagccgctgctactctacttggttgcgaccccncatgtggtgagcgccgcccttctagtggaacgcgatgaacatgacctgcggatcccagtcacaagcccggacatgggagggaaccaggggcccacttaaccagcgacagtccttcgttcctatcggccaacgccaaag

SEQ ID NO: 21947 - DNA, 428 bp, Oryza sativa
  unsure (1)..(428): unsure at all n locations
agctngcttagtccgaggtcacacttattctttttctgcttccgccatcatatcgccctccccgtcgtccccgatgaggggctgtccgtgaacggcaacgtccttctctggaaatttcttggccttgctctcacgggcagcggcgccattgcttgttgttgttaatttttgccacgatcgattgtccatcgagcggcggtggtacatgaccaaaccgcttatgttgcctcatattgatttgtagatcgatttgcatattagcttacccgtcaacggaacaattaaagttggtacatgaatcctatatacttatatagctcatccccactaagggtagatattggtatncctctcttctctcattaagccacatcacctcaattatttctagccactagagatctatggttcaaattgtctcttccttc

SEQ ID NO: 21948 - DNA, 433 bp, Oryza sativa
  unsure (1)..(433): unsure at all n locations
tcctgcaagtgagaagccccctggcagctcgaccgatagcccagatctagaaggcactgagtttcatgaggaagaaatagaagaaggagaattggcaccagaaacacaagttatagacctcaaggaatgtggagcttcacatgcctctaacctagcttcagcgaaggatacaagtggatctaaggtagacaccaagagagattcttctgtgctgtcatatatacgcagtcttggattagatggtcaacaaaaagcactaactgaacgaagcaagatggcaccaaatacaacatctggggcttccaagactaaaaattgcatgagagtctatccgatggacatggaggaaagtggggatgctgtggtgatctctgagaggcanggcatataatgtaagaaccaggcagcttcgcatccttgtaatcttacacct

SEQ ID NO: 21949 - DNA, 308 bp, Oryza sativa
aactggcctgcgctacactaattgtttatgtcggggtctgtgcataaaataggctcatctttttacatcgatgcactactagtaaacaatttgtctggatctagaggcagaagctctccaatggagcccggctgtcttggctccatgcctctttggttctgccgcatcacttgattattatgagaaaggatgaatcttgtatgtgtatcccagcgtgttacctggacataagcagctccagtgagggctgcgcagacacacatattcacatcctacgacacacagcgcgtgcccaccaaaactcaccc

SEQ ID NO: 21950 - DNA, 436 bp, Oryza sativa
tgataccagtatgaaaacccacatcaccatatggtattttattcgggtactgcaatgacataagggctggatgaataggtgacaactgacataactcacctgaatgcttctgcacaatgacatcaaactttgatacctcacaagatgcactatgtataatcagtgctgccaactcagaggtggtgggaaggctgtaacggtcactctgagaatggcctgacccaatgagcttgatagcaatctcaggagcacttgaagaaagcagcttgtttcgagcaagacggaactgctgcacaagaggattgaactgatcaagcatcgagataagctcttgcacaataacaggatcagggacatccccacgattatcagtgtgatcaaaaatattaagcctattctggagctcattggcggggtcatatatgtacagctgggc

SEQ ID NO: 21951 - DNA, 384 bp, Oryza sativa
agcttaataaatccgtctagcagtttactggttgaatctgcaattggggtggatattaatctatgtttaatactttaaatatgtgtctgtatacttaaaaaagaatttgacacacgaactatacccggcctcaggtagaatttcctttcctatgtgtagggacttcagacccgtgctctttgatttccgagagtctttgtttgtcgaggtgcaatctgcacggtatagaatcgagttactaccacctataacttgtgatcccaagttgagcagtacatgtaaaccaaaccggcggcaaagcatatgcagttcgacggcacgcgagtactccttgtggaccgacgaacgaacagcgcgtacgcatagcctgatggaggcacggac

SEQ ID NO: 21952 - DNA, 451 bp, Oryza sativa
tctggagatgcatggcattgttaacgattgttatcattattatgggtggcagatgttagcggattaattacgagtatctgctcatcttttcgagatcgagagaaaaagagaaagacaaggtcaatcatggggaatggatgccatgggctcaccatgggccagtaattcggtctgacgctgtgacgaagtgggcttctcaaaccaaaattactgggccaaattcagcctggccctgacctcaaaccatgggctgggccttgccgattaactcaagtcgatcaccacagatcaacaaaggatgagtggtgtgtcaccgtacgatgacacattgagcggccattattgatcgcacacaagcatcctttggtcatagtggcaatcctgacctgcactgcactgcacacaccggctaggctacatcgatcgtcgccagtgcagcgtaacacgcact

SEQ ID NO: 21953 - DNA, 392 bp, Oryza sativa
agcttatctcttacgctccacgaattgtttatttagaacaccaccaccggctcgcctcgaccgccgccgactggtgtttccgcctgcacggctggcctattatgccgtcgttgttgggcgtctacgtcttcaccgaccggcttgccttcgccgccgccgactggtgcttccgcctgcacggctggcctttatgccgccgttgtcgggcgtctacgtcttcaccgaccggccgtctcgtccgccgccgactggtgcttacgcctgcacggctgacttattatgccgccgttgttgggcgtctacatcttcaccgaccggccgcctcgaccgccgccgactggtgtttccgcctgcacggctggcctttatgccgccgttgttgggcgtctacg

SEQ ID NO: 21954 - DNA, 432 bp, Oryza sativa
  unsure (1)..(432): unsure at all n locations
ttagcagacttcgtcgccgaatggaccgagtgctttattacatgcctgcggagaagatggagtactagactatgtattttgacaggtcaaagaggctttcaggcactggagcgggggtcgttctaatttccccgactggagagaggttgagctacatattatggatacatttttctgcgtctcacaacatgacggaatatgaggcgcttcttcacgggcaaaggattgcgatctccttgggaattcggcgtctgatagttcgtggagactctcagttggttgttaatcaagtcatgaaagagtggtcctgccttgatgataacatgaccacctatcggcaggaggtatgcaagttanaagataaattcgatggccttgagctaacccactctcttcgacataataatgaagtagccgacacacttgcaattt

SEQ ID NO: 21955 - DNA, 429 bp, Oryza sativa
agcttgatcgactgcaagattctccacttgttgacccactagtgggacagcacactagtgcgcaccgcctccttcatcgacaacaagaatgacattatggggtggattagatcattagggagttcgctgatcctatcttttccatagggatgggagggttccttgtggcctgcagtgtagaagtggatactgatttacttagtgtagctacatgatcttggagaaccacacaaacaacttgcaacaaatttacaattttaatgcatgcttaagtctagcttcacagagatattgctatcttaaatgcactttacataaatgataaagaatttacctagggtaactttgaggtttttttttaaaaaaaaacagtatggatgtgaggctcacacatcaatcaggcgttgcataagaataacaaatattcat

SEQ ID NO: 21956 - DNA, 407 bp, Oryza sativa
  unsure (1)..(407): unsure at all n locations
tgtgtatatgcggcaccggcggttcctactcacatatcttacgtaccgcaagatgaaggcggagttcgatggcactgaagagactgatcctgcaccaaaacctacaacgggggagaaagtgtgtgcaatgacagagaaaattgtttgcgagtttggaaaagtgactaagaaaccatcaaaggggacaaagcgcaagaaacccgagaagactactaaaccagaggattgtaagaagcaagatgatagttcgaagccagatgagtaactccctcccccattcaagaagcattccatattctntaagtacctcccatactggaaagatctggagattcggcatggcatagatgtgatgcatctagagaagaatgtggttgacaacatagttggaacatttgtggacatgc

SEQ ID NO: 21957 - DNA, 411 bp, Oryza sativa
agcttagctagatacacgacagtcttgtttattttcatatactaattatagtattatgacgatcgatgcagaacgcaggccgttcaactatattatatggatactctaattaatactaactcgggctatatttactcgtattattgtacgggggatgaaaatgatgtggtggaatttttatcatgaaaaagaagtttaagttgggagggattaacttacacagataaacacaaagtatgagatgatggtttggacacacacgtcaaaaaagaactgttgattgctcggtcttgtttgtaaattgtgattaagatatccagctaatcggtgaaggttgccggagttgattatctatatatatgcatcagttgtcattgcattatattccgttatctaaattttttctaccat

SEQ ID NO: 21958 - DNA, 431 bp, Oryza sativa
  unsure (1)..(431): unsure at all n locations
tggaatagtagagttggttgactatggcagattggctgtatgccaaatcaatgacttactgattcaactcttgaccacttagtatttgtgtagatgtagtgcttaaaacaccattgttgactttcagatggtctgtactgtttgtctcgagagatgatgttattgaaggctgttatgtgtcttgcaaccaccaccacctgcaagtntagatatctgaattctcgttctggaataatatccttgaacaatttgtaatgatacgttttaacaattttcttggtgaaatgtacgtgcgccatgacgaaattgttgaacatgtttcatcaattctaaaaagcaatggcattgctcattctggggaaagcattgacactggacaacttgaatggtttgacatctactggctatatatatatattcagttcatgttt

SEQ ID NO: 21959 - DNA, 449 bp, Oryza sativa
acctgcggcatgcaagcttagagaagtgcaagcgaggtgacgtttttctatgttttatgggagaagaagtgagctgaaaaaaggccggaccgccgctgattagcagctggcaatggcatcgtcagctttcgctggcgtggctcgtgttggcagagctggagctgctttgcgcaacaggagtcaacgtgattcagcgagcaaacggtagccgtccatctcgcccccgccacacgaatctcgaggccggaaaaccatgtccggctcccagttttacaggctgtggccattgcattaccacctcttcttctgccgctacagtccgagatccccaggcacggatcttggcgcttaatgaagtgataatttttactggttattagtaggtggcagtctggcagacatgccccttggcccttgccatatgactactacttgcaggaattgttcgc

SEQ ID NO: 21960 - DNA, 425 bp, Oryza sativa
  unsure (1)..(425): unsure at all n locations
ttatnttcaacctgcaaccccaaccagggtgcttgaacctatgctacaagcttctcacctcttggagcggctatgatacattgagcaggttaaggaaggagcctacaagtgaacaactccgctgcaagcctgcactgcacctctgagctcaagaagggctcctcctctctaatctttgcacaggtgagcccatcttagcgaagagttgaactctgtaaccactaaaactacactatcagttagagaactaaaaagagcaaatgatgcacggtagagactgcatggaatggggaagcatctcacctttgcagataaaatcatccaaaggaagtgggagcctgngagttgttgctgtggagttgatcacctaataaagtctttgagcctctgagctcttgacacctcttttcctctctctttttctc

SEQ ID NO: 21961 - DNA, 456 bp, Oryza sativa
  unsure (1)..(456): unsure at all n locations
taattacatgcatntactatttctctaagtaaagttaatgcatttattcaattgtgtccgagtcttgtgggaggcttaattctagacatgcaatctcaggttttcttgtaaaatacagtgccctccacttcagattaaaatttatctagtcattgcactccacagcaacggttttaacccctttgattgtccaatttggtttcatctgaatgtgaatgcatatgccactttggttgcaactgctgtaggatgacagggataagatatgaacaatttgaatttacaaaggtctcttttcctggtcaagaccaatttctttgtggtttatagtgagagggtaaacttatctgcccgtgaattgctcaattatttaagaactatttcttctctctttttgcggctatgttatttttctggtttacataaagcaatggccatgcattgatggcaatatag

SEQ ID NO: 21962 - DNA, 438 bp, Oryza sativa
agcttgagagtatatcaattattatctggtactatgcttacaagtgtacttgtaataaaatcctttgcaatccagtgatttagtagcatgcttctctttttgccttattaatttgttcataaattgcccatcaactaggggttattatttggttcagaaatttctcgtacattttagaatcagagaagttttatggtgtttgtgttccaaaatagtaacccctcctgttgctaccaccaagcagtgccacagtgtattcattaaattggtggaacacttttttgctccatacaaatgagataaatgaacataagctgagaaacgaaagaagagtcgatggagatcacttcctaggaaattagtgtttgctgatgaattctaattgacatgatggtcgtgctaatgcaagtttaggtagctagcaaagcctatgctctc

SEQ ID NO: 21963 - DNA, 439 bp, Oryza sativa
  unsure (1)..(439): unsure at all n locations
tataactgaataatcatttgatgaacttagttcagtttatggttgatacagggaaagtaggatgtagatgttcatgcctttggataccatcagagcaagagatcaaactggcaacaattgctgaacatatctccaagaatagccaaccaaatggagttgtcaccacacctagctcactaggccaactaaggacatacgaacaagagcatgtgggtttctatggtatgcttaggaggcatcangagttcttctgttacagttgtacagttcttcagtgccaagtgctgaactgacctccaatggcagtgctgacatggctgaagaactgttattacagttggcaggactacttgtctttgtggaggctcacgcttcatctcgttctcgcacatgctacaccatctaggaaatggcatcctggtatcaacttccaacatag

SEQ ID NO: 21964 - DNA, 438 bp, Oryza sativa
agcttgtttagctcattaactcaatgaattttttctcttggactccatgcttgccaaccggcgctccctatccatgaaggccctgcggcggctgtgggagaagcggcgtggtcggcgtggcccatcggctgcagcgggaggagcggcgtggtcggcgtcgtctgcgtggcgctgcggctgcgggaggagcgactggagtcgtcgcctcatcggcgtggccttgcggcctttgcggctgcaaccagcgggaggagccggtgggcaaggcagcgctgcatcctgtggcgtgccggcggcggaaggagaatggcgaggcagcgctgcggcggcgcaagagaatgcgacagcggcgcaagagtaagcgacggcggcagcctgctactctgcggcggcgcatgcgcatgagaggcgcatcggctgacgacggacatactggat

SEQ ID NO: 21965 - DNA, 435 bp, Oryza sativa
tcttcggctcgctgcagtgcttgcttcttttccatctcatatatacgcatggcccttttataggccatgggatcgagcgcacgtacaggtatatatactgtgtacagtacatgcatgttcacaatgcaaacatacgtagtagctatccaaaacgtacaaactactagtaacttgtttacatagaactacgatgcatgacgcacgcgcgtgcaaaaattaagtccatgtatggatcggactagcttattattaacttaattgtctccatctaataacaaactgtgtctagattgcatatatatattcatattccatcacaactgaaatatgatctatctgatttgcaccttatctaattccgacaagtagtaatcgaccatgcatatcataaacgtatatccgtcattatcaatccccgccactagctaagatatg

SEQ ID NO: 21966 - DNA, 455 bp, Oryza sativa
  unsure (1)..(455): unsure at all n locations
ttagagtcacctgcngcatgcaagctttctgtcatttatcaacgccttttttctctaaatagcgctcctggagaaggattaattcgtcaggtcaagactgaacatatcacatatgggcatataatcaaggcagtttgatctgaagaaatgggtcacctcgatatggaggaggtacaaatccgaatccaaaacggtgttcgtcaccatgtggtgaagccaccgtggtatgaacttgtcaggccaggcgctgacgctctgtggaaacacccatatcaccctgctccttccaggagccacagggatgcacaagaacaccagcatcccctgaggctgctgctgctgcttctcctgatcaaaatctgaactttctagacggtttttttaacctgaataatgcaacggatcgagagggtggctgatgcttgatacgtgccactgtctcgaggggcaactct

SEQ ID NO: 21967 - DNA, 59 bp, Oryza sativa
gttgttcttggtggatcttacatttactaacattgagttctgaaagctgactgcttttt

SEQ ID NO: 21968 - DNA, 432 bp, Oryza sativa
  unsure (1)..(432): unsure at all n locations
agctntggctgctttatggagtagtacgttgtatgagaggtacagggaggtagctgcggcaaagtatagcccgggtggtggattgattgattgatgcatgcacggattgatattactgcttaatgctgctgcaccggtgggctcagtgtgcaggcgtgcagctagtacgtcgtcgtatgtagagcattcattcactcaacaagcataggcttaattatgcttgctactgcagcaacaggcaacaggcaaccaaggcatgcatgccgataatacacgagggagcagagaaggttctgagaaaaactgtactagcaggagctcttttatctactcctacgtgaggacactgccactccgaatccaagtgcatcgtccagttccaagcgaaagggtggaagcttggagagcggccgatcgagctgagcaggaggc

SEQ ID NO: 21969 - DNA, 441 bp, Oryza sativa
tgcctccgcgagggccgaagaagccttttccggcccattatgcctatgggccattgggccgacgatcgcctaacggcccatcaggagtccatgaacctctattacactatgtatctatgtaaatgtccctttcataagggtaaccatgtaaattcccctgtataaccaaaaccctagtagtaagaacctgtaataggggctataaatagtctcatagggccatgtaatagggggatctaagaaaaattctctaatcaatacactttactttcaaccactgttgagtaaccacatctttcgacgtatgcagttgtcgtttcgacaacagttggcgtcgatcgtggggacctccgagcaaaaccactgagagcaaacgccaccgaagaatgtcgtataggagaaggatacaaggcgaaaggaaagcgacgctcgggtggatat

SEQ ID NO: 21970 - DNA, 470 bp, Oryza sativa
ctccacccgcgatctctaagtcacctgcggcatcaagctatactcaccatgcgaagctctttctttttcataactcatgcttcacatgacaaacctttattttgaaaggaaaaaaatcaatatttattttgaaaggaaaaatcaatctttattttgaaaaaaaaaaaatcaactcttatgcacttccgcttatgtaagaacggtatatgccctgtgaaaacacgtgaaagttgaacataaaaagttttataattgcatgaaagaatactacagataggtattgatatgaatacatcctcaccaaacctcatacttatactattaacctgattttttattctttataataaagttgagcttatacttaagatttggtgggaattatatcatattatactgatctctgtaatattttttctattaaaataatctcttttattaaattagagaacttctaagtctggttctta

SEQ ID NO: 21971 - DNA, 392 bp, Oryza sativa
  unsure (1)..(392): unsure at all n locations
ngatggcagtgatggcacacggaatgacatcatatagtttctattcctgcagggagacacacatggcctggaggaatatgatacaacgtaccattgttggatccgtgggaatgggcaatgacactctctccagatcactgtacgacagcgctaaggggaatatccgatgctcagtcttagtgccaggtggccctaatcaagactttatgagggtcttcatggacgatctaaatgatctcgacatggagaacttcgacagtatgcatatcacataaaacgatgtaaggctactcatgaacgaggtctaccacttccttgaaaacaagaggcgcgctcatgatacttatactaattacactcgcataatatactttcgtaccatgggactataa

SEQ ID NO: 21972 - DNA, 433 bp, Oryza sativa
  unsure (1)..(433): unsure at all n locations
agctcggatcaaggtgaagaaggcgatcttatgccaccctcaccgatcaatctagctcgcccaagaatccaccaaagtatccaacgagatcaccccactgacaacatcttatgagacatcaacaagggagtatccactcgttctcgtattgcaaatttttgtgagcattactcgtttgtgtcttctcttgagcctctaagggtggaagaagctcttaatgatccggattgggtgatggcgatgcaagaggagttgaacaatttcacccgaaatgaagtgtggactttggtggagcgacctcgacaaaatgtgattggcacgaagtggatcttccacaacaagcaagatgaagctggggtcgtaataaggaacaaggcgaggttagtggcgcaagggttcacctaaatcgaaagattaaatntcggtgacactt

SEQ ID NO: 21973 - DNA, 458 bp, Oryza sativa
  unsure (1)..(458): unsure at all n locations
ntctagcctatagtgggtctctaggttcaacattngcataaagctaattttattgagcaattaatgagttaaataagcaaggacaagtaaatctagcatcattttaatttatggacagcaagtatataattctgaaatgtataagcaaatgagcccaaacggcgctctcatcatcaaccatggactaccaaagtccatgccaacatggcacaacatgccaacaccaccatcaaacataatcccatccataataatccacatttgatgctaacataactgactaacacatcaagcattgtccataaccgaggacacggctattcgaatagaatatactctgatcagaggtgtacaacaggacccacacgaaatgaacaaagatcaaatgctacataccccgtcgagtgtggtacacaagtgattcaagcttattacatgcccgttcttagccccacccc

SEQ ID NO: 21974 - DNA, 348 bp, Oryza sativa
  unsure (1)..(348): unsure at all n locations
tgtacagtttgggaaggtgttttntgagagaaaagatttatctacttcaaccgatatgcccttaggcacggccatacataacatagaaatcacacgtggaaggggtgggcaattagctagagcagcaggtgctgtagcgaaactgattgcaaaagaaggtaaatcggccactttaagattaccatctggggaggtccgtttggtatcccaaaactgcttagcaacagtcggacaagtgggtaatgttggggtgaaccaaataagtttgggtagagccgggtctaagtgttggctacgtaaacgccccgtagtaagaggggtagttatgaaccctgtggaccaccccca

SEQ ID NO: 21975 - DNA, 419 bp, Oryza sativa
  unsure (1)..(419): unsure at all n locations
agcttgaattnttttctgctccggatctatctttaattacacagctccgtgttttggctgcagagagtgcatttccgtttcatctactgcgtggaggacctggtggtgaaccacaagcaacgggagtgggaatcctgcttcgggaagctcaacctcgatcccaagcctgtcaccgactgctacaagggcgaacgcggccaccaggtccgttccagtaatcccatttcttggggggcaaattgcaaataatcctatgatcaattgaatgaattgatcatgtctcctcctgttgctgattccatccattgctctaatcttaatgcctgacctgaccggcattgtctgcatcttgatttactccgttgatccagctctcgctcaagtatggaagacagactgacgctttgcagcctccccac

SEQ ID NO: 21976 - DNA, 449 bp, Oryza sativa
  unsure (1)..(449): unsure at all n locations
ntacggttattgggttcttttgcggacaccatatccttataccctctttgggtagacctatgagctaacttataaggcgaaaagtctaagcctaaacaaacaagcaggttattcgtttggtccttttaagccataagccactctaacactattaagccataagttatgttggagaagctttattttcttttttgaggtggatgcataattccaccactaaactcaggacattaaatccaccgactnataaatcacataagccaattaggccaagcctaaacaaagaccgatgaaaatcatgaatgccattttatcattgcaccctcgattcgttttctcccatctacttcctccatttcacaatgtaaagctttctggcattgttcacattcatatagatgctaaaaatctatatatataataatgtctaattcattagcatctatatg

SEQ ID NO: 21977 - DNA, 430 bp, Oryza sativa
  unsure (1)..(430): unsure at all n locations
agctntatggacgcgctaatgtttaatttgctccacccttatcggtgaggacgagcggctattagatgtatcacgatactcaggggtgaacgtagagtatgtgagggggtgcccaggaacccggtaaaaaaaatttatctgaatctcacctatttttaccatgtgtgcactccctcaatacaaacttatacacctatatcacgttaaacttgatctaaagttaaagtaaattaagcaagtgataccctccatttcgttctagctccgtccctggccacatttgtgtggtaggagagaaagaggagcagtgagcaacggtgagtagtagtattagaggacatgaataaatggattagaggcacacttatagatagagagatggtcgtcggtcgattactaacaagatttaatataatagagtgaagcgact

SEQ ID NO: 21978 - DNA, 376 bp, Oryza sativa
tatgtttatgatgtaacacattataaggacgcggttcttttatgtagtgtttttaaaagatagggcgatcaaagtttaaacgtacatattgaatgaaggctagtatttggaaacagactagtatctttaaagagaacttgacatgtttctcttagtgtattccacatttgcctttgtcatggtgctttttttttacactgggccaactgacttgcgtgcaattgagtgtgccagccaacgaactttacttatggtgtgtctgttactggaggttcccaattatgaaccatgctcgcataaaatggaccggtcattagcgtgtgatatttaagtctacctatattttataaaaataattaatatggtttataagcaa

SEQ ID NO: 21979 - DNA, 438 bp, Oryza sativa
  unsure (1)..(438): unsure at all n locations
agctnggaccaactggtagcaactcacatatcacaacaagggtcatgggcacatatggttatgcagcaccggagtatgtagccactggtatgtgtccttacgcctaccctgcagttaattatcaacacttaacactgcatgtgatagtcatagtacagctgaaatagcaatatgtgtggaatttgacctctcagtcttcatatgttcccaaatttagcgtttttgattgtcaatcatgtcacttacatttttggatgcatgctatatctcctccttctgtccaatgataaaattcggaattttagctaacagacaatataaatagtccatggatgttgaatagaagtcaagtgtgaaaatgaatattgcctaactagaaaggaagcaataccaagtcattgaatatatagaatagtgggtatgcactagctaagtcca

SEQ ID NO: 21980 - DNA, 464 bp, Oryza sativa
  unsure (1)..(464): unsure at all n locations
tggatgaaccatccatccatctgatcagttagcagtatatttgtttccataattngattgggtacaatgagtggtggatgcttctgccttctggtcattgtgactgcacagtatagggaaagaaacaaacaactgccccaatctaatccagccagttggatcctggattttattagctgtcaatactattttatgtatggtacactgcactcatggntttgttntggttcttgccaactggtgactactcatagctggatggaatttggtcgtgtaacatttcttttataagaaaagtttgtcatgtcaatttgtccaattctatcacaaatcatataatacttgcatttcaatgcaggacagtttgatatttttcttcgatgtatcaatcttagaacttataatatgaccaaagagagctgaaatagaaatcatatttcttgcccaacatatgagatgcatca

SEQ ID NO: 21981 - DNA, 436 bp, Oryza sativa
agcttgcgacgtcattaatcgatgagtactccttgctgggctggcgcgccatgctgactgaagtcaatctgtcaccgaaaccaggcctcgtggatcgcattaactgcggtgcgcacaaagatatggcgctggaagatttccaccgcagcgcgctggcgattcagggctggctaccccgtttcattgaatttggtgcctgtagtgcggaaatggcaccagaagcggtactccacggattacgcccaattggtatggcttgcgaaggtgatatgttccgcgccactgcgggcgtaaacacgcataaaggcagcattttttctttagggctgctatgtgcggcaattggccgtttgcttcaactcaaccaaccggtaacgccaacaaccgtttgttctacggcggcaagtttctgccgtggcctgaccgatcgcgaact

SEQ ID NO: 21982 - DNA, 457 bp, Oryza sativa
ctaagcttgccccagaagcttcatatttgtgccaggtttttgcgggatccttggaggcaagaattgccgctgctgtcgccgggctttctggcttgataaccccaaccaacaatgttcttaattgcactttgccagaatctacccacgggcgcgcctgctgccagaactgtttacaatatgggcagaacggatcggcgaagacgtagacaatgaccggcgcatcttttttaccgtcgaggagccagtgggattgttccatccgttgccacatttcgcgtccggctggtgcgtaaatttctttttcgataagtgtgttactcaggttttcacctttctcgttgtacatgtaaccagagatagcgtgcttaccatctggagtcaggtagatggtgacgcccatatcctgatactttccgagataacctttcattcctcctggggcatcgaatgttttgat

SEQ ID NO: 21983 - DNA, 422 bp, Oryza sativa
ttcctttcccatttcagataattactgaatttttggtatttgctctcagtatattgcatcatgtccttctgtatacatacaatatctgaagaagaaaaaatggctgtgaataagagcagactcttcaagtgatgacaagagtatctgtaattcttcaatcaccttgaaacattgtaatcgaactatgtgttctctacgtacaactgaaattttggtagcataggattcaagtgccaaacacatggttcattggtcatggtcacgcaacagcacaatttacatggtccaacactcatgcagtccacaatttgaatcgagtttttcttcacaaatcagaatgagtaatattgtgcaccacttacgtcaaaacaaaagtgataacagaaacgaagatgataccagaagtgcaaagcaaaaacagt

SEQ ID NO: 21984 - DNA, 472 bp, Oryza sativa
  unsure (1)..(472): unsure at all n locations
gacctatgaaactcagcttgtaagaaagaatatgcctgtgtgttcttctcctccaagtcactgattttcttntttggctgcccatgggaagttngatcgtgtattgtctgcttggtcggtgcattgntattttcttccacgtgagttggcacaagtgcgtctcatatttcttgacctactcctatgtgcgttgattggttgtcattctttgaagctgcacgaccgagaaggtaagacgaatcttgtccctcgcagtatgcatttcagcgttcttatggaagaagcttctaatcaaaaggaaatgaatcgctctagtaatcccaaatccaacacgcaattctgaacgtcaaatggaacggaatgctagaaagcgaagggagactagaaggtcaaaaacttggaaaaaggaggagactgaaaatggaaccgatttcataaggagctgagcttttcatagctccgcttttgataa

SEQ ID NO: 21985 - DNA, 437 bp, Oryza sativa
agcttgtagatgtcgtctatagggctggttgttgtattgtagttgcgaaagaatcttgaatcgcaacaattaaattcaacaggaccataacttgttggcacaatggctcggactcggaacttactgacagcttttccgctaagcaaaaaatgctgcccggaacttccgggaaggcaagacttagcctctgaccagcctatcacactaagcaaaaggtaatataatgatacttagaagttagagtaatatgcaggaccatagagtagcagcagaagacaactctcaataatcacatggagaacaccacacaagcacgggagattaacacaagagggagacaaatattttatcctgaagtttggatcataaggatcctactctccgttgaggatcaaaatatagaacgaaagttagataaatctccgagtccttttgcc

SEQ ID NO: 21986 - DNA, 460 bp, Oryza sativa
tgccgcgagtcgagacgagggtgtatctggagcactacgtcgtcttctaggacgcgtggatcagcaagggactctacaggtgacgagctcttcgatctaattaacctacgactacactcacaattaatagaaaaattactacctgaaggctaaagccgcatcacgtacgactttgtcatctttgatgtgttgttcttcgcatactttcatgatgaccctactcaacaacgacctgtaccttgaggcggcaaatgctgacttcaccaacttccagaggctctacacgctcgagtggctcagcctgaaaaggtcaccacacgatcctcttaactatcaatattacaacatcttaatatattccctaatcaactaacagtctgatacgacgaacctacgatgtatttatgtataacgcgggtgacagaatacgattatgaatcaattaatatatcatgtgcta

SEQ ID NO: 21987 - DNA, 436 bp, Oryza sativa
  unsure (1)..(436): unsure at all n locations
gcttgagacggncgttctgtccatatggtgatctatttttattctacattntattttttttggctaaaatttagtgcaatttgttgtctccgctaattaatcattgctgctgctactacgattgcttgtagcttgaacacaaactctttcgccttcatggtgccacttggacttggtgctgccataaggtcaatgtctgaactctgaactctgaactctgaacagagtctgaagtcataattcaaaaacaaaacagagtccatttctttaaaaacaaaacctgtgaactctgaaacaacaaatagactatgagaaataccagcagtttcgagaacattgatcgcttgattgattcgatttaccagtacgcgcgtgtcgaatgagctcggagctgggcgaccgcangcggcacgcttggcgacccgtgttgtgatgc

SEQ ID NO: 21988 - DNA, 451 bp, Oryza sativa
  unsure (1)..(451): unsure at all n locations
tctaagttcgaatcgaacttacaatatcaaatattctccgtctcggtgtcgtatctcttctctggcggcgatacagtaaggggagagaaataataatgaaaataaaagggaaaccgtacaaaacaaagaacgtggcttatgtattctagtggattttgctcctagcctacatgtaagttagatttcgcgggtaaacgggcaaagcgggcatgcttagtgattacccatacccatgcccatttacccatcgggcatagcttttgacccaataagatactcatgggtataaaatggagaacaaacccaaccctaatagggattntacccacgggtaaatgggcaaacgggcacaattggcatccctactaacgagatatactcagaatatccatcacggtggcccggcgcgtaactaccttgctattatataaccagcctgataggtgaatct

SEQ ID NO: 21989 - DNA, 429 bp, Oryza sativa
agcttgttacattcggttaaatgcctatttgcataatggttcacattaaccagaaggagaattgttgtcctcttaagaatatgatcttctttgtatctaatgacaactacaacttttcttttcaaaaggtccagctatctcgtgaggttatcaatctttcacctctatcaacagcaattatctctcataggtcggacgatggccgtgagtgcaaaactgggtatgttaggctagctgcattctctcaggtaaataccagtattttatatgttttggttctcaattttgcacgcgagtttcatggtactaagaaaagttggaataattgatctcagtaacaaactgtgttattcaatattgctttctgtacgaattgattaaattgaatgtttacaagtattttgaggattccagcattcagtaatactg

SEQ ID NO: 21990 - DNA, 460 bp, Oryza sativa
  unsure (1)..(460): unsure at all n locations
taacacgttcttagtctaagtggcatgtgaagaacggcttatantcatggacgcaccgcctaaaaagtaaggtacggattccttaaaattgcttttgcccacaatttgttcattgtggcgagacgctccacggtttagccacactttacatattagttgtgtccgccactgaacacaaagtggattttaaactctcaaagggaaggtttcctcgttgtttacatgacactcaaatagttatggaaaaaattaaaaccatttgagaagatgtattaatatggatatattattccacaaatatgcaagttaaaattcaacttctacatttcgcagagaaaatacaaatttgattgtgattataccgtaactaattatagcttaagttaatcttttcgtgcaagatatagaagttgaatttaaaattgcatatttgtggagtgatatataacatattaataca

SEQ ID NO: 21991 - DNA, 206 bp, Oryza sativa
tctcatccatgcacagcggatgtatgttacactaccaccaatactacaatggctactcaacagctcagaacgcagacataacactaacgcagaaaggtggcgaggatgcggaggcgatgcacaggcattcgcaccgacctcacagacaggggagcgcgcgcgaggccacggaaagagcggcaagacacggtaactcagagaaacca

SEQ ID NO: 21992 - DNA, 275 bp, Oryza sativa
  unsure (1)..(275): unsure at all n locations
atggaactcagcaaagcagttattaatagaagccctacatgcagctgtaactgatatgaactcattaacacttgacacactgcaaatanagatatttaacttccttcacaacaaactaacacctcttaaatggatagctcctcaagtgcttacgtatagctgatctaatctacatccactatcctcaatcaaattccagtgcgatttgacactaggggcaaaagacctggagatcaatggacggaaacaacgacgatcagtcgtggaattcctac

SEQ ID NO: 21993 - DNA, 433 bp, Oryza sativa
agcttgcaatttccacccgacgttctgtctctatccaagcatgaatgaactgtatggtcgggtcatgttgcgttatcggcccgccacttgaagtaactctgactgtgtcaatctattgtacgaattgacatttccttacatcttcctatgtacatccattttgggatagttaagataatgatagtactgaggagtgatgaaaagaatagttataattaccacggaatcatcgtcgacaatgtttggacacacgaaacacctttgtcctcgagttcggtgccttacggaccttatgacctgacaacggtcaccacaacgacactccggacgctcacgccacgtggggagtcctaggggatttacgtgccattctaaagcctcagcagcaattcaacgttcatgctcatccttccgccttaggtagtccgatctt

SEQ ID NO: 21994 - DNA, 447 bp, Oryza sativa
tccatgagaccatgaccttctcaccactaattgctatcttctcttacctttgactattgacttgcacacttgccagcccatatgcccctacaagtatatataatgagcccaccgtgtcattacttgctcagcttcagctctgtgactgcgacgcgaacccatggccgccatggacgagcctcctcagctattcctctgcccgatctccatggagctcatggaggatccggtgacggtgtccaccggcgtgacgtacgaccgccggagcatcgaggagtggctcttcgtctacggccggaccacctgcccggccaccatgcagcctctctccaacttcgacctcactcccaaccacactctcaagcgcgtcatctcgtcgtggctcgatcgcggctcgtcgtcgtcgtcgtcttcctcgcccgcgacctcgacgctgtcgagcccgat

SEQ ID NO: 21995 - DNA, 331 bp, Oryza sativa
ggtgcgcgtgagaggaagtgagcttctatcacatgcacatggagggaggggagggcattggtgtagcatgtgcacgtggtgggcatgaagcccgcttcggtttgatcacagcggccgatgtgaccatgacagaggctcatgaagcatccaaggagtaccagtattcttcctcctcgccgtcgacgtctactactgcttacccgacgcctgttgctgccatccgacatggaggggaggccgtttgaacgccgaccatgtggagtttgtgcggcgagaacatgcctagagaggctagcagggacaaccgcttgcttatgttcagcacagtgag

SEQ ID NO: 21996 - DNA, 445 bp, Oryza sativa
  unsure (1)..(445): unsure at all n locations
ntggtagcatcataccatatgtgtcgatgcatggtgctttctctggagtgcgattggggacagtgtatcatgaaaaatctgaagatacaccttcgtggatctgtggatgcatgaatcatcacatgcaaaactattcacaaatagtagcggtggacatctgtatagatatagaagttgggttttaatctattattagaaaatatgcgcaaatacaattgtgtgcattctagctgtcggcctgccgctataggcggaaagtattacttctataatattaaaaactttacttccctgaactctttagtctatcagtttcttctcttaagtaaacgttttctcactttgatcaagtcacaaaacaataattaacatctcgagagaaacaacccggatttctacctgcaaaagtggtcctgattctatgtaccaaagctatggctacaga

SEQ ID NO: 21997 - DNA, 440 bp, Oryza sativa
agcttggtacaagtctaccctttttatcttttgcattctcttgtcttccatatcttgctattgtcgttgacccctggcctcattgtggtcctatataagagtactgctgctgaatgtgaacatatcttggatttactgttcatatttagcggtaatcaattcatgttctgcacagtcttttacacttttcctcatatttttttccattatatacaatttaatttacagtgaaactgaatatgtgaacagtttttcagctttattccagtgtttatgaattaatatttttcatcatcttctaatatttgataggcacagctggttctgtcatttggctgttcagaagcctggaggctgggccatttgatatcctgaagttttgagtaagaatggagaatgggctgtccgatgaagttcttaaagcagttttccctctactg

SEQ ID NO: 21998 - DNA, 453 bp, Oryza sativa
  unsure (1)..(453): unsure at all n locations
tcgcaaggaggatatatcaaagaggtcattgcagagggctcttctggaggcttatcatcatcaacacaattgttgtctgcaaaacgaaagttagcagcatcgaatccttcgacagcgaagcgaagacgatcacctattgtattgccaatagtcaggtcttcaggagtgcgccaaattatttctcaaaatgctctcatcatggagagatcacaagttcctggtcatatgtccccaagtgcagagtctccaagagctagatctctgtctccagtggcaaggttcgtatcaagtccgtctactatccttgagctggatgttgaaaatcagccaagggaatcaagtcaaccaacacctcatgttgtgactcatcgntctggttagcacctaatacatttgttctanaggactggannattgatcctgatgtagcacgtgcagaacttttaaggatga

SEQ ID NO: 21999 - DNA, 412 bp, Oryza sativa
  unsure (1)..(412): unsure at all n locations
agcttctcgagctcatcggccttgagattgatctccccgtcatcagtaaaaccccttccttcacaccaactttccatttttcatgcatgtcatggcttccctttcttggtatttgtcccttttctcttggaagtagatgtctaaagaagtaggaagtgttgctttcaagtagatctgttgaatggttgtttgttatacattggataccacgtgagatcctgtatatttattgacttcacactcatacttgggctgatagatggtactaggttggagaaaagtggtcacatgtctattatgtgcttggtcttcacattcatcaataataatctgaacatgtaacggaatttcagtggggatattatgtcgttgttttatgatccgntatagttgttgttctttggcgttacta

SEQ ID NO: 22000 - DNA, 289 bp, Oryza sativa
tatctactgagtccgtaatacggtaacaatagataatcttatgtttaaatatataataaagacaaaactgcactagcggttcttaatactgcaacgatgtttcatttaggtccacaaacttgcataacgcgtatcgagatccctaaacttgatataatgaatcatcccggtccaaagtatcagatgaccgagtgcttacttactatgcacgccacaagcacgatgacatgaaactaattcacacatcttccctctattttccctccttcccatctttcaattcttgcaa

SEQ ID NO: 22001 - DNA, 448 bp, Oryza sativa
  unsure (1)..(448): unsure at all n locations
tctatcaaggaagaagcctcaggtcaatctatattctttctttaganatagagataacagatgaaaaaacagttcataactaggcctacattactaactagcaaaaaaaaaatatatcaggcacatatctaagaaaataaagatgcctagggttccccatactacaagtctctgataaaaccaatatcaataattaacaatctaactaccaatagtcagttacagtgcgaaataataaaaattacaactgtaactaaggtatatttccactgtaagtggtgtgagttgcactgtaagtgtgttttaagactgcatgaaacctaaaatattgacttcatctgttaaatcaaagattcaaaactgagaatacaatctgaaaactaaactaaatccccagatgaaagaagtgggcatcacataccataactaaatcaaagaagatacaagg

SEQ ID NO: 22002 - DNA, 441 bp, Oryza sativa
  unsure (1)..(441): unsure at all n locations
ntagaatgacctaactctgctgtnttgctatagacttatactatctatctaatctagacttgaggattaggttgaaatgaaactaacttatatgattaaactcccagctttggcacaaactcctaatggactctaaaaaaggggattgaagcaagggtgagtacaacgtactcaacaagctattatatttaatcaacaatgaatgtatgaaatgataatatctgtgtaaagctaggtttacttgcagaaagcagagaatgcagaagtagaaaacctgtaatgttttaaatgcaacaatatgtaataaaatttctaattagatttctatccaagatgccatagtgagtcccaatgcccgataaccgtgagcaccgctattcgaatagatttgacgatattcatactgcagtagatgtacgctntactcacaatccatgacgt

SEQ ID NO: 22003 - DNA, 431 bp, Oryza sativa
agctggtgggagacatatctcccccattgatgttacttgtatcacattgcatatttccctttccaattgcatatttgctgtccaattggatcttctaaaactgaaaacaacatagaaatttgctaaatagaaaataccataaagataggataggtttgagtcatgctaggtaagacaagctagttctctttgttgaaatgatgaatagttgctctggcttatatctcttatatatgggttcatggtaagtgcattctcaaaggttaaatataagtagccaacaattatctgggaacctgaggtatatgagctaagttgttgcgagatatgaaatagtaaataagagttgctatgatcctgatactagattgacttgaattccgaatgttttgcttttcaaaatgataaaattgaaagtacctcatttgaat

SEQ ID NO: 22004 - DNA, 462 bp, Oryza sativa
ttcttgatgcctactccggctaccaccaaatcagcatggcgaataatgacgaggagaagacagccttcatcatgccgtttgatgtattcatgccgtttgatgtattctgttacgttaagatgccgttcgaactgataaccgcaggaaatactttcctacgcacggtccaaggagcacttaacaatcaaattgggaacaacgtcgaggcctacgtcgatgacattgttgtcaagaccaagacaagcgactcattcattgacgatctccgggaaacgttcgacaacctccgacgatatcgcctcatgctcaatccagataagtgcacgttcggagtaccatcgggaaagctgctcgggttcctcgtctctggaagagggatcgaggcaaacccaagaagatcaaggcaatcgagaacatgaagtcgcccacaagactcaaggaagtccagatgctaactggatg

SEQ ID NO: 22005 - DNA, 404 bp, Oryza sativa
tcatcctgtactggacagacctctcggctgatactcctatacttttcctcagtgcgcgtgcgctgcagtagtactcctctgcttccgcttttctcctgcttcactggccggctgctgctgcttcgattgcttgcgcggcttttctcctctgcgcgaggacaggaaacactgagtcggactgggaatcgacgagacgacgggagtcgctgccgccaccgataagatcgatttcttcgatcgggaaacaatcgccggtggccgggaatagtagatcgatctccaatgctctgataccacttgttataaaaatagatgcacaacggagacacgaatttttacgtggaaaacccttgtgggaaaaataccacgggcgccgaccggcaatgatcactatagaggagatg

SEQ ID NO: 22006 - DNA, 449 bp, Oryza sativa
  unsure (1)..(449): unsure at all n locations
taattgtgctatangttctgggaatgtaaagatgggagctatttatatattggtatatatagggtagcttaattagtgaaaacccaaacatcttacaagatttatagggtataagaagagagggaggggggtataccatgatgtgcacggttatatggatctggatattggaagtgtatgtggcattttggccaatccacagtaatttcagtattggttttgggatattgtaatctagattcttagtataatgtagcactagcactttacttcaatcctcttgctccatgagaatgatgaagtggcatatatgtttttgttaagctcaaaatcatttgtgctgcatgacatggcagaggattttcagataataacagtgtgtaagtgcttccttttgctgtaatgcagaatgtcaagtccgagtaaaggcaggcagtaatattctggat

SEQ ID NO: 22007 - DNA, 453 bp, Oryza sativa
ttaagtcacctgcggctgcagcttcattgttttttttccgctgcgtttgttcgtctgtcataggatcagcaaaattgccgactagccatatatttgatgtttcaaactatatttgcaaacatacctttttctttcttacaacggatcgtacaatacgctatcgtaatccgagcggctggcagtgcttgtggctatggcggccgatggcaccgattttgaattttttttattctaaaattgttttcactggcagttctctttaacttgccgcttggttatcttagcatatccgtttgcgaaactcgattttcgctggtcaacgaaaacccaatttaactaccagcgaaaactatttttgtagtagtgatttatgatgagatatatgagtgacgataacaatattacaccaccaacaacttaaagactggaaggtaaacgaaaagggagttactg

SEQ ID NO: 22008 - DNA, 406 bp, Oryza sativa
tacatctttgtcagaagtgaaatttgggttgatgatggcctttctctcatttattcatttgcagaggcctgctctgatacccttccattcgttggagctgaaactcatcgatggtgaaggaaagtgggaactatgtacaatcaaccaataattgatgtggcccacttgaatttttgacgagttttcatcaagtgcctattcaccagtggctgcctttacaagccatgaagaagataccaattcacattatgagacttgcatactttcacgcagcatatgcgcttatacgagattctcttttccttggttagaggtttgagatatagcaaaacaacatacaggagttgtagagtggaaaggtagatattgacttgtagcccctaagaagatagatagcgtagtacat

SEQ ID NO: 22009 - DNA, 443 bp, Oryza sativa
  unsure (1)..(443): unsure at all n locations
agcttcatgtatatatacaactctcttgatgttctgtttagcatgtatcacatccttcaaaatcccttatattttgggacggatagagtatatagataaattatataataccttcgttttttaatagatgataacgttgattttttgtcacacgtttaaccattcgttttattttaaaaaaatatgtaatcataatttttttgtgagttggtttatccctcaaagtatttntaacatgagttatatcttatatatctgtataacatttttaactaaaataaatggttaaatatgtgtttaaaagtgaacaattttatctatttaacaaacgaagtacatacgtattatgacattcccaacccaaaacactagacatggtttccataaactccacatcatcaagaaactagtactagacaccactcttccaatacaaacactac

SEQ ID NO: 22010 - DNA, 462 bp, Oryza sativa
tggacaacatcctaggaatggattggttggctaagcacatttgacagatagattgtgccgaaaagtccatcaccttgcaaggacctggaggaaagcaagtccgctttacccctaacactcctaccgcaagtcggtctatcttaacctgtttacaagtcacctccttggagtcggcgcccatagtttgtgaatatcccgacgtatttccggaagaattaacaagaatgccaccagaccgagagattgagctcgccatagaactggcaccaggcaccgcaccaattgcaaaaaaaccctaccgaatggcagctaatgagttagcagaaattaaaagacaaatcgaagagctggaaagtaaaggttatgtgcgacctagctcatccccttggggagcctcagtgcttctggttaagaaaaaggatggctctgagagaatggtaatcgactatagagccctgaatg

SEQ ID NO: 22011 - DNA, 415 bp, Oryza sativa
agcttctgtgaagaaatatgtcgaaagatttgtacctgtgattaagatatctgcagttttcccttctgatgagatggaagaaaccatcaatttctgctgcgggtactgcaagaaccacatcatcacgtgtaatctaaacaagcctttgaagagttggttgcaatgtttttataagttccatgtttattatctggttcttttaatctctttttgggaaatctgggtgttataatctacgagattaaccaaccacagcactaaaattcaaacttctcagaaggataatacgttgattgctgattaatgaaggatggcgaaaaaccatgtcatagagcgggtggacctgttgcttcatgtggtttctgcacggcagtgcccggcaagaaatgggcctgttcggttgtcgtactgctgc

SEQ ID NO: 22012 - DNA, 459 bp, Oryza sativa
  unsure (1)..(459): unsure at all n locations
tggcgcttttcttcccgccgcctcaccgtgaccggtggtgttagctcgacgggagcccccctaccttcgtgtcttcttgccccctcgtcgtcgccacctagctactattccgacgaccgccaatggcgccgatgaggagcagctccgcgacgtcaactctcccaagcagcagcaacagatatttcttcgcgccggtatataatcctaagttaattttctggggagaatattcctccgcatttagtcccggttgtatggtcatgacgggctgtcataagaaactcggcagtcagagatggcttctcaaagtaccagaagggcatcggatagagggtattagctagtatatcagctaattagaatgtatgtatactatgtatattagacagataggaatagagtatctntcgcttttctatccacttatgttagataatatattatgagaatgagtagtta

SEQ ID NO: 22013 - DNA, 472 bp, Oryza sativa
  unsure (1)..(472): unsure at all n locations
gacctatgaaactcagctgttccttctagaatgacccaatgaagctccttcttattntttattcaagctaactgactgcatttatttgatttaaagatacattcttaaataatataaaaatagacaaaagaatcaccgtttacataaaaaaatataagatatggagagtttcagtactagtttgttccctctgataattagtctattcaaaatttacagttggcaataaaatgtagttcacaattactgactacttacgtgaattgcaagagagatgtgcctgtatctatctgtgataactgagtcagcagatatgtgctggaatcttgctgctaagattgcagatggtgattggccctttatctcacccttcanaaaggcaaacatgaagagataaataatttgattttaaattgcacatatcaatgcagataattcaagtcttcaagaggaatatagcataaacatgttg

SEQ ID NO: 22014 - DNA, 456 bp, Oryza sativa
  unsure (1)..(456): unsure at all n locations
gcgatctctaagtcacctgcngcatgcagcttgtgtggtattgaatatttttatttataaaattctagagagcatggtgcctattccatccgtccaaaaaaaaatctaggattggatatgacatattctagtataacgaatttggacagatgtatatccagattctgtaataggacgtgttatatttattactaggttggttttttataagacagagggagtactttttaatgtaagacttatcatgaaattaacatgttacagagagagaatatcaatagtatgatactttatatatatgttcggngaatattccgctaaaggaataataattaatttagagtgaggaatattacttaatagagaaaatgtataatattttatttggcaaaaacaccaaacacataccatttggccaatcaagagaagcgccctctatggatgtatggataaaac

SEQ ID NO: 22015 - DNA, 457 bp, Oryza sativa
  unsure (1)..(457): unsure at all n locations
tgttaatgtctggaagactgattcatggtgctgcatttttctatgtaagncaccctgtacgttgtattgcgaaagcataatggattaaccacattagtgtaccattttatttatcatgtattcagtgagtcaatctacaactattcttctgctacttatctacgtgtttatgagaatccacacataattgttggctgacacacttagcagcttggagtattgttagttatgttaaaaacttcattattgaggttggtaatgtattaagaccttcatgcatgagtttgatctcttttgcaatgtctttacttttgcagaacttctgaaaagagggtcagcgcagttgctattagcaatgatggcacatatgtaacttttgcagataagattggtgttatttggttagttaccatgtgggaaagtggtggagagcacgagcctactcgatataaacctc

SEQ ID NO: 22016 - DNA, 437 bp, Oryza sativa
  unsure (1)..(437): unsure at all n locations
agcttcattcatctctcaagtttagtattttctatatagtatagnggaatagaaatagaatagaatagaatctttttccccggttgcacaaatgaaatcccgttgcctaacgcgggatgtcatttatacaactatcatgagctaatcattcccctgcagaccatagaagaatctcgtgcaggtggaacatatagggagacacgcaatactgcaagaaatgaacgcgaaggttcaacatcctcaacactcgtactgatgtatgaggctggttgggagccaactggggatgcgtccggatggacccaagctccacaccatatcattggaggctcgggctgggaaagtgctattgagagccgatggctggtgcctcatgacaaacaatggggaggcttgaacactcttgtccctagataagcggtatacctccatctccc

SEQ ID NO: 22017 - DNA, 394 bp, Oryza sativa
  unsure (1)..(394): unsure at all n locations
tatatntaagtgggtcacaaagaaagtgactgaatgtgttatattctcgctgcacagtcacaaaaagagccacccaacaagatctagaaaaaccctcgccaaaaaaaacaagatgtaacaaaacaagcacccgtatgcccaaatcctgaagaactggtcgaccaaacaaactacaataccagtagggatggtgtgcctgagtggtcctcggagcctgggagccgagccacagaagcatacttactaaaacaaaaaatatttgtctgaggcaagtctataaaacaagcttctggaacgggctcacaaggcaactgggaaatatagaacgaacatcccacagtataaaatatgcaccaacaaaacacctataacgccggctcgaaaaaatcactac

SEQ ID NO: 22018 - DNA, 426 bp, Oryza sativa
ttggagaagaagtcttatgtggagtcctggcttatactttatgtgagcgcctgtgaagatggagccgtaggcccgctagtccgctgctgtttatttttgtttgacaagccttaagtgcctatgtaataatgtaaatattatcgatactataaagatgtgtcttttatatcatgttcgcatggtgtaccccggctattcctgggacggcgattaatacactagcgttccggaaaaggcatttttcccggtcgcgacaagctggtatcagagccatctcgactgtatgataagccaagtggataaaacctaaggacatattttataaataaaactatttgcgacagtcctttatctcctcccctatgctattgcaaaagatactcactctactcttcgattcactagactaatggcactttgcaaaaa

SEQ ID NO: 22019 - DNA, 425 bp, Oryza sativa
  unsure (1)..(425): unsure at all n locations
agctntaccatgtctcgtagtttattcattcaagttggacatgtactgctcccacagctatatatactcagaaccttgagcccctcgtgaggcgtgagaccttccagcacctctttatgattatctctgtgcctccttgtactcctgatcagcccatcctaagctcaattcggtcagttttttcttctttccgagatttgctgcttttgcatcagcttttgtcacattttccagttgtgttagctctagtcgaccaccaaggtccgactgccgcagctctcccaaatcactgcagccagagcaagcaccagctacaaagcatgtaagcgtctgtaggcaagtgaggtgtccgaggttcggaggcatgctttttaacctctcacatccgtgagtgtacaggtgacggagggcagtcatgtacttcg

SEQ ID NO: 22020 - DNA, 446 bp, Oryza sativa
tcctcttgtgttggctacagattacggtaccgccatattttctaagcaccgctgcagatgatttcttcacgctctgaatcaagttctgatgctccttctgttctgtaaagagaaaaacgcagcctgatgtatgagcacatctgaggaaataatttcatcatggtagtggttctcctaaagaggaaaatcaaaagaaagtaccgatcttaagcttgggcttcttctccagtgccctgtgccgctccggcggcacggatgcggaggaggatgatggagcggcggtcttcttcaacccaggcatgggctctgggcgcggcggtggccggttgtttgcccccgggatgacaagctgcggccgctccggcgccttgtgctgtggaagagatggctagaggtccctctgtgtcgtcgtcggtggcagcgacagcttggggtctctatgggtc

SEQ ID NO: 22021 - DNA, 421 bp, Oryza sativa
  unsure (1)..(421): unsure at all n locations
agctnttcttgtccttgttaatatttgtttgtgagctaacttaactgattctatcagttatgtgacgagtgtccgtgcatcttaccctcaggacatgaaccacaaagtgcgctatatggagagatggtgtcatctccgggaatgaggctatatctgacggacggttttgttacaaccagaggcgccacttagcaaaggaacacttacgcacgctaataaggggggcagaatgaacctacatcaactattaattagaagacagaccatacgacacacaggatttgttgatgaaattcaacgatttctattgaaactgtcctatatttaagttttaaaagttcgatgaaatcttacacaagagaaacgtctataggtccttctgctagctccacaaggcggtgggctaaacgacctagagttt

SEQ ID NO: 22022 - DNA, 334 bp, Oryza sativa
acttatcatgtgtcgcatactcattaccgcactgtctattttatctgctcccgctgcttacgatactgttgtgctctgaaagaagcattcatgcttcctatgggttgtgaagagagatacgctacctaccgtatatgcacaactgatgaaattatatgatattggtggtgagtgtcctaactatgcaagatttcagacactacccatcttaaagttgagcttagtctacagtgccactgcgccactctcggcggcacagatgcagaagacgccgattgaacagtagacttcttaggctagcgcatgggctcttggcgcgaggtggtcacctgtt

SEQ ID NO: 22023 - DNA, 441 bp, Oryza sativa
  unsure (1)..(441): unsure at all n locations
atgcaagcttcttcctgaaataatagcggncaccttttgtttatacagcatgtctctgcggattgtcggattttgtcatcaccttgaggaatacttgtctcacaggacttgatgataacagccatgaatcaataaatgagacctgaaccatagnttttttttccctttcagttgcagccatgtgtaatgtacataaatttcctcagcaatatcaaaagttctaaatttaaaattgccaagtattagcatggtcggcttgtcgtggtattccatcacaaattacaatattagtacagggttccttntgtgttgacagttaacacgaattaattgtaaagtgtaaacatgggcatagattgaatatttgaattggcataaaaatgaactcgtaatactccctccgcctcaaactactggttagtttgtcctaagtcaaacatt

SEQ ID NO: 22024 - DNA, 413 bp, Oryza sativa
atctacgctctgctcgcaagcatcatcaactatctatattatcattaaacatatcgagagaggaaataatcactatgttgggtgagcgcatgaagcacgattgatccggagggaaggaaccagtacccaacccttcatcaaagcaaagcccttaattaataaaaaaaacaatagtgaacatggaaatcttcgaaccagcggagaaaatgcgaaggaattaaccgagctggggcgaggagaactccaaaagtcggtgactagactcgagttcttcgtcctttgcgttgcagtggcgaagtatatttggaaaaagggaaaatatctgttcttttatttgggtaggaatcattggatatgcttttattaaaatattttgtggtgtggcggaagagaacggtgagctgtattcatcg

SEQ ID NO: 22025 - DNA, 441 bp, Oryza sativa
agcttcttgccctagtagtccactccatgatgtatatcctatgacaacgcacaagccctgcagttccaaagcgaagtcagtcagatccagaccatgacggttgaggttgtcggccatctataaacaaaggcaaaagaaaattttttgatgataaatgaagcaacaagacagggaaagactaaaggattttcacaaataagagaagatttttatttcaaaatactgctaaggcttgggatctaaggctcatcctatggtcaaggaggctctgataccaacttgtcacgaccggaattaacccaacgggcattccatacgtgcgtgtattattccttgtcccaggaggcagggtacaccaaaagttgattcaattcagagtttaacaagcggaagcgtaaatagttaatttattacatgggtgacgaaggcccagcacacacg

SEQ ID NO: 22026 - DNA, 460 bp, Oryza sativa
tgagacatcaactctggaggatgagaactccacaaatgagcattaaagcttctctttcgaaataccccaggattcatgctcacataagggatccctagaagcctggcagattaatggcacttccttatgcgaggaccacagctacctttcgggcctcatctcaaacattgtttagaaggttgggtgtggatgcttttatttatcataaatactgcaaatcacgtatatgttgtggcactaatcttgcagcatgatgtctccatggtcaagcttgtgagaataaacaaagcactaccgggagataccccggattatcttggtaagttttctttccaataaaaataagaacaaatttttaggatattatacaccttcgggtattctccatttcaggttgagattaagaacaagggacgtacggtgcctaataactcgggagctacaacaactgtacattttg

SEQ ID NO: 22027 - DNA, 434 bp, Oryza sativa
atctcttgtagccgacaggctatcttttattcagaaattcagaaccagtactgtgaggctaataatcacaagctgtgtgtggtgaaatgtttgatttcacggtaacaacgttccatggggagatcaagcagaagcgagcaatggagagacgatggagcatgacctgaggaataaggggctttgcttggtgcctgtctcgtggacgcccgaagtgtaccgggatggcaacgcgatggactactggacgccggcgtaccggggctgcctgtaccggtgacatctaactgaaatgcactttgtttggagagctgaagattctaagacagctaatgagtattcagatagtgagattccagagaaactaataagtccagcttttagttattatattagttcattttctggactctgcggctaatgattctcagaaaccc

SEQ ID NO: 22028 - DNA, 433 bp, Oryza sativa
agcttctacttgagtattatacttgctttaatatcttaatataaagtggtatcggagtattagctgatacatgctagatctatttgatcggctacgctatacatatatataatcttgtcgctaatgtatatttcgatctaagtatattatactgtctcggcgtggtgaccgatctatcccaatcacttgatttaagtatacatcgatataaagattatatattgttaatatctacagccgatcgagtagatttggtttcttgctacttattgatgatcgccgatcgattcacatatgacatcggctcaaagataaatgatatgtcatcggcatctagccgatcggctatcatttatagatttaaccacggtttctttgtcttcgtttcttgtttattgcaggatcaaatcaactggcacgctcatacatccga

SEQ ID NO: 22029 - DNA, 429 bp, Oryza sativa
  unsure (1)..(429): unsure at all n locations
atccctntgatgcatatntggatctggattcttatatcaaatatataggatgagtagtatctgatgtaaatacagttcttgagaaagattcaagtattaaaagtgtttataaatatgtatttctcctcttgtcaatttagatttctccgagcagatgactcattacgtttaaacactctgcctgactagtcatagccaccaagcaccgggagtcggcctaggcactttccaaacatgcatatgagtgacatgagttcgtcattaatggaacaaagtttcacgaatcaaaanttactactcgggtatttttgcaattgttaagagaagaaaatacataaatttatctgatctctatgctnttgagttattccgaatataatacctagcatcttgcgttactcggtccatccagcgagctcccaggtgcta

SEQ ID NO: 22030 - DNA, 402 bp, Oryza sativa
atagagtagctgacctcattccgaagatcataggatttacaagcttaagaagtgacacgacgaacagcgaggcatagcaaatggtcctggtaaagtcatcactgaaggtgctgcagagactcacaagcattggaggagagatcggcataacattactgtacaagatattgaaacatcccttccttttaagaaaccttgccgaaatcttgggagacaacaacatcaatcaagaattaaggaagcatgtggcaggaatcctcagaaaccttgccattgatggtgacacaaggaagaagattgggcacatgcaggtgctcataaccaggctgatgaaagcattcctcaattcagatagaacctccagcacaaatgttgattgcttgctaacaaaggtagctgggc

SEQ ID NO: 22031 - DNA, 431 bp, Oryza sativa
  unsure (1)..(431): unsure at all n locations
agctngtatgtatagccatcttctgtatgtacatccatcttnggntatctgatgccgctgacatgttcttttctatcgccggtcgctatctacacatgttaaacttgctctaagagtgagttcaatagagcatgttcagccggtgatagacgtacatgttaacatgattgatgagcttgagagaaaaatacatgaaagagagtgttagtcgatgatagattaagcgctcgcttttacacaggctctaacacagagcgctactttctacagttggctgagagagtggcaaaagggaatggtgggccctaataaaataaaatagtgcttctgttatcatcgtactgtagatttctgttctagggatcgcttattcctccatctcaagatgacatggtaaaaattatagctcgctgttggttatattattgtat

SEQ ID NO: 22032 - DNA, 451 bp, Oryza sativa
ctcagctttcagctagagatacatgttattgctaatcatattacttcgagtttctctaagtttgattggatgaaacaggttgttctaaatggactacgcaaaaagcaccatatggaaaaaccgaggacggttttccgtgaagaaggggaggatgatgtgactatgcctaccagtgatacaaccattacttacatcatggatcaacaagaagtcatcaaggtcaagtcctccaagtgctggaatctgattcggccacctgctgcactgctgactttgatgggctgccaaagctacatacgacctctgtttttggcccgtgagtacttgacggaaagctctcagagtcatctttccaatggaaccagccacatctccgaattcctagttcgttggccgcaatcgtagaaacaaggtgttacgtcacctatattgggccaatggacttataact

SEQ ID NO: 22033 - DNA, 159 bp, Oryza sativa
agcttataaaatccttacaaacaacttatatatttgctgtagggtactataccttcggatgtcctaaacatgtataacccctcgtgctcatatgttctagaatctttgcgaagtttttttttccggggggggggggggggacatcttactctaaacccc

SEQ ID NO: 22034 - DNA, 442 bp, Oryza sativa
tggaggcgaaagcagcaaagcatgtgatcgacgcgtgcgtgaggacatagtccgtcaaacaatgcgtcttcacgtcgtcgttgctagcatgtgtatggaggcaaaattaccctcatgaccgacggtttcctaccatcatcgacgagaactgctggagcgatgagagcttctgccgtgacaacaaggtgagtttgttactgtattaaaaaacaaaggagggtttgttcagtgacacggaagcgcactagcaatggtggatgcataagcatattttatcacccaccaactgaatctttttttcttcttgtggaaaatctgtgcaatctaatgactttctggataaacttttcagctgtggtttgcactggtcaagacggcaccggataagacggcgtcgagggcatccatgggtagggacctgaagctggtcaccgtctgcccg

SEQ ID NO: 22035 - DNA, 450 bp, Oryza sativa
  unsure (1)..(450): unsure at all n locations
ttaagtcacctgcngcatgcagctaactgtaaatcttggctttgtttatactttaactcatgttngctatgttatagatgggttcattttctttttattgcaacacatgacgtaatatgctatatgtatgctaagctcttgaatattaatgaacataattcctatacttgatgaaatcattgtcaaaagggggagaagtaatgtgaaaatttttggagaagcaagattaatatttgagagttgttgagaagagcaaagagcatgttttttgttcaattgggaatttctttcttttaaaaagggggagaagttttcttttggatttttgagcacgatgtgtacatttgtacgaagtgtgctttttaccacttattgttatttttatccaaacaccaaaacatttttatgaatttgccaatgtgttcatcaacggggagattgtaaatcaaa

SEQ ID NO: 22036 - DNA, 472 bp, Oryza sativa
acggacctataaaactaagctgcgattaggaacccaaacttgtctaagattgggtctcttgatgttagttaccaaagcctttggcaaccacacacaagtgcggtactcatcattgtaattcccattaaaataagcaaccactttgccctctcgaattttggaaattacatatgaatcatagtaaagaccatctggccggaacctcctggcattatgcccggaacttccggtcatgtcttgtgcacggccattggcccggaacctcctggcaaaccggtcggaacttcctggtgggaatttttgagagacagagactcccaccaggaggttttggccggattgtctggatgttccgggtacctggctgctcacaagattagtcacctcactagcttgtggtgctttatcttctctcacagacattaagcattctttcacatttaccattacacgcttgacacaggactccacc

SEQ ID NO: 22037 - DNA, 460 bp, Oryza sativa
  unsure (1)..(460): unsure at all n locations
gcgatccttagagncacctgctgctgcacttggaaacagccgccgtcttatcatatacccttctgagggcagcggttgggagatagaatgcgctaaataactgaagatttaccactaccaggaaagcaggaatactggctggaaatgcaatttccaaggggcactcctgctaattattaaagggaagtactgctcaccaaaaagcgagctttcgtaacctatattcaataggaaaaatgagaaattaatgggaaaaatgtacagcaataataaaattcaagcgacagtatataccatagaagtgcattaaggtccctgccaaaacaaaagaaaaagaagtgcctcaaggaactccgggcaaacacgaaaaaatgatggtccatgagcaacctatgatttgagaaacaaaaccacgtagtatgttcttatttctatggaaccataatagcatttctttact

SEQ ID NO: 22038 - DNA, 393 bp, Oryza sativa
  unsure (1)..(393): unsure at all n locations
agagatgattagtggtatgcagtttattatgtgttataactttgttaaaaataaaatatttattgcttggttattnatnnaanatnnagttttgtnttttgttgaggtatttgtgaaggataatattgagtgaatacaaataantatatattgtgctttgctggcctagatgtaaaacgagaattaaatttagtgtaaccctataaaaataaaaagagaattagcagggccggccttggtcctatacagccgaggcgaccgtcgggggcccatgacggtggaggcccataatggtggagggccaacatctaatactagtaggttagtaccttatccaatgttgagatcaatgatttgtattcagaattaaacgtgttgcaagcgagtttgtca

SEQ ID NO: 22039 - DNA, 332 bp, Oryza sativa
  unsure (1)..(332): unsure at all n locations
tgcagcctagtgagccaagtagagagcccaaaggatattattcattgtatcccgggaatcgctntcctcctagcccttcgtaccacgtggggtcacgtactaagcaagccacaggccagaagagtgagaatcacataaagaaagcgccgatgccaactgaagaagaagtactcatgatggctattaacagcaccgaatggtctcccgcagggataactattnctagacgacacagaggaaataccttcccaggtgcacgacagttgacccagcaccttctataccatggtggcagacatctgatagtgaatggtaaatcaagtcttctctga

SEQ ID NO: 22040 - DNA, 423 bp, Oryza sativa
agcttcatgagttccaacacgcatgacatcttgctatgcttcgacttgcatccatcatacaacggcatctggcaatcttccaccaacttactaaacttctcataatctctgtcgttgtcctctgcgtcttcaatgtcatgcaacattgtagatagacattgagtgtccaaatctatggtctctccacctaaaggagaaggtacgaacatgccttctcgagctgcggcggtgttctctacatcctgatccaacacttcttcagctgcgacatcaggcgcctcttgctctccatgcttggtctagcaggtatatttcttcatgaatccattcattatcaaatgagcatgcacttcatccttgtcttcgatcatctgttcattcttacagtctctacatgggcacaacatgtgcatgctcatccta

SEQ ID NO: 22041 - DNA, 440 bp, Oryza sativa
  unsure (1)..(440): unsure at all n locations
tggagaggacatctagctaggtatacagtatatatttgatgacttgtctgtgctccagtgacaaatgatacaaatgtgtgttcctgaccatctatgctacacatatgtagcaaagccagcggtatgataaaaatattagctgctagtaattaaccatgccctttctcaaaatatcactattgtcttgtattcatggcttgaaccggtgaagtgcaacaggaattggaggcaaagggaactgaaattcaagttatacatacggagcgatagggcattgctttgccacagccacaagccaactggaaggctctgccggcaaccgcactgcttctccttcctggagaggatttcttccttgggccctgtcttgcgaggagcgaattgggaatggngactagctgcagagccactggctgaatagatgttcttgctgcagcaac

SEQ ID NO: 22042 - DNA, 333 bp, Oryza sativa
  unsure (1)..(333): unsure at all n locations
tatctagagggaactntctaatactaggatcttattgccatagaaatcttttcctgacctaatccatcctatcttacagcccttttggtagttcataaaaagagagcatgtacttaacgaacatccgcttagaactttgtattaatggagcaccatgcctttcttcaatagattgcatcttaccttgccaacaacccaacttatgctccattctgttctcaaccacctttcataccttgtttagtatccttttttggcaatgggaatactcaatatttcataggtaaatcacccacattgcatgtgaacatattgctatatacgtgtgtttcc

SEQ ID NO: 22043 - DNA, 433 bp, Oryza sativa
agcttttaattacgttgactagtcttgtattgtgtgttattaagaaagaactatttataaattgtgcacttagtgtaggggtttacatatatgtgacaaatttgacttaaatttgctagatacttcgttggaggcatcatcgtcaatttgtgtcaagcaatagctaagaaacaatccacattggccatccttcccaccccaggatctgaacctgggtcgttgttggcggttgacctcacctctaaaccctatcccacccctgtcgatcgtctccaccgtcggtgaacccctaggccaccaccattagggctcgatgctctctctgttgcctagcacctctctgcacagattggtaggccgtcctcgcctactatcccaaccttctctgtgctcgcatttgtggatcttcatcaggccacccaccgctggcgct

SEQ ID NO: 22044 - DNA, 426 bp, Oryza sativa
tggtggagtgggatgagaggtcgttgtatgcggagaccatgttcttcttctcctcgatgcagcggcgcaggcccgcggcgttcatggtggactccgtctgtgcaccagatccagcagagcaagagcagttgcagttaggggaaagggaaagggaaagcagattggtattggtattggtactagattagagattatttaccttgagctgttcgatgcggcgtgcggctgcgcggaggtcctcctcgaggacgaagacgtggtcctggaggcggcggcgatggtcctcggaggcgagcagcttgatgcggatggagcggtcggagactgggaggccgagcgagtcgtggatggagtcgcggatgtagtcatcggcgccgccggggagaggggtagaagaagcatcctcctctcgcttcatggatgatc

SEQ ID NO: 22045 - DNA, 440 bp, Oryza sativa
agcttcaaatgtgccatacctcatctcaattatcttttgtttggctctccaggcctttgcatagcttatggtgtacttgaatatgttctcgatgtgcctaataattgattatggttcaaagccaatgttaccaacaacactgctgtacatctcacttgccacaaaagctgaagtgatgtttcggtgatacttctccaccccttgtaagtagcacttgtgctcggtcataatgctaactttccaataatcattccatttacccttatatgcatggacacgccacggacaatctttcttcatgcacctcacttcatacacataatttgttgacttgaccaccctaaactctctctgcaaggaaactgcccaatgcttcaccgcctccttcatctcatccttatgagcataccttgcaccgtcaattacctcgttctccttat

SEQ ID NO: 22046 - DNA, 467 bp, Oryza sativa
  unsure (1)..(467): unsure at all n locations
acctaagaaactcagcttatattatgcatcttctagaatgtataggatctaatacttttcattcgtaattgcatatgtacaatgccatgatggattccataaatgaacattctacattgtgaaaagactgcaatcaattatgcttacctttcttcactcttgccagattccttctctagattttgcatactgcatacactcgagtagaatggacttttctccagcaattcttcatgagttccagaatgagctactnttccattctccacaacaacaatcttgtctgaatttatgattgttgacattctgtgggcaatcaaaataactgtccttcctttcatagctccatcaagagcttcctgaaccaacttctctgattctgaatcaagtgcacttgtggcttcatcaagaagaagaattggcggattctttagcatagcccttgcaatagctattctatgtttctg

SEQ ID NO: 22047 - DNA, 427 bp, Oryza sativa
  unsure (1)..(427): unsure at all n locations
agcttgngtgttggcggcggcgtatctctttttattcagctaatccttctgagacggacaccttgctctccaacttgcaaatcttgcctcgattccagatttccctgtcatgagctgctttgtctcgctccacacttactgcatccatagcactaagcatatgcaccgcatgcattagagtggcactctcttcaccatcaggacaggtataggntccatagtcttgaccatgaagcttgtggggatgatactggaaagctgatgaatccaactcttcttcaaaacgttgacgcaactctccaatggccaccaaagctgcttcttgacaagcatggcagtacgatcttcctccagcttcgaacttaaaggacggaaggtcttcacgatcactaaccaacgtcacacgaacacgacacttctcctcgtc

SEQ ID NO: 22048 - DNA, 457 bp, Oryza sativa
tcagaggacccctacgcttactaccaggagggtgatgattattttggcgctcagtatgtcttagatacggtcattgcctgtggcaatggcgtgccgctgccttaactccgctgccttatctacttctgttattgggaagtattccggaccgctcggtctgatgatttaaaactatgcctgcgggcttatgatgtaataattcgtactagacactcgtgtatgtgtatctggtatttcagctatgaattcgtgtgaccaaactacttgatctacggaaatggtactgtttacacgaatgattcctgttataaaaacgggggtacacagagctggtttcatagccatacgactgtacgataagaccaaaacgcgccccactccttttctaagttggccaaggcagacattaccatttagtaatactgtcacaaataaaaacgctattgttacaatactc

SEQ ID NO: 22049 - DNA, 456 bp, Oryza sativa
  unsure (1)..(456): unsure at all n locations
aaatctcagcttttncaagatacgctttcagatgtattgacgatcttttattganggatcttatatgaatcgtatgatgaagtaccacatgagtggatatatacgaaaggaatccaaatctgccgaatcgctcatgttatgatcttctacaacctacgtctccgcgttccgtcatctggcttatgttcttcatgtaccattccaatcgaatgactctatgaaaatacgtcgatacttctacatattattggtaacgtatgagacatccctatttcccccgggggtcttaattaccactgcttatctttaattcgcctctgaccatcaatttaatgtgaataacccgcctcctctctttgaacatggggcgcttccgcgtctgagcgtgcttcanacaatcttgtcttctttctattaccatatctctagagtcaatacatttctatgaggaactac

SEQ ID NO: 22050 - DNA, 442 bp, Oryza sativa
agcttacctgaataataattgattaggtgtatgttctttataatcatcgaatttgtattcacattgcaagtcatgtagctgatacaatcatgtacaataattcaataaagtaattttgatgatccttgcctgatctgattttctagaattgcacgaacttcttagcaattggttgctttaacaaagagatctagagtgatgtacatgtcagataatgatcgaagtaaaaaaaaagtgtggtcaggaggggccgaaatgccagctacacagttcatgagttgatttatttatttttagataatgaggccatgagttgatagctcctgtaataaattatgcgaatggtccttcattctgaaaaatgaaatttgcaaggaaacaatataattcttgatgagttgatgtgaatgcatgcaacttcacaagcataataatccagaaa

SEQ ID NO: 22051 - DNA, 454 bp, Oryza sativa
tgcgggttcgtttgccacaatctgaccatttctgaacagttcttattccattgccacagttatagacttacattttttttgcactaaatgtgctctatttgacactcttatcttctagccaaaatatattttcttaagtgaaccgcatgaaaggatcctacaatattactactcgatataagtagttatgtagtatttacatgtcaaaagtgttaaatcttccccaaatacataatcaattttactatcatagcatccgaagtgcttaggtattctaatcctagtttttaatcctaaatggctcgaagaagagttaatggcacccccggtacaacaacttaccgggtgtgtgcgatatagtgaagaacttcagatttgaccgtcgagtgcacaaccttgcaagtgggtcgcatcttaaataaaacttggaatttactatttgttgaatcactta

SEQ ID NO: 22052 - DNA, 434 bp, Oryza sativa
  unsure (1)..(434): unsure at all n locations
agcttaacacctctcatgtgactgtttctctattttgaaataccataaagatccanatccatgatgcacaggtcgtcttattcaaaacctcaatcatcacatcctctctctcccacttcacacctcggaacgcactgttcttatagagagaaaggggctttcccatctacttaacccgaaatgaaatggctgaagagagggatgttccttttggggggtacccccgggaagagatccattggagactgngtgggcctgttgctcagaggattagagcacgtggctacgaaccacggtgtcaggggttcgaatccctcctcgcccacagcctttcaaatgggaagggcctttactttccccctgagggtaagaaaaccatgatcgggatagcggacgtaaagctattgaactcgcgtatgctctctccttttgca

SEQ ID NO: 22053 - DNA, 421 bp, Oryza sativa
  unsure (1)..(421): unsure at all n locations
ctttatcattcgggcatcgagctatggtgccgcatgatcttccctacagtaacgacaccgcagtagaggttaaccaccaaattcgggatggaacggtgtggatcctcaacgcctaggacaccagaacatcgaaccatgaacgaggaaaggcatgagagaaacattggctagtaattgtgaacccccaattcttgactggaagggacaccaaaggccactgccctccctctctatctatccaagagacggaagggcagagccgttttttggctgtttcatcttttcatcaaagaggtgaacaatgaagatagatggcaagagcctgagcgaactgatcaggccgtgaaggaacaaagctcaaatcgtacgtacgttaggatgcctaagctgagacatcactgcacattcactngacacctat

SEQ ID NO: 22054 - DNA, 419 bp, Oryza sativa
  unsure (1)..(419): unsure at all n locations
agctnaatatgcatcagtgcattgctttatattctttcacacacaaatgccccagagatgaataagaaagcaacactaacctagtatgtacatcaagagttagaggtcgcttccacttcatctaaacaattgatgcagttgtattgcatggactgacattgttacaattctaaacctgggtacatctcaacgcccttttacacatgcaaaaagatgcacgctgactcctacatactatagataggagcatattataaacttcgtaacatctagatatgacataagtgtaccataaacaagttttgcgaaagaattgaaccagtaataacagaataaacagagtgtttacctcctgtaagtagagttgccaaatgataatgggcgtatggcatcagaaacgtactggatgaatgaacatg

SEQ ID NO: 22055 - DNA, 458 bp, Oryza sativa
ttgttatatctgcagaaggcaaatatgaacacgtgtgttgtgcatatgattgaagataggtctttagaagctttttttttctttttttacgtaagatagatatgtctgcctaattaattaataggtccgtcagattaagtaaaaatcgatggctaaatattttattaaaaataatttaaaatagtgagtccactaattgaagtataaattagttaatatagatcataaattggtaatttaatggtacaaaacatagttctgtaacctttattttaaaccgtgtgtttttaaaataatggttcgaaataaaattatattatattgttaatataatgggtgaaataacagagtccaatatattttatttccaaagattatggatctaatttatttacgtatatattatgatatatataatctatgcttatagagctatagctctctaaaatttaatatca

SEQ ID NO: 22056 - DNA, 439 bp, Oryza sativa
  unsure (1)..(439): unsure at all n locations
agcttatgcagtggaagaaggatgtgtgtctattttgtgctgcgtgtcaagttaaatagggatgctttatatgcattagttacttgagctaaggtaagtaacttaggccgtgtttagttcacccgcaactaccccaaacttccaactttcgatcacatcatatcacatccaaaactttcctacatatataagtttttaattttttttccaaacttccaactttcccaaacttcgggcatgttcactttgatgatattttcaacattaccaaattttggtaaagttatcaaaaaaaaagcggctacatttagtttgctgttaaatnttggcactatataagaaatcctatcaaaattctggcaagttgctaaaattttaacatagttggtaaaggttttttttgacatcaaagtgaacagtttcttttaccttttttagt

SEQ ID NO: 22057 - DNA, 386 bp, Oryza sativa
caagcacaaagaaaaatctgcgtctgcctcacaagtagcaatgcgtcccatctgccaatcaaaccaaccccaccagcatatgcatatgcagtgtgataaaaggttggatcgctagctagactctcttgcggcttgtgataaatggtttctgtacgttgccccagtctgcattggagatgatcagatggaacgtaagaagtccacgggggtagctgaacatggtggagtggtggttgtccacaatagttatgatggtgtggcatctctgcacgtgccgccctcgtgcaactacagtcctgcgacaacgacggctcaatccatgggaagcttacatgcactggcgccatatccatctacagcttgtttctatgaatatctacctatct

SEQ ID NO: 22058 - DNA, 438 bp, Oryza sativa
agcttagaaaaaacgaaatgtggcgttgtttgctggctcgtgcatggagaactgcatcagatccaccgcacatgatagaagaccccgtcgttgacaccgtggccgctcgtcgcctccaccgccgccgacgcccatctccccgtcgcttccgccttctccaacaacacaacagcataccccctcgccttcaccgtcaatccgagccgcatccgctccgctcgcaacactccgtccctgcatccttgtggccgtagcctggtggacgcaaagaaggaggagaggtgggagaagcaggaacgaaggggagcggcatggaatatggagggaggtgcgggagagaggggcgaatcatggagggagaccggaggggggagatcggtagtgcctcgcttttggagacgaacagaatcgatggggattttggatctgtgtgaactc

SEQ ID NO: 22059 - DNA, 449 bp, Oryza sativa
  unsure (1)..(449): unsure at all n locations
tgccaagataccactggtaataccaacatcatggaatgtttatgatgagaagtacagaacgccatttatgccagcaaactgttgcagaaagaaaagggaccctccaatcagtgcaactgcatatacatcagaaattaagctattaatatcatggaaataaagatcataataatgcaaagggaaggaacaaatagaaacaagtatacagacattaagtcgccaccccctgctccccgctaccagcctggtcggcgcccggctcaccaccgatgactgtcgctgcccgccgcctgcgcattcaacgacaagggcgggagttcgccgcagccgcagccaccgctcccgtcgtcgtcgtcgttgccagcggccggatcaacggctgacggatccgctgacccgtgaccttcggccgctggngtcgaagaagacgaangagagagggaggagag

SEQ ID NO: 22060 - DNA, 446 bp, Oryza sativa
  unsure (1)..(446): unsure at all n locations
cggtataacagattcaatgtaggttggttgtggattatatgcatggaattngncgagatcttatggaagtatggatctgtcggtaactccaaattaagtgactaaaaaactggtaaaaatagttacattattggcatattttgagcaagttagccatacatcttggctgcatatcaacggcatatgtccaagtaacatcatggttttcttcctgggctacggttcgagatcaaataccaatcagagagctgctagctatggtacactaaaatgtatcaagcctagcttttcttgtgcttcttgggtggacagaattgcaaaagtctcatgttgccgcctcttgtctcaccaggaagaagggaaatactcagacacgtaatgggataaaaactaaagaatgctgcatcctatgaacagtcaactcttacttgtgaccaggtttgagt

SEQ ID NO: 22061 - DNA, 387 bp, Oryza sativa
aaaggaatccataagaaatattactatctttgtttttcaaggagcccattgaaacgtacgccttccctggtttctgaccattgagaattctatggaaaggaagtgactcacctaccatgaatctggcaaaatatcttggtcataaatatagattgatgctattttttggagaagggattatagtatatatactttgatgatgcactgatcgtacaagaactgatataatattaacactatctgtttttaaaaaatagacattacccaaatcttaatcatggcgcttaagtactcattgtgttgaactaggcatcttatgcttattcaaggaccaaaacatcacctccatttgattccttcttgtatgatggaaaaattcagaaagga

SEQ ID NO: 22062 - DNA, 438 bp, Oryza sativa
tacggccgccgtgattccaccgacgacgctgcattcgtctggttgatgaggactccacacactgtcgttgacatcgcgtcgccggcgattctgagcgatgcttttctgaatgacgactatgaaacgaactcctaggcggtcgttgacaggtgcactatactgacagcacataaacgagattgagatacctttctagttgacaataatcaaatactccctccgacgctaaatatttgacaccagggataatttttaaacatgttcgatcgctctacttattcaccagctattgagagatatgtaaaacttagtgtatgcttaacagactacttaacgatgaagcgaatgatatgaaaataattaatagatacttaaactaggaagatagcccgcgtattcacgcaggcgagcatattatttaggtttgaaaataattct

SEQ ID NO: 22063 - DNA, 391 bp, Oryza sativa
tagctagcttggctaataccatcagtatttgtgcaactacggaactcaaggagtcttaacctctcacgaaacagactatacggtgaactccctgtggaaatatctggatgctccaagttatataaagctcgatatgagctacaactctttgaacgggtcggtactcacaactgtaagtagccttatatttctgtcacagctacggttgcaggagaataaaatcagtggaggtatacctgattctttatctcagctggataagcttattgaactgcaacttggtggcaacattcttgggggtagaatcccttcatcgctaggaaaagtagttaaacagggcattgcaatatacctcagcagaaatggactatatggtgacattccaccacta

SEQ ID NO: 22064 - DNA, 355 bp, Oryza sativa
tgactctgctaccggcgactccacaccacagcttttcttgatggccatgacgaaaccaaactcgtcacaaaagctccaactacgaagatcttagccctggagtgggggaaaagagacgcagactgagtactacccactggactcagcaagtcataccgcaagaggaggtttgatgcaagatataaccataagacgctagatgttcttttgcctaccgcccgcatttaaatacagcacttgaacgcagccagacagtcgcagtaaacaactcaatattaacgcacacactgtccaacgctaccccacgctgctacaagcctcaccaaccacctgaactacaccagttcattaagct

SEQ ID NO: 22065 - DNA, 446 bp, Oryza sativa
atgcacagctgcttacttgatgcaccggcagtttctatctttggtcataagtttcgcaagatgaaagcagagcttgatggtactgaatagaatgattctgcaccgaaagttacacccggggataaagtatgtgaggcaacagagaaaatacaatgcgtgtttggaaaagggactaagaaaaaatcaaaggggacaaagcgtaagaaaacatcaaagggggcatagcagaagaaagaagatcgcaagcccccttccccattcaagaagcattctatattctttaagtacctgccgtactggaaagatctggagattcgtcatgccaaagatgttatgcatcaagagaagaatatattcgacaacgtaattggtacattgttggacataccacacaaaactatactaatgatggtttgcaatcacggtccgacctagtcgtaatggga

SEQ ID NO: 22066 - DNA, 448 bp, Oryza sativa
tgcagcctagtgtgctaagtaaagagtccaatggagagaatctattgaatcccgggaaatgctttcctcctagcctttcgtaccacgtggggtcacgtgctaaacaagccaaaggccagaagagtcagaatcagaaaagaaaagcaccgatgcgaactgaagaagaagtacgtaagatgaactttaccagcaccgaatggcctccagcatggataactcttcctagacgtcaaagaggaaatacctttcaggctgcacgacagttgacccagcacctcctaagccatggtggcagagtatctaatagtgaagggtcagatcaagtctcctcggatgatgaagatgagtctccccgacatctcggcgaggaagagatggaatcaaaggtatgcacccgttgtggacaaactggacacgctgctagcatgtgtctcacactctgccctca

SEQ ID NO: 22067 - DNA, 106 bp, Oryza sativa
  unsure (1)..(106): unsure at all n locations
agcttgtccagattcgtagtcctaggatgtgttttatctaatattaagntactatattatgtgacggaggtagtacttcctccgtttcatatcatatggatgttaa

SEQ ID NO: 22068 - DNA, 453 bp, Oryza sativa
  unsure (1)..(453): unsure at all n locations
ctcaagggatagcccaacgagatacaccaagcgcctcagttattctatcctccaaaaccttctccaatcctcaccaccaccctcaaaatcactctctcactcaataagtgcacacaaattgggtggaggaagcaaaatcacaatgggagaggctagaacaagctacggaacacaagaactaaagtggaatggccaaagaatgagctggggtcgaagtggctatatataacggttaggcgacgtcatctagcccgtactcacatatatgaactggaggggtgccaggaggttccggacctgtgtgccaagaacttccgncaacactcatgaaaatattcacctcacctcggcgccaggaagtaccggacagaacctccgagtgggactctctgtcccgagtagagtcatttacacaacagctcctaaaatatttcacactagacaccactaaag

SEQ ID NO: 22069 - DNA, 426 bp, Oryza sativa
tggctgataatatatctgctcaatatttacaggttacaggtgggcactgcatggcagatgtggtggcagatattgttacacagagttgggatcatgagaaggttaagttttccttgcctcctctaatgtcccttgtaagttaaaaagaacttatgattgatgactaggtttcctaaatggtcaataaactatctaacgggctgtcaccagtcattagaaaaattatgggtatgatgattgccttataagatttacagcttgattagaggttagttgcacttctattgtgcctttttaaccatcagttcatggctgttttttattatcacagtttgtgagaaaatactcgtataagcacgaatgctacaaatcatgcttgtttttttctcagtaagagatgaacatgctagtctttgtgatcactat

SEQ ID NO: 22070 - DNA, 336 bp, Oryza sativa
tgcatttggtcaagggaagaatgtctatgaatattgagaaaaatatatttgctctcacactagaacaatgcttcatcaaatgataaatgtgctagaaaagttgtgatagagcttaacaacctgtttaacatcagtaaggtccctccattgatgtgtgatggtgctttctttcatgtgagatgtttatgtcacatattaaatcttgtggctcaagatggattgacaatcattgcacatacaattcagaatattacgactactattggttttgtgaagaattctacgttgcactgggaggaatttcaaaagtgtgcttgagaatgtgacttgaacaac

SEQ ID NO: 22071 - DNA, 426 bp, Oryza sativa
  unsure (1)..(426): unsure at all n locations
agcttntcacgcttgtatgacctgtgatatcttcggtctttgctttgggaagatgaatcaccatcgatactcttacctgtgggcttgggctgcctatgtgatggtggtgcttccatttcaagctcaggctgtttcctctttagttcattcagagatatgctttctgaactatcaatgttgaagtcactaaatcttgttcttgatacttcatccgttctgcatttccattgtaaaagggatcacgtgaaaattcattacattcacaagctattcaaagcgctcaaaattatatgtgccacataagagcttgtacaatgattttgagcggctcaaaattacatccacgagctattcaatcgcctcacaatgattttgagccgttgtagttagcattttcataacaagtacagatgaaagtgttctcct

SEQ ID NO: 22072 - DNA, 430 bp, Oryza sativa
  unsure (1)..(430): unsure at all n locations
taatctgtctgccacatctgtgattgctctgagaaccttgttctaaaatgcagactgtgggggagagatcagacctctnttttttttctccacaacccacaagttgtgtgaactgtgtatgatgtgttgcttctatcaccaaatgaaataatgcttaagattgttgctataaatcttgtttcaatcagtattttaacggaaagaaaaggaggaaggttatgttgccctgaaaggtggaagcaaacagtagctaaatagtaacagtgacaaactgtgaatgatattgcgccctgtcacttcttgcatcanggattgccactaccaaatcttctttacaactttgttcttgttaactcaatctagatggccaagtaatgatcacctttcactatttaataagcctttagttttcttatctagattctttttc

SEQ ID NO: 22073 - DNA, 436 bp, Oryza sativa
agcttttaactgcatcaaaccaatggcattctatttactcaccgcgttcggattaccacccgattcgatagcgataatcgccgtgatcaattgtggatcgacgccccaggctgcaccggctttctggcttattggcatccactgcatcgcacgttgcaccggaactttcgcgttccacggcgggttcgtatagtcatgctttgatgaacaacccgctaataacacaatcaaaaaggcaaaccatctcaatttcacttcttctatccttatagcctggaatcgccgttgaggtgacaacggcacacctaagcggcatgatatacatttcgtttctgttgtcagcaaggaattgccatgtctctgtttcacttaattgccccatcgggttactgcattaaacagcacgccgcgctgcgtggtatccagcgccttaccg

SEQ ID NO: 22074 - DNA, 435 bp, Oryza sativa
  unsure (1)..(435): unsure at all n locations
agcttgctganccttgtggagttactctgttactctaaggaaggaatgttgttttggagagcaagtatgggtcccctacgattgtcaatgatggtgttacagttgcaagagaggtatattacagtgtttattgcgtcaaatagcattgaatttccttacaatttgcttgtttgctgtatgctatacttccacagaaaaaaaatgtttgttttgaaaagtaaaacagtctgcacatttgctcacaagtttcatgcgcaagtgtatttctgtttactattgctggttgcatttttgcacaccatgttctatcataattacctttgtgggttctaatatatgatcctctgacaagatgaactaaagtttgatagctggtcattgacttaactatagtgattgtgcaccatttgttttagtcatgatataaagaaattt

SEQ ID NO: 22075 - DNA, 451 bp, Oryza sativa
  unsure (1)..(451): unsure at all n locations
tataaacctgttcatcaaatccaagctctgctgcttctttgcactatactatactacatcactgctgtatgatttttcatggggatgcgtatacacattttaggttcccctgaggccctgatcccccgtatgtacaaaattcttggcaattacttggatcaatagcgtggaattttgtagaatattctgcaaaatgtgcatggtaatgaaactaaataatgtgatattctgtcaaactaagataagtggtgggcggtggagttattttcttaatagagcattgagaccatcttcattgnttgctctacgattggtaaactgtgaaaaaaaaaacccgaagaagcaatatacatagtttacgtgtagaccttttatgtttcgattcttagtgattaaaaactctactagagaataatacgatgctataaaattcaactgtggtgaagaaaaa

SEQ ID NO: 22076 - DNA, 435 bp, Oryza sativa
agcttccattgtcaggtataggtccagtgttcttgtagtttccccataggaacagctcttgcagtctagacttgttgaatatggagggaggcactggcccctcgagctgattcacatgcaagcataggtattcaagattgggcaatgatgaaccgattccatctggtatggatcctgacaagctattgttcccaaagtttatgtaggttaacagaggtgtgttgttgaatatgttttcaggtatgttcccactcaagtcattcttgatgaaactcatgtacctaatgtcatgcaggtttcctagctctgttaagatgtgccctgacaggttgttgtagcttagaacaagaacttggattctggtcaaatttcctatggatgatggtacactgcctgacaatctgtttctactgagatcaagaaccctgagacgag

SEQ ID NO: 22077 - DNA, 459 bp, Oryza sativa
  unsure (1)..(459): unsure at all n locations
cggacctataaaactcaagctggtaatcatctctctggttgctgctgattggatagcttgcatgcatctnacccggatcagtagtattattcttttcttgctctagtggaagtagagccatatgcattggaaattgttgtcatggggctagctaggtacccaatgttgcagcagcactgtacgaaccgtctttcttcttcgcacgtagcactgcagctgttcttgtaatggttttgggatgcagcacagattcatctgggcgttcgtgttttccggggggttgtactgtcgattgctgcatggcaggataatcaattaatatgatagagatctgatgaactgttgatagactactgttgaatgctctttattntctgtgcatatatatatgtatagaagtattggagaagagtgtctgattggtagatcacactacgtcagttgcatttgattcatgat

SEQ ID NO: 22078 - DNA, 436 bp, Oryza sativa
agcttcagatgctgaacagctaagctttatgttcctcctcaatgatttaggaacctttcctatccatagcatttcttgtgcctaaatcatgccaactaccattgcctttttattttccaaaaataaaatgaacactatgaatagttttgcaattaccaccagaaaagatatcaaagacttctggaaaatatattacatagctctatagttttgtatcagccatacttcaatgtaccttacggattgcaaattttgaatcagcacgagttacaccatctgttttctcaattgcaccatcatgcgaaggttccttttctgcttgatttacgcctttatcctcatgatccttttctgggtgattcaacttggccttcgcgctcctatcgtgtcgtttatgatggtgatgatggtggcccatgccatgagcccctttctg

SEQ ID NO: 22079 - DNA, 432 bp, Oryza sativa
agcttatctcgatcgagtcgggttttactcttcggacgagatacaatctacttcaacttctccacatcaagatgatggggcttactcgccaatcctgatgaaactccccgacgatttgagtgccgtcttcactacaagggcgatttctacccgtatgcctacgcggaagtcgacctcaacaccgatctcgcctagcttcatggaagtcggcgtcatactccagccacttggcacgatttcgatggaccaactcgaaggctacctcatctcccccggcgtcgactcacgaccaacagagatcgtggaatacgacgaattctgctactgctacgacgaccgggacctcgatgacttcgacgagagctttgaagacaactacacccctttctacgtcggcgtcttcatggccaacaacgagacggaagaacaacg

SEQ ID NO: 22080 - DNA, 454 bp, Oryza sativa
  unsure (1)..(454): unsure at all n locations
tctgatgacaaganaagtcttgacaaaggatggttatgattctcgttataaacatggatcaaccaaatggtcataagtgttgatcttggctcaagcatagacaccaagttatatggcacaaggcaaaggtataataaagctaagatagatgtttagtcttttcccagtcttgctgtctggtgtagactggatttgctagataggcgtcgtactatcaacaggggtctatgaagtgagtatgtggatgatcttgtgccatattacgtcatatgcatgtgggtgcatttggtggtcttgtctggccaagtgtgatgagttctgtcaagtcccaaacacagagagaagtgggtatgtcctatatgtttgggtagcctaatgaggttatgtccaatggagtaatctttggagtgtagccgtatatcactggtaaaagttgacttccttgatggattgt

SEQ ID NO: 22081 - DNA, 376 bp, Oryza sativa
gtaactcgtatcacattgcatagtttcccctttccaaatacatatttgctttccaatagcatcttataaaactcgaaaacaacataaaaatctgccaaataaaaaaataccaaaagataggataggtgtgagtcacgctacgtaagacaaactagctttctttgtagaaatgatgaatagatgctctgttatatatctcttatatatgggtacttggtaagagctctctcacaggtcaaataaaagacaccaacaattatcccggaacctgaggcaaatgagctgcactcgctgatctaagtctaggctgtcgcgagatatgacatactaaatatgagacgctatgaaaatgatactacctggacttgaattcccg

SEQ ID NO: 22082 - DNA, 360 bp, Oryza sativa
tgtagcttgttagctcgattggtctgtgactattatgattgtgactcatttcaatttcataatgagccgagctagcataagatctcatgacgcttaacgagctagggtagacatctcaccatgataggtgggttgcttctgctagcgggctatcgctccaattaaagagaaaccaaaacttatctgtttgtgatccctattcacgctcaccctagccgcgccaggtgcttgcactgctcttgcgcacttgtccacgcggctgcgccaccggcatgttgagccctcgcacagttaccaaccgaagctagccctgtgcgcgcctccatgtcgtgatgaactcttccgctgcgctcctctttt

SEQ ID NO: 22083 - DNA, 398 bp, Oryza sativa
gccaaccccgagaagatacgagctataaagcggatgcgcccccacaacaaacctagggatgtgcaatgcgtcaccggctgcatggccgtcctaagacggatcatatcgaggccgggagagaacgcgctacccctatataagcttctcaaacgttgcgggccgtttaccaggacagaggaggctgaacgggccctcactcagttgaaggcgtacctcagttctcccccggacctggtcgccccgaaaccagaagaaccgttgctactttacctcgcggcaaccccgcaagtggtcaaagcggcattggtacgtgagcgcgacgaagacaaccctcgctttgcgcacacccactctgtgtctactcgactcgggagagaccagggaggagaaggcccccg

SEQ ID NO: 22084 - DNA, 352 bp, Oryza sativa
  unsure (1)..(352): unsure at all n locations
gtgtcaccgaacatgaccccgcctccccggtcctatccttgctgtggcagnagacgatgcacgccaaatgagagatgagagacagaccgacgaaccaatgataggatggatgaagatgacgaagcgcagctggtcacaaaacttcggaatttgtattgaaagggtaagtagtgtcacacttcaaacatatgtcaaaatataatggcatggttctaatttcatgaattgtaataacatattaaaagatgcacaattatgatggtatgaattcaattgtgaatctgaagcacttgaacgtgtacaaaggcaagattaggttctattaaggggaaggggggaggtgttacccatt

SEQ ID NO: 22085 - DNA, 433 bp, Oryza sativa
tgcataggaaccacatcacaatcaacagaatctgtatatttgtcaatggaaaacgaaaccctacaaacctgtgatacctttgctcttccataatcgtttaaccactgaatatggtaaggatgtggatgtgtacgtgtggtcaagccaagctttttgaccaaatcagaactcaccatattgttgcagctacctctattaatgatcacacgtgcacgacagttattgatgacgaacaagatttgaaacaatatatggcgttgcaacctctcaggctgctgtacctgcatgctgagcacccgctgcacaacgaatggcctgtattcagttgtgtcatcacgaccaaagacttctccatcctcatactcaactatctcttcctcctcttcctcttccacatcggaggtggtgatgtaaccatcttctgtagcaacat

SEQ ID NO: 22086 - DNA, 377 bp, Oryza sativa
  unsure (1)..(377): unsure at all n locations
acctgcagcatgaagcttcatgtagggctgaggatctcttttcttttatgcctactatatcgccatatcggatatgaggtctttactctgtattatcctcaatgctgatattcagtttttttcgtcttcgctgtaatgccaaagattattgtctgtcctcaaacatttaattntctgctcaaagcataagcatctgatgaaaattacagcataatgtgttcttttcatagaatagggtcatatatcttccgcattgaattgataatactataacattgcagtaaccttgttggtgtaacaacacgatgggagcgaatggtactgcaaatatttgttcttggtccctcaaatcttctggagccacacgcaagttttgc

SEQ ID NO: 22087 - DNA, 436 bp, Oryza sativa
agcttctcagcagagactacctagttggctcatgtaatctagtcatcttccgacacagagttggtacatggtgacctatttgctttatagatgacatagaagaaatgcaaacaacctttactcgtacagaaaacaacaggtataataaatgatcatagccctctaaagctacctgcagaagaggagcgaaatattgtatatttttatatttgaagtaaaaagggactaaaattaaactaatgtgcccaacaggatcacacattagaagccaattgtcaacacttctcagtagagtacctagttagctcaaataatctagtcatcttccgacacaaagttggtacaatagtgacctatttgctttatagatgacatagaacaaatgcaaacacaacctttcctcgagcatataaaaaacagcttcaataaacaatca

SEQ ID NO: 22088 - DNA, 424 bp, Oryza sativa
  unsure (1)..(424): unsure at all n locations
agcttgatgactcagagttcagaaatgcattttcacgggcatatatcanggtatggatttatttgttttttgaccatgagggtttttcctgtttttgctatgataatagataatatgtcttctagatgcatttgattgtgatctttcgtcaacgtgttcttatttctatgataggtgagggagtatgatgatagatcaagaagcagaagccgctcttactcaagaagtcgtagttacagcaggagcactatggcagcactaattgttgactgcattgttccacagatctgtttctcggtcaccgtcacctgtggatgaaaggtatatccttttataacatcagctntttactgggcatgcctttttgtcgntaaagagaaacaggagtatgtgttggaatttgggtttttatatactttggaac

SEQ ID NO: 22089 - DNA, 428 bp, Oryza sativa
  unsure (1)..(428): unsure at all n locations
agcttgctttctgccnnaagaaaagaatgtatattaataactaccagtaatattctactagtagcttttaaaagaattaatagattgaacggaacaaaaattcttttcgctctggttacaataaataacatcattccgtcctaacatctaaatgcaagtgtcttatgacactacgatttttgtaccaaactaacagagccgcatcacatgcttcgcagctgatgtacccgctccatgtagattgaagcgtacaaaagttcttacttcactctgaaagttgcattactatggattaccaaatttaaatatctactcaatgaggaatgtccagttatccacttatcttatcaagagatacaaactaaagcaataaagtatggatccctggtcatctacagtgtactagtatggtctttacctatatgtat

SEQ ID NO: 22090 - DNA, 430 bp, Oryza sativa
  unsure (1)..(430): unsure at all n locations
agcttgacactccatccctacgtcctatttttatgtaaccacaagaattgttaatgatttctaaaccttcatcacatattcctaatatgttcaaaatattgtttaggaactaaaatgttcaaaactacattctttcttactcaagcaagcaaatccagacgagcaattcaacacatcagtaaagacagctggctgaaatagcttggaaaattctagcggactgctttggaacaaaatatgttctagatataataacaggatgcaaacatagaaggggttntcattaattctctcatccttgattagctccctacatacaatgtattcaaagatgttgctatgacagacctcgtgcagttgtttgtgccagaactaaagcaccagccaacaccaacaaaccagtggggatgagccaaataatgctgggctg

SEQ ID NO: 22091 - DNA, 381 bp, Oryza sativa
agcttgcagctcattgcagagcatcgcattgcggcgtctcttctcttcttaccccagcgagaccccatttccacggtgggagaagcaacagtttcgccgctgatcggcggcggccggccggtggttgccggggagctgcatgctaactgcagagaggaggcacgagaggatccttgtacgtagcttcctctcctcagttcttcttgcttgattgatcagctccctctgttccgtccgtttagttcatgcgtttggttctgggaagaatgcggttgcttctgatctgtttgcacgtggtggggttcaactgctcattatgtttgacgtttttggatcatcatttgcttctgttcatgtgctcaaccgtcttgatgactggat

SEQ ID NO: 22092 - DNA, 427 bp, Oryza sativa
  unsure (1)..(427): unsure at all n locations
agctnttataaaagaaacattaagtggtttagatcccctaacagtggcaatagtggaatttgatcatttacttttataccaacatgaccaccttaaataaaagaagctatccactcacaccatttaggagagaaacccttcatcctcaacgtttgttgtacaaaggaccattttactntatcataaactttttcaaaatcaatcttaaagattacaccgcttttgtctttacaatgtaattcatgcatagtctcatgtaaaataaccactccttccataatattcctacctggaataaaggccgtttgagtgggactaataactttntagcaacttccattattctattcgttgcaactttggtgaaaatcttaaaactcacatttagtaaacatataggtctatactattgaatcttaatagcgtc

SEQ ID NO: 22093 - DNA, 337 bp, Oryza sativa
  unsure (1)..(337): unsure at all n locations
tcccggnttagctcgcttttatcctttccgctgcatttgtaatctttatatttttgtaagacgtggatctgtatgtcaacaattgtcgtttgtgtaccctggctggtcctggatagggatttaatgcacattcagtttagaaattctggttcgtgaatttctgggcgtgacatggccgatgtgggaacaaagtcgtccatcaatggcaataaaaacaccagccatagaagcagcttgaggcgactgacgttgaaagtgaagacgcccatcaatggcggcataataagccagccgtctaggcagaaacaccagtcggcggccacgaacgcgagccggc

SEQ ID NO: 22094 - DNA, 449 bp, Oryza sativa
  unsure (1)..(449): unsure at all n locations
cgcccggatcttaagcactgagctgcagcttattcttgacaaaatctatcttttacaatctccttttgccgccctacttttcgtctcggtggtcttttctttatcttgaaattacattcgatagatagtcggggagaatatagcagccagtaaaagatgggaaaatgagagcaattgatagaaaatataatgattaatatataatatattgtgcgaaacatttctagttttattttctgaatatatgtacaaaataattaaatattttttacatgaattaaatattggttttactccgctagatagtatcatagtattagctactccagaaactttctaattcttgagaaggtatctagatgtgccatattgtgtattgcaaatnttgacatcttccacagtccgatcaatccttgctactggtagtggtagactctaaaataagcccc

SEQ ID NO: 22095 - DNA, 446 bp, Oryza sativa
  unsure (1)..(446): unsure at all n locations
ggatgtttcttccttgatgaatgccaacatgaatggttcatctgctgattgcagctgagaagatttatctggatgattggtatacttcatggttgatgtcttcgaatctgaagtccactgggtgctcaagttgtgcagagtcttcataaaggaaccagattctagcatctttctgaaagccttcatagaagctacaaaaccaatccttgagcagttcagccgatagttttgcaacaacatcagttggtgtagaagcgtattctccatctgatgtgcatctccgatgagtacgctcttccccatcatcatctataatcggctctagtcttggaaattcagcttctgacacggatggccgattgacaaccttcatgactatcaagtntagccaggtttgtagtagccactanggtccacctgctccgactactgagccgactgctatc

SEQ ID NO: 22096 - DNA, 79 bp, Oryza sativa
aagaagcagcacgaagaaaaaaacgctttttttaacccacagggagagggaggggatacttgacaccgacccctaaaag

SEQ ID NO: 22097 - DNA, 380 bp, Oryza sativa
gaccccgacacagtgacccacgccaacgatcggaagcaacccaagacagacactcacaagcaccggttctcgggtgtggcacgacactaccggagggtaacacaaactactccaaaatcctcgacccatgacacagctgtagaagaaagaacagaaatttcgcggagcccgcaatgcgagaaggcgtcccaaactctcagagaaaagctggttacctcgccagtgttaatctagccggatactcgcaaggatatcatggagaattgagatgctacccgccaacgacaggggtgcgtgcttatgcaggacggacatgtgggagcctatgctacacatcagctaccacctcactgaagcaaccacgctacacatgacctgga

SEQ ID NO: 22098 - DNA, 453 bp, Oryza sativa
  unsure (1)..(453): unsure at all n locations
tcacacttgcatgccaaacaattgcattgataagtcaagatcctaaccttatggcaataaagaatcccacaattctcgcaagatatcatatgcgcatgcagcgagaaaaatacaagatactaatctgaacaacaagtaagcacatcatgcctagaaaggttgaacaccaaacttataattaggtgctgaattagtcaatcttaaagcaaacaacctgatctaaaaataaatttatttttcacatcacaaataagaatattacatcgagaatacaataggtggtgagtgactaccattaaaaaaattcaaagaaacctcatttctacttgagccacgaacaaaattgcagaaaaaacctcgcagatcaggagctagctgattgactctcagcttatatgagaantccaatttgatgaagctgagaacctgatggactttcaatgaaatacgcag

SEQ ID NO: 22099 - DNA, 468 bp, Oryza sativa
tacggacctatgaaactaagctggagcgtcctgcgaacaggaacggtctaacatttatgtgacagaaggatcgaaccaacacatgctcaataccaaattaaataaagcaacaaatgactcaagtaactcgccgagcatgatgaattttatgcgtggaacatttttcatgaacccagacaaagatactaatgcaactgactaaacgataaattaatgcacaaaatagatgcatagctataatacacacataaaattgcccatcgaacctagacacgacttagtgcatatcacctaacaaattcccgactgactgccaaataaattccaaataatgtttttctaaaacaccatactattcctagtcgataaatccaattgaaatagcgatcaagattgttcccacgaatcaaaagagcaaaccccaaaattttcccaaaacaaatccaagtgcaaaaggcatgtgcagat

SEQ ID NO: 22100 - DNA, 371 bp, Oryza sativa
attgagcgcctgtgaatatggagcccgaagcccgctacatccgctgctgtttatttatgattggcaggccttaaatgcctttgtaataatggtaaaattatcgatataataaagaggtgtctttaataacaagcctgtgcggaggaccacggctgttcctgggacggggaataatacactaacgttcgggaaaagggaaatttcccggtcgcgacacccgggccgctgaccggggggcccctcatgtctgcgccgcacccccgtgcttacgtcattcctgtaatttaatgcgcaataaaatattaaggatttttgttatagtaataacacaggggacctctaaaatcaaactaattcttcgagctcgttta

SEQ ID NO: 22101 - DNA, 404 bp, Oryza sativa
  unsure (1)..(404): unsure at all n locations
ttattgaatactacttaaaagtgcacggcgtcatacattataaatatgaagggtactatttagcgagaaatccaaaaggtgagtttggcacgcttcagtcaagtcttttactggtcggatggtggattaatctttattcaaatattctaccanttgatgatgacatgacatcaaaaaatgctacaagttctttgccattggctaaagcagaaaagatgcatgtggtggctcttcagtatatgcacctctgagtaataatatgcaattcatgtaggatccaccaatacatgtttaactttttntaaaaaaaatatctctcatgtcataaatatcttactttaacacataatattatcaattttttgaaattttgaccatcaatagattaataaggtcttagttgt

SEQ ID NO: 22102 - DNA, 430 bp, Oryza sativa
  unsure (1)..(430): unsure at all n locations
agcttattagctaaaaagtagaagacactttttaccatagcttcatggattatcaagtattgagtcagcttggtctcttgaaacaatgttcccctcgtggaagggaaaacacaaattagccgagctactcctgaaaaatgttggtagattttattagtgccaaaacactctctgaacggtggatgagtctttttaaaaaaatagatttcgcttatctaccaaaaggttgtagggtcattagtctacctataatgatcactaaaggttcatattaactcaaaccaacagtttgggaaaatggtttcaatatctacccatcctttntgtacaccaatcaacccgatgaggttttgaacccaaacaactttataactttcaacttttactaaggacataccccgattttcacctaagttgattaattaaaact

SEQ ID NO: 22103 - DNA, 449 bp, Oryza sativa
  unsure (1)..(449): unsure at all n locations
acacattatactcagctgaaccttgctcgcccgagtaaggaggaattgttttttacctggttgttgatcaagagttgctactatgttggatatctcaaacgtacatgtgcaaagtatatgtactctctctcaaattaaataatctttggcacggtggcttacccttacccttgattccacgagacactgcttctccttgccttatgcggcttatagacagaacagcaattagagcactaatcacccaatcttcattcaacttttattctggaagatttcaaataactttgcaaaagaaatccaagttcctcaaatgattcactcaatctctcaaagtgtatcaatataaattcctcaccatttntgcctttctgattcctactctaaggtttgatatgtggagctcgatagggatcatacatggcgtacttgcattcacatttattact

SEQ ID NO: 22104 - DNA, 412 bp, Oryza sativa
  unsure (1)..(412): unsure at all n locations
agcttagcaccagttaaatgctgtaaagtttaagttttacatagtttaagaagtaagtgtagattctatcactgttcactatttagttagactgaanagagagagaggaaaaaaaagaagaagcaagcagcaagcaggacaacatacagtttcgcgcaaatcaacttctcgcaagtaggctcgctgaagatttgcacattccaagtttgtaccggccaacttagctccctgcaaatcagactagcttatagtacggataaagaagtttgaataacaaagcgaggacaaggaactgggttgtcagttaaggcacaagaaaagagggattggtgttaatgccaatgacctttcgttaatgtacacttcagtacacgattaaccatgaattcatatcaaacagtcatggtttcat

SEQ ID NO: 22105 - DNA, 435 bp, Oryza sativa
  unsure (1)..(435): unsure at all n locations
tcaagaagatgtcacacagtccgtgccatggccagatttattatcagatgatgcatgcgacattntggggctcatttttatagacaattcacgagtcagagattgatggacctgttcaagaagttatgctagcagaatcaacaaagaaagtttgatgccatatgggatcaactggatcgtttgaccactacacacatggtagaggttaggaaaaaacctatagttgccagacaggaggagccggagggacttgaacccattcctaatgaagcaccaagtattactcggcgcaggaagcgtggaagggtcacgaagtgcttcacggagtgtgtagaatatgagccaagggagaaatggtcgttgttgtacgatacagatggatcgaggtatggtgtgatgactacaaatcttgctgaagtgtataactgggttatg

SEQ ID NO: 22106 - DNA, 421 bp, Oryza sativa
agctttggattactatctttctggttttattaattttgagtgatcttaaatctgttgattcttcttatgatactaattatccacaatctgatatttctcgtcactttttgaatggtcttgacatgtctatttgggagatgaaagttacatctattcaggagtctgttaatatgtctactttgactttggattcactttacacaaaattgaaaacacatgagatgaatgttctttctcgggaagttgattctaagtcgagtgctttggtttcttcttcttcttctttggatgttgatgcttcttcatctaagccttcttttcttgctgtttttaatgccacatacaatgatcaactcgaacaaatcgaggaggagaatttggctttggttgctaataaaattgcttgagctataaataatgc

SEQ ID NO: 22107 - DNA, 453 bp, Oryza sativa
  unsure (1)..(453): unsure at all n locations
taacatgcaaagataccacatcatcatccactatcaatatgtcacatcatcatccactaattaacaagataccacatcatcatccactaacaatcatcacatttaaacatcatgcaatcatgctatatctttatagttnttataatttaagagcttttcaaatacaaacatgtgaaattatcatccaacataattcatataatgtttcaatgtatatctttattatgttttatgatatcctatatacttatatagttcatcctcacttagttagtgcttaaatgattaatctatggtccaaattatctttctctttttttcctctaattaagttatatcatatcaattgtttttagcctttagatgattaatctacggtccanactatctccctacttttcttcttccataaagtcataccatcttaacttttacgtttgaatcaccatttta

SEQ ID NO: 22108 - DNA, 433 bp, Oryza sativa
agcttaagtacgaacccagatatggagatttatctccatcataagtatgcgccttcaatgctaagtagctgaccctatgagagcttggcacgagcacggtgctgactgctagctaggtatagaagaaccaggaccaaagtgaatcatttggtaaatataaccagtccaatatgaaaatgttgctttaccctggttcaggctaccacaatggtctcataaggggatctaatacgcaatttactcatttctaaattagtttttagagcatattttataaaataagttttatatgaggaccataatgtcaaaaatcgcgatggaacctcggtcatgctgaataggggaggatggaaacaaatgctttctttcatctacctacctcaagtccttcaaataaatctatctattgtcatgtcactccgtatgacaactg

SEQ ID NO: 22109 - DNA, 336 bp, Oryza sativa
ttcaataagatttctattggagcccatgaattagattaatgaaaaggaaataatgcttgacctaactcgatgagtaatttaactagtaattacccggctaacctcgtgcactttattgcttaaaattttaaaatttcatgtttagctaaaaatattattatattaactgtgcatttgagctttaattcaatttatatcatacatcaaatatattgcaagtaacatattagaatacgatataccaatatatttgcgccccatgtcttaatgcataataatatgatattaaagatatatgataatgcatatatctgtgccttaagatatatgataacg

SEQ ID NO: 22110 - DNA, 409 bp, Oryza sativa
  unsure (1)..(409): unsure at all n locations
agnctttgttgctcagtgagtttttatctttctataaccggaaaatagccagacaaaaaaagttagtatcatttacctagccatattgtgccattgcattgttcttttcagtttttgctttgttgagtttgcgttgcatcgtctaatcatgttgctggtcttagcgtttagtccgtttaaagtttcgagttctggtcacgtttagtaccactgtctctgccgccgtcgtgtctttgttgctgtcgggaccagcacgatacttgactttgaatgattattcaactttgcattctctgatttgagcattttctattcctttgctacatatttaagcgtacccagaacttcacatatttgatngcagccatacaacaaggtttgcgaagacatcgatacatccaacctccat

SEQ ID NO: 22111 - DNA, 458 bp, Oryza sativa
tactcagcttgggtagatctttccgagtcggaataccgtactttgcttatacctggtctctccctgactggttcgaatccgagtcaaggagagagatcttgccgaagtccttggtgatgaagtcgaggttgctgaaccagaacgcctgcccaggaaggaaggcgaagtcgtcgatgccggagacgaaacccatcgcactagtctgcgataaacttgacgctacctctacctggcacgccaactgtcgaaacaagatttcggcaatactaaaagggggtggctatcaagctacaaaagtggatggatttgaagacaaggaattttatataggttcaggccttcttaatcaagaagtaataccctactcctatccggtgattgatccgccgagtgtattattgatcgtatgatctgcgagaaaatcgtgtgcctagatggaccctgacccctccttatat

SEQ ID NO: 22112 - DNA, 400 bp, Oryza sativa
agcttatccaagggatgcaatttttctttttgactccaagtagtatgccttgcgacaatgatctaaatcctcttcaaaagaataggatgtctccaatacttaatatggtaattgaaccatcatttgactctgatgatcctcctacacatcaatataatttactggagccaacatcaattattactagaaagcatgttttaggtgctcatacatgggatcacgagtacaattttgatggtgctagtcttgaaaaaactcttgtgcttcataagcctacaaaatgctttgaagctactttagttgaattctctaaggacatgaagaaatctagaatccattttaactcttcattcagatcaaagcatgtggacgatgcatcacattgtctgggatataacat

SEQ ID NO: 22113 - DNA, 429 bp, Oryza sativa
tcatcttggaaccatcggtgaacttcaatcgtccttcatctatggccaattgaacctgtcgtcgaaacacattgcaatcattagtagagtgagaatgagaatcatgccatttacaatatgctcgacgcttcaactcttcttgcaatggtatgacatggcctttacgtaatctaatttgtttttcttgcaaaaggtaatcaaaaatcttatcacacttggccacatcaaaactatacttaacttcactttgccgatctttgcgaggagtcggcattaagttagagcaaacaaaaggcttatttttattagtccacgaccattcgacaacataaatatcatgatcaccctcctcctcattatcactagcctcaggataatcaactacattaacattatgccttttgtcaatggtctagcaaatttttatta

SEQ ID NO: 22114 - DNA, 424 bp, Oryza sativa
gcttttgtggcctctctcacccccattttttggtgcctcttcttaattgaaagacctctagggaggtctttccccttgggccaagttattctaatagctatctgaacttcacagttcaaggtgggtgattcatcaccgaaattaacgacaccctagtatgccagtatggcatgccgtgcttttcaggacaaccattttggtgcaatgcctatgcaggtacatccaaactagtcaattcatgatggtggacacagatctgtacaatattaaaaatattgccgaagtgtcaacgtgcaaggtggtgtactacaacacagcttttgaaaccatgttcaactgctgttcaatcacttggacacagtacagacactagctttagtcatcaatgaattcggcgttactccttcacattcaattatagaat

SEQ ID NO: 22115 - DNA, 446 bp, Oryza sativa
ttgagcagctcacagaaaagctgacctctgcgcctatttttttcttcccgacatcacgaaagatttggtatatattgtgatgcatcaacgcaaggactacgatgagtactgatgcacgacagaaaggctgtggcctatgcgtcacgactattgctaccacacgaagaaaactaccccacccatgacctataactcgctactgtggctcatgcgctaaagatttggagacactatctgattggaaaccattgcgatatctacactgaccacaagagtctgaagtatattttcacccagtcagatctcaactcgaagctaatgcgatggctggaattaatcaaggactacgatctagatgttcactatcaccccggctaggcaaacgttgtggccgatgctttgagtcggaagagtcattgccatcatttgatgaccgaatggatggt

SEQ ID NO: 22116 - DNA, 134 bp, Oryza sativa
gaccaaagaaccgaatgcgaaagaacaagaggaagaaaacataaaccaagaataccactgccagtagccgaaccgacaaaaagaaaacctagccactgaaacaaacggcaaaaatcacaagaaaagcgacaaaa

SEQ ID NO: 22117 - DNA, 456 bp, Oryza sativa
  unsure (1)..(456): unsure at all n locations
tacgacacgagggcatgcaatactntagcctccatctnttgctgttnttgcccataaatgattattcgtcccttggaaacctttctgggcaaagtgtaaaagggaggaaggcttgttcgtcatgtatggaggaaacaagaagctaattattgaagaattcacgcaagatgatctacatggctcacaggagatntatcccaaggtatcacccttacagaaatttgagaaagaatntcagtgaacacaaacatttagcaagtccaccaccggaactaacaaggctacaattgcatgccttagtgaggggaatcaccaacgattttggaaagcgcaaaaacatttaacagacgccatcagtaagtaatttgaagatagtttcttggaaatatcatataataggaggtgctatgcgatcctgngtggtttggttggattagtgcattggattaatcatgt

SEQ ID NO: 22118 - DNA, 415 bp, Oryza sativa
  unsure (1)..(415): unsure at all n locations
agctttcatccgtcgattccgcgagaatctttctttttatacgagcacatccgattacgccatggactcgcccccaatcccctagctcatatataaggaaacttaatctttggtcgtttgtcactacctaaaccttaagtcctaccgatcctaaaagtacaataagagattgttacgaggaggcgaatcagatcggtataagaagaagaatatcccccaaattcgaaacccttattttgatttttccgaacaatacgaaccctaacctataaaattcccaaaattaagaacagttaacctcgaacaggcaaatcaccagctcaatggaaaaccctaagactcaccgngattagggttagttcgtctgacttcgtggcgcacggcatgagcttcagctgtgtgcgcacctccgaac

SEQ ID NO: 22119 - DNA, 452 bp, Oryza sativa
  unsure (1)..(452): unsure at all n locations
tctcctgtagcggatccggtggcggtggcaatgccgactggtctcgttgcggatccagcttgattgttgttgtgttgttgcgatgatgttgctgttgtgttgctgtgatactgaccgatggattgantttggggggcgaagtatggggaatgtgctcggtgatgatgtattgagcatttttttttcatcccgganaccttaaaggtactggcacctttgaggagactcaatggtgccgccttctaagtgtaggttgggaaatccgacacctattgccgcttcccaactggcaccaaaggtcttttctgcagtagtgttgacacttcgttcttcaacatgcctcttatacatgtacatggtgatgagtgacaatccttgcatagatttgaattggcagtgatttaccttgtatttgaatacatgttccatataacattgtgataccacctgag

SEQ ID NO: 22120 - DNA, 369 bp, Oryza sativa
  unsure (1)..(369): unsure at all n locations
ttgccacgtaagattactcattccatgctctatcataattccttgtgctaaaactaggtatagaatggttgtgtgatgcacatcctggatgttatcttccattatctacagaaacatttaggtgtaaaacaagcgttctttttgttacatagagctagttttatagcccatggaaacataagagactattcacaggaactctgtacagaacagagctcatcatattatgttgggaatggatgattataatttcagtttctgtaaaaatagaatgtccacaggaactctcaattcaactaattatatggtaagactggatgttcttttaggttatatganaatagaacaatatgtgtttttgcgctcata

SEQ ID NO: 22121 - DNA, 453 bp, Oryza sativa
gaccttagaaactcaccttaaacagaatacagaaacagcatgccattttaatcttatacctctgcttcatacatttcataaaactacatgatggcttttgcatatcactttcatatcataaaactacaggttagcataaaagcagtcaattcaaatcccttcatccatctcccagatatggtaaatatgattgttcatctgtcaaacattcataccaaattagtgacagtacactagaaccaattcatctcaggcaaaacatatatataatctcgagcattctataacaagcaaatcaccatcgtaaagcaacaatagatcaccacgattactagtaaagaattgcagctctcacatagaactagtgaagtaacaacaccaaatgatcagaatagagtaagaagttgaacactgcacatcctacgaaaatgttgcccagatttcaaattcaaa

SEQ ID NO: 22122 - DNA, 434 bp, Oryza sativa
  unsure (1)..(434): unsure at all n locations
agctntgatatttcttaaaaactaatttattattctaatgtgaccttaataatacaatagcacattggtcgagtttatttgtataacaatgtattttacaaggacatgtttaatctattattccataaaagtaaattgatacttggtacaatattgacctaaatgtttaattaaacactcacataaacatattttatgtataaagttcaatttatttgcatgacaaattattttacatgagtgaatccatcccatgagagactcgatgaaagttataaatattaatttaattattctagtggaacactcctatatatataaaatcattgtagtggcgactacttcgtggttacttagatgtcatgacacttgtcgacatggttcaagtatttaacataaaatttgtaattattaataatngactcgtgttttat

SEQ ID NO: 22123 - DNA, 453 bp, Oryza sativa
  unsure (1)..(453): unsure at all n locations
tcagtctctatcagggcagctgcatgccctgaagtttttggatattaggtgctgcaataaactggagtcactgaattgtttgggagacctgccatcattagaaagactttgtcttgtgagctgcaaacgtctagcatccttagcatgtggtccagagagctactcatctctttcaactattgctattcgatattgcccagccatgaatatgaagccgctatatgaacgccttaggccacggttggatattcttaaggaaagagatttgtcacatgcccatgcaaaatgtccttatggaggtacctttccattgcttattccttcctttttgtttttttttccctacatactagtattgcatatccatatgttgcagagtatgcacttaanaatntcaatcacctccccctctgtntatagtcaataatacaattacaaggttgtcaacagaat

SEQ ID NO: 22124 - DNA, 427 bp, Oryza sativa
  unsure (1)..(427): unsure at all n locations
agcttctcagggtctttcgtgcatctctagtcttataattgtggtaggacgaaaatcgtgcaggagggtacgtgtcgctgcttgggttgcacaacagagataactaaagaaaaattacttcccacttcatatgggtatgaatatgaagtacaacttttataatttaccgttgtcgccgtatatagtttttttagcaacaactaaaacttgagaaggagctaataatttaaattctcaaaaccatgcatgaaaccttanacactacattatatttttaatatactaatattcaatggtttatagtgcatcaattagtggtatacactgaaaaaccacattcatatatgtntttttaaggcatctatgatgcatttgatcccagcaaaattactaacgctctatatcaggtgtgcatagcaataatatt

SEQ ID NO: 22125 - DNA, 439 bp, Oryza sativa
  unsure (1)..(439): unsure at all n locations
tggcccgatgctatangaggcgtcgccgccgccgtgtttgtcgtctcggtgaacgccgtgttcatcgcgccgccgcccgcaccgacgtggcgcaacaagctcgccgccggcgccatgcggtagggattagcggcgtatgggtagcagcttgcactacctgcagcgaggatgccgcgacagtggtggtcggcggcgaggcggcggcagcgccctggctgataggtctccatggatctcgactcgatacggcggcgctccgatcctgtacactgtagcggtgatgttgtcgtgagcccgggcctttggagattttggagataaagaagcctaaatgaaatggtgcgttcttcttcttgctggaggatttcgtagtcgtagctagaattgctgacgtggcatcccaaacatgctgcagctgcttattgcctggtctactggc

SEQ ID NO: 22126 - DNA, 395 bp, Oryza sativa
agcttgatataacaaaactcggctgctatttatttgacctacaccaacgctgcgcgtaaactacgttaagacgccccatctccatgagacctttcatactggaaaacgggtgggaaaactttccatgtcctttcaggagttggaacacctgatgttccttgcggcggtcgactaacaatatagatattgtattgtttaacaccacaaccatcttgatcatctgtataacaaacactacatcttactgagaactggcacgtgaaccttgttcacaacactttgacgtatcgactgattgcaagcggcgcagaacaaagaatcgcggaacgctcttcgcatattgatgacatactctcacatacaattaaagtaactgacgctgatgatgctctttc

SEQ ID NO: 22127 - DNA, 234 bp, Oryza sativa
cccaactaactgaaaaccttgcggaaaacacagaccgccggaagataatatgaaatggatactacccgggaaattggctgctaccctcccggcggtacaaggaatctttagaactaatctataagaacctttcgaaacaatcaaatctgggccaaatctgaccatattacaccgtttgcgaactctctaaccgcaatatacgataccactggactgactttaagcttatgccgt

SEQ ID NO: 22128 - DNA, 430 bp, Oryza sativa
agctttccgaggccttgtcaacctctttttttatgaccggaggggtagctattcccttctcttttttctcccgaagggacgattgcaaaaggccccggcgtgttgtacttgtatgctgtacagaagttcctgttcgatactctgttgctattttttctgtagaaaatggaaaacacagcgcccagattactgaatgcagaagcctgggtcgcttcaattttgccaccggaaagagcaggcatgtagtttactaaggtggtgtttggttggagggactaaagtggaactaaactttagtccctctcacaaaaatataagtccctaccatagggacttataattttgtgagaaagactaaatttagtctctaagttcccaaacaccccctaagtgcatgagtagttttggctgaaacaatgacatgctgtgt

SEQ ID NO: 22129 - DNA, 446 bp, Oryza sativa
atacctatcaatataggctggttcatttttcttttttatacccgtatgccccccccccctctccaaaggttccaagccctatctagtggtcaaaagtaaaaactcagtagggccttgatttttatttagtctttatacattcctacatcctagcaaggtttcgtgtatacgcgagtataatctttggtgtataatgtatactgtatggtcgtatagataagtaaaatggaaaaaggaaatggagatggccgactcaaacgaatgaactgtgtctatgtgtagctaactactgcacatgggtgccatgccggcacacggccttcagcgcgtgcgcgagcgacgccgagaacacggtcatcgactggaacacggcgggcagcttcccctgcacacatgtcaccgccgcggacctcgtcgcgtcgatggccttggcgtgcttccgcatc

SEQ ID NO: 22130 - DNA, 378 bp, Oryza sativa
gacctctctagcccttaagttgatatcggaatcggctgtggtattttcgtcgtgtgactctttcacagatggttttgtcaggatatccagaaaagttcctagctcaagaggttctcttctagaagcacaccgtgctagggcatcgggttcgacgctgtcttttcgatagacatgtcgtacctcaaggccgtcaaatttccgctctagtttcctgacttcggcgaggtacttgtgtaacttggggttggagcacttgtagtctttgtgcacttggttcgtgactaattctgagtccctcttcacaattaatcgcttgacacccagtgcaatagctgctcttattcccacgaggagtccttcgtactcagctgtggtatt

SEQ ID NO: 22131 - DNA, 449 bp, Oryza sativa
tcttgaggtgattgatgctatgtagaacacccgatgctctaagttaaccatcatatttgaagacaatgttcaccattttaatgttattaatttccgttgtccagtgagctgccggagttttttggtggaacttgccaatgtgaaggtggttgtatgaaggctgacaatggcccctggaaggatgatgaagtcatgaaggtgactgctccaatctgatcctttatccttgaacaaattcttaaattacagttgataagggaaaaggaactcaaaatttctatgctatattatgtttagatggttcaaagcggggttgggtggtgtggaaatctcaatttgaatcatctagaggctgaggagaaaatgatgatttgtgaagatgacaccatgtacaccaaggtagcatagatattacccgctctttgcagtaacacattcatatctaagta

SEQ ID NO: 22132 - DNA, 407 bp, Oryza sativa
gttctctactttggtggtaacttgttcggagggaatttcccgtcatctattgggaatttggtttatctaaaagtcattgatttcaactctaacaacatgaacggactcttccggttgcaggtatataaatgatcttttgcttctcatagtagagatttttttaccattcttgagaatgtaccgagaagcaccacgtttttagtgtattttgtacctccttatgttaagctaaagatttcactaagtacctcctcgatgataaaattgatcgttgaaaaaaacaactgttatactttgcagctttcgaaaatcttacaaacttgcaagaactgaatctgagctcgaataagtttgaaggtagcatcccaaagtcattgtttcacttcctcaccttatagtattagatc

SEQ ID NO: 22133 - DNA, 442 bp, Oryza sativa
tgttcggaactcacggtcaaaccgtggtgtgtacttgctatacatggcatgggacccgagtggatttgacgaacaagcactgctggattactgttgctactttaatttgtccacctcgatcgttggaacatgtcgatcaatgcatggtcgtcggccagccgatcagtacacttagagactgttgccaaaataaaccttactaaattttggtattgtcaaaatttttagtaaggttgataatgttgccaaattttagcaagatagctatttttgaatgtggtcactttgttgccaacgtatattctaccaaattttggtcagtactgtgcagttgccaaatttctggtctttttaccaaagtttggtaagaaaccaaacatatgcataattttggcaactttatcagaaaatggtatggttagaaatagcatcaaagtgaaca

SEQ ID NO: 22134 - DNA, 400 bp, Oryza sativa
gtctggctcgcgaggaggggagatggatgacttctgctctgcttattctgccaacgagaagatgtccggtacagagtggtggtgcaagattcgttaagagctgacatgggagagagcaggtattgttgaagagtacgggttggtgtaataacaagatgcctttggcatgcagatgccaccaatccaccaagctggaatagccatggagaattggagatggaggctctgcagcatcagagattgcgattgcgctatcgcagccttctcagtctggttgccgtggaagtacaccaacgttgatgtgcatattttgcaggaggacatttctggcgaatgatgagagtagctcttcgatcgactcatgtgctgtcgcggtctcatatgaaagaagaggagatgc

SEQ ID NO: 22135 - DNA, 475 bp, Oryza sativa
attacggacctataaaactcagcttggagccatctctttccttttgaagtcaggcatgagccttatattggagcgcatgttgccaatctctgacattagccgctccagatcatctagaccgtaatgctcatcttcaaatagcttgttaccctctgggataccagcttgcagtttctctgaagcatctgcttgtgtgttatccatatcattactaacctcgcttttgtggctctgaggtaccagtttttcctcagcagtttctgtcattctgccatttggaagaggattggatgccactgaattagcatcagcatccacaacctgattagttttatcatgagtagctgtatcttcattcaatccctccaagtctcttgacgtacttgactcaccaatgaattcccattgttcatcagatccatgggacagaacttcgtactcaaattcgtaattggattcatcatctgtagattct

SEQ ID NO: 22136 - DNA, 458 bp, Oryza sativa
  unsure (1)..(458): unsure at all n locations
tgaactcttgcttgtcccgagtgaacgatgaatggaaactatattcttggttgttgatcangagttgctactatgctgcatatctcacagatacaggtgcaaggtatgtgtactctctctcaaattaaataatctttggcacggtggcatacccttacccttgagttccatgagacactgcttttccttgccttgagcgattgaaagataatagtaattagagcaccaatcacccaatctttattcaactcttattccggaagttttcaaatgattctgcaaaaaagagccaagttcctcatataattcactcagtctctccaagtgtatcaaaatgaattcctcaccaattggtgcctttattattcctactctaaggtctaatatgtaaagctaggtagggatcatacaaggcatagttgcattcacatttattactaagtcaaaaacatagacta

SEQ ID NO: 22137 - DNA, 447 bp, Oryza sativa
tcttcatgccattttaattcgagatgtgcactatcattgtttatatctttcatccactgattctagatatttaagttgttcaaaatgtcactgctagtgcagagagatagtaactctaaccaagcactccagttccaagggtagctgttgacagataccaccaaaactggtctagctatagcttcactgcctttatcacgtataacaatgccatacaagtacaaacaaaatgaatcaatagcaccagttctccgatgtgatgcgagctctctctccaatgcaactagttcctgattaacagcattgcttttgcccagagatccctcaagctcgactgtttcttcctcattccgtttctctccagcctaaattgtcgagaaaataactatgatcaccaagcatgtcaaatttcaaaatgcttattaaactatgaagcaaatgggagac

SEQ ID NO: 22138 - DNA, 387 bp, Oryza sativa
agcttggacgtgctctaacgttaggcattttttttcctgaagagaaacgttacataaaaggcgagtgtggagagcttaccaagtctacggaggacaagcctatgatccaactgccgtgcccagagacatggagcctagatacgagccttcgagcgataatacatgggatcaatctctgtgagattgagagctggagtagatgaatattttactagtaattcgattatgttaagataagctttgaccaaaaggatccaataaacaatgctctgcagcttggcatgggaagcaccgaggagacgctgtgtgggcttgcgtacggaccgcacaatgaccacatgctctgcgtgtactgcagagatccaccggctgtcaccgcaccggcga

SEQ ID NO: 22139 - DNA, 463 bp, Oryza sativa
atactaagcttgtcatgcacatcccagtctagataggcactgccacattattcttctctaagccaaagaatactgcaatgtaagttgttcactacgacaccgctaacgccaacacattggacctgtggcaactcactcaccacctaacggtgtctgctgcctcatcacaaatgaattgtacaagctacagcctacgtgtgtgtatcatggatagcagtgcctatatacgccgaacaacatcaattgctgacacctgttctccgactgactgctagcactgtctctagtggacctaattcctgatatacagaaccgagttttgacgcacaaccctcatgctcgaaccggggtatctctatgagcagctcttcacacactaatgtacagaagagatctctgatcaccacgcatgtcatatatccgaatgctcattattctcttaagcaacagggagacagtcact

SEQ ID NO: 22140 - DNA, 357 bp, Oryza sativa
  unsure (1)..(357): unsure at all n locations
agcttcatgctaaactagacttttggttttttcatgaagggggtcacggagaagaatctagatagtggggcccgcccgtgggtcccactgtctttggttatctctctttcttttcttttctctctctcttatccttctcttctctcggttccttctcctgctctctcaatttcttctctgttttctcacccgttctcttctctgccttcggctccttcacgcgcgccctanaggaaagaggcgccggagatggcggtctggcgcatcgcggcggtgggggaaggagaaagaggagaaatgggcggtgccggtggggaatatgacgcctgggctgtgcggcggttctctgcccacctc

SEQ ID NO: 22141 - DNA, 455 bp, Oryza sativa
  unsure (1)..(455): unsure at all n locations
tgagctagctcagtcgnattattctgtcttaattcatgcctttacgagttacgatcaatcaatcgatcgatcattgaggtgtcgccagccgcgccgccgtgccattccagttccagctgcagctccacctcgccggactcgacgccggcgagcctcagcaccaggccctgcgccgccttcccctccgacgccgaccacacaacggagctcccgctccttgggaccacggcggtgccgtcctctttactgtcaacgccggagggggtacggcggcggctgctcgccgcggccgcctccaccagcggccggagctcgaagaacgccgcgcccatggggtcgtcgacgaacgggtcacggtcgtagacctcctgtaagcaagcaagcggagattaattgatctctagcctagctaggagaacacaatggagtacatcgatcgatcgatggaggattgg

SEQ ID NO: 22142 - DNA, 399 bp, Oryza sativa
agcttgttactttgaatctgtgtatatatatttataagtacttttaacacttgttttcacttgtgaccatgcatatgcaccttcttggcactgtattttgcacaatattgaaatttaaaaatttagctatgcacaaacagtggtactgtaatattacagttactaacgtatgttctcttttactgcaatttcgtcatgatgctactgcaaaagggcaggaatgacctataaattttacagtaacgacctattaattttacagtaacgtatcatgttactggacttctgcgataatggtactaccgaatcgtagtaacaaggtatgatttatacacgaacataatggatttgtgttcacaaaatttgaatagatgtacatagaaaaccaacaatgatctc

SEQ ID NO: 22143 - DNA, 454 bp, Oryza sativa
tgtggggttttgttgacggtcattatcgatcagtttctttttgtcaatattactaaaacaggagagaactagtgatgcttccaatgcataaatatgttagaacaataatattccactagtattaggtctactaacctttttgcagagaatgacaataaagtgaaggagaatcgacatcaacaccaacgataaatcaatcagatgatgtcgaggaccagacttatgtatggatgggccaagaactcaaaattgacacgatgaattgagccaaaattcacaagtctgcggagtggagcaatagaggaggccaccagccgaaattgagctggattgggccagccccaggttcggccgaaccaatcctggcgtcgttggatccaggttttgtcgtggacgtccaggattgcatcccaatgacggttggagggcacttcggacaattccgcttccacaa

SEQ ID NO: 22144 - DNA, 387 bp, Oryza sativa
agcttgatataacaaactgtttgtatgattattgacctacaccaaagctgcgagtaaattagttaaagctgtgaaagccacagaagagcagaaatacttgaaagcggctgggaattctttcgctgttcattctgtggttagtacccctgatgttccttgtggcggttgtttcaagatagagatattgtattgtataacaccaggtccctcgttatcatctgaagaacaaacatcacatctcactgtaagctggcgggtgaactttgttcatagcactatgatgaaaggaatgattgaaagtggtgcaaaacaaggaatggcggaaggctttgcgcatttttctgaaatactctcccagaagattaaagtagctgaggctgatgatgc

SEQ ID NO: 22145 - DNA, 457 bp, Oryza sativa
  unsure (1)..(457): unsure at all n locations
ntactgctaaagcttctccaaacacggccatgtttgcgtgccttattcatgtagaanaatggctcaagcctgactttgccacccacgtttgttatgaaaatagatgcacaacggagacacgaatttaacgtgaaaaacccttgcggaaaaaaaccacaggcgccgaccggcaatgatcactatagagaaatgggatacaaacgcaagggatatattgggctgtcgcaccctccccgtgcggcttacaagggatatactaataggaaactaatcctataaagtagagtcttattagataactaatccgaatatactgtaggcccaaaattcggatcacatatttaacaacgttnttgccgtaaactcgtgccaaaaccacgacatataactgaatatcacacttgtgatcttgtactatntaaagctatgattgtgccgttaaaccaaacaactgtag

SEQ ID NO: 22146 - DNA, 176 bp, Oryza sativa
ttaagactgcgttctcctcagcaaagcagagattctttggagcggacgggagcacgctcgatagccattctggtgctagacggcgtggtgtcccttgtggcggatgtttccacatctagatactgacttgtctatacaccaccctgctccctatcagctgataagccatgccatgg

SEQ ID NO: 22147 - DNA, 408 bp, Oryza sativa
ttactgctactgcttgatactacgccgccatgcgcgtgtatatgattcatgtcaaaaagaggctctcgtctgactttgtgcaccgcgtttgttatgtaacttgatgctcagccgagacgcgcttttcacgtgacagactccttgctacaaccaccacaggctccggccagagatgatcactatagatgactgggatccccacgcaggggacatgttggagtgcctgaccctccccgtgccgctgccggaggatctactagtccgagactggccctatcaaggagagtcgtattagatgactgatccaaatatgctgcacgccaccgatgcggcacacatatttgacatcgtctttgggcggaactcatgccgcaagcagaacgtatgactgagcgtttcacttgtgat

SEQ ID NO: 22148 - DNA, 385 bp, Oryza sativa
  unsure (1)..(385): unsure at all n locations
tttttntcatgcgatacatcctgttgttgtggataatgaacagagtcctagatccgaaaataatgcttgtacacctaaatttagttttctctccacagggaatggaatttctgtttcttttaagtatggtcagattcaattctcgtacatcatttagttacttttaccgacaaattacatatagtaaatattttactccaaacattacatatagtaattttttaattgtcaatatactgatatggagattgcatttttaatttttgcaagatgtcccgatgcatctaatcatataggaatcacatgtattagaaactaattacacacaaataatgcaataacacatcggagagatcaaataacaggacaacgtccaactaaaatc

SEQ ID NO: 22149 - DNA, 452 bp, Oryza sativa
  unsure (1)..(452): unsure at all n locations
tgagcatngcagtggatgagttgttcttgctccgaagtgagctccatgtcctcatgaggtacgtcaatacctgtacacacgactttccaaatacttggatgcaaagagattagatgcaacttcatcttgtgcttccaagcggcgtaatgtgtcccatcaaattgaggagcacgcccagaaggcatggagacgaagttgtgagagggaatggtaagtttgctgtaatcaaaaggtatagtggctcccttgggagatggagttcccttgctgctcgctccatcttcatttctaatttccccgtcctttccccctaagtccgacatcgtggatcgctcaaagcggtgaagcttgaatcaagagcaccttgctctgataccaattgaacgcgcagagatgtagcctagaggggggggtgaataggctttcctgaaattntctcaacaatcgcagcg

SEQ ID NO: 22150 - DNA, 437 bp, Oryza sativa
  unsure (1)..(437): unsure at all n locations
tgcccgacagtactccgaacgtgcacttctctggattgagcatgaggcgatatcgtcggaggttgtcgaacgtttcccgcagatcgtcaatcaagagtcacttgtcttggtcttgagaacgatgtcgtcgacgtatgcctcgacattgttgccgagctggtcgctaactgcgccctggaccgtgcgctggaaagtattccctgcggntatcagtccgaacggcatcttaacatagcaaaataccccgaacggcgtgatgaatgctgtcttctcttcgttctcttttgccatgctgatttggtggtagccagagtaagcgtcgaggaagctcaatagctcgcagccggctgttgagtccaccagttgatctattcaaggaagagggaagtgatccttggggcatgccttattgaggtcggtgaagtcgacgcacattc

SEQ ID NO: 22151 - DNA, 448 bp, Oryza sativa
  unsure (1)..(448): unsure at all n locations
tatcatatagggcttcgacaaggggttntattcgttctttgagcataaagataaagatcggatagattcgaaccgcaattgcaaaggtaatcactactatgccagcccaaatcatgatcttcaccaacttggatttggttctctcgcgaaaatcgcgagttgcagagatgagaaccatgaatagcaagatcccgaataagataacagaaaccgaggaaaccacaagagtgaagactagtagagtctcgtcttttgtcattctttgctcctttttcactcaatgattcattcgaatttcccgaccaaaaattctatatgtctattcatagggcctccgtgctaagtgctacaagatctagtgcactggaactcgtggttatggacccgaatcctttagtatggaacattgtcttttccaagtaaaaacccccagtatatgaaagaatga

SEQ ID NO: 22152 - DNA, 454 bp, Oryza sativa
  unsure (1)..(454): unsure at all n locations
cttaccacaatgttntggacagagaatccaaacatatcaaaaggatgagaactttggtcaatgttaaacagaaggaagtcaaataggaggcaaggaaatttgagtccactgagaagaaagttaccttttctttcaccaattctgctatggtagacgcatactgctccaataatctaaccctggtcagacaatcagatggtggttgatccatagcatcgttgagatctgcagatccttgtgaagtaccagatactggagagcagtgactgtccaagctaccagttccaccagattgctgtctgttaattgccatgccatgtattggccttggtgcactcacagcagttaataacttcggtggtgaaagagaagaactgtcaagttttgatggcatggtgcgctgtcgggagtcattcatcgaagaggaggatccctctgggtgcacaaagacata

SEQ ID NO: 22153 - DNA, 457 bp, Oryza sativa
  unsure (1)..(457): unsure at all n locations
tattaatgctgcngcttagtcaaaaaaatatgtataatattttcttattacttttccatggaaattcattaactttattatagttaattctcacatctttagacaaaaatcctcaccagctttagacaaaaagaacttaccatctagtacacgttgcagcaagggatccaacaaaagatataagactagaatggtacgctcccgagaggcccgaacctgtataaactcccgtatctattgttntttttgtttctgtcccgacctcgaatcctcacactagcatcctgaacgaatctcanaaagggttcctttccactctgctagaggagctcatgctccaacaacctcctatttgtatggcctaattataggttaaccactctgtttacctgngtgtatatatattcatctttctatataagtttatcagttatattttgtactactattccagatg

SEQ ID NO: 22154 - DNA, 455 bp, Oryza sativa
  unsure (1)..(455): unsure at all n locations
ntatcaatcatgactaaattagtactatctncttatgtaatattgcattnttcttattctaatcaatacttccatctcttttactggatggcatgttatccatcgtgggggcggcatcagcatccgcaacagccgtagctatgtgatccgtgcaccatttgatctcctgtggcttgagagggtcgtcactctcgtcctctcggccaatcaatttttttcgcgttatgatctttgccattttgtcttgcctctcgtgatttctaattgctctgctatttattggcgttttccccttcattctggctgtattaaatgcttcgagagggggatttgtgctgaggctaaactagggttcgtagctctctcactcctttgttatgaatagcacttctattcgttataggggcactaggcccaaatatatacaggtacaagagtgggtaaatatgcacaaa

SEQ ID NO: 22155 - DNA, 379 bp, Oryza sativa
  unsure (1)..(379): unsure at all n locations
agacttactaaggataacccatgtgcacttcttaacgcttggaaattaaggaatgggtngcaccataatcaaacaatattactgccggtgtcgagttgacggagaatgtgcccaatataacctctggtgctgactgcgcctcctctgcagatgcatgaataacacaggcctgaacgaacttgggtccagcatgtcttggcttctggcactttccaaccgtgtgtccgggtttgttacaattgaagcagagatcgggtttttctcccaacctcttgggcttgtctggcagagctggctgagctagctgatctgactgatctgactgagctggaatcattaatggacttggagtcnggttgaggctgctgtgactgccact

SEQ ID NO: 22156 - DNA, 409 bp, Oryza sativa
cttcaaactcctaagatgaatatatctcctttatcggagttatcaaaccctgacaagccatatcggctagctgagaatctgttagagccaagctgtagcatctattccttgtttctctaaacctttggatgtaatcctgtacagattcatcatgcctttcctgaattgctgttaaatcagaaagtttcatctcatggattccactgtaaaaatagctgtgaaactgcttctccaaatcggcccaaccattgacagaattgtgtggtagagaggaaaaccatgtaaaagccgatccggacaaggataaaagaaacagcctaactcttacggcgtcaacagccgatgcttcaccacattgagctaagaatcgactgacatgctcattagtcgaaacaatttcttgccctga

SEQ ID NO: 22157 - DNA, 430 bp, Oryza sativa
  unsure (1)..(430): unsure at all n locations
agcttgaggcgcagccatgtggggcccatcatattttttggctgacacgtggacccaccatttntaattttttttgctaacatgtgggacccaccgtttttaaattttttgtgtggctgacatgtgggcccataatttttattattttttcgagatataattgccacgtcatcaccacgtcaatgtcacgtgagacggagacctagtcaaaccagccatgtaggcgccacgtcaaccaaaaccgccttcaaaaccacttaggggcctcctttgcaccggttttaacagttctgggaccagttatatctggttttagggtttaaggatgaaaatcggattcggtgtaaaattaagggacctcaaatgaacttattcctttccaaaggctcgtttagatatggatattaatcttagcccatcttatatttat

SEQ ID NO: 22158 - DNA, 431 bp, Oryza sativa
aactttcggcattaaattagtagtcggcatcaacgtgcgttataccatagtcatatgttaggtaactactctctcggttcttgacctagaaatgtagctacatcttagaatggacgagacatatattgaattgaatcgtgaggatgctaaaaataattcggagtagctagctagctagatcgaacttctgtttgtgtttgtaactacttcgttttagcatgtcattataggtcgaagtgtcgaacaaaagaaaagtttatctctataacatgtagaccacaggtgtatggcatactaccaaacattattgagctaataagctgatcaaatcattgatctgacacgaaatcgtagcacaacgtggctaccaaacatatatactatcccctttgtcccaataaatttatttttggttccttttcatttatctc

SEQ ID NO: 22159 - DNA, 429 bp, Oryza sativa
  unsure (1)..(429): unsure at all n locations
agcttgaatcaacaataaaaattcatgattttatacaatntataatgcaacatcttaacaagcacataggttgaaaaataaacgctaaacacatatacctattgcatttatcactctttcttaaataacctttagcacaacataacaaagagaatttttaactttttcttttcttgagcctttttctcatatttttctcttttttttattctgagtacgtccctgtcgtcaagactgtttccagggattcggcacccattattttactcacatcgaatacgtctttgtcgtcaagactgtttccaaggattcggnattcattttttcatattttattctctttttcacaatgagcaattaaagctatttgaggaataacaattcaataaaacatatatatatatagcatttagaaatcaaaccatatgc

SEQ ID NO: 22160 - DNA, 453 bp, Oryza sativa
  unsure (1)..(453): unsure at all n locations
tatctcttacgctccacgaatggatcagtcagaacatcaccactggctcgccgtcgtcgccgccgactggtgtcttcgcctatacagttggttggtcacaacaccgttgttaggcgtctacatcttcaccgccggtttgctttcgccgccgccgactggtgtcaccgcctgcacagctggcctattatgccgctgttgttgggcgtctacatcttcacttactggccgcctcgtccgccgccgactggtgtttccgcctgcacggctggcctattatgccgctgttgttgggcgtctacctcttcaccgactggctgcctcgtccgccgccgactggtgtttccgcctgcacggctggcctattatgcagctatngttgggcgtctacctcttcaccgactggccgcctcgtccgccgccgactggtgtttccgcctatacggttggcctatt

SEQ ID NO: 22161 - DNA, 432 bp, Oryza sativa
  unsure (1)..(432): unsure at all n locations
agctnttgatcngtgctcttctgcaggttattactactgagtggaagtttgcagggactacttgaagaacatgtgtaatagagaatcctgcagatttgcacacccggatttgaataatgaggtttttataattttcttcttctggcatgaaccatttgttttacaggctactaattagcaagttctttccaaacattttctaataagtgatgaatacccaagttgaagtttgccgtgattntaagcgaggagaatgcaatcgacctgcctgtcgcttttaccatccacctgcaagctcaaattctattggataaagtaaagtaacttatatccaatgttttgtttcctttgaattcaaaatcaaattagcatcaaatagctgcaaagcacatacacagagcgcatacaacccttagaaatgtccaaatcaaa

SEQ ID NO: 22162 - DNA, 448 bp, Oryza sativa
  unsure (1)..(448): unsure at all n locations
ntntccttcctcagaaaagctgtctgggatttcaggtatctctttactgtttgcgatcttaaatatagcagctacctgcaagatcagattggatcagcttggcattcacaagttacttggaaaactatagctacaaagtgaaagcataccccctcgtatttatgccaaggaggttttgccgttgccatttcaataatagtacatcccatactccaaatgtcaactggtagatggtaacctctaccgttcattataacctgcatgttacaatcattaggagaattcagaatcatataaagatgatgataaatacggtatataaaggtttactgttagaaaaacaatttacctcaggagccatccagtaaggacttcctttgaaagagcgtatttcagcaaaagatgatatctgtgtcaaacgtaagtaatgaaattaaaggcttaaaag

SEQ ID NO: 22163 - DNA, 432 bp, Oryza sativa
  unsure (1)..(432): unsure at all n locations
agcttgccaggaatgcatatcgctcgttttatcaattngaggtcatacttccatcttttgtcctatctttagctcgttaagtagagttcgagttgccgtttttgttgtatcttgagctggttaagtacaattcgagccgccaatggagcatcgtcatttgctgggtgttgctttaaaggatgttactatgctagcaaatgacactgtagatgggaagaaatggcatttcagttcgtgctatatttgtctaggtgaatttctcctatatgtccaaaacaggaaagtaggaaacagcagttggtatgcttttccgttacgttagaagcttaaataacggattttatgctgcagcttgacaagtccattggcatagcatgggctaaccaactcatcgcatgtntacagttacagcccaacagatgcaatggcata

SEQ ID NO: 22164 - DNA, 455 bp, Oryza sativa
  unsure (1)..(455): unsure at all n locations
tgagctaagatgcgagctatattcgaggccactatggatgttatcagtctaatccacaaatctatttataggcaaaattaatgggtaacccatagattataaatgagtttatggatcgatccacttgcatttctagatgcggcaatctatgttacgatgtggaaatccatgggtaaccacttatttgacacgtaagtaagtttgcaggtcggttcgcttgcatggccactattgtcagtgtccaagtcattgatgggccatggtcagataatgttcgagggcaaatcatctgccatatctcaagcgtcgataaaatggatgttctgctgcttgattcacatgtgagggcatagcatggattggctgccaattagcagttgtgtttcaaagctctttagtattatggccctctttatttangcttacgtttattggtctagacttttaagtcagct

SEQ ID NO: 22165 - DNA, 425 bp, Oryza sativa
agcttgttcgggtttcctcgacgtacattctgaaatccgtgcctgcaaagagcgtggaattcaatgcacttctccaactcgtgatgtctaatgtcccattcacaagcaaagacccatgacctctcaggctgcaaggtccttctcagcaccatgagtacgtcacctcctaaggtccagcagtcacaaatctctcctaaagatgcggacaaggaacagggagcggcgactatttcagatcaattcgtcggggtaatcgacatcgatccccacgagccatctgtcttacttttgctcgaagaccaagcctcatcaccgacaagtacaccacacgacgtgtacgctatcggtggaaccaacacatcttgaggcatgggaatggaggatcaattaattacgctagcccaacacatcagaactctcaacgc

SEQ ID NO: 22166 - DNA, 447 bp, Oryza sativa
tgtgcatggaatggaggtcatgataggtagagagagagttcttcagaagcctgaaaaggtagaggcagagggatagagttactgttagacttaatattatcatttgtatatttcaccatatcaagtcgtatttagctagttagtagtttgtgtcgaagttagttttttccgtgtgcatactcagcaggtcaatagcatttgtgatttagtttgatggggggcgttggggggggcatgatccttgagaagcagcatagcagcttggtagagaagagaagatgatggcgagcgcacgtgcgggaacaacgaggggaaggttagtggaaggagcatattctggggttgggattgagagattgaggtatcatacatgatacctatcatatctatatataccatacataataccccgttgatccacatatgatacaactagtagcctgatac

SEQ ID NO: 22167 - DNA, 420 bp, Oryza sativa
  unsure (1)..(420): unsure at all n locations
gctttcaacctgatcgaggggatagatgtctaggtgatgaagctaaaattgccagatatcaaccggaaaatgctgaacagatatatttgtcccgggctaaaagggtatgctgttcatcattgcgggctctcgtgctgtatttgaaatttatgattgataaccatcttatttcaacatctttttgtctgtaggccgaagatcttgctgccgcacttaaagcaagcagaatgaaccctggcaaggctggtgccaatgacacggttagttgatagtattagcattagattatacaggtaatatatntttgctccttcaacagtataggtgttgaggattntatgggtggatgtgtattttttatatatacatgagaaattccatcatctttgaatgattgcaagtcttcctctttggagagca

SEQ ID NO: 22168 - DNA, 447 bp, Oryza sativa
  unsure (1)..(447): unsure at all n locations
ntggacctgcactggagctaagcaaatctcctagaccatgtgtgtgtttttcgcatcaacaatctcccaagccaaattgattgtagaagcctttatcggaaaattcataccttgtcatctcttcatagaaaacctagacacacaaatggcccctaccttatgtgccaactatcgccgattaataatttgataataatattgtgcatacttgcatcctattgagttaaaactttccttgaaacatgacaataatgtggcacaaagaagctagaaaaacattggctccttgcgaaaaggcactaaagaaattataatcatatatgtgggctgcaccgccgatcacaatacatcaatacaaaatgggtgtgtgcatcttttacttagaaaataagtgcatgtatcccatcccanagaataccttgataaaggcatacatatgcttcattt

SEQ ID NO: 22169 - DNA, 477 bp, Oryza sativa
attacggaccttgaaactcagcttatttcgtcatcgcttacgtggactgtgctgaatctttctttgagtcattcaacggttaaactcgaattcgtaaggatcccgaaaggtagaaggaattaacctgccttgccatccacttacccattcgatccaatcattccccacgcacgcacctgctcctcccttgtcccttctccgtttctcccatctctcatcagtgatgtgtgggtaatggcgcctgctggtcccctaccttgatcgcctatccgccgtctgcgtgtgacatgattggtctgcatgcgagttcgcgtatggttttagaaaggagatcggactttatgctacacgagagttgagaaagagcaagtattatgagaatatgagtatatcaatatgcaatagtagtttttatccatcctaattatcattgaaattctgatcaatatttagcctaataaataatttatctgtctt

SEQ ID NO: 22170 - DNA, 364 bp, Oryza sativa
gcagcatgcactcaggaaggcaggcgacctggttgattgttgtcctgaatacaattatatcgaggctgcgggagaaggcgctacccctaatcaagcatctctaaaactctgggccggctatatggaccgaggaagctgaacaagctctcaatcaacctgagagcttacctcaattcccccctgttctggtagccccgggccggaggaaccattgttactttacttggccgcgacccctcattgtggtgagtgccccccctaatagttgaagcgtgaggaaggcgaaccgggatgccccctccggctctcaacggcccctccttcaccgaaagcctaacgcccaaagctcccacccccgggagga

SEQ ID NO: 22171 - DNA, 455 bp, Oryza sativa
  unsure (1)..(455): unsure at all n locations
tctcttactgaangngggaaaagaatgagcaagaatgatttcattttcagtactcagcgagccacaccggcagatgcatgattaatgcaagggggtacaacgggtaattatatacgggttaagttctgcagaaaacagcatttaaaagtcacttaattgcccaaaaccattttattaagacgatcctagagtacacagtattattaatcaaggccgtgaaccctcacgaacctgccttaacccaaggcctacgatgattcataccgaactagcaacccgacccttggtcccagctcgtcccaagccaacccaggccaaccattccacattttagttgttaagcaaattttaagaattaaaacactaacttgggtacattgctcggcttgcccataaccgatggcgcgactattccgatagattatactctgatcagaggtgtacatctttaccca

SEQ ID NO: 22172 - DNA, 117 bp, Oryza sativa
ccaatcaacgagctgcgctactacacttgcgaggtctttttttaaaagcccagaatttggatttgactatgctttgagggttaaagctacagcctggactgggtttttatctcccac

SEQ ID NO: 22173 - DNA, 393 bp, Oryza sativa
  unsure (1)..(393): unsure at all n locations
ttagatcatatttctgtaattaggagataactagagctcatctattgagacatcgattcaagattggtntaacatgtgaatgcatgatctaggaattgcgttttatattgacgttaaagatgacaacaatcatgaagtggaagcgccatatctgaaaggagtatctcttttctcattacagtatagtcacagcagaaattcttccctctaatattttcataatttcattgcccgagctctgactntgattttttttacggcaagaggagatcttcagctgttcctgaagcactgttgatcatgatcctctgaaatgcagtgtgagtgaaaaaagataaggtctttccactgtacatgaagcacagcagataatgtttctctgaaatgacaatc

SEQ ID NO: 22174 - DNA, 123 bp, Oryza sativa
cacaaaaacgagagcactcacaaaagcgaactcttctctcagccgcagagcaaacgacccaccaaaaagacggacgcaacatccagagagcgaaggaatgagggacccgcaccgtagaatgag

SEQ ID NO: 22175 - DNA, 416 bp, Oryza sativa
  unsure (1)..(416): unsure at all n locations
ctggaggctgcgagattggttgatatgtgagcagagctgtatctcacctctnttatcctgccatacagggctaataggctggaccaccacggcgctcatagttttaaaatggctagccggaccttaactattagtacgaatcctttgcatctctctaagtgaaaaatgagaaaatgggagccctccgacgcctctcatataaatgtaacgaacaagttcaatacctggcaaaatgtcactctatgctcactcgcataatatgtctaatctatatatgatcccaggaatacaagaccaacatttacacagagatctgtgcctacatgttcatgagcgcatcgcatgggaaactagaccctttgtttacccctgaatatcggttctctgccagtgcatgaaataaaaaactgaaaaaa

SEQ ID NO: 22176 - DNA, 423 bp, Oryza sativa
  unsure (1)..(423): unsure at all n locations
agctntgccaaggaactcctaatgacatattctcttaaccctacaatcttcttccgggtgtctgcatatctgtaccaatcagccatggtctcaagaaatttgttcatctgagagttagtgtgcgcctgcccagagtacagcattggtgaacatggcaatggctcaggatcccgatccccctttacaagttcaagcttcctgaaatgccttatgcacctctgaaggcttgctgttactgataataatgtcccaatacctttctcactcacaatgttccctccactagcggtatatcttaaggttgggtagatgacccggcgggtgatcacatgatccaagaactcaatccctcttgtgatgtgctcaatctctaccatcgaattctcaggcctcaaaccaaacgtgctcttccagaactcatca

SEQ ID NO: 22177 - DNA, 279 bp, Oryza sativa
gggttttctcaagcttggcatacaaagaccgagcaggcacattggaggggagcttaaaataagaacaagaatggccggcatggtcatcaggatgacttgaccacgttatgaatagtgacccatgtgcatgacgacactccaattacaatccacactctcagtacccatcctaatgcacggtgcacatatattggacgacactgcagagccagaggcagattgccatggaatgggagctgaataactcaaagattggtaagacaacggggatatgggtac

SEQ ID NO: 22178 - DNA, 357 bp, Oryza sativa
  unsure (1)..(357): unsure at all n locations
agcttgcgtgcagtcccacggtacaggtttttactttgtatggaaggatttgacttctatagatatttactcaatccggtgatgactattcaatacaaaaatgtgcgggaaataaacaatgacttggagagcgtgctggggttactcgctgttatttctgcgcatggtgtggcgtgtgtagtaaactcgtacgtcttgtttggtagaagcgcacattgttaaacacattgactgcatccncacgtaacgttggtatgatgaccttccgccagttgcttatgcattgctcgcacgtatgagatatggaatgatttaattctgggtgtgtattcaaggttcaccacacccgttttgagt

SEQ ID NO: 22179 - DNA, 454 bp, Oryza sativa
  unsure (1)..(454): unsure at all n locations
ngaagaaatgtagagatagttggcagtttctcttcttttgcattaagaagattcttgcatttgccgttcgtttacacggctcccggatgcgcccacgcgaaccgatcaatcgatcggtccggccatgtggtccggttcagttttcaggggacgtagtacatggggttggggatcttgaagacgcggtcgccgacgtagtcgccctgcaggtcgctccactggtcgccgacgttgccgcggatcctgtagccctcctcctccaccagccgcttcctcatcgccgacttgaacaccgacgagctctgcccccggtactccgggctcctgcattgtaccatgatattgcacgatcagatatcttactttctgaattttaaccatgcaacctatgctactaacaaagtagtattctgccatgggattgcgatatcttgtgcagttcgtcatctgaatg

SEQ ID NO: 22180 - DNA, 373 bp, Oryza sativa
  unsure (1)..(373): unsure at all n locations
agctcttcnggtactaacatcattggttcttgtttcatgaactctagttcccatgcgctctgaacataacattatcgcagcagaggagtctgcttctccaggattaaagagaactgaatgtatgacaccatgtcatcgcatacagggtgaataaaatcaccggccatatatattcccggacttcattagtatattacctgccctcggaaatataatacatgccccttcgccgcataaaatatgcgctcctacgcgcagggacttaagaaagaaccatctatatcagaagtaccacgctttgctagataaacgtgtcagctaggtctatgcccatactagaattgcgggcgtactcgtatgttcttcacatgta

SEQ ID NO: 22181 - DNA, 415 bp, Oryza sativa
  unsure (1)..(415): unsure at all n locations
tgtggagatcgctgatcggctggcagctctttatactccttattggataactgcgggccgatcagagataggtttgaagaaatccagcgtcagattctagatgcttatgccaatgccatttccccagtggtgtatttagagcagcatcggcttaaactggagagggcgatgcagcagatcgctgacagacgtcagagagctgagttggagaccacgattcaagcgaatcggctatccatcaaaggggataaagccaaacttgatgagatggaggccggcccgagctctacttangtcaacttagatcggctcagggctagggaggcggaactggttgctgagctcaagaagtgcatggccaatatatcctcggaggagaagaagcttgccgacctccccagggccatcgaagagc

SEQ ID NO: 22182 - DNA, 406 bp, Oryza sativa
  unsure (1)..(406): unsure at all n locations
agcttatacacctaaagtttatagacctttttgttataagtcaagagnttatatacccgcgtcaaatatgaaaangaattatatcctgatgccattttgaatttgaattcaaatagtttctatatatagcatttctatacatctaaagattatacacctcaagtttatagatctaaagcttataagtcaaaagtttacatacccgattcaaatttgaatttgaattcaaattcaaatttaaatcttttatatataggatttatatacataatgttttctaacttttgttttttaaaagtttttttatggtctactgtgataggaaaagaaaacaagaggaggaaggggcaatatgggacgactataggggggaggagggcctcatctgatcgcttggcgatcgccc

SEQ ID NO: 22183 - DNA, 425 bp, Oryza sativa
  unsure (1)..(425): unsure at all n locations
agcttatacgatgaactggtacgtgcggttgccctggtaactagtaaatggcggtatcttttttgtgaacttgttgaactgtactttctttaatgtattccacaatacaaaatgggaagcactgagacatgcttggctnggttttcccccattctttctgttacatgtagaacaagtggataccaataagtacatattttaaatataggaaaatgggaatgaatttaatctatatgaagttggttggagctttcctttgggatgtgcaggagcaggaagcatatgcgattttaaaaatgtaggaaaagtgagaattaaattgaaatcagggaaatcaatgagtatatgcatttgaaccttctttttgtcatcatatctaagtcatttcacgcattcagtatccatctggtttgaggctctactgt

SEQ ID NO: 22184 - DNA, 348 bp, Oryza sativa
  unsure (1)..(348): unsure at all n locations
agcttgacttcattcttgccaacatgattatgtccttggcttgggaccataacccatggtgtcattcattaacctcatcggaatgggacctattccttttcacatctcaaaggagaacattagtctcaacaaaacgggtctcatccttcacttgaagaccaaccgggtgcatatgaaagatatggatatgtttgttgagtattcattaacatcacaaggggcatatactcgtatgcaagctcaagtgcaaagatccgatataaataatatgtgaacaacatggatctaaaacatgcacaatanatgtataggatttgctccccctaagtttatgcctacaaagaaata

SEQ ID NO: 22185 - DNA, 445 bp, Oryza sativa
  unsure (1)..(445): unsure at all n locations
ntagcttacgggtgcggcgggcggccggaaaggcggattcctgtgtgtggctcccgaccgtcgaatggtttgggcggcaacggctgcgtgcccgcgtgagctaagctaagcagccggccgcggccacgagctgagcgcgcggacaactggaaccgagctggtgtgtggcctgtggcctggttgatgatgcgagacgagacgatgagctaaaggtcgtagctagagctgcgtgcgtgtgtgcgtgcttgctntgcttctgttggacaaaaaggaggggggaattcaatgcctcgatatactactcctctccttggcttgttcggtttctctaggttaattggagggagtgcattgatcgtctgatcaatctcggcagctggccagcctacgcaacattgcaggcaatgcgtgttgggtgttagcgcggggacctggcctagctact

SEQ ID NO: 22186 - DNA, 428 bp, Oryza sativa
aagagccagatgaactattttacaagcttaaatgtcatctattatggagtgtaaatcatcatctacattggaatgagaaacggaggatgattgacatagaagctccgaggataaactaacaaagggattttattatacgaaagaaaatgtgcaaacctgggaattcattaccatatattgcctttgtatttctgctagatatcgagagtatgatcccataaaattatgatgaacacctatattcaaggagatatgttcatcttcaacaatctttctgactttctgaaggaacattctacatagagacttgtaggcctgtcagaaatgcagagcatcaaccttcaaccctggagaaaagctttacattgatgcacagaatctacttgtattgctatgaaaataagtattgccgacctgtggtaaattca

SEQ ID NO: 22187 - DNA, 384 bp, Oryza sativa
tgactaaatgcacgagagtggttagtgtttctcattggtcagccagaatacaatattaatggaagagaaaagatcatttgaatctgaaagggatactgatatctatggaaataggggcacaatttggtacgccagtgcaaaataattatatgcattccacaataaattgtagtcactaatgatcaatatcgttattctttatacctctcgctaatttgaagcaatcgatttctattgagaaaaatgcacttcgcactgtgtagatcgtttcgagtttcactctcgaaactagcagaactaaccctctctttaacatgaatataacatagctttgttgacaccccacaaaaatcttgtgtatttgactattgctgaaacagtgta

SEQ ID NO: 22188 - DNA, 456 bp, Oryza sativa
  unsure (1)..(456): unsure at all n locations
tatggctgtctaaaccgaaagatgcgtgctatatggattttattatttatagccctttccttttggacggctcaccaccgatcaaaataaattctggccctgggattatctattctcatgtatgttcctttaaatcttatatctgcccagctctatacttctataactcttaatatattgaataataaaatggtctttaaaagcaaatattataatatgctacaaatcaactataagggaagtcctcaaccataacactagacatagttttcataaactncacatcatcaagaaactagtactagacactactcttccaatgcaaacaccattattccatacttcaatttaatggtacttatctcacatgatatattggatgctctgtagaaaccatgtctcatgcaagacataattaccttctctttcctcatttattcacttgccacctcattt

SEQ ID NO: 22189 - DNA, 458 bp, Oryza sativa
  unsure (1)..(458): unsure at all n locations
ttaattcagagtaaatgcagctttcaagcccagttctttatattatgaaagtcaaagccccacccataacatagcccattcattctaacccatgggccgattcagtaagacgatcaggaaagctcctcgtggtggctttctctcgaatccgagcgagacattggccttcctgattcctcccttcctccttgctttggtcaaccgcgtgtgtaccgtagcgcccagctcccgggggagtcgccgcgccgaggaatatccgctcgcgactcgcgaggatgatgacgacacggaacgaanagaagcggtgcgcgcgcgccgtcgctgtccgcggcagcgtcagccgcctcgcctcgcctgccgagcaccagcagacaccgcgagaaagtacaaatcggagtcggagctagcgccacccaccccgctgtcgccgcgctgaccccttccaccaccaccacccg

SEQ ID NO: 22190 - DNA, 455 bp, Oryza sativa
  unsure (1)..(455): unsure at all n locations
acggacacttgatactaagcttgcccgcggtacaccgaacacgcacttatcggngttcagttttatgcgggcggagcggagactttcaaaagtttccgctagatccgagagtaaggtttcttggttgcgcgtctttacaaccaagtcatcgacataagcctcaacattacgtcctatttggctacccatagaaattcgagtagtacgttgaaaagtaagacctgcattttttaacccgaanggcattgttgtataacaataagttcctatgggggtaatgaacgcagttttttcctcatcctccttagccatgcgaatctgatggtaaccagagtatgcatctagaaaacacaaaaggtcgcaccccgctgtggagtcgacaatctgatctatgcgaggcagggggtaaggatccttangacatgccttgttaaggtcgttgtagtcgatgcaca

SEQ ID NO: 22191 - DNA, 442 bp, Oryza sativa
ttctgcaatgagaactgggatctcttctttctcaccatgtcctgcatgcccttccaacagggccgtcagaccactgccctctcgatctttcatatcccgctgccccgcgcaagccgcgcacctttagatttgagaacttttggacatgcattccgggtctcaaggatatggtcaaggctagttggacccagccttccccgcacacagagccaatgcaccgcctaaatcacaagctacagcgcacagcttcttgcattataacctgtgctaaaagtctattcacggaggcgaaaattcagtttcacatggcactcgatgtcattcagcggcttgatgtggtccacgaacacagagatctctctggcccggaattgcggctgagagcagcactaaagcgcataactctgactctcgtcacgatagagagggataggaaaagaca

SEQ ID NO: 22192 - DNA, 318 bp, Oryza sativa
  unsure (1)..(318): unsure at all n locations
tagcttatgctctgcaaggtgatgccggagtcaccggagatccgtgctaccaagggaggaggaagttccatctccgcgccgccgcggngacctccacacccgccgaccttcgtgttgttgagcctgcgctgccgtcggaaaaagggcgatatcgtgctgtgaactcacggcgccgtatgtggtaggagggccgaccacgagcgatgttggagcagacccaatggccagccgtgttggaagcttgaggattactaatgttttgacaccaaagatgtaattcaatgatgaatgatcgggaaccacgacttgcggatgacg

SEQ ID NO: 22193 - DNA, 451 bp, Oryza sativa
  unsure (1)..(451): unsure at all n locations
tgtaggacgaaataaacataaaacanaaccacatctaaattagtacgaatcatactcagatatccataatacaaatattttatccaaaataaaccgctatgaaatccgattaagggctactccatccgtcccagaaaaaagacaaactctaggtttccatgtccaacgtttgactgtccgtcttatatgaattttttttataattagtattttcattgttgttagatgataaaatatgattaatactttatgcgtgacttgtctttntaattttttttataattttttcaaataagacggacggtcaaacgttggacacggaaatcatggtttatttatttttggacgaagggagtagctatgaaggcatgaagctacctcttcacaccagctactagagctgtagctgacgtgggtccaccgggcagcgacccagcgcccttaaacacaa

SEQ ID NO: 22194 - DNA, 426 bp, Oryza sativa
  unsure (1)..(426): unsure at all n locations
agcttcgcaattgccacactagtttgtgttcatttgaattgccttcttgaattgccatacacctttggagctgtgcttgtatgtgattttagagttgaaggatgatcctgctcttggccagtgtgtaccttccttcctgatctcatccagttcccatacaaactgaacaaagcatttggatcaatcaatgcaactgagtgccagcaacatttttaggtattggttattccagtttcttgggaagtattgcagttatccttttttacaaacactanngtgtgaattcggttataacaatatcaagcaaatgtctctgttatttggcaaacctgcacctttcttgcttctctgatttcagaagttctgcgaaattatagtggaaagtttgttgtgcagcggcaataatcaaagttaacaataatatca

SEQ ID NO: 22195 - DNA, 452 bp, Oryza sativa
  unsure (1)..(452): unsure at all n locations
tgtcgggtggatgatacanaatgcagcanaccatgcatcctaaaaatgttgtcggtcaagcactgaagaagcatatgcccaaacattttgcanaggacagttgactgttgagctcatgatagaattatcccactatttcactgacacccaaaataatctcaagatgattagttatagaggttactggtaggccatggcgagtattcagacattcaggcattgcttcagatagattntacagggcaaagtgaagaaccattgctttaaaacaaaaactgaaagcatactatatctagtttttgtcggcatcttgcacacaggtggccagttggtgagcaacactgttaattaatctacctctcttggttaatcaaggaagtaatggagtgattagagttgagaaatgcttatagctagcatgcgtgtgtgagggtccaaaaatggtccagtct

SEQ ID NO: 22196 - DNA, 399 bp, Oryza sativa
agcttcggcgagtttcagcgaaaacaatttattcttctggcggataagctcaacggagcgcgtcgtgagctcaatgcactagtggaaatcaacttttctttttctttcttttatttttttgatattcttttatttttctaggacacgaaaataggcacacctccaagttacagctcaatcggagttgatatgtggcctatggaatattttgaaaccactataaacaaggtgcaggaacatgtgagctcgaacagacaattttgcaagacaaatttcggaatattggattcgccaaacccaccagagggggggggggagaaaccgatgtaaaaattttttttttatccaaaaagttaaatttgcctgattccgagtccgtttcaaaagatatgctgtttg

SEQ ID NO: 22197 - DNA, 394 bp, Oryza sativa
  unsure (1)..(394): unsure at all n locations
tagatgtggaatagtgcctttgttntgccgtaccgttgacgtcactgcttttatcgcgatgtaatggcgtactcgatatatgccagctctgccgctatctctgtatcaagaagaanaacccctagaactatttacttgtcttgcggcgcccagatctacttccttgtactattctagttccacttttgtgcaatttcctcaatttaatcctaataggtagctacttaaccaaattcttttgaagttactctaagtttcggtctgaatttcatccaggcctgacacacgggagcggcacacggggtttggcgtccgtgccgcgcccatcgcgtcgtggggccgggtcgagcagatgccaacggtgatgcacgaggagaacatggggcagcgcgcg

SEQ ID NO: 22198 - DNA, 420 bp, Oryza sativa
agcttctctagcgctaggcgaatgtgtttttcatgctcttctgccgacttggaatagatcaagatgtcatcgatgaagaccatgacaaacctggctaaatattccatgaacactctattcatcagattcataaagaagactggtgcattcgtcagtccgaacgacataaccttgcattcatataacccatatctggtcgtgaatgcccgtttagggatgtcttcctctcggatccttagctgatggtagccggatcgaagatcaatcttcgagaacacggttgcttctttcaattgatcaaagaggtcatctatcctcggaagaggatatttattcttgatggtgaccttcgtgagtgcacggtaatccacacacattctcttagttttgcccttctttccacaagataactggagctcc

SEQ ID NO: 22199 - DNA, 469 bp, Oryza sativa
  unsure (1)..(469): unsure at all n locations
ggacctataaaactcagctttgagtgtaaaagaaattttatcttttcctattttttatatgcaatctctaaatcctggaacatgggactcaatttctcacttcagtccaatatcatacatcccctgtcaagaagggatcgaatcgtaactctagccacaataaaaattgaacgacgagatgttcttcagtttcatcattagatttgccgattntcttctcctttcgttccacactgtaagatatatggcttctccattcctcatttagatttactaacatacatatatatacaactacacatacatttatctatgcattaatctattcaaaactaaaaatgtcttataatttaaaacaaaagagagtatatgaaatcaagctccagtaaattataactctattctttgaatgaagcttattgaggatctcanaataactgctaaggacaaggttgagttttcagaattt

SEQ ID NO: 22200 - DNA, 408 bp, Oryza sativa
agcttgagctgaattataagaggctctattttctatatgatactagaataggaaggagagtgagtataataagtcgaatgaattccggagttgtcggaaatcttctctcatttcttttattttgtttattactctaatttcaatataatattcttcctgagtaatttagatttatcttgtgagaattatctcttggttagttcctaaatagcatacgggattattgttcactataatcaactaaaatatagtgattgctttggtgagttataaacactaaagtagatattaattacttacacgtggtgtttatgtaattgttatccagtaattgctgcgtatcccacaatacgtttaaagtatgtgtagaggtggtgacagccattgagatcacttaagtccttcctg

SEQ ID NO: 22201 - DNA, 437 bp, Oryza sativa
  unsure (1)..(437): unsure at all n locations
tattgaggatctcanaataactgctaaggacaatgttgtgttttcagaatttcttgatgataatcctgaacaggaacactttcataatttccttcatgtcacaggttaacaaactttctgctaaagagtaaaagactttctgctaaagagtaaaagtcggttacaatgtaagacttcaaagttactacttctttgaaggtaaacacaggcggtcaaaaataagttttttcagataatcaatgactaaagaccagtgaaaatagtgtattcttcccaggcagtcgcaggcgatctggcttacaacggccacctgtgaaaaataaatcttcctatgcggcaaggttaattaaactgacagcctatataaggattttcggcgtagaaaaaattacatccaaaatcaccaaatccacactcgcatgtaccaaaaaaaaaac

SEQ ID NO: 22202 - DNA, 385 bp, Oryza sativa
  unsure (1)..(385): unsure at all n locations
ggctgggtgatccgggttagtaatgtcctgtgggtaaaatgtaccccctctgcagaggttacaaactattctaacagccgtgcacacggttatgggcggatgtgaagtgattcctagcgtaattttgtttgactactgccttgtgaaattgccgctgtgaaaaaggggatcgatggttgagaaatctgcagctgatgggatcagctaagcccgggtggccgtttgaaagttgttggccccggtggccgtttgaaaattgttggccgggtgccaatcttgatccaattcaaagaactggtcattgcacatactccgaacggacgagacgcacttgtctatncgtgtctgttgaaagcactcactaagtgtttttaaaaagagtcaa

SEQ ID NO: 22203 - DNA, 450 bp, Oryza sativa
  unsure (1)..(450): unsure at all n locations
tctcattgtttccaataatttcagagatcggaacattcttatagtacagcacatattctgctgaaggcatgttaagctttatctggaccaacaagtttactgccggttctggtcttaacaaagacagcagcttataacttatatnttagcatgtcttgtgtccctggctctatgctaaagaatgattacagaggcaatacaaaaaacaacaaaaaanaagtgatcaagtggtacaaaaagtaatgcatatatgcaatccagagtgttctgatttgcgagctatattgtcatgcttgacggtttggctcattggctgagaagaaaccatcctctgttgaataatggctggctggtaagagacaaaggcacacttgggcaacttgcctacctaatattatttntattattaatctgttggtatgctaccatgggttctggcaaggcaatcat

SEQ ID NO: 22204 - DNA, 291 bp, Oryza sativa
cccctcctagttcccctccgcaataccacttcacgttcccttcctcgtgtaaatacaggcatgtggccatcatcccctcttctatgtaccaatattggctacttacctccgcgaatgatcgtacaatatctgttcctcatcgcgaacagcatctgttaatacaggaaacagctgctaatcatgagacatttatgctataacaatcttatatgctaacaatcatatatgctaaagcatataaactacatctaactgacatatatgcgaagacatatatgcttgtgaaaacat

SEQ ID NO: 22205 - DNA, 451 bp, Oryza sativa
taacagctcacaaccagctgttgagtccactagttggtctattttatggagatggaagtgatccttggggcaccccctgttgaagtcggagaagtcgacacacatacttcactatccgttggccttccgcaccatgactgtgttggctagccactctggatggagtacttctctgatgaaaccagctttgagaagtttatcgagctcttctcgtatggcctgtttctgatctggtgcaaatctccgcaacatttgctttactggcttggcaacgggtcgcaccatgaagttgactcaatcacctccctagggacccctggcatgtcggacagctgccaagcgaatacgtccgcattatcgcggaggaaggtgatgagcgcgagttcctatttctcgttcattgatgccccgatcttgactgtcttgtcggagttggcactggagagtggaa

SEQ ID NO: 22206 - DNA, 397 bp, Oryza sativa
ctgcagcatgcaagcttgactgatgcccagatggccgatttgtctttttattggtatgactgctccaatcaggggagaaattctcatatgaggatattgaaagcctgtctcatctcacacagaagataatcttgcatgaacaaaggtctccagaggcgaggaagaattctaggaaagttaaccatgtctgtccttacatgtatgggtcggaacaaaaggatgatgattcctaaatatctacactcgagtggggaagtatcaaaaatgttataccatgccaatgggtaaagaagtcacgaaaagaggaaaggtatgactttgatatcactaaagctgacacaaatttccacctgcctctccaagagatgcagattcaacttccaactggccacacaat

SEQ ID NO: 22207 - DNA, 468 bp, Oryza sativa
attacgtgacctatgaatactaagcttctcggttttggtctctgcccgatgcattcgaacctatcctcttaatataccagctatagagcggatgcgcccccccagcaagcttatgggtgtgcaatggctcacccggtggatggccggcctaagtcggttcatatcgaggcttggggagaaagcgctacccttatttaaagctcctcaaacgctccgggccgtttacttggacggaggaagctgagcgtgccctcactcagttgaaggcgtatctcagctctcccccggttctggtcgccccggagccaaatgaacccttactactctacttagcggcgaccccgcaagtggttagtgcggcgttggtcgtggagcgcgatgaggacaatcctcattccgcgcacccccaccctgtgcagacttggcccgggagagagcagggaggagaggcccccgagccgaacggtg

SEQ ID NO: 22208 - DNA, 432 bp, Oryza sativa
  unsure (1)..(432): unsure at all n locations
tgctgcatgctagcttaataatggcgttcattttcgcttttttatcattaatcagccattactctgaaagactcatggaagagatgtttataaaataaaagttacctactgatagataattcgatcagagatgatggtaaattaatgaaaaggaataggacagtagtatgcatcagcgcaattagcacgttttttattttttgtatcttgataacgcgcttcatacttcagaacacctgacagctttnacaaaagttcgaagcctggcacaaaatggttgccaggaaacccacattatccatgttaagcctgggcttttgcaggccagaactctattagcacgttgtatgagtgctccattttgcactaacagagtttcaaacaacacatgtttgatatgatggcaaccgattgatcttattatactcgaaa

SEQ ID NO: 22209 - DNA, 457 bp, Oryza sativa
  unsure (1)..(457): unsure at all n locations
tcccacagttcctgtgagaaccacaggaactgtgcttgttgaattggttgacaaaaacgggttctacttctctgacgagttctcgctcaccttccacatgcattattacaagcttctgaaatggctcgtgcttcttccaatgcttgggaatgttaggcgtcttgtcatcctgcggccacaaaaaggcgcttcgttgccatcattntcaaggaatattgattagtgatttgcacagtgaaacgtcaggtcctcatagaagcagataagcagaacaagatattagcaggatatccaatcacccatgaaggagcttgtccacatcatactgcatcggggagctcaatctgcacagaananacccctcacgatgctgcatcccatcagttagctagttcgggaagtacagcttttagtcatgcaaaaagaattntgtcacacttgagattgttntctaact

SEQ ID NO: 22210 - DNA, 368 bp, Oryza sativa
aacgccgtgaggacaagtcccccgcaattccctcctgtaaacggcgaagtgaggctaggcagatagcccccgctgttgacatcgatgacggcgatgatgacctatgttttcaagaacctggggccaccattgccactgtcgatgggggagcgtgtgctcacgtctctcgccggagcttcaaggctatgaagcgagagcttctggccgcggcccctactcatgaggcgacgcgtcgggcgcggtggtcggaggtttccctcacctttgaccagaccgaccacccaccgtgcgttgcccggggagggcagaatgcgagggtggttttccccaccatttgcaacgtgaagttggtgcgtgtcctcatagat

SEQ ID NO: 22211 - DNA, 422 bp, Oryza sativa
agcttggataatgcagaatgttgttggttttctgataataacatctgcacagatgggatattgtttggttgatcgtttttcaatggcgaggctcgcatttatatctcatatatagaaatactggtggagttcaaaattattctattataataaaacttatgtactaattggaactaacctttagctctaatatatcacgttataaaatcatatttgtgcatctgacctagtaacaaaaaaacaaaaaaacaatcgaagtgagcgcaactagccgctaggttctttgtggtagaatttggccacccaagctaagtcataaacttggcatgtatgctagtattaaccgctaattattacacgatctcagtggtagacaacatacatgtgtggatagtatggccctcgagcgacttctttatttt

SEQ ID NO: 22212 - DNA, 450 bp, Oryza sativa
  unsure (1)..(450): unsure at all n locations
tntgtacagctagctgctcagagcaatatttcttgtgtgcacagtanatcataagttaactcttgtgccatcttttgtgttaggaacatggggagttcttctgtttgctttacagtaaaaacaagttttttttttatggaatcagcttgtgtattagaatgtggaactaggatcttggcattctttatttgtatttaccagtgtgaaagtcttggctgatttttgctgtacttgagtgaagaaatcttggttgaaatgttgtgacatcttanaatagaatcaaaatcgactgggcaaattaggggggcaaatttggctttctgcattgcgaaatacttcctaactacttgtaggtcttctttctatcttctatggaatttgacactgggactgttggaattgctgagacttaaatgctcccgctcgtgttaatctgaatttctgtttaat

SEQ ID NO: 22213 - DNA, 439 bp, Oryza sativa
  unsure (1)..(439): unsure at all n locations
ttaagncacctgangctgcagcttgcggagatggcagagctctttttttgctcatcaatcgaagcttgattcagccaatgagtgagaacactctttgggatgaagatggttaggtgcatgcatgcaaagtacatgacatggtgcttgagctaataaatcagctgtcagtagaagaagattttgttacaacgtatttatctgatggtcaacaaacaggttaacatacatgtacagcacaaaagaagaagattcgccgattatctctccataacagcaataagtcctatgcctcgccagaagcaagagaacaattgtccaaagtaaggtcgaatactatcttcggcaaggtcgactctataccacccttgtcgagctatcatgtcctgcgtgtgtngcagctngaggactgcagtggaatggacaagaaccatcttaatca

SEQ ID NO: 22214 - DNA, 400 bp, Oryza sativa
tatcaccgagatattcatgctaatggttcgacatggaagcggttacaccaaagaagagactgacagcttgatggaatcgctgtccgaggctgcagttgaaatgtctgatcttgagaacttcatgcttatatctcgtaataacagagacggcacaaagactcttgatttcattgtgaaagaagcaaaggaggaactcatgcagagagagagagagctccagaaacgggagaggtctaactctgttaacggaaacccgatttattattgataaaatcataaccattcagcctgtattatggtaacttgcatccttattgtaaaatgtcagcagcctgaagaacatgtaaggcgcgcagttgtcggataatgaacataacactaagggcgggaagatggtcac

SEQ ID NO: 22215 - DNA, 442 bp, Oryza sativa
  unsure (1)..(442): unsure at all n locations
gacccggatcttaagtcacctgccgcatgcaagcttgatcaaacttaaatatgtgtgactcttgttaaaagatcaaaactcttataatatgaaacagagggagtttttgttttggaacacaatgcatacctatttttaagcaatttataaagccaaatgctttaatataatntaattttcaccaatcatctagccatgtaggctctatgcctcatttatctaagtacatgattaggactgtttgggggcacatttgtatcttcattagccactaggcatttacatacataacggcgtgcatactatatgtactaaccaagattatttttcttgtaggttgctgacaaatttatcagctttatttatgggagtaagccacagaagtgcaaactttatgtctcggcacataattattaaagaactccatcctgtgaggagcttg

SEQ ID NO: 22216 - DNA, 455 bp, Oryza sativa
  unsure (1)..(455): unsure at all n locations
tgtcaatntcatagcaaacacacanagcttccagcgcatgctctgcataccatccctctcacttggccggtctcgtgctggggctcaacatacttggtccattcccacgaggacaggccggctacaaattcctgttcgtggcgatcgacaaattcaccaaatggattgaggcaatacccacggtggaaatcaaggccgacaatgccatcaaattcattaaaaggatattntgtagatatggattgcctcaccgcatcataacggataacggctcccagttcattagcgccgatttccaagattactgcatcggactggaagtcaagatctgcttcgcctcggtttctcaccctcagagcaacggacagttcgagaggacaaacggcatagtactacaagggatcaagacccgtgtctacgacaggctcatgtcacatgacaagaagtgggtcgaa

SEQ ID NO: 22217 - DNA, 371 bp, Oryza sativa
ctgtgagcaggtgcttttgtgtgtagttttgacaattcagcacagaggtcactttcaaataaatcagggcgagtagcagcccattggccccatttaataaatgcaggacctgctttctccagggtacgatgcacaagacggagccatgttttcctgtacttactgccaagagtatctgcaaatggggccatgagtatacttggagtgaacaacaatgccaaatatattgatctgaagattatgatgaccagctctactgctgaaaatatcaaggaggtgacatagatacgaccatcttgagcacgcgtgtaaagactatcacgaattggtaagtactcttcgtctgcactggtcttctgagctagcattat

SEQ ID NO: 22218 - DNA, 434 bp, Oryza sativa
tcacctaactggttgtggtggtattgaggcgatttctattcacgtttcttcttcgtcgtcgccttcttcttctttctgttgtagcagataggagagcgccatcgtctatctttccatgtttcctgtctgtgctacctactcctttgacaacgcctaaacacgctgcactgcagtcagatacaatctagaacgctgttagcaacggatgaatgtacatttcgttgccgtgacatgaaccaattgatgagtcctgtccaccacagactagaagatatatcaaattaaccgtgtgtatatctgcctcagttggtgtagagatcggaagttaattagctatggtttgtttttgagaaattaaatgaaatgtaagagtacgtgatcaaaaaaattattcacattttggattagttagaagaaattatcgaaaattatca

SEQ ID NO: 22219 - DNA, 408 bp, Oryza sativa
  unsure (1)..(408): unsure at all n locations
agctttgaataacacagctgctaactgttagacactgagatgcattgctcatcgcgtctgcgatgatgcgaggccgacgccatattatagcaaccatatnaatattaaaattcagatgacttcggtcaagttggacccaagggtcaaattgtcatcacatttctgccaaaccggccaatcaatcaatccctggatttgttagttagacgatacaacttttttagctagaagataactacatgaaaacaacccatcggtaatcttttttttctagctcgatggattatgatgccgtgcacgcgtaataaatcggtcatcgcgatgggttgattatttaattgggctatgttgtactaataattcagatgctttgatctctgaactactatatatgcttacttgcgccac

SEQ ID NO: 22220 - DNA, 386 bp, Oryza sativa
tggtcgcgggaacgcgggaagaaaggtccgagcttgtattgagaataagaagtagccaagaacgcgagagcttgtaaggcgagctgcggtggtgtatctagccaatgccggcggggaactggtagggagggggatggggggacgtttctcactcttctttttttctttttattaatctcttgttcttcttatatctttataccatacttcttttaacactagagcacttatctcttaactttatcttatttatattcttatatttatcccttatcccttatttcttaccttttcctatttttttattcatcaccttcttacattcttgcctcctttcttattttttatatcctcttttgataattttatcatttttctctattttt

SEQ ID NO: 22221 - DNA, 369 bp, Oryza sativa
ttgtaccaactcttaaaaagttgagtgactgccgtgtaaaggattttaagtattgggcacttgatcacgtcactttggctaacaaaaagtgcctaagaccctaaaagaacgtgacaggccacacctgaaaatatgggctgcacacattttaggcctatgccaaaaaatatgccttcgacatcctttaaaggatgacgcatgtaacatgctcccgggaataaatctttcgggtgatatagaccatgtgtagctcatatgaatagcttctgatctgagtgattaatccttatgggatactcccaaatagatataataaattgaatcccgactggcgcaagtattctgctgataacccttaccggaaataat

SEQ ID NO: 22222 - DNA, 404 bp, Oryza sativa
  unsure (1)..(404): unsure at all n locations
ctagagatgtccaccttaatgaagagggctgctttcttgnttctgtgatagaacatgatcatgttatggatgaaatagaaattatcatgtaaagttctttttctaatgatagcactctgattttgagatatcatttcacccaatttcggcgccaatctgnttgcgagcaatttagcaacaatttttgcaatgctgtgcatgaggctaatcggtctataaatctcaaccttagaggcatctgcctctcgtgggatgagacagatatgagcggaattcacgtcttcaagtctcagcgagtggagctgtgtgaaggaatttactgcatccatcaaatccaatttgattatgtcccaagctcttatgtagaaagccctatgaagccatccggtcctggggccttctct

SEQ ID NO: 22223 - DNA, 228 bp, Oryza sativa
tcgatgtctcggggagtacgtatattgaaaagcatacatataagtgagaggactttgtgttctcaaaaaaaaagggaaaaaaggtgaggacccttgaaggttgccaacccgagttcatgtgtttggttcatatataacacgcttatatttctcttaaatattcgatactagggttttccttgttatcaagcacatactgcataatttcgacaatattgtgttcatgat

SEQ ID NO: 22224 - DNA, 190 bp, Oryza sativa
  unsure (1)..(190): unsure at all n locations
gacaatgaattagacatgcttatgtccatagtagttattttttatctatggagtgttctggaagatgtggtatctgggctgntaggcatgtgtgtgtaccactgacccaaatntcctactcgcccttctgaacttatacgagtatgatacattagaattgctagcttaaaaaattgtatgttgttttaca

SEQ ID NO: 22225 - DNA, 414 bp, Oryza sativa
  unsure (1)..(414): unsure at all n locations
cacatgctctataatatntgaagcaatcatcaatcatcctctttctatattataccgctctcctaagcaaccaattcatcttgtgggccgattgatgagttccacaaattccttcatgtacctctcccatagccactttagattgaacttcatctaagcacttcaacaagtcaccatctatatttcggcgatataaatcttcatcaagcaatgtgtatttgaatgctatgccgccgaatttccgatcaaccttaagtgtgggatctttcaaatatcgaatcaaaggaatgctccaatcttcttctatttcctgggcacaaatgtccgaattcacaattaattcggtctctaaattgattgaaacatgccgcccagcgctctgcctagaaccggtcagaccggccatacagggtc

SEQ ID NO: 22226 - DNA, 457 bp, Oryza sativa
cggacttagcacgcgctgcacttataaggctcacagggttattcttcttgacaaaaagataagatcggatagattcgaaccgcaattgccaaggtaatcactactatgccagcccaaatcatgatcttcaccaacttggatttggttctctcgcgaaaatcgcgagttgcagagatgagaaccatgaatagccagatccccaataagaaaacagaaaccgaggaaaccacaagagtgaagactagtagagtctcggcttttgtcattctttgctcctctttcactcaatgattcattcgaatttcccgaccaaaaattctatatgtctattcatagggcctctgtgctaagtgctacaagatctagtgcactggaactcgtggttatggacccgaaatctttagtatggaacattgtcttttcccagtaaaaacccccagtatatgaaagaatgaaa

SEQ ID NO: 22227 - DNA, 447 bp, Oryza sativa
  unsure (1)..(447): unsure at all n locations
tgcagcatgcaagctgcttatatctcttggcaaagatgttttatgacctacattcttctatatatccagaactttaaggtgatacagcctgcatataacttctggtagctccagcctggggcccttgtataagcagcccagttctagatagcgaagattgacaaatgctgagatgttgcctatcaatgaatccaagtcaaagaagaccatcttcagtttcaacacacggattgaccttacctcattgagttcttgccgaaacgtgtctgcaaaatccaagtcatgtggcccaaacagcatcaatgtgcttaagctcctttgntgcaactcacggaaggaattagagaactcttggaggaaagaatcattatgatacacagtgccattcaattntgttatgcactctcactctgttattacactgacatgacgaacacatggcggtgc

SEQ ID NO: 22228 - DNA, 323 bp, Oryza sativa
  unsure (1)..(323): unsure at all n locations
gcgatccttcgatcaccgcgaggccgatgactttttttttttgatgcttctgagggttgcctcctccggacttagtcggcgtgattcttgtgcactgtcgatgtgaaggattaaattaaggccatgtggagttggatcttgatatcagaacagagggatttaccctatttgcgcacgtgctttgctgtcctttctagcttgtgaaacaaaatatgggaaggctctgtgtggggcgagcttanggcccaagctttagaaacttcttcctcaaaaccaggcaatttggcccaaaaattcttgaagcggaaggtttcggcagactc

SEQ ID NO: 22229 - DNA, 109 bp, Oryza sativa
  unsure (1)..(109): unsure at all n locations
aaaaatacaaatctatacacatctgtctgagggttggtntacgttgcacatggagagtacgaaattntactctttctctctcactactactctcaatttctcattcata

SEQ ID NO: 22230 - DNA, 502 bp, Oryza sativa
  unsure (1)..(502): unsure at all n locations
actcaagcttatctttctttcttttcttttgcaaggaagacttcttctaatttatacctgctcaagatgcagcgaagcagtaacatgctccacctcaagatgaatagcagggtcctctttatcactcaccggtttgaacccttcaaacaaactatagcgccgacttttccaagttcacagtccagtacaccctcaagcctagaaaattatgagaaacaatatcgtttgtgaaacttctcacacaggagaagatcttgaaccggcacatcctcctcgacgagccggcgcttttgcacatgaaaatttggcaagatcacatcacaagcctacaagttatggatgggcgcagttaatgtagcagcttaggaacttacttgaagggtattgagttccacagacgaactgtctcatcattagaacctggtagtaagatnggcaggtctggatgggaacaaacacaggtaacacaatccatatgccctatgagtatttgaacacaagt

SEQ ID NO: 22231 - DNA, 394 bp, Oryza sativa
tgatggtcgttatctatcagattcaaccgtcaatattactaaaacaagagagaactagtgatgcttgccatgcataaatattttagaataataatatgccactagtattaggtctactaaccttttgcagagaatgatcataaagttgaggagaatcgagatcaacaccaacaataaatcaatcggacgatgtcgagaaccagacttgtgtatgaatgggccaagaactcagaattaacatgacaaaatgggccaaaattcacaagtctgcagagaagaacaacagaggaggccgccagccaatccatgggctggccgaacccccctcatcgccgctgggtgtcaggtttcttttggacggtgtggattagctcccaatgacggttggaggata

SEQ ID NO: 22232 - DNA, 339 bp, Oryza sativa
  unsure (1)..(339): unsure at all n locations
acttcaacgatgatgttatgttaatagcaaggtgagtatatgtaacgccccgattntcgntcgggattaagaatcattaaataatgcattntctagaaattaaataaaagttaaatcaatttaatcaagtgaaataatgggagaattaaaantttcccttaaaaatcattggccgggaatattttgtaatattctttgtgtcctaaaatactctccggaattttccgtaaattttcggagctcaagaagtaattttaatggcacacagttcatcgaatcaattnaataaaaaaagaaaacaaaaactccccttcctccttgggccattttcggcccaag

SEQ ID NO: 22233 - DNA, 438 bp, Oryza sativa
  unsure (1)..(438): unsure at all n locations
ggtagcctagtgacanaggagagagcccaatggagagaatttattgtattctgtgaaatgctntcctcctagcctttcgtaccacgtggggtcacgtactaagcaagccaaaggcaagaagagtaagaatcagaagagaaaagcgccgatgcgaactgaagaagaagtacgtaagatggctattatcagcaccgaatggcctccagcagggataactattcctagacgtcaaagaggaaataccttccgaggtgcacgacagttgacccagcacctcctaagccatggtagcagagtatctgatagtgaagggtcagatcaagtctcctcggatgatgaagatgagtctccccgacatctcggcgaggaagagatggaatcaaaggcatgcacccgttgtggagaaattggacacattgctagcatgtgtctcacact

SEQ ID NO: 22234 - DNA, 385 bp, Oryza sativa
agcttgtgccggtgctcatcaagttgctctacctcgccttccttcatgtacgcctcgccatgggcctccacatccgtgcgccactcggcagcaggagaggaggggaagagagtgggaagataggaagaagagataggattgtcaccgttgttgcatcggctgatgccgggtgcaccagcaattcaattgtggtgaacaccatccgggatgaggcgatggtggcgaccggtgatgcggaccagccgtcgtccacctcaacctcgctgtgcccggtcatcctcccacacccccgcgccatacttgggctcctcctacagttgcacacgtcgtcccggccactgtcaccatggtcgaaggggaagataagagagagatatggagagag

SEQ ID NO: 22235 - DNA, 401 bp, Oryza sativa
  unsure (1)..(401): unsure at all n locations
aatagagatggacttctacactctttngagtttgaatcattttatgcatgcgaatcttgtttacttggcaaaatgacaaaggcacctttcacgggtcaaagtgaaagggcaagtgaactattgggactagtacttactgatgtatgtggaccaatgaactcaactgccagaggtggttttgggtattttattacctttaccgatgactttagtagatatggttatgtctacttaatgaggcataagtctgagtcctttgaaaagttcaaggaatttcagagtgaggtacaaaantcattgggcaagacaatcaagtatatacgatctgatcgtggtggagagtacttgagccttgaatttggcaatcatataaaggagtgtggaaattgtccacaactcac

SEQ ID NO: 22236 - DNA, 504 bp, Oryza sativa
aactcagctccataatcttattttggcacgtgttctatatttattttatatgagcacattggcctaacagaaaaaccaaccactctgatgataactccatctaaaataatcagaagagatattcaactggatatgaacagtagaaacacacaattcatatcaatatgttagatgctgaccaacttaagctatgtttaaagaaacattaagcggaacagaacccataacactagcaatagaagaacttctccttctaacaatagcatataaagatggatatttatttctaaagaccaagattcctaaccattcatctttccaagagcctatttggtctctattattcacaatccaagaacgcatacttaagaaaagtattttactcgcataagtcctgaccaaacatgagaatcacattggtgcctatcaactcgagttataaacttattatgaaaatatcttctctttaataagtcttgccagacaccattctcggttattaac

SEQ ID NO: 22237 - DNA, 349 bp, Oryza sativa
aacgtctaagtgtcaactggaatgtagttttcattttacatacagaattacacaggcacgatagatacacattctaaaaaaacacacttctctttactttttgcccgagaaaacggcttggtttgtgccacagcacaataacttccaactgtatttttacgggtaccctggttctgcaatttttttctacaattgcacggtagatgcatacattcacacaccactacatataacaggtacatatttacacctcacgtatacatcttgtgaacaacgggacctcataatcttactaaaaacatattggagggcctttacatgtgcatttcaatttcgcctgaataaaact

SEQ ID NO: 22238 - DNA, 231 bp, Oryza sativa
agcagggcaagccacatgtgcacatggagtgggcagcactccacatccctgtgaagcaacatacctgtattcctctcgattgcaagctctactactgctttacacagattgactgaaacagcgatgtgtgtcaaccctttgtctacaaccctggctcttaccaaatgacgagttacaacattgcctgctgcgccacagctctcacaatgggaattgtcttcacacccctag

SEQ ID NO: 22239 - DNA, 375 bp, Oryza sativa
aaatggagttggatctgtgcagccctatgaaaaagcggctatggttttgatgcaacatcatgccaatttaacattgacccatcggagaaggaagcaaaccaacttggtgtaaggtattctatgattgcacactagtttgagttataattcatacaagaattgttaagtttgtttatttctaaccatgcttcttctaatgacagacaactaaatacaactacttgactaagcctatcaaattcttccatctttatgaagaattatttgtgggctgttcaaaagctgatggctctcttgcgatggaccagtttactgctaatactagtaatgatagtgatggcagtggtagcatcaaggagctcgaagaatatacat

SEQ ID NO: 22240 - DNA, 251 bp, Oryza sativa
  unsure (1)..(251): unsure at all n locations
gacagaaaatgaatgaatctaatatgtatgtacctgctcaggagagataaggaacacattgacacgcgtttggatgccttcaccaaagcttcatccattgatgtcagaacatgccttcgattgaatggagtgatcaatgttctgcacacgatcaaatgattagaaatcangttaagtaatatatttcatctggcttagtttgattttatccccttcatcaacgacacgtttgaaaaaaaaccatataattt

SEQ ID NO: 22241 - DNA, 274 bp, Oryza sativa
aggagcctttctcaacccattggtataaacacaaactgatccgacgtaagctgcataaatcatctattcaccagattgcactaatttaacaagtgccaaattctaatgcctggaacatgatgcagagaagtgtgctcactgctctgtttcatcgagaaggtagatagcaagttaataaatctgtcaaatcccctttgaacattatatgtatataatacgatatcaaggtatcaacatcattatcctaaacaaatacaatatcaaggtatcaaat

SEQ ID NO: 22242 - DNA, 293 bp, Oryza sativa
  unsure (1)..(293): unsure at all n locations
atatttcacgaatcaatacaattgctgttacattccaactactgctgagagaaccacgcctttcgacatggcatagttgtccattcgacaacagctggcgccgtccatgggggacccagaccgaaaaggcgaaatgggacccctttcaccacacccttcgccacagtacccgcgtggtatggcgacaaaggctgggggcgagagtgagttaagtccaagctggngggctacgaagcctgccaagcctttggacacctttcgccacacgccacgcncttcgccatagtaccaat

SEQ ID NO: 22243 - DNA, 510 bp, Oryza sativa
  unsure (1)..(510): unsure at all n locations
ctttaaactcaagctggttaaccatgatgctggctgtcatataatacacacaatcttatggatctacacaacattangacttatctggctcatacctgtatgctattgggccatagtatgtaaatcagagtgatacgtactaaactttcagccctgtttgcaggcaaaacaatatgaagccaagactattataaaaaacaaattctatactctatgatacaactcttctttgcagtcatgggatgcaattacaagtttacagttgtgggatattaatatatatcatgggaacacgtttacagtcacagcggtggggtgctacaaacgtctagtgtactatgtacctcttccacatatataacaatgaaagcatgccaataatatggcataaaatgagactatcttcaaccttcaatggagtatggggcgcttgattcttcaatcattcactgtatcctttcacacagcttacagcacattatctttattatctatataacccttctatct

SEQ ID NO: 22244 - DNA, 446 bp, Oryza sativa
  unsure (1)..(446): unsure at all n locations
agcttatagaccttggagaggagctggtatgtttatgagatgtatagaagagagatcgccgaggtttcagcccggaaccaggacatcgtcgccgccgccgtcgttctgatcgatctgctcgatacttggatgtcttgctgctactggcctttgtattgcattccttgacttgattgggctgtggcttggttgagcaactgagctggcccatctgcagtatgttgggctcctaacatgggctttcaattaactagttattttacgtgcttcatttcgtcaactctctgctactaagagttcctcaatgtaactttccttctggaatctgcattacgatttttctttaaaaaaaagaatacagtctcggaggcagaaccatgcattangaattttaagaaaacactatgagaggcagaaccatgcctagtagaaataccatccctatg

SEQ ID NO: 22245 - DNA, 480 bp, Oryza sativa
  unsure (1)..(480): unsure at all n locations
actgaganaggctatanggtgatcattctgcatcaacacattgccaatccctttatctgatgcatcggtttcaactacaaatggtaaggagaaatccgacatcgcaagaacaggtgctgatattattgcttgcttgagggttngaaaagctgcatctgtcacagtattccaaatgaaaggctgatccttgcgcaaaagatttgtcaatggtttactgaaaataccanagttgcgcacaaacttttggtaataacctgctagaccaaggaaacttcttaagtcctttactgactgaagtgtgggccaatctataacagcctttattntatcttcttcagtagcaaccccatttggtctgatgctgtgacccanataagacagtttctgttgagcaaaagagcactctgctctgttaaccttcagacccatgtntaccaannattggaaacaacccttagatagttgatatggtcagcaaga

SEQ ID NO: 22246 - DNA, 219 bp, Oryza sativa
gtggctagggaggatgagaaaaaactgcgttcattacccccgtaagaacctattgtatacatcaatgcccttcgggttaaagaatgcaggtcctacttttcaacgtactactcgaatttctttgggtagccaaataggacgtaatgttgaggcttatgttgatgatttggttgtaaaaacgcgcaacccagaaactttactttcaaatctggcggaaac

SEQ ID NO: 22247 - DNA, 413 bp, Oryza sativa
  unsure (1)..(413): unsure at all n locations
acacatataaactcaagctngacgacactcacgagcaagctcatcatattcattcttgccttctatgtacaggcagacatccgcaatcattgtataaacaatagagacggacctgaaaaanaacccaatagtaaatagcagcgatagagggaaatgttctatttcagatgagcaaaggatntgtatgagatgacaagcatgattcataaggacagcatacagtataaacaaaactcaaggcaaccatgggatctgattaatgatcagtggatatgctctactacacttactgtataacacatggtcaagcttaaggatgactgaaggaggttaattctacacattcagcatcacgacctgcagttccaggttcattatctactataactggtaagttgtctctccttttcttt

SEQ ID NO: 22248 - DNA, 375 bp, Oryza sativa
  unsure (1)..(375): unsure at all n locations
gcttgtgattgattcgcagcgagttttgttctgatagactccaactggaancttaataaatccagccaagctaaacctttagctagtgactttaatgagctgactcatgaactgctctttagctctgtagtacaagagataacaatatttcatatacttagtgcttctttagtcctttagttacagccaaacctatttttatctagtgaattcttcattaattagtgtttattattatgtttacatataaaaaatagcaaactataaattataaatgttatagttcgcatcaaatatgtctacaaagttagttccagtttagaacttggagttgtactatgtgttacgaataaaggaagaagtggactctatcat

SEQ ID NO: 22249 - DNA, 335 bp, Oryza sativa
  unsure (1)..(335): unsure at all n locations
ctgattgtgagtacaccanaatgtcgtcaatgaaaaccacaacaaacttatccaaatattccatgaacactttggtcattaagttcatgaagaaggcaagagcattgtgtagaccgaacgacatcaccgtgaattcatacagcccgtatcgcgtggtgaatgaggtcttcnggatatcttcttcacgaatacgcaattggtgatatccggagcgaagatcgatttttgaaaagacagtggcacctctaagctgatcgaacagatcatcgatccggggaagagggtacttgttttgatagtaacatcattgagagctctcgtgtcaacacacatcc

SEQ ID NO: 22250 - DNA, 327 bp, Oryza sativa
taagttgcaccaaggcaggcgctctatcacataactggcctgagaccaacgtatgccattctattatgttgctaactccaccacatcagacaccgtctgatttgtccatatgggatctagctaatacactcgcatctgcacttggcaagtatgcccacgcccttcattatttgggggcaaaaattattaattatctcatgcttgcactgaactcttgcaagctttgacgccagtaatctcttgcctatataaactcatttttatgcacaggccatcaatggatacaaacgattcttactcaatcacacaggttctgtggaacatata

SEQ ID NO: 22251 - DNA, 262 bp, Oryza sativa
ctcagcttatgctgatgagccatcatacaaagatgatctttattcacacgctattgtcgctgaagaagtatgcggtagctgaaacatatcccttctgccattagtgagcaccatgcggcggacgaacgatactacgcgaaacatatcgacagggcactttgtgggctacatcggtgtctcatgccaacaaggacgcgcgaacagcggaacgatggcgatcctatgctgagcacattcatttgccggaccagcagtttcatac

SEQ ID NO: 22252 - DNA, 390 bp, Oryza sativa
  unsure (1)..(390): unsure at all n locations
cgacgntcgtactccatccaagcatgaatgaactgtatggtcggttcagggtgcgntatcggcccgccacttgaagtaactctgactgtgtcaatccattgtacgaattgacatttccttacatcctcctatgtacatccaatttgggatagttaagttaatgatagtactgaggagtgatgaaaagaatagttgtaattaccacgaaatcatcgtcgacaatgtttggacacacgaaacacctttgtcctcgagttcggtgccttacggaccttatgacctgacaacggtcaccacaacgacacttcggtcgctcacgccacgtgggggagtcctatgggatntacgtgccattctatagcctcaacagcaaatcgacgttcatgctca

SEQ ID NO: 22253 - DNA, 376 bp, Oryza sativa
  unsure (1)..(376): unsure at all n locations
ntagaggtnggaggagctgaagattctgagaagctgtttacttacttantttgagatatngtagntagcgagtctgaatcttgacaagaatctatgtcatttanggtgagtttgaggaataggggattaaaaagattagaaagatatgcaaaacgaggtgaaccattagcatatgattaattgagtattaactattttaaattgcaaaaaatatattaatatgagtttttaaagcaactctactatataaaaattttgtaataaaacacaccgtttagtagtttgggaagcgtgcgcgcggaaaacgatgtgctatcttactcaatgtccatgaaacgaacgcactcttaaagaattagagatttaatgagtagct

SEQ ID NO: 22254 - DNA, 320 bp, Oryza sativa
  unsure (1)..(320): unsure at all n locations
gagctgcgcctgcagagccgaaacctcttctgttattggttgtggcacttggccaagtgggtgagggtgtacttgagtagcgaccgcgtgagcttgcagttgcacgtgagggggccgatgtgctggtgcggtctatggctgcccgaccaagtacattggtgcttgcacgacttgtggcggaaggggctgggtcatcacttgtggatagacttgggtgggacctagcctgccgatactggaggattggngccgtaatgaccttggtccgccttgctgactcgtatgcttgctggtgttcttgcatttggcaaagcatgtct

SEQ ID NO: 22255 - DNA, 423 bp, Oryza sativa
  unsure (1)..(423): unsure at all n locations
tagttagtaataaagtggtcccttatgtaaatggtacatatctgtccatgtgcatggtatcataaatcacaaatgcagaaatgcttcaatgaatgagcagctacaagcacacaaggtaaaaataaggcgcaaaagcatctgaaccgcacagcatgaaagaacaaaatggcatgagcttgctctatgccatgccaagaatctgaaaaggagaagacaagagagtnatataataatatctgtaattggagtaataggaatgctactgctgctactaataacagtaataaattgtagtccattgacatgctaatgtgtggaattaattctacattatacaggtatctgtattggctctgttgctctagtgatcaccattttcttcatgcgtntgatgtttgagcgaagaaagcttacagatgtcaa

SEQ ID NO: 22256 - DNA, 411 bp, Oryza sativa
tcattcctccctttggtttggtaatctctttatcacattggatagataatcggcgagtgattccttgcggtttagctgcaacaggatgaccacctaacaaagtgacaaaattctcttcaattgccttcgatattataagctcaagcatcatgtcatgcacccgacaagcatgagctttaccatcacaatttatatccattggttggaccatacttctgttgatgagctcattgaagtaactctctgctacatcctccacagactggcctctttcttcgccgatgaatccttccgcaatccattgctggatcaggctatccctctcaatcttgaagtcctcaggatacaaactgaggtatagcaaacatgtcttcaggtagtaagggaggtcatagtaactgagggaaagta

SEQ ID NO: 22257 - DNA, 426 bp, Oryza sativa
  unsure (1)..(426): unsure at all n locations
tttaactcagctnctttgggacgacgagcggcatgagtccagatgcaagagaatgtaaggaagctcgtggggttattcgcgaaattactgatgaggaagcgggcggttatgtaaaaaattgtcccaatagagcacacggttcattctcaatgggcgcacactcacaacgacaagtaccaagtaccattccattctcagcgcatccagcatccatatatcacagaacaagcattaataaacagtaaattataagtgattcacaaaacagctaacagcttgctccctggtgaatacagaagaaaaattgaaaaccgactgcattgctagttgacaccaccaactattttcttaaaaaagtaacaaaattttcaagattacaactgcttacacgatatcattaacaatcaggtggatcgatcaatcacc

SEQ ID NO: 22258 - DNA, 347 bp, Oryza sativa
  unsure (1)..(347): unsure at all n locations
atcctgggatgtcattaagacagaaacagccgtccaacatgttagcccggataacttgggcttattaaacgggttaaccagagcaagatcaaaccaacaaattgagntaggaaaatgtaagacttgcatctgttctgctgcattcggcaactcgctggcaactggcacgacctgcaatgcgtgttcacaagaaacttgtatgttagaccaactcgcgtaccctgagatatcgtgtgttacaatagattctctgtgttctttaaaaagacaaggaaataatccagacatgacaaaataaaaggcagagtatggatatatctacaaaggtgtttatgtagcacgcacta

SEQ ID NO: 22259 - DNA, 255 bp, Oryza sativa
caaaagcaagctgacctaatactggaattcagtatgcaatgaccatggagcccatgaccctcccatagtcatggtggaactggatcgttgaaagcatgatggaaaatgtaagcccaagattgacatggcagataagtgacaatatgttcttgctctggcttgtaggacatttgagcgtgaagactccacaatgatatcatacacggatatacccaatgaaatgtgtcggtctaacagcatctttgatcctgccca

SEQ ID NO: 22260 - DNA, 446 bp, Oryza sativa
  unsure (1)..(446): unsure at all n locations
ctgcagctatattagcctttggactgttatgcttctntgttactgataagttagagcttgatcttctgatgcgtttgatttgtgctttattgacaaggctttcactacgtaatgaaaaagcatatgattggcatgtttatgaaatacaggctgtatgcatttttacccaacaaatgcggacactctaacaagtaaacgacactttagagtagaaaatgagtagctctttctcatacagcgtggcatgctaacaataacaagcacacacattagagctcttataagaactttctccataccacttggaattataaatcgaagaacatacccataacgttctcatcggagttactttatctgcagtactcagagcatgttatgatcacgtntggttattgtgctgctctgtgaaatgtcggtgtttacaagaatctctactgatccat

SEQ ID NO: 22261 - DNA, 483 bp, Oryza sativa
  unsure (1)..(483): unsure at all n locations
tgtcggcagcaacagaaaatntnctagggagattcaccccagatggnggtttgggtttctcccgccacccaatccccttccagttcccctccaccatgggatgtttgtttggatcaaggggattggtgggataattcctaactaaacattaaaatttgaacacttcacacaaggcttaaagatacgctacaggaaatttcatgatattgtacagaattttcaaaatccacttttcttgagaaatcaaaatccaaaggccttgtccgtttccttgggtttcaatccccaaggggaatctatccagggagggagtgagtgaatccctcccatatcactcaatcccattggggtttgaatccctcgcatgatcctaatccctctcctaaatcccatgtctcgttngactgggatgtcatacacaacacagcagcagtatactagtngcgtntgagctatttgtatgcatcagatcattgaaaacat

SEQ ID NO: 22262 - DNA, 344 bp, Oryza sativa
cgcatgcacgccgaacacgctcttatttgtgttcaactttatgcgggcggagcggagactttcgaaagtatccgcttgatccgagagtcaggcctcttggttgcgcgtcttcacaaccaagtcatcaacatacgctctaagattgcgacctatctggctacccaaagaaatatgagtagtacgttgaaaagaaagacctgcattctttaacccgaaaggcattgtcgtataacaataacgtcctatgggggtaatgaatgcagatttttctcatcctctctagccatgcgaatctgatgataaccagagtatgcatctagaaaacacagaatgtcgcaccccgc

SEQ ID NO: 22263 - DNA, 498 bp, Oryza sativa
  unsure (1)..(498): unsure at all n locations
ctaagctgcaatgctngcgcatgcctctcaagactggggacagagatagatatatgccggacaaattgtggtatttcagtattttcttcagtctctatcctgtagccatcatctatagaaagatgttctgctaaatcatgaaagaggtcatgcattctatacccaacatgactgtctttcccatgtgattgcttgccgaaaaaaccagataacgacagctcgtaaaagtactgtctggtaattccctctgctctctccgaacggccattagaactcacgaagccttctgcttcccagagtaagataatctcatcaatgtgaaacatgtantcctttgggaatatactgcagtacaagaagcacctttgcacctgtgggtcaagacgctggtagctccacaggagaatttccattatgttcccatccaggttgttgtatcccgtgcatgcttncagaattcaacatctaacattctgctcaaccgagatgctacagctt

SEQ ID NO: 22264 - DNA, 487 bp, Oryza sativa
  unsure (1)..(487): unsure at all n locations
ctcagctaaagaacaaccgctataatcatgcaagagtacatattcaaagttttgatcccatgctaatgcgctaatgcccagttcataaagaggatcaacatgataacaaagcatagaacatgagcttttaatcttttctcatgactcttatatttaagattatttttaatttctgtaaagacaatagcacaatcacgacggtccacctgatcttatcagtcagcangtgatggttgtgccaaacactgccgtctgacctcaataagttttccagctagagttcccattacaggctgtctcagtgctatcttcggcactactcatgcgtaaacgcactcagtagcccggacaaaaacagagataaagcttggtaagcatgattgatacaaagtatggacgcataagcatgagcattcataagcatgtactgacagttattgcacaaagaatgtaaacatggcatgagtatgagagggatactttcatt

SEQ ID NO: 22265 - DNA, 396 bp, Oryza sativa
  unsure (1)..(396): unsure at all n locations
tggccaggtcattaagagtatcaacatggataccaagcatagaacatgagcctttaattctttctcatgacttttatatttaagaatttcttttaatttctttaagaccatagcacaatcacgacgggccacctgatcttattagtcagcaagtgatggttgtgccaaacactgccgtctgacctcaatcaaagttttcagctagagttcccattacaggctgtctcagtgctatcttcggcactactcatgcgtaaacgcactcnagtacccggacaaaaacagagattaagctctganagcatgattgatacanagtatggacgcataagcatgagcattcataagcatgtactgacagttattggccaaagaagganacatggcatgagtatg

SEQ ID NO: 22266 - DNA, 308 bp, Oryza sativa
tgaaagatagtcctcagtaataatatgttgcaaatcatattatagcctgctaagaaatagcttggaaccacacaatgataagtcacttctttgctggccaaatggtaaagatgcttgactatgtcaaatactcctagaatacactgaaagagagccagtaacaaaacactgatatgattccagtgaattaaatctaattctaagaaattataattatcctaacagaactgatgggaactgaaagggaaccatttatctattcttgagtgaaatatgaattactaataaatagcagtgtaaaccttttg

SEQ ID NO: 22267 - DNA, 278 bp, Oryza sativa
caacctatttcagcgaaagaagccatagtcagaacaacccaatcttcaagtgattcaaacgggctggattatctggggattttccctgctccactaactaactactttctgcccatgttctttcaagaaacaagccattacttacaacactgaaaactgcagtttgaggagggcctcaactcgccggatcccaaagaaggccttacgaccgcgattgatccaagctaggagaagaaatcctattgattccatctcaggctaaaccatgagaaaaaaag

SEQ ID NO: 22268 - DNA, 488 bp, Oryza sativa
  unsure (1)..(488): unsure at all n locations
tagcctcanatccatatgagcacattagaatgtcttgatagtatatggatagtacacatcatttcaagttttgtccggaacaaacacacacatttaagcactagtgattgtacataacgaaaaagctagcacctgctataacaacatgtaacaaataatatcccctgaatgttaaagcctttccagttggtgcttagcattatgtcttgcgtcaatcatcactttccacagttcagcgatcctaagtggcaaatctcacccaacaccaagtacaaaatccgcactaagtttggtgtgaataattggtagtcccactactaaaaggctctagtatgtcataagatgctaatcactatcatgtatcagaacttcggtgacagattagtatcatcttactactaattccaggcagtgctagctggacatggacgcgagtctacctgatgctatagccataatattagatattcgactagaagttaaaaaaa

SEQ ID NO: 22269 - DNA, 442 bp, Oryza sativa
  unsure (1)..(442): unsure at all n locations
tagctatgttttatnttaaaattatggtgagttggaagttatgatgatgatgagaaagatggatggggggtgttagccgcccccgcttgtatgtgtctaacgcgatgggtcaacctcgacgaaccggatttgtgcatgcgtgtcgtcttggcttacacaccacgccacgtcggatgggccccacactcagagccaagcctacctacacacacctacccctccgacggacggtctcacccaatcacgacccatgccaccccgggcccaccgtcacagcgaccgttatcgatcagcatgtgggcccccacggtgatctttgattattatgtgactaggtgaaatcccgcgcattgctgcgggaatttagtatgataacaataaanatataacgtgtaagatagctaaataatatcatattaaataaattaatgtggtttatgat

SEQ ID NO: 22270 - DNA, 445 bp, Oryza sativa
  unsure (1)..(445): unsure at all n locations
agctcgatgaccaaactacttgtgctcttattccctccttnttcctgctccacttttccttcttgttcctactgctgctgctactctcatcacacttgagttggtgtaatttagataaggctctccttttcagcacgccaaagtagaggaaaattttttttaaaaaaaagaaagaagaggaaagtagtagtgggcatctgcaagatgctggacagcatcagcaacaggagggacagaaaaagcttcaataattnnttggcttgccaatcatggtgtacaacaccatggccagaatcttgtttgagagagtagtgctgatgagtgtgaattctctcaccctttttcctactgatctaaacccttttttgaccgctgatttggcctgctggacagtgttcatgggtccccattgttctctgcctacagtgataacactgtttcaact

SEQ ID NO: 22271 - DNA, 483 bp, Oryza sativa
  unsure (1)..(483): unsure at all n locations
tgctcagaagagcataaacaactgttgcaccagatataacatatcccaacacttctcaagcctgcttatgtgatcatcatagtatctttntgaaaaaaaaatgaacccagcacaagtaaattagtacttatcatagaacagaattagagcatggagtacaaagtgaaaattataaactggtttctctttgacaattctgtagttctcgacctctgcatcgtatctcatccctttcttcttttatatgtgaagcataagatgcaagcagtgttcctttaataacagggtctgatggtactctctccattaaaaaaatataaacatacttcttttgtcactaaaactgaggaatataattaactcatctnccatgtagaanaaccaagaaactatatgcatgaatgcaaccaataagtactaaaatttcttattgggttccagtcaataataaaattagcatgtggagactacaatattaccatc

SEQ ID NO: 22272 - DNA, 266 bp, Oryza sativa
  unsure (1)..(266): unsure at all n locations
cggatgcgccccctccacacacttaaggatgtgcaatgcgtcacccggttgcatgagccggcctaagtcggttcatatctaggctgggagagaaggctctacccttatntaagctcctcaaacgctccgggccgtttacttggacggaggaagctgaacgtgccctcactcagttgaaggcgtatctcagctctcccccagttctggtcgccccggagccaaatgaacccttgctactctacttagcggcgaccccgcaagtggtt

SEQ ID NO: 22273 - DNA, 470 bp, Oryza sativa
  unsure (1)..(470): unsure at all n locations
agagtcaatgggttgctgttctgaatgcacatattatcctggtacatgtgctgattgtgatggtgatcctgatagcagtttcaagtgtgagtttctcagagatctgtccaatgctgtgaatttggagttagcagctgaagatggaatggtacattcgtgttcatttctgacttgtcttccagccaattnttgtcattcatactatcaaacactacatattcattagctttatatttaaacagaattctatgtgttaccatggatttctgttctgccttaccatgtttcaatgaggacatcctgaacgttggtttgtgggggtgggcggcgtgaactattgaattatattggtttgaagcttgtgacatcaatatgtcttctagaacatcgaaatagttcgatttgtgtgagctctgataacttcaacagtaatcgtacacaagaatattctttgtcacacaagatattct

SEQ ID NO: 22274 - DNA, 395 bp, Oryza sativa
  unsure (1)..(395): unsure at all n locations
aatacttgcgtncttttctgcatagaatattattgagatgaaaaatagttgtgaatgtttaaaatcgatttggatgatagaagcaactagtatattntaatggggtgagcaataaatagcggcgtggagcccgaaacgccaaattaaaatttaatattaaaatagtgctatttttttgagaatgctaagaaaatgtcaaatcagttcagtggaaatctacagatcacagggaaaggtattatctgcaccattataatacggtagcttgcacccaaaagttgactattccttccgatgattcggtgagatgaagctaggttaagatcggagcgaanaggatataaggcgtagtctgttgccattgatcgataagcgcatgttaacttgagacgatc

SEQ ID NO: 22275 - DNA, 464 bp, Oryza sativa
  unsure (1)..(464): unsure at all n locations
tggatattgtcgacattgattatctgtgcaagccacagatcatatnttattgatcattaattaatgcaatanacattgcacatcattttgttcagttcaatatcaactggtcatctctggaaaagtgagagaaacaatatgtaaatcgatccatatgggttgcctggattttttcagtttgtgcttattcagtaaataattaaagatccatactcaacaaggcaaaaacccatggcaagaaaagacatatagcatttgaaaagaaagataatttatggggaaaaagtatgatgacatagtactatcttttaatgataaagggctttcaaaccagtgatgcaagatgcacatttgcaaaaggccacctttaacanaaagcatgagaaagtaccaagtctgtattcaaacaaatatgcttgtccctctcttttctttcaagtaatggaatagtgatcagttaatac

SEQ ID NO: 22276 - DNA, 337 bp, Oryza sativa
  unsure (1)..(337): unsure at all n locations
gaattatgtttcttgtgtgggcattgcttttccaagggcggcgaaggcaataagtgatctaatgcagcttggctcttgcccggttggtttgccctagtggggttgtggcaccaccggntntatcttttgcttatgaactctaattgagacttccgctgctatatttatgtgttgtatgttgggaccttggaccatattatgtgtcatgtaccttgctgcactntaaccctattatggtacttgctatgtttattaattgcttgcgatgaaagtgtgaggctagtcgcattcctggggactagccaagcatgagtaacgacgtttgatcgcttgagat

SEQ ID NO: 22277 - DNA, 373 bp, Oryza sativa
  unsure (1)..(373): unsure at all n locations
aggatagacacatacacctcttntgtccatatatcaataaattctcagtctatggaggcctgaaggctcgaacctttatataaatcatctcttgtctgactggacctcagaaggtaacacagacaaatagaacctaggttaacaagctttctattgtcaagaatttaatcgacaacaccaacattgtcaacatagaaatcagttataataatagaagccacaccgaatttaccacaaataatttgttagtctttttcaggaatttatgcaccgagaatctcggcgtgtttcaatctggtagtctttcttttttaggacaaattactgtatataaccacatgcaccacacacagcacacatcaattcatatcaa

SEQ ID NO: 22278 - DNA, 514 bp, Oryza sativa
  unsure (1)..(514): unsure at all n locations
actcagcttctgtgcatggannggcatgttggtggcaccaattngatgttgccccataacctttggaaggtatgtagactactaagctgaaacataatagtaccttgtgtattcttggtatttacagtaagagactaagagttacactgctatagctgtccttcagcaaatgagggagatggttcacatgaaagcaaagctgtttgctcatcccagtccggctaagcaaaaggaagttctttttgaaggaatgctgctcatatcaaatagcccagattctgtgttgactcaatctagcttgtcagtaagcagctcgagtcctgaaattggagaccccaatgaccacctgcaggtggattcaagtcaagacatagtgcatattgaggatcgtagcangtcatactctgaaagggaattatcgaatcttactgctgatatngaataatccgcgtaaacacacaatanagaaagcttggatcaggccttataaatcanacatggtggactgatctca

SEQ ID NO: 22279 - DNA, 398 bp, Oryza sativa
agcttgcccgtcgcggatggatgacttcactgatgaatccggcctccagaagtctcgccacctcctcgcggatgaaggcttgacgttccggggcctgccgccgcactttctgccggaccggccttgcgcccggccgcacggcgagacggtgctcaatcacctccctggggaccccgggcatgtccgctggtctccatgcgaagacgtcagcgtttgcccgcaggaaggagacgagcgcgtcttcctatttgccatccagaagaccaccgatccgtgtggtcttggatgggccgtcgcccaaggcaaccttcttgaccgggacctcgtcgcatgtggcaatccgctgcctcggggcggtgggggcggaggtgccaagcctctcgtcaccaccctcgggc

SEQ ID NO: 22280 - DNA, 429 bp, Oryza sativa
taagctggtgaaaaaggctttttcatggtgagctggaagtaccttttacagagaggggctgctgccgagaaacatgggaccgaacagagatggaaaccgaactgaataggcctcaagaagcttatctgaaaaaggagaaggcaaagacgtgtaatgtagcgccaaaaacagccgagttggtggtggagatcacagtgctcccctccagctcacgaaacgtgactccctgatgcggaaaaggaccttttcatcagtgaaacccagtacccaccagcccagccagcccagccggttgaactctcccaggcgaagcagcgagccagccggcgattcagagcggaagcagccggcgacgaagtgtgagatagcgagctatcgagccagcccagccaccgcaaccgcagcgacgctcgcaggggaaaagaaaag

SEQ ID NO: 22281 - DNA, 313 bp, Oryza sativa
  unsure (1)..(313): unsure at all n locations
taaaacgcaacaccctcctgctgaaggagttgcgcatcttctactgaacctttgtggcggcggccacggcgctggcggccggcggcggctttngctccggttcctgcccttccggcagctgcatctcctctggcggtggaggtggcggcagcgggagtggtggcctgccacgccagaccttcccgggcggtgggactggtggcggcggctttcctgcatggcatgcccgtaccggcggcaacacgaaccgccgcaccgcaagggaaacggtggacgccgccgcggaaatggatgaaggaacagcggcggcagc

SEQ ID NO: 22282 - DNA, 266 bp, Oryza sativa
catatttatgggaaccttattacacattgatataggtaatctgaacaacctctaagtcaatgcttgcttcacgtgttctacctgcaagttcacacacacacacaaaatgcatatttgtatcccaagttcagtaggcatgcaagtcaaaactgaatccctccatggtttaaactgtaaaatggcatttataatttcactgctgaaggttggcatttgatatttgcaatcgctatcatacggacagagatgcttgtcatattctaccc

SEQ ID NO: 22283 - DNA, 301 bp, Oryza sativa
  unsure (1)..(301): unsure at all n locations
ctttatgcatatctggatttggattctgtttaacanacatataggatgagtagtatctgatgtaaatataatactcgagaaaaatgccagtattttaaaatatttataaatatgtatttctccttcttgcacatttgattttcccgagcagatgactcaataacgtttaacgctctgtccgactagtcatagcccccaagcaccgggagtcggcctaagcactttcccaacatgcatatgagtgacatgagtttactactcgggtacttttgcaattgtttagagcagaaaataaattata

SEQ ID NO: 22284 - DNA, 488 bp, Oryza sativa
  unsure (1)..(488): unsure at all n locations
taccttttttcccggatcttaagncacctgcggcatgcaagcttgtatgttgtgaataaataatattttaaagtattgggcatacaccatgcgcacactgctttaacagatgtgcttgagtccctaaaagacacatggtttcaccatacctggaaatatatggcatatgtggtataaaatccgagtaaataaactcataaggatttatcaatcgtctggaaaatgaccaaaatatataatcagcctaagccataatattggtcaataaaaatgcacacttatgtggcaaaaagcaatgatattgtatccaatcaattgcttgataaacccaaacagcgccatgactatataaaaaagtcagcgaggcagctatataaagctttactgtttgacaccttntaagatgcattgtaccaactcctacaaagttgagtaactgcggtataaaaggatnttaaggtattgcgcactagatcacgcgcactttt

SEQ ID NO: 22285 - DNA, 351 bp, Oryza sativa
  unsure (1)..(351): unsure at all n locations
gatagacctctagagccatgtaatgtggggatccctaaaaaattntacgaatcaatacaattgcttntacattccaactactgttaagagnaaccacgcctttgacgtggcatagttttccattcgacaatagctggcgccgtccgtggggatacccataccgaaagggcgaaatgggacccttttcgccacacgccaagccctttgccaaagtaccaataaggtacggcgtcaagggctgcaggcgaagaggtttcgccacacacacgcccttcgccacagtaccaaaaaggtacggcatatagggctgtgggcgaacaggtttcgcccacccacacccttcaccatagt

SEQ ID NO: 22286 - DNA, 396 bp, Oryza sativa
aataacttcacatgactatatatatatcaggtcacattcatgggccaacttctcgctatgcttggctttctatgcatatcgtcacgctagttgttgtaaacgaatgatgatatgtctgcaactgtccatgaatgttttcgattggcttgagcagattgtgtccacacatccaccaatcagtcatacacgcatatcttagcttgtatattactcactccgtttcacaatataatgtaagtcattctaacatttcccacatttatattgatgttaatgaatctagatatacattcatattgatgttaacgacactacatatttacactccttaccatcacgctgaatggtgaaaatgtaatattgcctacattgcgtaccggggagcatctcattttc

SEQ ID NO: 22287 - DNA, 475 bp, Oryza sativa
  unsure (1)..(475): unsure at all n locations
ngaatagcataacatgatgacacaagttactgtattatatgttatcttgataaagatcaaactagcataagagagatacatgcatagcatactgatgaccaagagataacaagcagaacttaattgaatagtgtgtaaaacaatgcataatagtaaacatgatgcaatatgttacatatgcatacaaaagaaaaacaacttcccctcaaatcaaaccatacgggtggatcacccctaactcacttctcaagaactcaaaacgagaacgatcaagtcgtgttgaaaaatgtctgcaagatgtttttcagattcaacaaactctagcgcaatggcacatttctcaacattgactctgagaaaatggtaccatatcttaatgtgctctggtcacgaatgttgaactaaactcatagcaatgttgatcgcacttgtggtatacaaatcacagcaacactagagaaagacatgccatatc

SEQ ID NO: 22288 - DNA, 487 bp, Oryza sativa
  unsure (1)..(487): unsure at all n locations
nngggtaatacagtagtactccactagattcaacttccgtgctcagtaagatgaatgctggtgcagctaanagtcagcgataattgatttaccagaagataatgttcatgtgaggtcagttccatgatagtgactttgtttgactgtcggtaattcttttgggctgtgtttagtttcacgtcaaaattggaagtttgaaaaaattgaaacgatgtgatggaaaaattaaaaatttatgtgtgtagaaaagttcgatgtgacggaaaagttgaaagtttaaagaaaaaagttaaaatctaaacagagccttggtttggatnttcctttcagaagcatgtaagaaactactctaatggagttggtagcatgacatttttttntctttttcaaaggtatgctttattcatgaatacttcagcagtagtagtaggtttcagtggtgcaacagtacctatgtcccanaataagcgcaactatggatatcagt

SEQ ID NO: 22289 - DNA, 419 bp, Oryza sativa
agctcgattgatcatcctcatgctctccagtacatgaaggtctgtggatttcaggccaactcatatctctactatgtacatgcccaagctgacataacttttggaaggtgatttggcaaacatagaagcccatattcctgcttgaatatagattacatctatcatatgatgtctggacattactcttattttcaacttatggtcaccgcggcaaatacaaatgcataacaaactagattgtaaaaatcattaagagaatttattctaaaaataattgttctttgcacggttgatagtgcgatgtcatcaatggagaaagctaggaaaatagattctggaaacgctgaagtgatggccatgcataaaagtgtgagaactggtgcccaagcacgaaccttagggaatgaacttttcattct

SEQ ID NO: 22290 - DNA, 414 bp, Oryza sativa
  unsure (1)..(414): unsure at all n locations
nggattcatatcatcgnnagttnttntattgatcctatgtgttcgtactttaaatccatatagacccttctacaagattgcagctatgcttaatttaatatcaagaacatctataatgtaatatggaaatagctttctgttgcaggctttgccgctccatacttaacctcttttaccctaaaaaagaaacaattttgtacatatattttggaataaatatacctncttcacatataccatatactatatacatagtatacgatttgtccgctgcagntatatgtatgggtcttcttagtaatattntcttgtacatatatagcattattggtttgtctatactaaaagtattttctgcttattgcagattccatatggcgcatgtactgatttcacagttatcatttggagaat

SEQ ID NO: 22291 - DNA, 470 bp, Oryza sativa
  unsure (1)..(470): unsure at all n locations
cactaagcttcggctctgccaccctctccaagagactgtggtgacggactggtannttgggaggcgatgctgctggcctccggtggttgtcgtcaagcatctcgaggcgctcgatgctggtggacgtcggaggcctgacacgacggtgacctcatggatcctgtctactccctccgtcccataatataagagaatntgagtttttgcttacactgtttgaccactcgtcttatccaaaaaatattagaattattatctattgtatttgacttactttattatccacagtactttaagcacaacttttcattnttatatntgtataaaatttgttttgaataaaacgagtgatcagacaatanataaaagactcataatccataatagggacggagggcgtacgttggcgctgcagctcttctgaaattgaattgaatctttgtaagtgcacgtcgaaaggggagtcgggg

SEQ ID NO: 22292 - DNA, 310 bp, Oryza sativa
gctgagtactaaagtacacacccttgctctgatgtaatatatatatagttcctccgccctgtagagaagatacagtgaagtaaagattatggtttcgtcctggttgccagctcgcacctgtggttgttggtgttaatccattggttctgctgctgctgctgttggtgtacacctcgtccgtgttgacagctgtattctcgggctgtatgagctgctacctaagctaagggaaataagtcctctatttatttgaaggattgctatgattcatattttgcaccgtgggtaccaacactatgtcctgggactg

SEQ ID NO: 22293 - DNA, 419 bp, Oryza sativa
cagcttacttggatcagccatgacacaatgctgattccttgttatctgacccgaaaatatcttgaggtcgaagacgggttagtgaatgggaagcatgtgtcaacccattgcatatccacatgacctgcacacatgtttctttatatttaaaccaatgcatatatatttgataaatttctgtggtgacacagacagaactaactataactagcttaccaaagagatgaattgtcaagcctttcagtgtcttcgtgaggtctgaacctgcatatgctgttccatccatgccagaatctgaccattcatctggagtgaagacacggaagccctccatcttgatgtacaaaaaatcatcaacacacatctgtcctttggaaatattcaagtgatatagcgttacatctacctgatggaagcaa

SEQ ID NO: 22294 - DNA, 240 bp, Oryza sativa
ctcctggaaagacttactggtaagtatttgccatactgcccatattggtggtttcaaacaaaaaatgcaaatgacaactgttcttaattttgtttgttgtaaaaaagtagaaagtaaaaaacaaccttaagtgctttctgaattcttattgtgaatgagcttcatggaaccaattgcgagctgccacattaacattgagcgaactcatgttgactgctgagcaaatctggtaattgcata

SEQ ID NO: 22295 - DNA, 305 bp, Oryza sativa
  unsure (1)..(305): unsure at all n locations
tatagatcagcttatagaccccnctaattgcaaggctaatattgaagtgaacaagctcaatatttgccatgtcgtaatctagcctacatagtactagcagattcagatccagggattgaacgcctgattattcttgctgtgttgggtttagataaagaagaaagggtgcatcacaaagagaagtaacattacatttgacccgaacttatcaatatctttggataaaaacaaatactgaacgcgcgcgtgtgtatagggattgtgtgtcggaaacattttctttataaatatagtacttacacaac

SEQ ID NO: 22296 - DNA, 484 bp, Oryza sativa
  unsure (1)..(484): unsure at all n locations
tgcaaatatgctaatctgagctcctgagttntnttntttggtcatcaatttcaagatggtcagaagctaaatgtgtctatttgttactgataaaatatatgttctctccgtttaatcgtcatgaaatgttttgggaaacatgaacttttcatgccccttttttaatatagattaagaatccagcctttacaccacaaggatgcatgtacacaaacacaaccaaagaactntccatgctcctaaatcctaatacaggcaacagcaaaagagaggagaaacatcaccattatttgtctttttcggnggacctgctgagccaaacccctacacaatgttggagttgttaatacgttattacttgcaataataatgtgatgaaaggtccatcgtaccccttgaaaagtcaatggaaattatatagttctaatntatgcggaatttcanagatgtcttcagataattntgtacaaatcatgtgaacatc

SEQ ID NO: 22297 - DNA, 432 bp, Oryza sativa
gcttcatcttttccatcaaatgacaagatttaatttgatcttacatagtttgcctcttagtcttctatattacttattgagttgtggaatgatgaaccaagtcgattatgggccactttgtcttattattacaactctgaaaatgaccgtagcctaatgggagaagaatcatttgaaatggacaagtggcgcctatgagatgtgtgatgaccatcccactatgtttgcacgccacgcaatttttttgtgctaccttttaaattatggcggcaaatgtgcataggcactaaatttgtactaaacattagtcttgacaaacttctcaaaattctctcctgacactaacagggatgataatcttaatatttatgagtgatatgccacacataacattatatgggcgctctcccatgttaaagatgcctcttgagt

SEQ ID NO: 22298 - DNA, 452 bp, Oryza sativa
  unsure (1)..(452): unsure at all n locations
tccttctggatgctggttgaagcggatgacgggtctctgcttggtatcgttctcttgaagttgattgccctttgcttggcctggagtacgtcggagagagacacaacttcttccatcgacgacaatatcttgctgaggctgtcggtgcagagaatggntggtgctaaagatattattgctatgatttattgcagagttaggtggagcaggaggagcattggtgttgggatgatatcgtcgatgctgctgttggagctgactagctgacgagacaatcgtagggtcgttcgttggatttctgcggtcttggtcaacaacacactgagttggcaatccttgggcacatggttngtaccttcgcacacaacacatgtgaccttgcgggtgggacactcccctggtggatgggcttcttcacaataagcgcagagggtgagacacatgctagcaac

SEQ ID NO: 22299 - DNA, 448 bp, Oryza sativa
  unsure (1)..(448): unsure at all n locations
agcttaacatgttaagatgtcacattatcttcctctatcaagatgccacatcatcatccactaacaatcatcacatttaaacatcatgcaaacatgctatatctttataggttttataatttaagagcttttcaaatataaacatattaaattatcatccaacataattcacataatgtttcaatgtatatttttattacgttttatgatatccttaatctacggtccaaactatctccctactttttttcttaaatgaagtcataccaccttactttttacgtttgaatcgccattctacatactatttaaatntaaattatcataaaccatattaatttacttaatctgatgtatctagctatcttacatattattttttattggtaacatactaaactagcatggtggcccgtgcaaattgcgcggctagcatcattattttttc

SEQ ID NO: 22300 - DNA, 459 bp, Oryza sativa
  unsure (1)..(459): unsure at all n locations
ctctagcttgatatatntaaatacaataatatattaatgtaagggacgaatataacatgttaagcaggattaaagatattaaacaaagcaatatagttatatcaggtgagatcggctgaaaccccgattctacccctattggcaattaagaagcaggttagtttttatgattctaaacacgacttagtaggtcaaactcaattgacgtagcactaagtatggaaagaagcataaaatctgaacaatcaagcttttgactgattttcgggatggcggataccttagctaatctaaactagcaaaatgatttagccgataccggcaaaaccctagaaaaggctnggctgatgcaagtaaatcgagccatcaagttagattaatgaagatatatgataatcaacagctacgaaagatagattaagacatctaanatgacatactaatccgctgatgcaaact

SEQ ID NO: 22301 - DNA, 460 bp, Oryza sativa
  unsure (1)..(460): unsure at all n locations
cacctgcggcatgcaagcttaacatacagccatgccacattattttccactgaacatattcaacctcatacaagcatgcaacattgtctacaatatatttaattctacaaatcaacatgcaaacatatccaatcatcaccactcacatcatgttcacaatatntttacaaatctatctatcattnttataatatctaacataaacttatcaatatgttccacattaaagcgcgggtcatntgtttcatgataaatactgataaactctaatatttcatttgttttctttttatccctagcttgattgtagcaaaaatatatatatattgaaaattacttagtaattcctgcagcaaagcgcggngaatcacctagtaattattacgattaccactatggctntatggagtgccaacgtggtggaaaatatttgtgggacctacaaatcagtctatccctc

SEQ ID NO: 22302 - DNA, 472 bp, Oryza sativa
  unsure (1)..(472): unsure at all n locations
ttgaacttntttaccatctttctatcttatttactttcttcatgcaatntatgctagtggtgtactaactactgtatatctgaaaatattttggataaagtattggagaatagcaaaagttcatatgccaataaatatatgggatattatgttatccatgaaacggggtttcttattgtgaatcttggctgaatttttctgcacgaaagattattgtgcgtgtcgtagcaacaattcttgaagaatatttcttgatcttgacagagacatctactctacatatagataatttactatgggtgaacatctgtatatagagtaaaaacaagactatctggtctaatcaatatntagtttacagtcaaacaaagacaatgtctttgtatgtaagtgcctgctcaatattactctatntctgtcagttatctgctggtgggattgtcaaatctcctaacgttgagatgacaatgac

SEQ ID NO: 22303 - DNA, 203 bp, Oryza sativa
gagatcattccaccgacaacatcttaggagacatcaacaagggagtgtccactcgttctcatattgcagaattttgtgagcattactccgttgtggcttctcttgaacctctaagggtggaagaagctctttatgagctacattaagtgatgccgatgcaagaagagatcaacaattttacccggaatgaagtgtggactttg

SEQ ID NO: 22304 - DNA, 427 bp, Oryza sativa
  unsure (1)..(427): unsure at all n locations
agaaggcaacggacggattcaatgaggtgttgggcacaggtgcatctggtattgtgtacaaaggccagctgcaagatgagttangaacttacattgctgtcaagaaaattgataagattcagcatgagactgaaaaggagtttgctgtggaggtccaaaccattggacggacgtaccataagaacctggtccggatgctatgattctgcaatgaaggaactgagagactgttggtgtatgaattcatggttaatggatcgctcaacagattcctgtttagtggtgtcaggcctctgtggagtcttcgagttcaacttgctctcggtgtcgcaagggggctgctatacttacatgaggaatgcagcacacagatcatccactgtgacatatagccncaaaatatccttcttgatgataatntcatagc

SEQ ID NO: 22305 - DNA, 396 bp, Oryza sativa
agcttcaaattacaaaactccaataaagactaatgtgacctttgatatgctcttgaacaagtatgagaagtaaggtggcgagaagactcgcaataaaggtaaaaggccaagatcacctcctatggagcgatttggtcattcaccaagacaatcgaagccacttttccttcatcatcctcaagtcatgccatggggggtttgtccaatgccgccgccgggttatccttttccctacttcatgctatggggggcactgccaccaatgtttgatcatatgcctccaatgcaatttcatcaaggttggggaggaccaaggaggtcagcacatgagccgttgtcttcaccaaacaatggccggttttgtattataaatctgatcaacgaagaaaggagaga

SEQ ID NO: 22306 - DNA, 486 bp, Oryza sativa
  unsure (1)..(486): unsure at all n locations
ccttggttgaatttntgcactctgngaatacgtctctcccctatctctagagcctaggacgcgtgatgtgttttcttggtggccggcggcgaatggcgaattcaccgtcaagtcggcatactcattgctttctgctgggtgcacgcggtgcatcattgggaagattattgcgaagtctagtgctctagaaagatgcaagttcttcatanttttctcaataaaaaggtgcatgtttaactacggacaacctgcgtcgtggttggcatcttgcctccatctgccatctctgctctagagaggaagagacttgtgctcacatctttcaaggttattcctacacacaagaagtgtggagttgtatcagagggcggttggggcttcgttgctcaacgccgatggagaatatccccgcttggtggtgcaatgctcgcaaagcaatcacgaatcgggaaaggagaagttttgatgccggcgtcatcttggtga

SEQ ID NO: 22307 - DNA, 436 bp, Oryza sativa
ctcatcaccagacctcgagttatgccctttctgtgaatggcgctgaggggacactggtttacgaacagtgtacatgcgtaattcataagccaatggatgcatatcatgcgggaatactgctactccgacccctgctggggcatgcgcaactcaaactattggtattaggatgaatatccaagatacatttttttacaacaaatatatatatggtatgtaatgcgctatgttatgaacaaagggaggatttgaccttcgatcccatcttcatattcagtacatagtacgtatgctatatattccattactgctatgtgattctatacatgccacatactaagcggatgaccgatgaatatctcattttaccctattatatattggacaaaatactagggcccccttgggttgacatatacttatatggtctgcgcct

SEQ ID NO: 22308 - DNA, 423 bp, Oryza sativa
agcttgttaaatactacagcaatttattgtttactggagtttaatgatggatgtatactcttgtgatggtaagaaattgaaaactaggaaggtgctatataagctcttcaatattgaaaaaataagtaagaaatctacagcaatatacctgagattcaaaatctagtgaagtgtcatcagtgaccatcacaggtgccagtttcaaagcatcctcaggaggttggtcatgttggctattcctcgaaccaacaattggtgaagaatcagctgcagaattctctctcagcccctctcctgaaaattattaactaacctgtctttagaagaaccatggtgactgcttcttgaagaatacctctcctatgtgttcgatcacgagttgattcgccaagctttccagctgtgatgagttcagttaattca

SEQ ID NO: 22309 - DNA, 507 bp, Oryza sativa
  unsure (1)..(507): unsure at all n locations
cttgcctcggttggtcgaacttccttccataggtatggcgaagtttggcacccaactaaatagccccagtttcaaaacaaacctaaaacttatccaacacgttctgataaaaggaaatgccccctacgggcctaccccaccccctctctctaaaagttcttggtcacaagtgtatatctgtatggaacctgagcaagctgaagacgtgtcttcttctctgctgctttgaatgctttctcatgtgctgtgacagtcttctcttgtttgctttcctgttttttctttagttcataccaccgcctggcatttgcatgcgcagaaagtgataggtcaacctctacctagaagaaaccataaagtgtcacgtgaataagaaaataacatgagggaaatgcatagaaaaagtaagaaacanaagttcaaaacaactaaataaaggtatanaatttaaacaagatcagaataaagcacacatgcaantatcatccttttatccattnccacatg

SEQ ID NO: 22310 - DNA, 439 bp, Oryza sativa
tcagcactaagcctactccggcgaaggtggctaattataattattatggccttatgcacatatcctagctggaaaccatgagagactgtctaagaatataatctctcgtcgatcacgctcgtagtaccaaccggggagacgaccgtgaccagccaaggaaatgaccatcttaccaaccacgtgagatgtcccgaagctaaagcgcgctcgggcaccaagaaatcatgcccacattatcgaagtagttagttagttaccaccagaaagaatcatccatggcgtccattggcagcaggtacgtatactcgtacaagtagtatagaattacgtgtagctggtattgtgcgagacacgccgctgatatgatggcgcggctccttatagagtaagcgctgtcactatgatgccatttcaccatactaaatttattaaagtgtca

SEQ ID NO: 22311 - DNA, 403 bp, Oryza sativa
  unsure (1)..(403): unsure at all n locations
tcgccagctcatcgtcgtccacaagtgaagcccctataaaggctgtggagtcgtcgtcgatccggccgggatcagggcctgtcgcggaagcggngttcggcttgcgaggtgccatggtgaaaggtgtgcgcggtggcgaaaagggagaacaaccgaaagatctaggaaatcaaggggcgccgtgaaaggaaaaaatggagaaggagagagcgctcgcagtgaaaataatgagagtgcggcggtgaaaaagggaaggggggaatatatagcccacccaagcgacggttcgcctccccgcccaatcataagccgccacatgtcacaagggtaggcgaaacgggaaattcccatcgatcgagccgcacagtgataagcccacaaagggaaagcccatcactgttca

SEQ ID NO: 22312 - DNA, 455 bp, Oryza sativa
tgagctgcagcttaatacttctttgagtgatttgtctaatctctttcctgtatgcccctgctgctgggtatatgtgtgagtgcacatcaccaccaaatcttttcacaaagttcttcatcaaatgccagaagcattccctctgctcagcatgctcaaacacagtatgtacaaaccttttctaagcctttacatgcatcagtacaaatagctaatggattcacatctcctatagccttatgaagttgtctcatgaaccactcccaattatcctaagtttcagcattaatggacccaaaagctaaaggatacatccagtgatgcccatcaacagaagtggcagcagccaaatgaccattccatctttcattcaaagcaacggaatctatactaatatatggcctacattcctataagaaaccgtctatgcagggcctcatagcatagataaacctatg

SEQ ID NO: 22313 - DNA, 353 bp, Oryza sativa
ctactatgatcctcatcataaatatctatatataaaagtaagttgtattaaatagaaaaatagtttcatattatgatagttacatcaattttacatggatttttatatttttgctataatagtcgaagctaaaattattcgacttagtattatactaaaaatggttgtttatgtttcacgacagaagaagcagtatataagtagcgtcgtcttcgagaaaacatagttattcaccggaattaatgagagatgttaaattaaataataactgattgtgattactagctagttcagacgctaaaatatatgaagaaattccatcagaaatgattatataattggattaagaccag

SEQ ID NO: 22314 - DNA, 474 bp, Oryza sativa
  unsure (1)..(474): unsure at all n locations
gcaagaagagaaacatgctaagccaggttgatatatatgaaatggcacatgatgcatgacctgatgcttcacttgcttgtagggtttaattgaatattacatggcattaagctaaccaatagcttgaaaaanaaatccaagcaatactatttctaaatcatanttttagatcacaatattggaaaaaaaggttttgaagaaatcatattttctaatgtatgtcacgaataatctactcgataatccatataatctggttttagctaattcaaacaggactttgtgatgctttccctgtgtaagatcgatcgagatgtttatcgatctgtgatgctcttcccttcattgatttgttcaacacaaaanaaagaattagtggactaattacaggattgcacctttcattcacagataggactacctccatcccanagaaacctaaaatgagatctaatacattctaatactacaaat

SEQ ID NO: 22315 - DNA, 397 bp, Oryza sativa
cctgcagcatgcagcttacgggacttggacctgaccttgtcttttgccaaccccgagaagacgcgagccatcgagcggatgcgccaccccagcaacactagggatgtgctatgcagtactggatgcatgggcgccctacgacgctcacataaagggcgggagagaaggcgctacccttagataagctcctaaagcgctcggggccgttcactcggacagaggaagctgaaaatgccctcgcccagttgaaggcgtatcataactctcctcacggtctagcagccccgcagccaaacgagctcctgctactttacctagccacgaccccccaagtattagtgcactgttggatgtggagcgccatgcagacaaccctcattcaggggcaccccactct

SEQ ID NO: 22316 - DNA, 452 bp, Oryza sativa
agcttcagctggtcatgctgaggcaatgttgtgttctaccgcacaactctcgatccatcttgctctgtgcctgcttcaattggacctatcgaagtggccaagacaacctcgtgatttctgcacctgccagtggagaggcaataagctactccagcaggccaaacattcgcaaaggtgggcaagataagaagtttcttgatgctgggactacgtaacttgcacactcccgttgcctcctaagcctagctatatgtgattcaacgtaagtagacataattgtattcagactttctgcctctaaagtgtgtgtggcttgcattactggcctggctccgtttttatattggctttgaacctacttcctctccgtttcacaatgtaacatattttagcattgtccacattcatatagtgtgtgtgtttagattcattaacgtctatatgaatgtggg

SEQ ID NO: 22317 - DNA, 480 bp, Oryza sativa
  unsure (1)..(480): unsure at all n locations
agctntcctgacactggtctgaccacacaaacttcattttcttcttgagtagttgtgtcatnggncgggctatcttagagaacccttcaatgaaccttcggtagtatccagccaagcctagaaaactccgaatttcagtcacagatttgggtgctnttcattccgtgacagcctccactttagcagggtccactgctactccaccggctgagaatacgtgacccagtaaagcgacttccttcaaccaaaattcgcacttgctgaattttgcgtataacttgtgctttcggagtttctggagaaccaatcttaagtgttccgcatgttcttcttcatctttggagtagatcagaatgtcatcgatgaataccaccacaaacttatccaagtaatccatgaatactttggtcataagattcatgaagtatgccggggcattggntagaccaaacgacattactgggaattcatacaacccat

SEQ ID NO: 22318 - DNA, 233 bp, Oryza sativa
gtgccaacgatgaagtcaatgccgaaggctcacatcagcatgccaaacaaccgaaacccaacgatgaattcgaggcaggaactcatttggcctctcattcttctccaaccattctcccctgaccccctcttatatataatccaaatagatgcatatcgatcacaaagcacacacaaaagccgccagggacttaggccacttagcagtaatccatggctgaacgcgaaggagcc

SEQ ID NO: 22319 - DNA, 485 bp, Oryza sativa
  unsure (1)..(485): unsure at all n locations
acggacacttanaaactcagctntctttagctggtntgctatgtgaatcttcaataatgtagtctactctaagttgcacgcatcatattttacaaagcagtcggtatatcacttggatcatattattcatggattcacacatcatatgctattatcgaaaccactcggttgggtagattatttattccttgactatgtgtttggtgtgttcaattaaccacatagtcgggggctacacctattaagtgcatctagtcgatgcacctgactttatntttcagccctccacagtctttagatttggtaaaagtactcgggaagtcatggcaaagatgattgaagcactcggctctggagtaatctagttcgagagaatattatcctttcgactgtgaaggtctcacgggctactgtggagaatatgggtacccctaccccacggcatgttatccgctagtatagggatactatattatgaaatgtac

SEQ ID NO: 22320 - DNA, 483 bp, Oryza sativa
  unsure (1)..(483): unsure at all n locations
ntcgnggaccacactagcttaacagcataccactttatatattctattattaatacacatacgtactctctcgatctcaaaaaaatacattcctagcattttgaggtggaattaatggagataaagaatgactgaaataccattaatcaataataaaagtagtaatagcgataggtacgttaaggtattgaatgaataaaactctttattttacgtgctaatgatatataggataatacaagttggctttttataggataaaattcaaactatagaagttgagtttttctttttatggatggagtatagcacacacaaccacgtanggctaagacaaatgttggaataatcacaacgggtcagaaacatcgactactcatcatgaaaagtcgacgngaggtacaagatactacagtacatcgtacgagctctactggtgccaaagaaattaacaagatgtgaagttacatgcatgcaatatac

SEQ ID NO: 22321 - DNA, 430 bp, Oryza sativa
  unsure (1)..(430): unsure at all n locations
tcanagatgatctagctgttcagaccctcgccatctgatgattctgttttgtgtcccccacctggatgggagtagatgccttttgccttgcgatctgtggatgccttgttgctctcaaggcgggtgatggaggccgtatgctctcccaaggtgatctccatctttttcaactggtcgaggatggctgccagcgcaacgttgctctgcccattgttccttgtgttcccgacatgttcacaggcgcangaagatgctctgataccaagttgtcacggcccggctgtcaggagctgggaattgaaatggatgaatggtctctgagctaactgaatatctgaagtctgaagattctgaagaaaatgcattggaaggatgattatgagaaaagaacggtcacgattaatcgcgaatcggaatgaagatctgagag

SEQ ID NO: 22322 - DNA, 405 bp, Oryza sativa
  unsure (1)..(405): unsure at all n locations
ctaagctcgcatacaattgatgttcccgcaactttcccaacaccagacgtatattgtgctgatggtcttcctctgattgtgagtatatcagaatgtcatcaatgaaaaccacaacaaacttatccaagtattccatgaacactntgttcattaagttcatgataaaggcaggtgcattggttagaccgaacgacatcaccgtgaattcatacagcccgtatcgcgtggtgaacgcggtcttagggatatcttcctcacggatacgtaattggtgatatccggaacgaagatcaatcttggagaatacagtggcacctttaagctgatcgaacagatcatcgatccggngaagagggtacttgttnttgatggtgacttcattgagagctcttgagtcaacgcaca

SEQ ID NO: 22323 - DNA, 200 bp, Oryza sativa
ttacatattcgtgcactaacacatttctttcatatgcgacatatctctatcatgcaactcagcttgaaatggtacattaatgtgaacactcctgaggtcaactccttcaaagaaaggcgtgttctaactttcatataattcgagtatatttggtccactcttttacagattcccatctaggctcatctgtgcgcttttac

SEQ ID NO: 22324 - DNA, 450 bp, Oryza sativa
tgtgtggagaagatatcgccctcttgctcctattgtctggttgtgggaggtgcggcctgctgtcaaccttcataccatcgtccccaaaatcagtatcatactgtgattggagatcttcatctctttgttctacagcatgagggagagatacaacagtttgatggggacgcgtcggcggcggacgagaacttggcgctggtcttggagttatattgatctcaatgctgtgcttgggccattgataaaggttccacgtgcagccgcacaggtcagaatctcgtcattaagtgggtgtgggatagtgtagccaacccaatctggctttactaatatcacctgaactttggcattgccggcttgcagctgcgccccatgcacttcggtcttcagggtatgcttgaatgctcgaccctctgtggcatgaattgcatatcctggtgtccccctatg

SEQ ID NO: 22325 - DNA, 304 bp, Oryza sativa
aagtaacgccactcttcttagcgatcatgttattttacggtcgatcgatgaattcccgaatcccttcatctaccactcccctagcaactatatactgatcaattactaaagaatactccatctatgtctcggcgaactaatatttgaacacttgccaggcaatcttgtgacctagcttaagtgtgagatctcacaaatatctaatataaggaaattcccaagctatttctgactcatgggcacaagatgtccgaattcacaatttattcggccttataatcaattgtaacgtgcccaccagctc

SEQ ID NO: 22326 - DNA, 365 bp, Oryza sativa
  unsure (1)..(365): unsure at all n locations
gacgtgagaatgtgttcaaaaaacataacccgtatgtgcgttagcatctgtatcctacgaacaagaaagctgacgttagtttagaatcaggttaatgcatataaaatgcacaaaatagactgcgggttggttaggtagtggataaataggccctaccaattttggtcaatgtcaaatttagcaagttttggtatgtgtaaattctgataagggaaagttgtgtttggattgaagccacaatagcctaaattcactattgaaatgacctattttctcaggccatgccaaaattggcttcaaccaaatacacactanacactatttgaaataccaaatattatgcagccctatttatgcctttaacc

SEQ ID NO: 22327 - DNA, 205 bp, Oryza sativa
agcgagaccgaactcgcaacttcctgcggacccgacaccctatcatgtgtaatatatgcggcggagcggacactttgtaaatttccctataccgagacaaagatttttgatgcacgtattctaaacaagtagcaacgtcgccctacaatgcgtctatcttgcgatcctaaaagattattatatgttgaaagatgacctgattttt

SEQ ID NO: 22328 - DNA, 204 bp, Oryza sativa
atgatgatttcatgcaggatttggtggaacaattgcaagagagagtgggaagttgctaaccattgttcagagtatatttcatgagactcttcctgtcgcagctctatgccttacaacaaatttctacattatagatggctcctatccatgttatgagtagaaatacaattattctttgatttattttataacttattttgttgt

SEQ ID NO: 22329 - DNA, 459 bp, Oryza sativa
cgaactgactttctctgacatcttatattcggactatcagatacactaagtttgcttggtgacagcccttgtgatgtaatgccttttctagccttgttgtgaatctttggagaagaacataacgtaaggttctgcattggtgacaggtgcggggaggcactaactgatagaaaagatttcctgtcagacacagtgtcttgatcaacttttgtactggacaacaactcatgctcttcctgaatcgagtcttcacaatcatctattacaggctgatcatctttctcactaggttttggattccacttagagcaaggagtgtcatcaccactctcttgatccatgaagtcatcgaaagtgtcttcatatgacgaatgaagcttcctatttggcacgcagtcttgacatctcttatccacatctctttctttgatcacttctatgtatgaagatagaagcgat

SEQ ID NO: 22330 - DNA, 367 bp, Oryza sativa
agctactacgaggaatcaagaccgcattctacttttcaacactgcttaagtgccaactgttcggcagcaagtttcaactctaggctttcgaacaaaccaagcaccaatccatgctgccatgatgtggttgcagccaattattgacccatccgtggcggctcagcaagtaccaccagatgggccagtctgcttgagggcgaactaacaagaaaaatcggcaacaaggagccgcagatgctcgagcacctacttcgcatcattgacgggttcacaaggagtgaggaggattcttaacgacgaccagctatacgtcgccgctgctcaagctcaagcacaagttcaagttgccgaaccacctcccctctct

SEQ ID NO: 22331 - DNA, 484 bp, Oryza sativa
  unsure (1)..(484): unsure at all n locations
gcaagtgccaccctcaccgatcatcttttctctcccaagaatccaccaaagtatccaaagagatcattctaccgacaacatcttatgagacatcaacaagggagtatccactcgctctcgtattgcaaaatatttgtgagcattactcgtttgtgtcttctcttgaacctctaagggtggaagaagctcttaatgatccggattgngtgatagcgatgcatgacgagttgaacaatttcacccggaatgaagtgtggactctggtggagcgacctcggcaaaatgtgattggcacaaagtggatcttctgcaacaagcaagacgaggccggtgtcgtaataaggaacaatgcgaggttagtggcgcaagggttcacccaaatcgaatgattatattncggtcanacttttgcgctcgtggctagacttgagtcgatcgcatattgcttgcttntgctactaacctcaattttaagctatatcaa

SEQ ID NO: 22332 - DNA, 386 bp, Oryza sativa
ttgcatggttatttcctctaacaggaatggaccaacaatgctgcacaacatctgaaaagcctgggacattgacccaaaagttctcatacctgaagatagaagatattggcactgaagtctcaattgaaatctgacagggcacatgatctgagatgtactctgaggttgctgtgaccatggtgtgagggaacttaagagtccaagctattgaggtaaaaacccaatccagttattgcagaagaggctgctcttgcatattgctccaggtgaagtttcttcctttgagagggatttctactaagcctgcattgctgattatttcattaaagatgagaatgtcattcatgtctcctcctaggatgtactctgtctcaacagaccttata

SEQ ID NO: 22333 - DNA, 425 bp, Oryza sativa
gcttagaagaactgatgaactgtagttttcactcttattgtcagagcgccagtgcagtgtctgacaaatagaaaaataatagttcaacaaagcatgctttagggcatatatagattaacgattagcgggataatgacttataaatacctgatgcttctcagagcagtagcgtgctttcttgcagctactacagaagttatcaccttttcatgtaccgcaccaatggcagacaggagctgacagcatagttgaataattgaaagaaatctatattatttgactatcaattaaaacaaagagttcaaccatgaaaaatggccacctattaataaaagttaacacacgttaacaaggctgaaaaagaaaaatgttgcctatgaaagcatgtcacacaagaaaattctagcactagcataacacataaa

SEQ ID NO: 22334 - DNA, 415 bp, Oryza sativa
  unsure (1)..(415): unsure at all n locations
tcccagaaaatcaagcaacctgaaaacaccaaaggaattccattgccctgatccatggngtcacatggtatgtatcttcggagcaagctgacagccagaaacagtggtcacaagctggaaaatcaattttcagtcaaggcaagcagctgcatgcggccaccaccaaactgcctatcacaattgttgtcacgtagtggcagcctcgaataatacaagtcgctatcgtgccaaggctccattggaaaggagcagttcacctgatatttggtgccatgtagaatgggagatctgcaagtagtagaacaatatgatatttttggagaacaagcttaactgtaacgctcactgctggcaaccatcatcangaggagagaatatcatttcttgtcagtagctaatgaaatgcgtgatgcca

SEQ ID NO: 22335 - DNA, 439 bp, Oryza sativa
  unsure (1)..(439): unsure at all n locations
agcttcngcttcatacaactgcatgtacatcctccatccgcctncaagacacattcctgcacggcttgcttgcgatagataccacgcctgctcctatcaacacacattatttcataccgatgcacttgtgtgccttgagcaacaactctatgtctccgcgcctttttgattttatcttccatgtactttgtcactacgctgccaaacacttatgttgtatcggccatggacggaccaattttcttgtatcgatccctaaagtacgcttgcgtgccgtgaaggatgaattcaacaatagcaaccaatggaagtacccgaactcctcgcattacccagttgtacacctctgccaaattggtgtcattatgccataccgagatccatcggtgtcgaacaatagagaccacttcttcttaggctcattctcaatttactgagt

SEQ ID NO: 22336 - DNA, 480 bp, Oryza sativa
  unsure (1)..(480): unsure at all n locations
tcctagggcctgacaacaagctactgaaccacatttcatgctttattgcttcttggaccacgagaaaagttcttattataatcataacgacgaagctacacgaacttgtagcttataactaaagtagaagaatgtggagttaacattgtaggggtagcatctttttttttgtcacatacaatcctaagtttgcctaaactaacagtgcagctattcatcaaattatatagtatattaagcctgaactaattttcacatgtccaactaatcaaatactctgtatgcaatatattaaaaagaactctagaccagttgtttgaaaacattttcccataattttgattaatattttgatggcccatggtacatgttcatcactgcagggttcccgtaatctggatntatgctagtttcgattancaacttcatatggggtacaccctttgtcagacaggaactttatataggagacagtactgt

SEQ ID NO: 22337 - DNA, 286 bp, Oryza sativa
aacaaaaatcagcagagagcgaaccagcgaagcacacctgcgggcgacgaagaacgacgggttcagacagacgacggcgacttcttactcctcctcccttcccttcttgcctttctctcgccgctcgctcgcgctgtcggagtccgccatcgccgccggtgactgcaactgaagtggacatggccgcggcggcggcgaatctgcgacccacaccctttattcgctcgtgggctatacaaaggccagagtcatgggctcataatcaagtgggcccaactcgattaca

SEQ ID NO: 22338 - DNA, 314 bp, Oryza sativa
tgtaaggctataatccttacgtacttgataggaatttatatgtatggaacgaatgacgcatataggatataaatcctaatgtttgaattcctaccataatcctataaaaaatctttaaaccgaatgagcccgaaagagagagagatgatgaagaagatgatgtgacatgaaaatcgctgacacgtggatcccatctactgacttaacaagttaaaccctggtcaaactgtcatgtcagtagaaaccacttccataacgatcgaaggagttgattttcactactttccgaagacaaaaataagccttcgggagcg

SEQ ID NO: 22339 - DNA, 451 bp, Oryza sativa
  unsure (1)..(451): unsure at all n locations
ntgaagagcaagtggctttgtctacagtaacctcttccgtgtcactactatgtgtgtctactacagtcggtcgaggtgatgcactaacgaacgaagcattagagtgggcagcatatgatattggtgccaaaatagcgtgtgcaaagataacacgtttcatgaatgacattgcggcatttaatgtacaagttaattacttggattggtccttaattagtgaatgtaacattntaacaatataatgcacatcacactgtttattcgtagagttcataatttattcttcattntaaaattatttatcgctctagttntggcctaaatcagacattgcaatctttaaccatcaaggtcatgaaatttgtgtagtttcacataataaaagttatgttcttagattcaccatgagcaatacattcatagtttataactcgcatattgataaactata

SEQ ID NO: 22340 - DNA, 391 bp, Oryza sativa
tgatctgttttagaagaatgctgttgttagttagctgtgaagatgacaactggccaatccatttgtttgctggccatgccggacattcggccataaaacatgcatgatgcccgtgcccaacataactgtagaacttgttgcatttggattgaagatattagttatttgtttgattgttgggtctatgtctatgtctaagaaactaggttggcttcgtctttttaattaagttggatcagaagattttggctgtttcgtgcaaataaaaaatttgttgagatgcactatctcttccaacattttgcaaaatatgtatgttccttattatcagaaggaaatattctagaagtgactatctttaaatatgcgtgcattgtactgaaatgtaaac

SEQ ID NO: 22341 - DNA, 438 bp, Oryza sativa
  unsure (1)..(438): unsure at all n locations
ctactaaccatatgcttgccttaacttgataggcatgtttctgcttgctcgctgtgtcttgttttgccaaatctgtggcgttctttttctctgccacaagtgcggcaactagcttaccttatgcgtggcaatattagtcccaaaccaaacaggcccttagtccgtccccctaagctcctagctatctctcctaatcctatatgtgcactttgtcatttctcgtgtttgcatgagcgattggtgttttgagttgatgttntatttatttctctatcaatgagataaggaagatcttttatctatgtttggaaacagtagcatgtactacggaaattgctattcatcacttgagggaatatccattcatttntntaagggctatgtgctacaccatatacgagttatatgactatgtctatgtttcgcaagaataatata

SEQ ID NO: 22342 - DNA, 168 bp, Oryza sativa
aaattcagatgatcgcaaacctattggaatttaaaaagaaaaagatttatgaatgggcaatttgccttttcacgggcccaataggccccaatgggaggaaaataatttggaacctttgtttgttcttggcgaatctaccggtttccctctcttgcgagttgcctcatg

SEQ ID NO: 22343 - DNA, 435 bp, Oryza sativa
gctgactgtcggtcgcagtctatggagatttgagtgaatcttctatgaagcttactaaagacctacgagtatgacttatacgctccacccgaggggtagtctacagacagtctagtaccatataagactctgagtgaaacttgcttgcacaagacttgcaattcaaggcgtagtccattggtcaagctgtgagtaagtgtagcttggagtcctaggtggatgttcaaccttaatcggtctccatcgaaccgctggtatataaacagtacattacagaaggcacatctcattgggattctgagatttggtgggggattgttggaattaatagatatgctaacgcccattctaagaataatcctttggagaatcacaaaagcccacctcatgggatggcatgcatgtggagttaataccaccttgcttatttaggag

SEQ ID NO: 22344 - DNA, 388 bp, Oryza sativa
cttatggagcaaggctggcattggatcaaccacactatcttcaccttgactcggaacctaattaagctatttctagagcctaagacctcaggccgcgcttcaccatacagggttcaacctctaccagcaaattaagctgtgtaaagcttgctatcaatattattactagcagagtaaaagttttagcagtcggtatgattatgaaggacttatatattccccctgagagccacttgggaaaccagactgacataattatgcactaaggtgggtccttggtcatcgatgaatgattatgaatattctcctaaagaggtcgccaaattccatactccataaactaaagagtggtagcactaataaagcggctgcccttcgactatataac

SEQ ID NO: 22345 - DNA, 441 bp, Oryza sativa
tgaagagaacattttgtttctttattatactggagatctagcaaagcacagcttggcaatgtgtggtgaggatcgaccatccatgaagaaagctgcggagtaactcgataggctggttaaggttaatgaacacccatggacgctacaaaatcccgtatagttggagagcttgctagtagaatcttcttacattataagctcaagaacctctagtacacgaaatctcatcatccataagaaagttgtcaaggacctaacatcatggcgttaagctggaatctttttgctacccaacgtacatcatatcaccatattataccgcgtcatattggatcataggtttcacttactctatatatacagactcagtgatgttcattttatacaaatcttgtggataataataaaattgtttgtgacacctttatctttatggactat

SEQ ID NO: 22346 - DNA, 449 bp, Oryza sativa
  unsure (1)..(449): unsure at all n locations
agcttacaagtaaaccagatatggagatggcgactaaagatgctggttccattnttatagaatttcaagattacaatggatctacgaaaagatcgtgtatttacaactacaacggaatagtatacaaagtcaacacaaatcattaaatggaatttatggctacacaaaccgttgaagatagttctagacctggaccaagacaaactcgcgtaggtaatttattgaaacccttgaattcggaatatgggaaagtagctccgggttgggggactactccttttatgggggtcgcaatggctttattcgcggtattcctatctattattttagaaatttataattcttccgttttactggacggaattttaatgaattangtttctactaacgaanactacgaagtcataggttttccatccaaaagagcctttctactttaagctctacat

SEQ ID NO: 22347 - DNA, 469 bp, Oryza sativa
  unsure (1)..(469): unsure at all n locations
tntcttacttagagccatngagccattatataccttattctattatggatcttctacggggttatntctttcattcttgctcgagccggatgatgaaaaattctcatgtccggttcctttgggggctggatcttaaagaattcacctatcccaataacaaagaaacctgacttatacgatcctgtattaagagcaaaattagctaaagggatgggacatatatattacggggaacccgcgtggcccaacgatcttttattatattttccagtagtaattctatgtactattgcatgtaatgtaggtttagcggttctcgagccgtcaatgattggtgaaccggcggatccgtttgcaactcctctggaaatattacccgagtggtacttcttttccgtgtttcaaatactccgtacagtacctaataagttattgngcgttctcttaatggtttctgtgccgacgggct

SEQ ID NO: 22348 - DNA, 402 bp, Oryza sativa
  unsure (1)..(402): unsure at all n locations
agctccttnttttctacttatagangtacttactcttcatcctcgtggcgatcagctgaagataggagtgcgcgtctgtgagttgagatgctacaaagctgcgtgatcacttgctgcatacttgccactctatgtcattgagcacccagctcactcaaaccatgttccaataattttccacctaaacgtcgatataatcccctcaaaaataaactttgatataatccgtgcacgcactccgagttatttttgtgaagcaaatgaactagcttgtggagcttctctcctcctatgcagggagctctataagcaaggtgaagcaccgcggaggtgacgattgatcagctatgaaagacttgagctgtcaagatgacaccacgcgcccagattcgggttatcctt

SEQ ID NO: 22349 - DNA, 313 bp, Oryza sativa
  unsure (1)..(313): unsure at all n locations
ntcatgacaaggcactttcaaagccgtctcaagcttaccatatgtctgcgagaggggtcccacaccaacaacaggttacggtccagaccatactgtgtccagaagccctaggtggttctctccgacaccactcgcgcgaaaccacatgtttctcgacatcatgcgctgcgctgataagcttaatactcagcccaggggtgttccacatccacctatagtggccgcacattgtcttaatgtacggcatgatattctcaaggaatcgcgtccttatgtgcgcgaagcggtaaaaccgtacacccgtacgttcccg

SEQ ID NO: 22350 - DNA, 410 bp, Oryza sativa
taaagttgctggttccatctttatagaactgcaagactacaatggatctacgaaaagatcgtgtatttacaactacaacggaatagtataccaagtcaacacaaatcattaaatggaatttatggctacacaaaccgttgaagatagttctagacctggaccaagacaaactcgcgtaggtaatttattgaaacccttgaattccgaatatgggaaagtagctccgggttgggggactactccttttatgggggtcgcaatggctatattcgcggcattcctatctattattttagacatttataattcttccgttttactggacggaattttaatgaattacggttctacttaacgaaactacgaagtcatgagttttacatccaaaagagcctttctactctaagctc

SEQ ID NO: 22351 - DNA, 486 bp, Oryza sativa
  unsure (1)..(486): unsure at all n locations
cttcttacttagagccattgagccattatataccttattctattatggatcttcnacgggggtatttctntcattcttgctcgagccggatgatgaaaaattctcatgtccggctcctttgggggctggatcttaaagaattcacctatcccaataacaaagaaacctgacttaaacgatcctgtattaagagcaaaattagctaaagggatgggacataattattacggtgaacccgcgtggcccaacgatcttttatatattnttccagtagtaattctaggtactatngcatgtaatgtatgtttagcggctctcgagccgtcaatgattggtgaaccggcggatccgtttgcaactcctctggaaatattacccgagtggtacttctttcccgtgtttaaatactncgacagacctaataagtattgggcgtctctaatggttctgtgcgaaggcttttgcagtcctttttagaaatgcaat

SEQ ID NO: 22352 - DNA, 500 bp, Oryza sativa
  unsure (1)..(500): unsure at all n locations
tctatcggtagagaactatatatactaagttatggtagagaaatatatgctccacctgattatacttttcaaggggtanggcatgacattacctttatagctagaatttacaactacaatgtatatgtttagggttaatcattaactttacatacctactcccttcggttctatattaattgacgttttggacaacgttgaggtcaaacttttataactttgaccattaataattgtataaacatctagtttaaaggaaatagaataatatatatatatatatatcagtcttttaaagtactgtaataaaagtaaacatgtatttatttattatatatattataatagaaaagtaagatcaaagatgtatcttgtagaccgtgtcattatctataacgttaattaaaatggaaccggtgggagtaactaactatcaaactcccctgatgttaccggtccaatatttgatagtggaaaagagcttgctcattatcatgtca

SEQ ID NO: 22353 - DNA, 397 bp, Oryza sativa
agcttgtcgagtatttctctgggcggttttcaagagaggcggaggcgaatacaaatcctgtgagacgccttggaaaatgggatctgcgacaccattgacacacatcatcgccgctgttttgctgctcgatacattattgcatgatgtggttttttttgcatgctctattgactgtaaatatgtatctgatgccctctttagatgtacatcttaattgatgcatatatgcggatttaaatcacagcatgcatgatgtgtaatgtttctttttccaaaaatcctttctgcacgtggcgtcacttatagggtgctttcaattaaaaatcagttatctgaaacgaacgtggatttacctgtaaaatgatgatattcccacttttgagcgccataggacgct

SEQ ID NO: 22354 - DNA, 446 bp, Oryza sativa
  unsure (1)..(446): unsure at all n locations
gctgaaactgngatgaatgcacaacaatgatgaggatatcttttgtgttctcatactccttgagaaattagaacatttaanacaaggtgacaaaactgtgcgggagtactttcataactntaaaatttgtctcacttatagtggtttaaaagaaagcaatgagaacataatgactagattttttagagggcttaattccgatattcacgttgggcttattaacgtgacatataatcatataggccacttgttcatgcttgcttgcagtgttgagagcaatattttaaagaacccaagggagaaacaggttatgcttgtgcttcctattactgacattttgcagggagctcagaacattcaccatgaggagaagagcaatatgctcgagatgccatctccatcgctcacgaaggaagaagaaaagactgatgcacctatattatctg

SEQ ID NO: 22355 - DNA, 348 bp, Oryza sativa
caccatgtaattaatggggccacctatacacttaaattacccactggccagtctccacttccacgtgatcatgcctatatggacgacgcaattgcacatacaccattccatcgccattcaaccaattgtaaatctcctcttctgtagccaccagttcattgctactccttgactctacgagtatgtacgtatcatgcatctaggatcgcccatggacatactatctttaacaaaaggatgtgtttttttgctattaagataacaaaacatgtgacctttttcctaagctcttcttttcctagattataattaattagcataagaatgtgctctctcattacatatata

SEQ ID NO: 22356 - DNA, 434 bp, Oryza sativa
  unsure (1)..(434): unsure at all n locations
tattacggacctatgaatctcagcttcctaatattggatgagcatgttctatcagctaatcttgtctgcttccatctgcagaaaagaaagccgccatcaatttggcacccactggtgatgccagactgatatctttgtaaagaatgacggntagtgtattaaaatcctatatattcgtttagactctttggattatgcattcagcatgacattgactggtacccctaaatgtcaaccgacaaccggcacaacttgattaagcatccatcaattcatttctcttctaaaaaggagaaggcaaaccgcacccaaaatgaatcgatacacattttcagcttgcatattctatggacaggtatgttacagtgtataaaaaaacaaaacaacgatatgctttacattctcaagaaactagcatgaactcgacctctatg

SEQ ID NO: 22357 - DNA, 465 bp, Oryza sativa
  unsure (1)..(465): unsure at all n locations
tctngtgcgcctgttatcttggccatgcactcatatgtcatattagtgnggngaacattccaatggagggtaatttagttaccatggttgcattgtttgcattatgctattatccgccagatcactctaatgaggccatctgtggatcactcccatgaggccatctctgccactcactgagtggctttacttgtgcttcttgtcaccttacagttcacatgcactcattgaactgaccacctcanggtccttgtgttcgtagttccgttttatgtaacagacttcatgacatcactgtagtgtagtcctgctacccatgccatgtcacctattagtcattaccttgttgcattgactaatacatgcttgaaggttccacctgagcctgggagcctgtanggattttcgctattgtcttatcatgtttgacattgaaaatgtgtatgtggagcccagaagataaca

SEQ ID NO: 22358 - DNA, 209 bp, Oryza sativa
accctttcttaatacttatcttaaaaataaatcgtgctaaaaactaatcatgcgcttagagccatcgaggttaacactgagcgcggtcgtctttattctaacatgtttgaccgtttgtcttgtttaggacctttgtgaaatatgtgaaactatatgtcaccctactaatatctttaacattaatcaaatgatatgagaacaccttatta

SEQ ID NO: 22359 - DNA, 263 bp, Oryza sativa
ccaaaaccgtctgcaatgcagaacggtttctgtaaagcaagccattaccatgagaggctcttgtgatcacaatgacaccacccatgcaaaaatgatccttaactgcattgaattgagcttctaaactattccggggcgaatctgaacataacctgataatctgccaagggaatcaatctttgtctagcagaacatatcgacaagctaaacttgaaataatttacctggtcgatatagcagttttctgtaagaatatgagacgt

SEQ ID NO: 22360 - DNA, 437 bp, Oryza sativa
tatcggaccaaacggattcaggtcatgatccggtagaaaaattcaacaaatataattgaaacaaggccgacatttcccatcagcttaatccactgaataacaacctggattatcaactttggaggtggaaaacgccgtatccaatctgagtttgattatagcgtaatggattatgtaggaaaaagtcaagtttcatctaattctccactcctaacttcttgcatcttgaatacaggttccctcagtaagacatccctataaaggcacagacttattgacttatcgcaagttcacgtaaaggcacagactgcagcaatcaactggaatattgaactgccaggaaaatgtaacttctagtgcctactaaattattcatgagtatttttctttgacagacagagtggattctattgggaacaattcattcatttgtctct

SEQ ID NO: 22361 - DNA, 366 bp, Oryza sativa
tgctccatcgtatccgaagctggggcgggtggtggtcggtgagacagtaaacctgtgtggcacatcagcaggaggaccatgtgctggcggcgtatgaacaagacgggttggcgtgggcggcatatgaacatgagttgcatgcgcgggtggtgtatgatcatgatgagcaagcgtgcgcggcgcacgaatatgatgtgcatgcgcgcgtagtgcatgagaaatagtgcgcatgcgtggcgtatcaaacgacgagctcgctccatcatatccgatgctgtggcatgtggtggtctgtgacacagtatacccgggcggcacatcatcatgatgagcatgaatggcatgcgtgggcggcgtatgaacatg

SEQ ID NO: 22362 - DNA, 440 bp, Oryza sativa
agcttttcactaaagcccgaaaatttgacttattaaccctttcagaaaacttatctaaaaaataaatcgtgctaaaaactaatcatgcgcttagagccatcgaggttaacaatgacgccgttgattttttttttaacatgtttgaccgtttgtcttgtttaaaacttttgtgaaatatgtaaaactatatgtatacataaaaatatatttaacaataaatcaaatgatatgaaaagaattaataattacttgtttttttaataagacgaacggtaaaacatgttttaaaaagtcagcggtgtcaaatatttaagagcggagggagtatatcctttttaacatctttgacgttggcgtttcatcgaagatgacatgaatttgccaggttatatataaatatcacattaacgctaaagatattgaatattccatcggaaagc

SEQ ID NO: 22363 - DNA, 433 bp, Oryza sativa
tactcagctatagccatgaatcctttatgcatatctggatctggatcctgcagaacaaacatataggatgagtagtatctgatataaatataatactcgagaaaaaatcaagtattttaaaatatttataaatatgtatttctcctcttgtcaattttgatttccccgagcagatgactctgtacgtgtaaacactctgtccgactagtcatagcccccaagcatcgggagtcggcctatgcatttcccaaacatgcatatgagtgacatgagttcgtcattaatggaacaaagtttcacggatcagaatttactactcacgtacttttgcaattattaagagcagaaaataaattatattatctctatgcgtttgatttcttccgagtaatactcagcaccttgcgttactcggtccatccaacgagtcccc

SEQ ID NO: 22364 - DNA, 401 bp, Oryza sativa
  unsure (1)..(401): unsure at all n locations
tctctgagccgacctgcggcatgcaagcttggacacgacgagcgcggcagactttatggcggcggtctctgcggcgccgntccaagtgagcatatncaccagccggtccaccaccgccgcctacgtgccgacccgtcggagcgcggcctcgccgagccgcgggtttgtcgcgaccgttccaggcaggggcggatctacccattaggcggggtgggtcgaccgactcagctacgactcgtgttgccccacactttcaagaccaccttattcttttatagtagtcatggactatcaaaattaggtataacaaggtataaacatctaacaaattgagacacttatacgaatgaactattaatacgatatgtgttgagatcgattgctcctatcgagtttacatc

SEQ ID NO: 22365 - DNA, 450 bp, Oryza sativa
  unsure (1)..(450): unsure at all n locations
taactgttcggtcagaatcaagatcaagataatgcgtactagttgcatactanggtactctgtttacaactatcatgtctctattatcagtgcaacagtggcatgagatttgaacacaatacaaatccgatgaagaagattctgctatgccgtttaacaaagtggcatgtgtggtgtatgctcagtattaaaacatgaatcgttgcagaagtcaaatcactactcttaattatcttccagataaatacctgtccatgagctacctaaacctacatgcaacttgtgtgacaacttatccttcattttagtagtgcaagtgaaatgctagataccaaatgggggttatattgtaagcactataatatgacatcaacgcagtttgtttaatgcttgctcgtgcagtctagagatctgcaactctttggtgtgatgggctgccataacacatct

SEQ ID NO: 22366 - DNA, 431 bp, Oryza sativa
  unsure (1)..(431): unsure at all n locations
atcccttttatgcatatctggatctggatcccgcagaacaaacatataggatgagtagtatctgatataaatataatactcgagaaaaaatcaagtattttaaaatatttataaatatgtatttctcctcttgtncaatttgatttccccgagcagatgactctgtacgtttaaacactctgtccgactagtcataaccatcaagcaccgggagtcggcctatgcacttcccaaacatgcatatgagtgacatgagttcgtcattaatgggacaaagtttcacggatcagaatttactactcgggtacttttgcaattattaagagcagcaaataaatttatctcatctctatgcttttgatttattccgaataatacttagcaccttgcgttactcggtccatccaacgagcccccgggtgctaggaatc

SEQ ID NO: 22367 - DNA, 387 bp, Oryza sativa
tctacggttcttggtctctgcccgaggcatcgatgccttccccgagaagattcgagctattgagcggatgcgcccccccagcatacttatggatgtgcaatgcgtctccggttgcatggccgccctaagtcgtttcatatcaaggctgggagagaaggcgctaccctcgtttaagctcctcaagcgctctgggccgtttacttggacggaggaagctgaaaatgcccttgcccagttgaaggcgtatctcatctctcctccagttctagtcgccccggagccaaatgagtccctgctactttacttatcggcgaccccccaagtatttagtgcagcgttagttgtggagcgcgatgaggataatcctcattctgcgcacccccactc

SEQ ID NO: 22368 - DNA, 289 bp, Oryza sativa
acttgacgcattgaaatctgatttgaacgccagtatccataacggcatagagttcttccacaaacaagcaacagcatcggtactctgcttgaagcaagcagaatggaatcaatacatggaagataataaacggaagaggctcttgataccttctagtttccaggctagaattttctcttttcaacgcctacggaatggctccagactatttgcattggattgccattgctaatttcttcagaatacatgagggcgataacacccaaactgctgtctgtcttaacacaaa

SEQ ID NO: 22369 - DNA, 422 bp, Oryza sativa
  unsure (1)..(422): unsure at all n locations
agcttccaatgcaattctcttcgtcttgtgtccggaggaattcgacaaggttgatggactagaggaggccaaggagatatgagatactttgcaattggctcatgagggatcacccgccgttcgtgaggcaaagattgaattattggaaggaaggctatgaagatttgtgatggatgacaacgagacaccacaagagatgtatgataggatgatgatccttgtcaacaagattaaaggacttgggagtgaggacatgacaaatcactttgttgtcaagagacttctccgtgcttttggtccaagaaatcccactcttgtttcaatgatacaggaaaggaaagacttcaagaggctcaccccaagtgacattcttggaagaatngtgtctcataagatgcaagaagaggaagctcgtgaagtga

SEQ ID NO: 22370 - DNA, 418 bp, Oryza sativa
cgatgccttgtgtctggctccgtcgtggtatcttatgataggttagctgttggcgtggtgttgtagttgtggttttcgctcagttttccctaattaactgagcactgtaaggtttaatcccgttttctcctcaaaatgggatatcttcttcttaatataaaacgtcggcaacggtctgaccgttcgaaaaagaagactttacatatcttcttgactgcaagtcatagaaagattcatagaagtgtacaaaaataaacacaacaatactagaggccttaaaaaatgaggagtgttgtctctgctagtttactggctgaagagagtaccaacttacacaagaacagatctatgtgtggcacaaaacttctccattttcatcagaacatcaaagaaaggcaatcttaccgtatcatgtcag

SEQ ID NO: 22371 - DNA, 428 bp, Oryza sativa
  unsure (1)..(428): unsure at all n locations
gcttaaagccatgtatccctattatgcttattcggatctgaatcttgcagaacaaacatataggatgagtagtacctgatgtaaatataatactcaaggaaaattcaagtattttaaaatgtttataaatatgtattctcctcttgtcaattttgatttccccgagcagatgactccttacgtttaaacactctacctgactaatcatagcccccgcgcaccgggagtcagcatatgcacttcccaaacatgcatacaagtgacatgagttcgtcattaatggaacaaagtttcacagatcggagtttactactctggtacttttgcaattattaagagcatanaaataaatatcttatctctatgcttntgattatccgaataatacttagcaccttgtattattcngtccatccaacgagcacccg

SEQ ID NO: 22372 - DNA, 445 bp, Oryza sativa
tgtgtttcttctactcaggtgtccgtgcattgcaacatatcttaaatagatacttcctccatctcaaaatatagttattttttaggttatacgggtattaagaaagtatgtgagaatgattagagaaagtatgtgattggttgaaaagagaaaatagacaaagaataatggttgtgattggttgagaggaagaggtaggtggagaaatagcttcattttatgacaagacactgtgctagaaatagctatattttatgacggaggtagtaatacgacatggtctaacgtgaatgaaaacatacaaacgtatatctgaattattgtatgccttcgagaaaatgtaaatcaactgttatactacaaattataaaatataaattccaaaggaatgcatatgcgccatggatgtacggactcatagaccaactgtgggaccaattatata

SEQ ID NO: 22373 - DNA, 345 bp, Oryza sativa
  unsure (1)..(345): unsure at all n locations
ctcgtcgcgaacaacagcaggaatagggatcaaccctcgtctaaggtatgatttttcgtgtaacttggcttaatttcattntctcttagctcttgtgatacagtccgaaatggtcgtcggcgccaactcgatctctgtcctggtgttacgaggtaattcctccgtttcacaacgtaattcgttctaacattttccatattcatattgatactaataaatttagataaatatatatgtctagattaattagcatcaatatgaatatangaaatggtagaatgatttatattgtgaaacagacggagtaggtgtcagaagtttaagatagttggttcgttattagtg

SEQ ID NO: 22374 - DNA, 357 bp, Oryza sativa
atatagcagggaagccagtgaatggcatcactagatgaaccagaccaacctatatatagatatacgatgcaaccccaaagcaagcaaaacatcgagtcgatatcgaactggactcacggcagtggggaaagttgacagcagcttctcgaagatgggagcggcctcgccgattgtgagcagctggagacaatgaatgagcggagcggagcgcaagcgcgcaacaccgtggtgagctcgtcagtgcaacccacctcaagtgaactcggtcgcgaagcgaagcgaatctgtgggaggggggagagctcacctgagcctcgatggcaaggaactcggctacccctacatagaagataggca

SEQ ID NO: 22375 - DNA, 402 bp, Oryza sativa
  unsure (1)..(402): unsure at all n locations
tttccacttcctagtgacgtggcaatagtgagagctgatgctggatgggctcattgtgttgcaataactggtatactactagttgaacacacatagcgtactttatgacagcaagagctcataatttttgtgttactagtaatttcgtaaatgtcatactggaccagatgaaggggatgtctatacatggggttggaaagaatgtgttccaacaggaagggtcatttctgaccaatcttctggtggaactttggaaaaagatgaaagacagagtgcgattgccgctgaccaaggtggtgatgattactgcctaccttgtttcattngtgcctaaaaagtataagcttctctacatcaattggtttcagatataacaaaggcaactccattacagtgagcccc

SEQ ID NO: 22376 - DNA, 450 bp, Oryza sativa
  unsure (1)..(450): unsure at all n locations
tactcaagcttgcttcgcctcacctgcccaccccataatcaatggtcttgttgtgcgcgccaatgcatataatctcaaatgccttaataccaagaccttcaatattcttaagaagcatggcgattcatggatcgaggagttgccagcggtgctctgggcaaaccgaaccacaccaagccgatcgaccggtgaaaaccctttctttctcgtctacggcgcagaatcggttctcccatccgagctcaccctgatgtctcctcgggccaccatgtactgcgaggctgatcaagatcagcttcgtatagatgacctcgactacttggaagagcgaatgcggcgcgcccttnttttntntnntttttttttatttnttttttttttatcttatnttattaaaatttataaaatatttttattctcttaataataataaatcattttatccttttt

SEQ ID NO: 22377 - DNA, 443 bp, Oryza sativa
tagcatgcatgtatttggccttttcggagtatatgaattatgtgctagaaaaaatgagtatatgaatttcacgaggaacaaatcataacaaatgaaaggcgtgtttcctgctgattgctaaattttgctagtactgatttgtttagacacttccaatttccaaaccatattggccttgcaaaaggctatattcgagaaatgttgcattccagcacccgtgcatatatgaaaacacaaatcaatagcgcgtataacatgctatatcatgtgaacatatatatgtcattcttttctcaaagagagagaacagatatatgacatttttgtgcactgtgcaaattaaacagggcccatattgttgcgagtgtacataatgcaaacgattttgcatttatgaatctgactgagcatatctgatactttgattcttgttttcaagttaa

SEQ ID NO: 22378 - DNA, 407 bp, Oryza sativa
tagtactaatatataatgtctctcaacctgcaaaaccttctgttcctgagtccgaaggtctcaaggcagtatggtgtccagatttggctggcatgatatgtagaccccacatatcagtggtcaactattatttcttctctctcccacctcttccccatatctcatattcttaccaaacaatcgagtggcggccgacatgagggcgatgagcagcgaagataatggccactcatgggtggcatcgcagaggggatggttgggttaaagattgcagcggcgtaactttacgttggtcattggcgacatgttgtgcttgtgcccactacgttgattgcctctccctcatatgagaactcgccgttgtcaatttgtgggtcctgcatcaccaccttcagtatctcgcggat

SEQ ID NO: 22379 - DNA, 402 bp, Oryza sativa
tcgcacgcgttcccatctccacctcatcatccatggcgtccaccgacagcgcccatgtggctgcatgatggcccgccgccgccagggaacacgaagcgtgcccgccgccgcttgtcgttggagccccgtcgcatgatgccgacgcgcagccggaggaggagataccgtactccgtctccttcagcgtgccggcgtcgccgtcggggatgcacctcggcgcgtccgtcgtccgcgtgcacgccgcgccgccttccgtgggcgaggccaggatcgacatgatccaccccgccgagccaccgccgcagatgctgtggcagcatgcgaggttccactcgcagcccaccctgacggtgatcaacggcgaggcggcggcgccggtgccccggagcgacagcacgcggg

SEQ ID NO: 22380 - DNA, 335 bp, Oryza sativa
tgacatcagcattcaattggttgtgttgtctttcggctcagtaatatctagagtgagaatggattatattgcaatggtaactacagcgagtacgtaccgtaaacaccataaggctgtgtgtactgtggatttggtaccagtaatgccagtgggagatggaacccattggaccacctttaactgttgcatacctactgctcgtgaagggaacttcagaccagacaaggcgttcgagtataccttaagttgaagttatacactatttaagtgctcctatagctgtaaccagaaatactgcctattgatagcggtttggggctacgacaaatgcacac

SEQ ID NO: 22381 - DNA, 391 bp, Oryza sativa
agcttgcttgagaggggtatcgaaccatcttccgctaaatggccggatcgatcgaagttctggtactatactcacggtggaacgctcaacccagttgatggctccttggtcttcagcgatcagatacgcgaggctgcgagtcgactaacggacgcagtggaagcctcttctcatggcacgttccgacctgacagagagaatgacgagctgtcactcgccctgcagactcctgagcatccaggacgaacacgagggaaaggggtgattccttggaagattggattcaaggagaacatccacacgtacaggagtcggatgagaagcaagagagatactgatgcgaagattgcagatcttgagtacaaggtatcgagctacgaactcagcatgc

SEQ ID NO: 22382 - DNA, 385 bp, Oryza sativa
agcacagtcccacccgctccagcccggctgccttcatacgcgctgaccactgtcacgcccactcatgccgctccacccgctccgtcccctcgcatgccaccacgctgcggatctccatcccgagcagcacgcgctccgccggcgccgtcgtgctccgtcgtgctccgctgcatgccgtcgaacaacgtcgcgtagtaattgagcgtcgacgtcgatgccgggtgtgcggccgttactgctgctaaggagtgaagtggcgatgacgacagcacggacgtgtcggggctcaattgcagccgtgtgttcagctctcgcgtgagcagctcgccgaagcttctcatgctagagcacgtgatgatctatagcacgtgatgatctggctcca

SEQ ID NO: 22383 - DNA, 280 bp, Oryza sativa
ctcttccagccggacccggtatagcgccgtgcaattcttcatgcacaacggcagcgtgccggtgaagtttgtgtagttcgccgtgagttggtccagcgcgaagccgtcgcagatgtggcgcggcagctcgccggagaagctgttgttggtgaagctcacgtgctgcaaggctatgcccttgccgaggtccggcggaatggtgccgctcatgtagttgttgaacacggagaggtactgaaggttcctgagggacgagatggtggcaagggagctaccttgc

SEQ ID NO: 22384 - DNA, 310 bp, Oryza sativa
gggcgaactggacctggcgaagccgtccttctctgggctggatgccggggcgaaccggtcctggcgaattcgtccttcttcggcatggcgaagtcgtccttcttcggcgtgcactcgtgcgacccttcgcctcgcatcatccttggctcgtggtcttcgccatgggtttcggcagattcggtcgaagggactcatgccatccgccaacaaactgtttgagagaggttaccgttaaatgtcttagcctactattcaatacactgatttgtttcgttccctacctgtttgtacctgtggcagcttgggagta

SEQ ID NO: 22385 - DNA, 410 bp, Oryza sativa
  unsure (1)..(410): unsure at all n locations
ngacatgatatttgaccttgnttttacatgcattttattatggaaactgaagttcaaaacatatgggagaaagcaatagcctatcaaacaaaaccattttccccctccaattggacctaatttgaaacaacacccaattgaaaatggaatatgtctactttgactcccttaactagtgtcttaacctaatttgtatctttaaaccgtaatagcggatattttgacccccaactattaaaactggtgtaatttgtctccctcaacggttttggaggactgttcactatcatggagcatacgtggcggtgttgtaagcgtctgtcgaggagtgatcctctctagcatgagatcgtgagacccccctttcgtgagttcggccggggaagaagctcgcctctataaatcgcgta

SEQ ID NO: 22386 - DNA, 358 bp, Oryza sativa
  unsure (1)..(358): unsure at all n locations
tcccacctcacctttntttttgggntttttccctttctctttctcataacattcttttaaaattaatattttttggggggctttttccctttctctttgatgcattttggggtttttttccttttctctttctcatagcattcttttaaattaatatagtttttccttttctctttgatgattttgggttttttccttttctctttctcatagcattctttcaaaattaatatgncnttccttttctattttttttattttgggttttttccttttctcttcctcatagcattcttttaaattaatacttttttgtatttgagntttttccttttctcttcctatagcatcttttaaa

SEQ ID NO: 22387 - DNA, 300 bp, Oryza sativa
gtggagacagaattccaccggccttcgccgtgctgtctgtcatgctcgacgagcagcgcgtcctcctggctcgtacaagaccttttctccacccgccgccgtcctgctgcatctgcctcccccacccggcagccgactgcactttcgccgccgccattgccggcctcttcattacagctacctctcttcttcagttcttctttcaccagcagatcgaagaaaatgagcttaattgatgcgtatctgtctctctcccctctgcctggtttctgggagaattttgtgcagctggtaggacac

SEQ ID NO: 22388 - DNA, 375 bp, Oryza sativa
  unsure (1)..(375): unsure at all n locations
agcttgcttgagattggtatcgaaccattcaccgctaaatggccggatcgatcgaagntctggtactatactcacggcggaacgctcaacccaattgatggctccttggtcttcagcgatcatatacgcgaggctgcgagtccactaacggacgcagtggaagcctcttctcagggcacgttccgacctgacagagagaaggacgagctgtcactcgccctgcagactcctgagcatccaggacgaacacgagggaaaggggtgattccttggaagattggattcaaggagaacatgcacacgtacaggagtcggatgagaagcaagagagatactgatgcgaagattgcagatcttgagtacagggtatcgagc

SEQ ID NO: 22389 - DNA, 434 bp, Oryza sativa
ggacactttaaactaagcttctcgcctcctggcgccgacgtagcacagtcccacccgctccagcccggctgccttcatccgcgctgaccactgtcacgcccactcatgccgctccacccgctccgtcccctcgcatgccaccacgctgcggatctccatcccgagcagcacgcgctccgccggcgccgtcgtgctccgtcgtgctccgctgcatgccgtcgaacaacgtcgcgtagtatttgagcgtcgacgtcgatgccgggtgtgcggccgttactgctgctagggagtgaagtggcgatgacgacagcacggacgtgtcggggctcaattgcagccgtgtgttcagctctcgcgtgagcagctcgccgaagcttctcatgctagagcacgtgatgatctatagcacgtgatgatctgctcccatcgtcgac

SEQ ID NO: 22390 - DNA, 262 bp, Oryza sativa
tgatgattctgcagtacgtgtcaggtgccatttgcagaaaaaaaaaatcatactaactagcatgtagagtggtgtggcagtggcacattagaacttatataccctcctcaagctcgcaagtcccgatcaggttgttcagttatagttctcccaaatcaacaggcccagtcagggttacaagatattcgatggaacttttcattaacccccaatttggcattagaaatgtacgaattaaaattcacaagtcacattaaaacct

SEQ ID NO: 22391 - DNA, 432 bp, Oryza sativa
  unsure (1)..(432): unsure at all n locations
ctttatgaatntgtgcatatcgcacttaaacatatcaacataactaatattttctttggtatgtggtgtatgaatgttttaattgttgtctgttaaaagtgtactgtataatttagtgcataatagaactgttctttgcagtactatgtctcccactattcaacatctaacatttccttgcttgttttacaaacagcctcatatacagttttactaaattttgcactttagaccatctttgcttcatttagggagaaatgtttttccatttgctgcaaatatattttcacccgaggtcggcatcttctgtacgattaaaaaagtgcctgaaggatgaattttgttaatttacaaagttattatgggttgccaaaaataaactttggtcttgtttgaattctgcagactatntagttctttgtataagtttct

SEQ ID NO: 22392 - DNA, 443 bp, Oryza sativa
  unsure (1)..(443): unsure at all n locations
acgtatagatacacatctgtcatcttagaacgtttgttntaattcgnttttaattatgagttttaactgttttttaagcgtccaagtaagaaaatattattttatgacacgactgtgcaatatttgaagaacttaactccagttatcaatagtaaaatggtatatttttaaatacattctcggactttcggtataatttggtttaacgtaaagaaaattttcttccaaacgcatcaaattaagtagtttcactcaataggtcttcatttacaaatatcactgtgaatgccgaaattcaaccgggttctaataattaacctcataatgtgaaaatccagactctaaaggggtgttctgatgggactaaaactttatattccctgtcgcattggatgtttggacgctaatttgaaatattaagcatagactaattacaaaactca

SEQ ID NO: 22393 - DNA, 451 bp, Oryza sativa
gcttgaagcttttttctgtggaccctacagtagcgtgagaaaatataatttgtttacagtttaaccctgcttaatttgagtcactgcaaaatatcatttatcttaacaaacaaagtgatgcggtcatgtgtcaagctgttctgaaaaattaatctaaacaagttttatatcaacttactactgcctcattgttcaaaaaaactaattactattgcctgctattgacatttgtgtgagatggccaatctattctggcctttgtggcatatgcaagtagttttatatcatgacaccgctctttctagcgatgcttgttgtgactatggacgtttcgatcaaattgcctgagctgactcgattgttaaatatggggtgttacgcaacacatcaaggggatgaaaatttttcattctgtacataagagtagaaaataccaactggatctgacact

SEQ ID NO: 22394 - DNA, 392 bp, Oryza sativa
tcgccgccgacacctgtgagtcgtgttcgtgcccaccgtgccctccccaccacgcccaccgcatcccccagcagcgaagagagaaaagagagagaggggtgagccgaccagaggcacccatccgtgcccgtcgccgctcatcgccgaccagttcgttctccctaccgcgcctgctgtctgcctgcttgcccaaccgcgtcggtcttgccacgttggactgccatgtgctcaagtctccggtcacaaccgcccacaagtatggctaaggggggtaagcgtccagatgcataatttaattctcacagtgcgggtcttctgtccattaagaattgcccgaaggacgaacattgttattcacaagacattatgggtgcaaaaacggtcctacgcca

SEQ ID NO: 22395 - DNA, 443 bp, Oryza sativa
  unsure (1)..(443): unsure at all n locations
gcttcatgtagctttttttccctatggtagatggagatatggctcaaagccaccggcttataaaacatactacatccggtttatggtataagactttctagcattgcctatattgatatagatggtaatgaatctaagcacacttatatgtctagattcattaacctatatatgaatgtgggcaatgctagaaagtcttattatatgaaacggaggaagtataagccaaaatattagattgaaaacctaaataaaaaaatctaagcctaaacaaagagggccttggagtataaaacatataagctaaatattggattaaaaacctaaatcgggcctgtaactgggcatgacccataaattgatcattgtatgggacttcgcangccacaagaaattttggacaaaatanattgcaaaaaaatatgccatgcagctcatatcat

SEQ ID NO: 22396 - DNA, 424 bp, Oryza sativa
  unsure (1)..(424): unsure at all n locations
ccttaaatactaactggagcctacaatgcgtntgctttgctcaccgtcttgtcatctcttgcattgtcggcaatcgtcacatgggaggaggaataaactgatttatataatggttgttttgcatgggtccgcttcttggtttttgggagtcaattttagccggtctcttctagggatagctattttcagatatcaaatttcatttatgattcctaaaatcagatttattttttttggggggaggggggaatttagccaatctcttggtgatatgctcttggagcatctacaatataggcccaaacaggttcccttaaggtaaatttcatgaatttaatataaagaaaaaagtctcgaactatttacccaaatatcatctcaatatttacccaatcctaaaatggtgccaactgatctacttttt

SEQ ID NO: 22397 - DNA, 354 bp, Oryza sativa
attctgatagtggaaatcttgttcttgccggacttttttttgggtggattttttttcctggtattttttcctctgctcctgattggtctaaatgagattgctcatttaagaaaaaatccctctcaaaatttgcgatttacatttaaatcctcttgacgttttgtcaccagttgatattgcatcggatggctgcaaatgattaggaatacatggcacacttttccagtcaagaatccacgccgagttataatcgtgttgccacgtggcccaatcacaagacgtggctgtaacctataaatcggtatataagatgtcacaaatctcagacttatcagctttatctaaaaacatcat

SEQ ID NO: 22398 - DNA, 337 bp, Oryza sativa
ttggagaagatgtcttatgtggagtcctggcttataccctcatttgtgcgcctgtgaagatggagccgtatacccgctattccgctgctgttcatttgtgattgtcatgccttaagtgcctttgtaataatgtaaatattatcgatataataaagatgtgtcctttatatcatgtttgtatggtgtaccccggcttttcctgtgacggggattaatacactatcgttctggaaaaagcaatcttcccggtcgcgacaatatgggtagttgtggatcgattaaccaatgtagatcgatttattcctgtgaagaccaactatggagggaacaaactatc

SEQ ID NO: 22399 - DNA, 433 bp, Oryza sativa
  unsure (1)..(433): unsure at all n locations
agcttcaagttntctctgcagtttggatttatataatcatacaagactgaccatattgtgaagatgatgaaagaagtagagtaaattcttacagatttggttcagcatcagagatttctggtcaagtttcacagacacgtgtatattttagttgaccagttctgcatactactactaggcaacacaatagccttctaatgtgacaaaaaaatatttgttttgatgcgggcgttatcttggtgacttatctaatttggaaagaacgcaatgctcgtgtctttgaggggcacgcagtctcaccggtgaatctttgtgcgtcaattgaggatgagtggaaattgtggtaagaagcgggcttgaccacctctctttgatgtgtatagtgggtgcgagggttttcccccatatgtggtgtgtatagagggtttctttc

SEQ ID NO: 22400 - DNA, 427 bp, Oryza sativa
  unsure (1)..(427): unsure at all n locations
tcacgtcgaaggacgtggntctctcagtggaatgattataaagtaaaacattgtattaattaataatattttttgggatccccccattacatggtcctaggggctagttatagtcttagtacacgctcatatcctctanggtttagtgtgtacaggggaatttacatagatactctttatatagggacaccagtgatggcatacaatgtctattctaattatgggcccctatgtgggtcctttggcccatcccataatatgcaaatggccttcatgggccacgctagcttgatgggcttactatcgaagccagtcttccatggggcgaacccttcatgcttcgccttaaggcttcgcccagagggagaccagatggtgagccctccgagcttggtggcgaaccctcttgacttcgtcctttggcttt

SEQ ID NO: 22401 - DNA, 418 bp, Oryza sativa
agcttctctggggctaatggcaccttttctttttctctccccattccagcagctattctatgtgtgtcaagtttgggtagaaaagatttcgccctcttgctcctttctgcaagacgggggaggtgcggcctgctgtcgacctccataccgtcgatcccaaaatcagtatcatactgtaattggagatcttcatatctttgttcaacggtaggagggagagatacaacagctggatggggacgcgtcgactgcggacgagaacttggcgctggccttggagttatattgatctcaatgctgtgcttgggccattgaataatggtcccacgtgcagccccaagggtcagaatctcatcattaggtgggtgtgggatagtgtagtcaacccaatcgggcttcactaagtccatctgaactt

SEQ ID NO: 22402 - DNA, 445 bp, Oryza sativa
  unsure (1)..(445): unsure at all n locations
tctcctgtgaatgatagcaatatgcagtcctatcacatcatcacagaaccaatcaaggatgatgcagtcactataacaatgccagctatacctctccagaatcagaatgagtagccatgtttgtgattttcagttcgctacttaccactgtaatcgggagtttgcagcaatcatgtaataaataaatatattcatgattataaacaatgagtttgttatgtttatggatgattcatgttgaggatgcaatgtaccgatgttaagcaccttccctttttgtttaatgcagggcctggtattcgtgtaataagggagacatgtgtgataaaaacaagttctatgaggattcttttggaagatgctgatatgggattatgtgtataattggttactgtcaaatgagacctatggtctcattntagaggaactatgttctaacctcgag

SEQ ID NO: 22403 - DNA, 442 bp, Oryza sativa
  unsure (1)..(442): unsure at all n locations
gcttatgacaataggctgctcaacttgccacgttacggtgctttaatttaccgcatgttcttgacatctagctggcgcacgtaacatttatttacaagacatatggatatttaatactcctatttaataccaccatatggatatactccacaacctaattaagaaactactctttaccccaagcataatctatataggtggaaccaaatacttaattacctcatccccctctctctttccattcactacttcgtgtatatgccaccttgatttcgatactattattttagtttgggcgaagagtcaaaacgttctagggtcaatttagtcactgatatttttaaattgttcaaaataattatcngttgatttacataattcttgagaaaaaaaatacagcgtgaacatgccacatcatcttcacatgcaaagntaacaatta

SEQ ID NO: 22404 - DNA, 395 bp, Oryza sativa
tgtgcagcatagtacctgtatgcttgttcatctgacctcaacaagtttgagagcacatgaattgagtgcaatgctgcattagatcgatttatctctctttcttgaaatagcaaagcaagaagtaatgcacagacccatgcggtgctatcttcttcaccctgaaaagtatgatcatacatttcagcaatcgcagctatcaaaagaacttggcaagatatataaatagtatgtaaaaagcaacaaagtaaaaaaaaaacaatatttgagtagatatctacagtcaaaattagatattatcacatgagaatgaagaatttacggaaccacacaaagttcaatattctgaatattgaaccagaacaacaggaatgctgtgcattcctggttcctatata

SEQ ID NO: 22405 - DNA, 250 bp, Oryza sativa
ggagaaacacaacttctttcatcgacgacaattctttgctgaggctgtccgtgccaataatggttggcgctcaaggtattattgctatgatttattgcagaagtaggtggagcacgaggagcattggtgctgtggatgatatcgtcgatgttgcggttggagctgactaactgatgagacaatctgatggttgttcgtttgatttctgcggtcttgtcaaccacacactgagttgcaatccttgggcaca

SEQ ID NO: 22406 - DNA, 390 bp, Oryza sativa
tttattgttcttgaccttgagccagacgattccgggatggtagacgatttcctgcaggctgtgcacaccttctataataacccttcgtaggttaacaattctgtgcaaatcttcggggagagctctcagttttgggcaatttatcagctgcaggtacctgatgcatggcataagaaagactgatcgtgagatggtttccgatgtgccatcagacaagctttctgtgctaaccgaccaactctgccagttgtacatgtcaacgatctcaagcagctcaagctttggaaatataatggtatgtgttggagacactacccctttacaaagagttcatggccaatgctcacaactgcatcatccccttttgacatgaagaaacctgcaacattg

SEQ ID NO: 22407 - DNA, 237 bp, Oryza sativa
  unsure (1)..(237): unsure at all n locations
tgtcggggagagacacaacttcgttcatcgacgacaattctttgctgaggctgtcggagcatagaatggctggcgctaaaggtattattgctatgatttattgcagagttaggtggagcaggatgagcattggtgctgcggatgatatcngcgatgttgcgggtggagctgactagctgatgagacaatcgtacggttcgttcgtggatttctgcggacttggtcaacgacacactg

SEQ ID NO: 22408 - DNA, 327 bp, Oryza sativa
cttatggttcttgaccttgagccagacgattcctggatggtatacgatttcctgcatgctgtgcacaccttctataataacccttcgtaagttaacaattctgtgcagatcttcagggagagctctcaattttgggcaatttatcatctgcaggtacctgatgcatggcataagaaagactgatcgtgaaatggtttccgatgtgccatcataacaagcttctgtgcttaccgaccaactttgtgcagtgtacatgtcaacgatctctagcagctcaagctctggatatataaaggtatgtgttggagacactacccctttaccaaa

SEQ ID NO: 22409 - DNA, 372 bp, Oryza sativa
  unsure (1)..(372): unsure at all n locations
ttatccggagtgttatctatgagacagtgtgtgagccaaagaagggctgcatctatgctccttatatcatgaagatgattaatgcaaagactgggatttgttatttcaaggacaaccaacacaagccttttcgtcctcatgctcccactacttcagctactccttctaccaaggcaactcgtgcttctacctcagctgctccttcttactctgctgcaccacagtgttctgagtcttcttctcccataaagaaggctctccgggctatcttttgtatgtgtgctaagaccgctaagaatgtgaagaagatagagaggcgtcccaaggaagattggatngcagtangcaaggatgtctctgatatttttgatg

SEQ ID NO: 22410 - DNA, 419 bp, Oryza sativa
  unsure (1)..(419): unsure at all n locations
ggacacttaaaactcagctatgaggtttctttgtctacgtggcatgtgagtaacgtgtctaattggtggcgcactgtgaatggccttagtatggcttgtccggatcgactatctgccagcattgcagtcacgactcggtcatctcttgactctcggtgcaaaaatttgcaataagtagagtaggtattctagcaggtgtggctgtaggcgtatggggcagtaccatgaccattcgcgcatacactttaggttgtttggttggcatattaatttgagagaatctattcagtaccactgagntngantcactttacattataccactgactttgtcgatatccataatataccatcagtcttttctttaccttactatataccatcaccgtttttaacctgttattctgaattggataaaa

SEQ ID NO: 22411 - DNA, 415 bp, Oryza sativa
  unsure (1)..(415): unsure at all n locations
tttctttcttggatgcgccacttgtacttcgtgcccaaccacttaaatgttgtctcaagtgggcaatcctatgactccaacgctccatgggggtgttccccttatttatgttgtgccattctttatggaccatttcatataaaccgtcccgttgaagccaacctagttcaaagcggaagagaggtttccaaaatgggcatgtgaaccagatctaagaataataagtgaatgatctgaaatggcgtgtggtagtgcttggcatgttaccaaagggaatttttgttcccattcagtgttcattaacactctatccaacttctcataagttggattttcaaggttatttgcccaggtgaactgcctccccgatagatcaatttctctcanattgagactattgatcacttcattaaaa

SEQ ID NO: 22412 - DNA, 411 bp, Oryza sativa
  unsure (1)..(411): unsure at all n locations
taccggcagggtttcttttggcctactgcagtgtccgacgccgacaaatatgtgcgcacgtgcgaaggttgccaatttttcgccagacaaattcacttaccagctcaagagttgcaaactatcccgctgtcttggccgtttgcggtttgggggctcgacatggttggcccgttcaaaaaggcagtcggcggttacacgcatctctttgtggccattgacaagttttccaagtggattgaagctaaaccggttgtcacaatcacagcagataatgctcgagacttcttcatcaacattgtgcatagatttggagtgcccaatcggatcatcactgataatggcacacaattcactggcggtgttttaaagacttttgtgaggacnttggaatcaaaattgctatgcctcaat

SEQ ID NO: 22413 - DNA, 350 bp, Oryza sativa
  unsure (1)..(350): unsure at all n locations
agcttgtgaccaanaacacgctatctgagtgtaaacaatttccaatgcctcanaaaggtagcagatctattggaccagagaaagagaccagtaccaaccactctgccattntatccatttttagtacccattccaggatcctaatggtgttcaaagataataaaaacacgtggtcaacaactgatttgggtaaattttagctccaacctttcttcatagaaaaaaaaaacacaatagctccaaggtttctagagagcagagactgtatacgaaatactaacactgtattcaccataataatgcaataccaacaatttatctaaaagtttcacatacatttattcgattat

SEQ ID NO: 22414 - DNA, 338 bp, Oryza sativa
  unsure (1)..(338): unsure at all n locations
ccggcgcaccaatcacctgacaattggaaagggcctaacctgatttccagtatcaagacatatctgcaagataagaagtacgtacaatggtttcggggtgtaaaactgatttattcctctcttttttttggttctgtttgctactaattgntaatcagtgcatttgcctgttatactgatactaaagntatcttcataagtataaacagaattttntagtcaagtattgaatacatgggttcaatatttcattgaatcatggcagatcgataagaaagacagataccggctcctctgaagtctatactatctgaatatatgtaatggtgtacataaca

SEQ ID NO: 22415 - DNA, 416 bp, Oryza sativa
ccatttgtaaaacacttcttccatcttaattagctcccaagtcaatttcttgttttcccatggatcttggagcccatccaacttaaaaaaccagaccgatttctattctatccacttcgattgattccatgccctggctgaatttcacattttggctggcaatgcatatgcatatgcagaatctttggcagggagcctgcaaaaagtcttggtcccttcgactcctgtacacatgcaaacaactcatctctgcagaaaaaaaaacactgcaacatgttcctggggatgtttgtgtgagatgagatatgtgatccatatcatgcagatgcaggtcataaacatgtgcagggcacagtgactgaagactgaagattactgatctcgatgattctactgcagagtgaagggatagtgag

SEQ ID NO: 22416 - DNA, 369 bp, Oryza sativa
tccacttttaccagtggacgatagttcacggagagcattatctccacaaatggatagcatatagtcagctggatcaaccttaaacagcttgcgcaatgtcctgtgattttgtaaagaacaaatgtgcatgttgacatggatgaagccatataacagtcactaatctataatgtatctatcatgggagtgataaccaaccggaacaccttttggcagtaatccttccatcttgaatcaaaagaaatgtgtggaaggagtgaaattattctctaagatacccaatctctcctctcttctaggaacgtaatattccctctttattttataaacatctattattcttttaaaataaacctactctcttttaat

SEQ ID NO: 22417 - DNA, 373 bp, Oryza sativa
  unsure (1)..(373): unsure at all n locations
agcttgatcagatatctgtaagtccgatctagtctaatattgatcggctngaagctcgaaagattgagctcctggcacaacttcaagaatgcagggccaatctggacatggaacataaaaagctagccgatctcccaaaatctgttgaaaagcagaaagcaagactaaaatcggctataaaaaatgttgctgatctaaccaagtctttaaaagtcatccctggaaccgatgctcaagatgcccaagccatcgaagaagacaacaaattaggcaaagagctatatcggctatccagcgctatttgtctcggtaactgtctgtgtaatagaccttagatatttttgaatcggctagatactactgatgttatctt

SEQ ID NO: 22418 - DNA, 407 bp, Oryza sativa
tagcttctgttgtctctatttctttccgctgcatttttgtaagacttctatgatgtttggaagacgcggatctgaatgtcaatattgtcgtttgtgtaccccggctggtcctggacggggattttaatgcacattctgcttgaaattctattcgggaatttctaggcgtgacaagttggtatcagaaccgaccttgaccgtatgacaagccatatggaaaaacctaagagccctctgaatccttttcattgcatatgttctctgcaattggatttgttccgggaaaattgtgatctgttcttgtggttcaagggaaaaatcttggtcgctcgttaaatgagatttgcaaaacaggtcagtccactgtttagtaaaactgtgagatttttttcgcaatcagtgggatc

SEQ ID NO: 22419 - DNA, 401 bp, Oryza sativa
  unsure (1)..(401): unsure at all n locations
ctgtcaccaatggcacgctttgcttggaactctattcatggcgtttagaaatgctgtcgcttcgcagaatcgtgaactgccgtttctgagagtatcatctcatcatctcttatgtccaagtagaaagccgacctgctgatgttcgtctgttcagagacccatctgtatgttgggagaggctacattttcgtttcttttgttcagtatgctatgttcagtatcctatatcagcctntgcaggcaattcccacaataatatctacgtattttctgtctcattcacactgttcatgtgaatatgtgataggtgaaattccatatctgacggtgaacttatgggtttatttttcattactagtgaaattgaaatgattaatgtgaaaattcctcaaaaaaattat

SEQ ID NO: 22420 - DNA, 404 bp, Oryza sativa
gcttctttctgggcgtcagtcctttttcggcagcggcttgccaccgcaagatggccatgctagatgggtcagtgcgggatagaagctatgttacctggatacgtcacatatgcaacgtatccgtatcagatacgtggagggatacggatacgtatcggatacgatccgatacgtatcgcgtacgtatcatcgatattcgcaattttcgaacaattaaaataaatctggatacgttctcgatacgtccgcatggcaacgatcaatatgctgtctccacttttctcgactgatgcccaaccctcgcgggtactttccccgacgtcgccgtcgtccgagacgccaaatgccgaactctgagccgccgtcgccaagcgccgaacgcatctgcaccgtcgctacatgcc

SEQ ID NO: 22421 - DNA, 264 bp, Oryza sativa
cctttcggaaagatcacggcgaagctcggttatactatttgttccttgatgaaaattactcacaggaatccagaactgatgagcagcttgtagatgagcaccacgatcataattcgaacgagaaatcccactcaagagaatattgcgagctttgctattatgttcaaaagcagttttttcaacagcagtattaatagcttcatgaatcacataaggatgaaaaacttttctccaaatatcataatcttcagccataatattaga

SEQ ID NO: 22422 - DNA, 340 bp, Oryza sativa
tgctgcatatgaaccacatcacaatcaacagaatctgcatatgagccaatggaaaacgaaaccctacaaacctgtgttacctttgctcttccaaaatcgtttaaccactgaatatggtaaagatgtggatgtgtacgtgtggtcaatccaagcttcttgaccaaatcagaactcaccaaattgttgcagctacctccatcaatgatcacacgtgcacgacagttattgatgacgaagaaaatctgaaacaaattatggcgttgcaacctctcaagctgctgtacctgcatgctgagcacccgctgcacaacgatggtcctgtagtcagttgtgtcatcac

SEQ ID NO: 22423 - DNA, 376 bp, Oryza sativa
  unsure (1)..(376): unsure at all n locations
atagtggggaggggacttgagagagtggagatcctccaagcatgccaagagcatcttctctcttgtgttgccgagtgtccatgcttatgacaagttctactattgaaaacggacattttgcaaagagcattgggaagcggttttctactgaacgcaacctgtgcttgggccagtggcctctgtcatgttcggcagaactcagagttcggtcgatccctagccggctccgttggccccaattttcggcttggacactcattttgggcccctcattctattggtatggatgttaggcccatatggaggtgtttaattgggttcttagggccaaaactccataagctcggatgcgaagttgattctcatgctncctcat

SEQ ID NO: 22424 - DNA, 434 bp, Oryza sativa
  unsure (1)..(434): unsure at all n locations
tatacaatcgtcgtagcaatatctatagcaccaacttatcttatttgaatcaaccgacgaatttatttgtatagtacatttgttttatgttaaaaaccatattacatttttctataatgtaatcaaacttcttaacatacacggagatagctgtatgttgcttacgctttactttattgaagaaaaaaaagagtcatgctgtgcgttatatagattgtacaacccacgtacaatcataccgtatccaccaatcatcggttatgcttatctgcaggtgggctcgggcaagcagcaactgtgtttgtgcatgtagtactgatcggatgtaagtactccagtacatatggatcggatgtatagctatttctaaaaataaaatctacgcagntatgaatcacttatcagatgattactggagggggcaatcttttttt

SEQ ID NO: 22425 - DNA, 419 bp, Oryza sativa
ctcatttgtgcgcaaataaatgcaaaggtttacactcaatccattcagcaaggggccaaagtgcctaacatgattactgaacaataactccacactgaaaaacacagccaccaaactttccactgcctgacaattcatcctggtgtataaaaaggaagtgtaaaaattacacgatgagtatgaaacaaagaccaatctaggtgtgttgtgcaagcatggatcagagttcccacaaactaaatttgtgtgtgcgtctatagttgatgcagagggcatagttaaaagaaatcagagtgctatgagaatgagaggtataaacatgggtcatgagaatgagaggtatccaggaagcaggtcagaagcactagacgccacactgatcgaagatgattgaagacattgccatgacaaacacatga

SEQ ID NO: 22426 - DNA, 350 bp, Oryza sativa
aagcttgtactctgctgctggcgactacactccaatgtctattttgtctgttgcgacgaaacacaacttgacaatacagctacaactatgaagatcttcagctctggtgtgggggaaaagagagcatgactgagtacttcccactgtactcatcaagtcataccggaagatgaggtttgatgcaggatattaccaaaggatgctagaggttcttttgcataaagctagcatttataagcagttattgaaggcagtaaaacagttgttgtaattaatcaatatttaccaaacagttgaatgggatgatgaccactgtcactatatctgccggccggtgttgggtggaaatg

SEQ ID NO: 22427 - DNA, 408 bp, Oryza sativa
  unsure (1)..(408): unsure at all n locations
cgggcatttcatcttatatagcagcaacctcaacaactttgggccagctccctgcatttgcatgccagcagagaacaatcatggtacattgttcagttggcagagaaagaaagatgagctcttgaagactgaacctttttttggccttcactttggatactggtgagcatttgacccttttgttaatacctaaccaccatctctctggcttctgctgtttgcaattacaaccttaagatctggagtagaaagcaatgcatttgccccgaaaaggagggtggtccattntggtagattatcatgttaaatacaatctcatgtgatctcaaatgtaggagtaggattgttatctttttaacagcangaatctgattagcagtgtcacttgcatgacgagtgactaaacta

SEQ ID NO: 22428 - DNA, 430 bp, Oryza sativa
  unsure (1)..(430): unsure at all n locations
ntctccctttctgaacattngactaataacacgcaacagattggatggttaataatttgaagttttaaactcaagttcatggattcagtatcatctgaaaatgataacatgctgatgttgttggattattttgaagacttcagcagtaatttcttcgaaaaagtaaaaaattatagcatgcaccatgcatcattttatgccaatgcccaatgaatttgacacccagctttatatagaatgcaaaatggaatagagtgtgaactccagcttacaatcactcaccatgtcaccagctcttactcctttctgtttaaggactatgaagtctaaaactctgaagacaacaactgttacagaaaaaaggctaaatgaataagtcgaagacctcaattaaattgagaccaaattaagtttcacctttgacatacac

SEQ ID NO: 22429 - DNA, 366 bp, Oryza sativa
gcacctcgtcttcagttagcttcgaagattcgcgtgatgggtgaaactgtgcccgatcgtgctgaacctgtcatcgacatcataaagtgatgaggaaaaagaggaagatccttgagaaagagagccagctactccagaggaagaagatccatcgcttcgttccgatgcaaggcgggattagtcgcttagttagatcgttgccgtagttcgctgtgttagattgcttggttaagtttgcttgtgagtgtgtgggttatatgtggtgcttacatcattggtgggatgtaacagcatgagtctagtttcttttgcttgtcagagtgtaagatagttggtgagatagtgttaatgcaacttatatgtaat

SEQ ID NO: 22430 - DNA, 433 bp, Oryza sativa
actaagcttataggagggacttgaatcgacccatgataagccattcgtttagaccacaatgcttcggctaaacgagtatgtcactgccgaggataatcagaaatctttctcttaatcaatttgatcaaactcttgttagatgcctcggtctgcccattagcttgtgcataatatggtgaagaattcaacaatttaatacccatgctatcggcaaactgaacaaactcatcatacacaaaaattgaaccttgatcggtcgtaatggtttgaggaataccaaattgatagaattatatgctcttgaacaaatggatagcatccccataatcaaccttcttcaaaggaatcgcctctacccatttggtaaaataatctgtggccaccaatataaactttatgtccttactcgatggtggattaatcatgccgatca

SEQ ID NO: 22431 - DNA, 193 bp, Oryza sativa
tttttttttaaaatttttttttttttgaaggagaagtagagtggaggtaattttaaaattattataaaaaattggggatatgtatttaattaaatatatataatgtatggataagaaaaaatgagattttgtatgaatttttaatgaaagtaatgagtttggattttgaatgataatgatgtattggtagtat

SEQ ID NO: 22432 - DNA, 312 bp, Oryza sativa
cacctcaggtcccgtgacttgctgagttctagagtactcacccttgctctatataaatatatatatataggtcctccgctctgaagagaagataaagcgaaacgaaaattaagggttcgtcccggttcccagccgtcgcatggggtgttgggtggtaaaacggtgggtccgctgctgctgctgctgaaggtgtttcctcctccgcgtcgacggttgtattctcgggctgtctgagctgcaacctaagttaagggtaataagtcctctatttattttaaggattgctatgattcatatttgtcaccgtgggta

SEQ ID NO: 22433 - DNA, 422 bp, Oryza sativa
  unsure (1)..(422): unsure at all n locations
agctggcatatacatgatgtgtgcaaaggaacaaacgttcttgctgccatcgacgtcatttcaagtcatatattgtccacgcgtgcatgtaacactaactaattataacatggtggcacatatatatagtttttaagatatgcatcgttgatcgttaattcgatgatgataggatagttaattatacggtcgcttatacaacgaagaagcggataatcaataagttattatacggtagtactaactaaactatgtcctaattaattaataagttagtttgtgtggccacgtcaatctatcaagtcaataaaatactgcggcgacgatgcatgcaacgcaaccgaaacgtacggaagccagatatatacacatttaattngtttctttttgaaaaccatatataatcatcaaacgctaaatga

SEQ ID NO: 22434 - DNA, 138 bp, Oryza sativa
cacgaagaaaccgtcaccaaaggaacaactaagaaacgcgacgcgacgcaaaagaacaacaaccgacgagccaaaacaaaggacaaaaacacaacaagcaaaagagaggctgaaaagcaaaagcccaccaacgacagg

SEQ ID NO: 22435 - DNA, 442 bp, Oryza sativa
  unsure (1)..(442): unsure at all n locations
taacctaacattatgacagcttcttcttganngactggtacaagggntcagnnagtcagaaacaccaagaggagcacatgcaagcactcatgggaggcacttatcttgagtttcacaaaaaaatgttacaataccaactgttgtaatatgctggttggcagatgagacaatgaaccacaatgcaaaggaaaagacagccgactaatagcaaaaaaggacttactatctcagaaagcatatatgtaagtgacatgataatgaagcaaatacatgtagataagatagttatacaaaggttaatgtagcaaatacatgtagataagatagttatacaaaggttaatgtagcaaatacatgtagataagatangtatacaaaggttaagtgggagggaccactaatatgtagtggtctcaccattttgttggcaccaattacctgt

SEQ ID NO: 22436 - DNA, 405 bp, Oryza sativa
accgggtgaatgaggtactgacaatgccggtccacggagagcctcaattgatagcttagacttgggaggtgtaagctccgtcggtcgacttggacgaagagtcatcttcacaactatgtcttctttgggccattgtatgaatgtcttgcgcgcatcgcccatagtcatgatttcatcatttgggggcacgggcagcggatagcctgaccaggtgtcctttactgtatcgatggacaccttggcatacccagctagcaggtctgcgccgtggaccttgtctgtaaccgagggcttgaaagccatgccctcagcgacttcaggagcgaaagttgggtggactctcgctagtaggacacactgtgctgcgccctgcataagggtgaaagttgaatctaatattggaat

SEQ ID NO: 22437 - DNA, 333 bp, Oryza sativa
aaatccatatattatcaacaaaagtgtatatattgtaatatgcaacttttgttatatcattaacttacaaatgtggtttggatacacattcagcttttgttatagtattaacttaattaaaaagtgtatcctaaaacttagttcttttcttcaactccttttttattagcttttcaaactgtcaaatggtgtgtttttaaaaaagtttctatatgcaagtttgttaaaaaaagcaaataaatccatttttcaaatttataatagttaatacttaattaatcatatactaatgagggttctcgtttcgcgtccgcaaaaaatttaccttctttt

SEQ ID NO: 22438 - DNA, 285 bp, Oryza sativa
cagaaatattatcggaagcagaagataaagtcagaatcatcatggaaagggtgacggttgctcagtctcgacagatgatctacgcggataaccgccgagaggagctcacttttgaagcaagagattacgtgtatcttcgtgtaccccgctccggggagtacacccgttccagaccataggcatattggcaccacgcttctggggaccatacagaattctggaacaatgggagaagctgctatcaactgaactttcgtcaacatgatccgattcatgacgtggtca

SEQ ID NO: 22439 - DNA, 349 bp, Oryza sativa
cttgctccgaagtgagctccatgtctttcatgatgtacgttaatacctgtacaaacaactttccaaatacttggatgcaaagagattagatgcaacttcattttgtgcttccaagcggcgtaatgtgtcccatcaaattgatgagcacgcccggaatgcacggagacgaagatgtgagagggaatggtaagtttgctgtaatcaaaaggtatagtggctcccttgggtgatggagttcccttgctgctcgctccatcttcattaccaatttccccgtcctttccccctaagtccgacatcatggatcactcaaagcggtgaaacttgaatcaagagcaccatgctctga

SEQ ID NO: 22440 - DNA, 446 bp, Oryza sativa
  unsure (1)..(446): unsure at all n locations
agctntgcttaattaatttgttctaactgtttcagctctaacactcttaggtcccttttgattcataggaaagttagatgatttttggaggattntattcttatggattttttcctaaatgatcctttgagtcaaatgaatagataaaattgaatcctatgaaattcatataaaataactaataccatgtaagttttggaaaaaaaaaatctaacatgaggtttaactttcctttgagtctttatctcttatctaatttctgtgtttcacaatcttattaaaatcttacgttttctcggtcctacggattcaaagtgtcccttacgcgtatgccttaccgtaatcagccagctctttactgtactacgtgtataccagcgacaccggccttaattttgtcctgtagcttgccatccaccacccagatcagatgtccctgcacgtac

SEQ ID NO: 22441 - DNA, 370 bp, Oryza sativa
  unsure (1)..(370): unsure at all n locations
acactataaaactaagcttagtaatagtactgtagtcagaacaggatgaagtgggaggagattaatctggcagactgtcgctagtaagttntgtactgactggagtcctaataagtctaggggaacgctgatgagcatctggtggaaatccattcaagtctgatgactggacaacataaagtgaggaattcttcaatgaactaatgccagaatatatcgaccctccatcaccagagtttgcatttaaaagatcggaagaattatcatacaaaccattgctccgatgaaagttttcctaaacaaaaagaaatcattatcaataagtatctgcagactgcagcaacaaactctgtngcataacagaacatga

SEQ ID NO: 22442 - DNA, 269 bp, Oryza sativa
agctctgagaaacaaacctaccgggaggttcttgcaaatcaactctcctatgcacatttgctccagaatttccaccactatcactacgcattctggcattggttgcatttgtgcctccatccttccttgtctttggaaccgatcgatgcaattgtcttgaaattgatctactactactactcaaggaacctgcactaaatgtgtttgatgatgatgggctactccctccactcaatgagcgcttcctcgacgaatttactctttctttc

SEQ ID NO: 22443 - DNA, 437 bp, Oryza sativa
tcctgttactattatatagaccgtagctattgggtttacacatgatgtaatttgatcagaaaggaagttagttaatttaagggtttttattttattaacgcattagagactgagttgacactggttattttataattgagagtaaaatatttgaaaatatgaaaaatataattgcaatgcaataacatgattatcaaaaatagaataggagatataacaaaggtaaaagataggaggatcaaaattatattgaataaaagaagaaaaatatatatatattcaagtaaattatgattcaaatggaaaaacatgattaaatttgtaatcttaatgcccatggtaaattacctacggtaagagataatttatatgcgagtttctaatttatgaaagataattaccactctagacagattacttttcttaataccactttt

SEQ ID NO: 22444 - DNA, 397 bp, Oryza sativa
  unsure (1)..(397): unsure at all n locations
gcatttgattttttttgngtgattagntgagtctcagaggcgcaagcaagcgcatgatgagcttgactaggtgcaggaaaatgtgagcgagtgcctgaagagatcacaagaagcggaagccgggagggcacaggcggtgaaggagctatgcggcgccaatggcgtgatcgatgagctgacgctatgcttggagaatgcgcangccgatgaggcgcgagcgcgccatgacgcggagatcgccgagctgcgcctccgggagacgcagcagggcgtcagcgagagcaccgcggcgaaggcggatctcgccgtcgccagtgaccgccacgccaacgcggtcgccgacttgcagtcggtgacggcggagctggagatcctgcggatggagcagccggtcgct

SEQ ID NO: 22445 - DNA, 437 bp, Oryza sativa
ttacttggcgtagagtggagctgaaagagaaacagctctgagcctgctaaaacatacctcattttaaattgttccagaagccacgagaagagattcaagagagtttccccacattctcatcgaatacagtatgcacttctctgcatccggaaaacaataccagaatcaaatgtctaccgagctttgagcacacagaagataccatatctagtaatgacaaacggaacaccgagatgctcaattgctcatctaacctggcgatttcactcgggcatgcaacacacgctggctcaaatcccataatgccactgaattgtcactcataccgatcgcgagcagtccatcagcctgcttccagatcaaattaaccaccattaagtaaatagtggttttcatcacagaggcaagtagctaagaaccctggagagagagagcta

SEQ ID NO: 22446 - DNA, 392 bp, Oryza sativa
  unsure (1)..(392): unsure at all n locations
gcaatcgcatggatccagatgccgatacggcctaacctatggacgtggaaacgcccacgagtacgtgtcgtacatatgctgatacgcactgaggcactacacgtgctaaacaatgtttcagcggagtcaagattactgctccattcgtttcagtttacaacacgctttgactttgatcgaagtcaaattgttttaagtttgactaagtttacagataaatatagtaatatttgtaataccaaattagttttatcaaatcaataattgaatatatattcataataaatttgtcttgatttgaaaatattaatatttttcctacaaatntggtcaaacttaaaaaagtttaactntaactttgaccaaagtcaaaatgttttataatctgaaac

SEQ ID NO: 22447 - DNA, 417 bp, Oryza sativa
  unsure (1)..(417): unsure at all n locations
actttgctggacaaatattgatgatgattntgcttatcattgtggcggaatgaattggaacgccactatgcttaattaaactcccaacgagtttcatggtatgtgttttattgtaagtttttttttatcctttttgtattagctatttagatttcgtttgccaattttaccgtggctgtacatcactactactcccacttaagattttgccttaagctttaaagtattatatctactcgcatgtaagatttttctgtaagctcaaagaattaaaatccaagctggtttccattgtcagcagttgaaccatgcagttatgtcgagctaatttgtttccttgttttaactatatcttgaaaatgtgcagcacccttattttttatcggttcttataccaaatcactcttcactaaaatg

SEQ ID NO: 22448 - DNA, 436 bp, Oryza sativa
  unsure (1)..(436): unsure at all n locations
agcttatntatataattcacatgtgcatttgcttttttgttttgtaaaaaggtttaggctccattaaatccaatgaaggagttgggcagactgatatctgaacgcaaatttgacgaggcatttacaatggctcttcaaagaagtgacgtgtcgatagtgtcttggttgtgctctcaggtatcttcctcttccctgaattgttcaccttatgtggagctaccagctatgtttattttctgataattatactactcaacaggttgatttgcgcgcattgtgctcaatggtccccgtcccccttaaccagggggtcctcctagccctattgcagcagctagcagttgacattgctactgatacgccgcggaagattcagtggatgacagatgtcgctatggcgataaatccaaccgatccggtgatcgccatgcacgtg

SEQ ID NO: 22449 - DNA, 456 bp, Oryza sativa
  unsure (1)..(456): unsure at all n locations
agctntgcgagtctaggactatcggnttgttctatgaagtctacttcctcaattntaaggttaacttccgggcatatttgagttgcccttatattcctcccaagggaatgtactatcattggtacacgtaaattttgggttttccaaccatttcttttcacaaaagcttgtgatatgaaagaatgggaagctcctgaatcaaacagaactattgcgggtacggagttgacagagaacatacccatcacaacgtctggagcatcctgagccgtctcagcttgaatgtggttcacccggcctcgaccgaagttgttggaagcacgagaaccttgtccacttgcctgagagctangacgagactgagctgccgctggagtangagttctggcagtgctgccattatcatgctctgagttggtgttggtagaaatctgaaggcactgtctagcatagtga

SEQ ID NO: 22450 - DNA, 381 bp, Oryza sativa
  unsure (1)..(381): unsure at all n locations
atcatgagttgctactatgctgcatatctcataaactcaggagcaaagaatatgcactctctatcacattaaataatctttggcacggtggcttacctttacccctgattctcatgaaacactgcttatcattgcctcgggtggttgaaagaccaaacagcttttatagcaccaatcacccaattgttattcaactcttattccggaagttntcaaatgattttgcaaaagaaagccaagttcctcaattgattcactcagcctctctaagtgatcaacatgaattcctcaccaaatgttggctctgttgatcctactctaaggttatatgtggagcatggtagggtcacacatggcatacttacattcacatttattact

SEQ ID NO: 22451 - DNA, 372 bp, Oryza sativa
  unsure (1)..(372): unsure at all n locations
caccttcaagaaacctcanggatatatattgctctaccaaaggtatagcttcttcctcttcttcttgaaccataaccatatatgttcattcaatctatcggcctacatttctcctttgagtcatactcgattgatttggtcatggtatatatcagattatcaacggaaagacatgttaaatatgtgatccgaattttgggcccacaatatattcgaattagtttcctagtaggattaagttcctagtaagagttcctattaggcttcctattagatgtctttctattatcccctatatatactctttgaagccgtacgggaaggggagacgttcccattggtattcctctacgnttgaatcatctcttctat

SEQ ID NO: 22452 - DNA, 328 bp, Oryza sativa
catgcaagcttgcttgacactcactccggctataatcatatcagctttttctgaagagcaccacgagaataccgtattcctcacaccgttcggccgtttccgttacatttaaatgccgctatgactgataaccgcatgatataccttccctcgaacggactgaggggcacttatcgatcagcttggtcacaatgacgaggcctacgtcgatgacattgttgttgagaccaagacagacgactcattgattgacgatctacaggtaaccttcgacaaccttatacgatatcggctcatagctcaatcctgagaagtgcacgttcggagt

SEQ ID NO: 22453 - DNA, 361 bp, Oryza sativa
agcttgagatatgccattctatattatgttttcggatgaatgcctgaatgatcagttagcccattatacgtattgtttccaacatggatctttcagtgatttatctttatgtgaacttgttaaactgcatgttacagcttgttggcgttgtgagctcactatgtgtcgaaacctgaagaaataccatctgaatgttgtttgtttaccttgtaccataggatttttgggaagttgtcttaagtagatgcaatatgctatgttttgaccattgatgcagcttatcatatagtctccatggttcttagtactgatgaattaccttttttttttttttgcctggcactataggcatgcttgtttt

SEQ ID NO: 22454 - DNA, 383 bp, Oryza sativa
ccccatgccattctatgagctcgcttggggcagtcatggtgcaagctcttgcgcaccttgagcgcccgctctgcatccgcaaggaggagctgctcccgcgcccgtcgcccgaggtccaccgcgcaccctcctgctgacgcctgcacttgagcccctgccaactgctggctcatgtcaaggggagagagagataatggagagaggaggaagaagggtagagagagaagatgacatgtagtacccacatgtctgtgggacccacaattttttttttaatgacaaatgagctccatatatattctttaaatcttaatggcatataagcgtcacgtcaatgtcacgtgggatgaagaccaagtcaacactgccacgtgtacgccacg

SEQ ID NO: 22455 - DNA, 439 bp, Oryza sativa
  unsure (1)..(439): unsure at all n locations
ttactttaattatgaacatattntacttgtcacaatattatttataaggttaataattatccatgctctatatgttaaattcgggagggttataatattatagttacagattatctcttaatgaacaatccggagttacaattgaactatgaacatatgaggtcaagatttataattagcacttatctactattcatgtttgttatatactccccagtgtaatatatgaaaaagataaattaattgtataactataatgggatgtacaatatatgtgtgcaacaacgtataatgttttggtcgcctactgtacatgagcttatttagaaagtgtactacccaatgctccaagtgattcctaaatatattgtagtttaattatacattagctagattctatgaatgatattgtatatgtgatgcgacaagattatgcact

SEQ ID NO: 22456 - DNA, 414 bp, Oryza sativa
  unsure (1)..(414): unsure at all n locations
cgatatccaacactcttaacgttgtgtcacatctgtcctccacataagcttatagtaggcacataagcctatagtaagcttatagctcactattatacttgctcttactagtataaagttataacccacttattctaaagctcaacatgcaaacatgccacctcaaatgataacaatccggcccatgtggggtcggccgaagcccaataacttaaggatgcccggacccaacagttcttatgcacacccactcggggaaaggcccaatattcctaagagactagtcccatatgggaagggtggctctccttttaaaggggcttcctcttcccagctaagcaaggtggattatcagaggctcacacggncgcagcccgacttttgcgtctcttgcagcatgtaatagtggaggat

SEQ ID NO: 22457 - DNA, 432 bp, Oryza sativa
  unsure (1)..(432): unsure at all n locations
ntcttctcttgaatgctttcccaacaccagagaactgcttcctgaacaagaaatattgtttggagcggttgacggcagcacagtattattacctccatggcattgtgcattccacattccattatgccaaccaaggaagcagctccacagaagtggcacaagatggattggaacaacatgagtacagattcctgtggccggcaccatcagttgcggtggccatgaatgcgggcatggtatcccatcttttaacccaagaacaggctgcatcgagcactgtgtagctggcatgagagcaacactgttccatccaaaactccatgggagcaccaaagcatgtccagtatggaaaggcaatgccacaccattacaacatcctgaactgttgtttgctctttataattgcattatctggcatcagattctctgaac

SEQ ID NO: 22458 - DNA, 348 bp, Oryza sativa
  unsure (1)..(348): unsure at all n locations
agcttcgaggctcctgctnttacccatgttcgaccttcctccttgatcttagcgaggatggaagccggcagtgaggcagtgtttcgaaagattcttgtatttcgctcgcaccaaatttcccaagaaaccaagatgaccaacgttcgcgtgggaatgcgggggttgttgggagagtctaccacaaggctccaccatagttctaccgagtcgcaattactccatttgttcatttggaggtcgggttgagtccacctttgtatttctgtctaaaccttcttttgaactctgcagtgtgccaacacgtgaagtggtgactcgtcgattatgcagcacaatgggcatatcttc

SEQ ID NO: 22459 - DNA, 455 bp, Oryza sativa
acggacacttaaaactaagcttccagcaagctcaagctcaacatatttgaaatctgagcttggctgatagcttgttaatgagataatatctgtatccaatagaaaaaaaatccatgataaaaaggaggaaaaccacaatttaaattttaaaattagcaaacaagaaaaatgctatgaaagatattttacactcctacatactattttattatgcagataaatactagttttgtacctaatcttatagtttatttgcatcacacaaccaagctcatgaacttttgcatatatatgctcatcctagctcatttggagccttatccacgcccacatgagctaagctcgaggacatcacgactcacgagccttatactattatacatgtaacaagcaaaccgacgactaatctagatatatcataagaatccagctgtcccaacttatatataaaaata

SEQ ID NO: 22460 - DNA, 421 bp, Oryza sativa
agcttgctgtggacttgataaagcatttttgttgtcctatttacgccgagaccctcctttctcaacccgtataagattgagaaagcctcatcatgtgcgcctccatgagaacaacctgatatcagtgcattccacagaatcaaatccctatgggacatccaatcaaaaaccttcattgcatcgtccaaaaaatggttctttgcatacatatccacaagaccaacacctatataatcatctgaatctgcattggctttgatcatgaacccgtggatttgccgacccaaatcaaatgcaccagcaccagcacaagccttcaggatgctagacaacataaacacgttgggaaccagccctgaagacttcatctgcagtaacaactctatcgcacggtgatcgtgaccattaagtacgcacccag

SEQ ID NO: 22461 - DNA, 369 bp, Oryza sativa
  unsure (1)..(369): unsure at all n locations
tggatgatggtgattgctgtggtccaacatgcagagcttgagtttggattcttatattggatttgaggaggagaagtgatctgggagctcagcttgagaaggaaaagaaaaaacaagcgagggaagtgaaaggggaggaagaaaaatgtttttttttgctgctcaccttatgtccagatgtgaggtggggcgcacggccaatggtgggttttgggctcacccaatgtcactgacaagtgggcccaaatcgtggtggtctaataggtaaaagctaaaatagatgtggaacaagaatatgggcagaattcagaaattntcaacaatttttcacctattccactgtgacactcagttagttcaataaataat

SEQ ID NO: 22462 - DNA, 291 bp, Oryza sativa
cttaagaactagctggactgctattttccatcattcggaccttgcgcgacccaggggagggcctctttgcccatttgatcttatgaatcctacttcgaatggcgaagtcggctacccctgagagattatgagactttccttgactctaactgtgtgcattttttaagtccctgactatgttttaccatgaagggaagctaacatggacccaaatttttttgattggcaacttatattcgtgcctgttggcagacccgttgcaggcaatctaaaccaccgtggcacgaattt

SEQ ID NO: 22463 - DNA, 431 bp, Oryza sativa
  unsure (1)..(431): unsure at all n locations
actttggatatttgttgtcatatttgcaaggaggttatgttgatgggccangacagatatcctgtatcttggaggagaattcagcaagacataaccctgaactcggcgaacggattgctcaatctttggaaacatggagttctgctggtgtggtcagaagaatcgttggagcagagaaggagctgttagttgagttaaagaaaatatgcgactcataactaaagctgcttgcttcagtatcggcttctctatcatcggccttacattgaaattgaaaaattttgctcgtgaattttgttccattgttgtgacatatgttgtgagtgtaactgtttggctttgcgccgtccattctttactctgtttctatgagattttgctggagtgatccctgcttttcccctctgttttgcatttcttcattttttact

SEQ ID NO: 22464 - DNA, 364 bp, Oryza sativa
ccagctctctgcacttcttcttcatgatggtgagcccaacattcagctctcgtgccgcctgcgtgatcggcatgtataagtactgggacacgagctcgaacgtcaatgccttctcctctgatctaacatcgtctctcatgatcttggaggctgctccgttctcatcaccgtaatagagcagtggcaataccttctcacttttctctaccttgttctccgattgctccatctcatcccaatacttcagcacatcatcttcaaagatgacaccaagctcgtctgcatggcaagaaacaatggtctaagcaccacaaatacacagaaattaccattcttcttcggttaaaaaagagatgaccattct

SEQ ID NO: 22465 - DNA, 383 bp, Oryza sativa
  unsure (1)..(383): unsure at all n locations
tatagaanaatatataatcatttttaacatattacaatcatattatccaaatatattaaatattagttgtaacaaaactaatttgatattataaatattgctaatttttatatatatatatagactaattaaaataacttataatgtaaaaaattataacggaggtggtactacactagtactcctatgttgcttgctcctgagctagctttcgacttgtcggacgctctgatcgatgctgccctttatccatctcctttctgcctcgatccgggccatcgcatgatttgcgtttgatgcaccggtgatgaccgtccaacagcaaattctggcgggcatgcatcacaccaatcgtccatggatcacnttccccctcttgcatg

SEQ ID NO: 22466 - DNA, 118 bp, Oryza sativa
acggtccataatatcattttgattttttgaaaatatctgtgttgtgtaacaaaaaacccgcaaaattcccacgatttttttttttttagttatgaatttttgttctgtggttacaaca

SEQ ID NO: 22467 - DNA, 362 bp, Oryza sativa
acacttaaaactaagcttatttattatgcaaaattatgaatagcattagttgttatcagcacttattatatgctatcgccctctcggctcatgaattctttgccaaatcagtttaagatgcacataaaaatgctccaatctaagaacgaaagcagagcgggtgaatgcatcatcatcacagctgcttataatcgcgagacaacatcatgacatatattacatgacaactaatgccatcctgtctcgccgcgccaaataaccggagcccgccattcgtcccctgcgagccgtgcacgatggacagcgcggtctcgtcgttccccttccgcagctgctcgttcacctgctcgagaaaccgcctc

SEQ ID NO: 22468 - DNA, 451 bp, Oryza sativa
  unsure (1)..(451): unsure at all n locations
ngcttatcttacttctcctgggatccttgaataatgtggtcaactcaaccttatcccttgtaaatattaagcaacaggcaggctcacattacttaatttgattaatcattagacttgtgaaagtctaatgaccttatttttgtaagttggttaagtgagtctactccatggtgtcagatggtttaacctgcttctgcttggatcctactgatagagttgtgatgcttcatgccctgctacttacttaagtgttcttttgtgcttgacaaagtggcaagttggccatgcaatctcttttgcccaagacatggatttctaattgcatatatcattcanagtcaccccttttctctgtcttagctttgctccttntttatggcttgtcttccttactaatgccacttcttttanggcagcatcttggataanaccatatctcttctgaaacaac

SEQ ID NO: 22469 - DNA, 459 bp, Oryza sativa
tacgtgacacttagatactaagcttaagctcggctcgacaaagctcacgagacttggaagatgctcgggctcggcttgtatgaagctcgagccgagctcgaattgagcctatgatgagtcaagctcgagcaactcgcgagccgcgagcttttttgacagccctactttcaaggtctaacgactattctctccatgtagcgcctttttactttctagaccggcttttgttccaatagtgaagaaacaatctttaacaccggttgaatacccccctttagtacctgttatagcaaccgtgacaagtaaatcgggacttaagatctcgatcttcttactggaccgactttgggtacactagtgaaaaaatgatatttaacaccagttggaaacccctttagtaccgattgtagcaaccatgacaagcaaatcgactgtggctacactaataaagaaatgatc

SEQ ID NO: 22470 - DNA, 400 bp, Oryza sativa
  unsure (1)..(400): unsure at all n locations
cacggataaataacaaaatagtacatgtgttgacaaataagtctcattagtgtgtttcatacttacattaagcaattcaacatttttggtgctgcccccttgtcgacacgatactccccattaacaaagtaatcaggctctttgattacaggaaaaactccaccaccaatgcgcaccatccataagaacctggaaataagcagctaagtaagaatccattttgtagttcagtttttgaaaaaatgttcaatactaattcgaataaaaccaataacatcgatttattataaattgctctagattcagtggataaacttacttngtaatgtcatctgaagaataaccagtaacaccaccaaatacgacaagcacataattcacatccagtgactgcattatc

SEQ ID NO: 22471 - DNA, 433 bp, Oryza sativa
gctttacgtgacactatgatactaagcttgtcggacgtttggatcagtaatacattcaacagtatcagctggtccctcttctgttggtgtagatctgcaagcagagcaaaggtattatttcagtcagactgtcctagtatgctacagtatattgctagaactgtcctcctattatgttatattgctagagtattactaactcattgatagattcagtaatgtggtttcttaactgttttttcatcttatgcgggagcgttgcaacctatgctttattgaattggagaaggtcaaaaataagcttccatttctttccaggtatgggatgcaatacatatgatactttactgaaattgtactttttacctgaatgaattatgtaagtgcctatgagttatctggctgaaaggcacctgcatttactgcttgagaa

SEQ ID NO: 22472 - DNA, 308 bp, Oryza sativa
gcttggattcacatcggcgaggtacttccagaggtcttctgcgtcgaagaagtggaggccggtcttcttcttcttcttgcgaacccaacggcggcagcgacgaccaaaggcgacgaccacagcgactacattgggcttctggaaccgccgcccgaggtaaaaaaaaaatgaactcgcggggagaatggttccggcggcggcaaaaaaatgaggaggtggcggccgaaagatgagagggaggggctctatatatagccatgggaggccggaatcgagcccacatcgacgggaaaaactcgggaaagtct

SEQ ID NO: 22473 - DNA, 437 bp, Oryza sativa
tcttcgctgcacctcgttgcccgcgtgccctcttctgtccatctgttggttgactaccactagcctcctcctcctggttcccctccacatccctttccacgtgcccctgctggttcccctccgcatacctctccacgttcccttactcgttcaagtactggtttggatcctcgttcccctcttcttcattccagtactggctgcttccctccgcgattgtatcgtacaatatctgttcctcatcgcggtcagccatctgttgatacaagaaacatctgctaagtcacgagacatttatgttttaacaatctaagtcatgtatgctaagtgtaaatgtcgtacattagaaccctacacatccttacgtgctgagtctaattacaaatccggatatatgcttaatctaagtgacgtatattatacaaccctacctagta

SEQ ID NO: 22474 - DNA, 424 bp, Oryza sativa
  unsure (1)..(424): unsure at all n locations
agcttcgccatggccattgccatttggcccatgtagattgtttcgtttcccgttgatccagaagaaccaagagacccagccaatgtttctgccaaggactgctgaagggcctccattccttgtgaaagagcatcttcagcttgttgtgaagactgctgaaggttggctatccctgacagctgctgctcagtgagaggttcaagctgtgtcgaaagaagctgcagttttcttacttttagtaactcttactcaaataaattcataagcaaataaagaaaggccatatgaagtactaacatgctctccaatggcaagaaatgaggtatgcaagagttatgcaaagcaagatagtgttntatcaaaactacaatctgcctattacagcacaagtntacaatgacctggtgatatgagtatatgaaat

SEQ ID NO: 22475 - DNA, 452 bp, Oryza sativa
tatatcgccaataccagccacaactcagcctgggtagagttatctgcaagagtggaaatgccaaactcagtgacagctaaagcagcacaatggcagaataatcatctaagaagaactttttgttggaattgactaagcatttctagttcataacacgcttaaatgatcactaacacaaacatatgcaacagttacagcacatgtaacggaagcattcgagagtaacaaaaagcttcgtgctacatttggtaagctgtttcatactaaagcgcgcgcaaacatgcacctatattacatctgggccggaagtgtatcacgcgaagacaagatgaaaaaggacaatcatgtaagaagaaaatacatgccacatttgtcacgcaatcctaccgcaaaaacaacataaacatgctatccgcatgcatgcacatcatcagaagcatcacacggagttc

SEQ ID NO: 22476 - DNA, 420 bp, Oryza sativa
  unsure (1)..(420): unsure at all n locations
agctgatgagaagntgatgtttgttcttttcgcanaaatgccaatccatacatggccagcaattgtttctgatcagagccgaggatccggggtgtgacaacgcagctcgtcgacaggtgcaggaaacctttgtgtatgcatcatctgtcttggtacagccactggaatctccattttgagcaagaggtggcatcttgctgccatgatcacggtcacggctcccatcaattttcatttttgattcttttattaaatattttctgcagttgtatagagcacaaaaaaacttgccagatcatacacccatagactttttttttctttcagtggcaagtgaactcaagctgcatgctaatgtcgttacaaagcagtatgtgttaaccacaaatcttgcttgttcgcaaatgtataccttactct

SEQ ID NO: 22477 - DNA, 445 bp, Oryza sativa
tattatctcaactttgtctgcctagactcaagctgtatataaatcagtggcgtcgtcaggctcgagctcgtctcgatgaattaaaccttacacgaatggtcatcgaaatctcgagctccaattcaattcctttgataaatacatagtgaactttagctcgaccttgatgtttagataaaagcattcatccaaacgttacgaaactctagctagctaatcgtttggagctcaaatcaagcctaggaatgatcaactgtagaattaatataaaccactggggccattctaacaatggtgaaatccgcactagttggtgaaataagatttttgagaatcaaatccaacctgcaatttcgtagagggtgtaataatctgtacgatgccatcaaactacttcaaggccccatgcatggatattgtacaaaatcagtaattaacccatgtt

SEQ ID NO: 22478 - DNA, 371 bp, Oryza sativa
taagccacctgctgctgcagctctaggagggtgttattctcttttcatttatcgattgtttcttttaagaacggattacaagatagcgcgaagaactctaatgaattcactgttgaactttgtgccactggctgcttccactatggactgggaatgaggaaatgatacaaaccggattagcacattttcttacaacaatgtctactgtgactaattccgtctagctaggactctttctctgcatctgactattctgaatctttgctcgtgctgcaattgctttcctagcaatcaatcatcaaacatatataccgggtttctgaatgcgttatatatctctgactatgcacgagtatatgtcgagcggtact

SEQ ID NO: 22479 - DNA, 378 bp, Oryza sativa
tgttcaacacatatcgtagaactagcgtagtgtttcaaccgaaattttctgctttaattttccacatactcaggtttttatttactcgactctagaatttaaaaaaaacacacaaaaattgcattgaaaaatttagccgttgtatctattatttacgcgtcacatattataaaaccgccacacaacgtagtaactactactgtaactccttacttagttctggttatttattatcaattgacatatgcaaagcttaactcctaaaaaacaacccaatttcgtactggagttttgaaaacaagaaaaaaattacatttatcaaaattttagtaaaatagaataatataagtattgaaaagcgttggaaacataatttaa

SEQ ID NO: 22480 - DNA, 428 bp, Oryza sativa
aaaatgagatcaccactactatgaatcacgatgaatcacaaggaaaccttcataggtgcaacgaccacatctcagttgtaggacacaatgactaggagctgtgagaaaaccgtatggtaggggaaaaggaacaatgagtttagctaggtcttacattttcaccaaccccccaaaactaatgaaaataaaaaccaccttgattttaatatgcacttaatttgttaaacatgttctaaacaaactaagtctactattttttatataatgataaagattatagatatttggttatactgatgaattaaatattatatagtatataacttagagaaattatcaaagtgatgttgatgaagaatatttgtcgaggaaacgtacttccgaaagatggcagaggctatctgattaatatgatccgttctcaacgc

SEQ ID NO: 22481 - DNA, 427 bp, Oryza sativa
tatttgttgataatatttgcacacggtgaatacaacattcctgtaatatactctggcttgaagcttggtagcatgggttgacattggccattgggtatgctcttatgatctgtggtcattaaaggcggtcgctgttttggtatgagttgaaagttattgaaataatttggtcgctgtctaaaatgcatttagctctgctgaattttgttttcctatgttaaattcttaactgcttggggctctgctatgggttttgaaattgctacaagtattgagctaatttctgaatcgacaatgagtgacacttctgttataaaggctttgcaattgtgttagattgtttctattgtcgggtacacgtgggaagtactgttcgtctgtaatgtatatggaatatataacctgagttgatatccttgatatatat

SEQ ID NO: 22482 - DNA, 447 bp, Oryza sativa
  unsure (1)..(447): unsure at all n locations
gcttgatgcttatgacaaccctgatctttagaggatagccaatctttccaacatgcagaatctaactgttgttgggtgcccaaaactgatggtatttaataatgtgaaatcacttcggaacattcaattggggattagtgagatggaaacactcccggcatacctgccagatacaaaattggaacaggtagagattgcttgtagcttatagctgcttaaattgatggtcaagaaagagtcttggtcggagtggggaaagatcaagaatatcatgcatgttaaggggtttgctagtgaaaatggcacgagatggtatatatcctacacaaaacacccccttctccttgatacaaatatagaatatacccttcaacttccaagtacaagattctacaagattgnggtcattttggtttctctttcattctccagtctcctcataatctg

SEQ ID NO: 22483 - DNA, 391 bp, Oryza sativa
  unsure (1)..(391): unsure at all n locations
tctcaaagtcctcatagactccagagattagctggttggtcaactcatcatcaagaccaaacaaaaacttttcctgcttctcggcatcggtgcgcacgtcctcatgagcgtatcgcgcaaggcggttgaactcgtgcaagtactctgtaactgtcctggttccttgttacaatgcacggaactctctttttctttgtgccataatcccctcaagaatctgtgccttcctgaagctttgacaaaactctgcccaagtgtcacgcccggaaattcactaataatttccgaacttatttgtgcataatatcctcgtccaggaatcagacgaaggacacaaactgacnatttaatatacagattcatcaaattaactaaaatgataaatacttac

SEQ ID NO: 22484 - DNA, 409 bp, Oryza sativa
ttcagacgcggccgcatctacagccactgtttctcaatgcttataaagatggcagcctgaaataattgaactcgttcggtcgggccaacccggcagagaaaaaaagggattattgaactccaaaagtgatcaaatgcggtggagcagagctctcgtgagtctaatcccgcaacgagaacgcatatgaataatggttttgcggcgggtgcgttctgcaatgacaggccaacggtcaaagcattccaacttccgccttctcctcgtctaaaaccactcgcttccaaacaatccaaaccttccatgccatttggcattattggctttgcttctcttctcttactttgctttggctcttccccataatcacatgaccctataatgaatgagagagagacctatcaactgatca

SEQ ID NO: 22485 - DNA, 336 bp, Oryza sativa
tggatggcgcggaatctcgggcggtgtccgaaaggcgctcattcggcggtggagtggccaagcgtatcgaccgccttgacagtatggggaggcggtagagctgcggtggcatcataaagttggcaaaggcgttgggtcttgggaaagtagaggcgatggggtgctcggaggatgatgcacgtgtcaaggacagccggcggatggtggccatggtggcggagtacgtgtggaggccgttctggccgagcgcaacggcgccactagagagaatggagagggcggaggcaaatggagcggctctagtgctattggtgagctcaagataggtagaaatgg

SEQ ID NO: 22486 - DNA, 418 bp, Oryza sativa
tcccacttcagcatcgcgaggctatatccgcctgaccccaagcggtgatggtacttcttcttggcggcattttctttgtttctgtccatcatcgcctgcccttgttgccctatcttgtaagcaacgaactcgtcccagtgatcccttagcttcgggaatgtgttaaagttcagtgtctgccccttcaagatgtatttctagtatagatctcccttgaagctctgaaactgttctgccattttctttatagtccaccttttcactattttctctgttcccgcacgaatggtgaacgtctcgagcattgtggtccacagcatctctttttccgaatctatgacaaagctgtcatgatctctgcgtgcacttgttctgcgctagtatacccgtctgacaggcaacgtatacctcacaaccc

SEQ ID NO: 22487 - DNA, 390 bp, Oryza sativa
  unsure (1)..(390): unsure at all n locations
aaaatctgacatttcagaatttttatccaaattttgaaagnttttgtcccaaggatattttggtcattttgacaaatttgtacagtactaacggagactaaccgggcggcgatggtaaatcgtaaaagttaagcaaaagtcgatggcatattggagaacatgataaagtcagtggcatataatggattatctcttttttttttttaatttctacaatcctggcaacaactactacccttactctttatgtcatacctgccacctatcttctttattatttttggattttaaaaatcaaacctagttcatcgtggagttgtttatagttgtagatatcccgcaaccgcactttacggtagcccgtgccatctttttgtatattngatttaa

SEQ ID NO: 22488 - DNA, 424 bp, Oryza sativa
  unsure (1)..(424): unsure at all n locations
gtgtactgctgaaagtgtcttggtcttctttgaagtgattntgaaaataatgatattcctgtgtgttggctagttgtcaaatgtttgaccctatgttcagtacatatttaatttttttatttgtttaacagaataacagtcgaagaatgccacgctctcatctgtaagatatggttctataaacagatgaaaaaaaaatagatttattcatcaatgcgattctacaccaaagattcatgtattttttagtatcatgcaaacaatccattttagcaaagtcaagctaaaggagtgatttcctgaaaaaggttcctggggagtagcgtatcttcaattttcccaacaaaacacgcctcatatccaaatcgtgttacccaacataaacatcatgcatgttatgtaatgtantgaactattaattttt

SEQ ID NO: 22489 - DNA, 448 bp, Oryza sativa
gcttgagcacattctgatgaggtacaaaattaacaatgccaaactcactaaatggttcacaattgaaagtaaacagtaagctatgaaacattgcagtgtctttacattgtcaactaaaaactgaagttggatgttttccaaaataacatagcaccggagtgttgccgcagatgacaaatacatatatgatgagataaaaaaataataatgcaaaaaaatcccttaaattaaaataagtatacagacgaccacatgagatcatttcaagcgggagcaggtgcagaacatactcactccacttctttttacttgtcatttaaggcattggcatggtccaatgcatatcatatattttgccttttctaatgatatatccataaaaacatattgaaaatataactacagaataatatttcattaaaaaaatgctaatatcttatttacatat

SEQ ID NO: 22490 - DNA, 443 bp, Oryza sativa
agcttctcacttctcagcaactatcctaatttgccatattcatgtgatgttcatgacttttttttggtgttcttatcaaattggtcatgaactcccggatggaagcgtaatatggggcaagtcctcctccttccgtgtattgctttccgctgggcaagcttcactccagcgaattgtcgtttttggagacatgggataagggcaaattgatggaagagctcaccatcgccattggagtcagaaaatgcaggggaaataaagagaagggaggagaaacatcagacatgcgtgtcgctgaaatatggggctacccacttctatatttaactctttcgataatgggctgccacgtcaacacacttagaccaagtcaacttgctatgtcaccaaaaccgctttcgaaaccacttaaagagtcaatttggacccgggttttaaaatag

SEQ ID NO: 22491 - DNA, 466 bp, Oryza sativa
  unsure (1)..(466): unsure at all n locations
gtgaccttatatactaagcttaagtttttgacaatgccctgtaacgtcctgttntctttcatcgctaattgttcctcacaggaatctacagctgtcaagttctgaggatggttgcatatcttttggagcagctgtttaaatgtaaacatgaaatatctcaatattatgaaaaaagatacaatccatctctaaggaaattactcgactagtgctacagaccatcaaggaccataagatcatgagagagcaccatacataacttaaaaaaggacgattaaagagaaatttcagaagtaccattgttgcaacaaatgttgatcccttcactgtcttatcaatcaaattgctcttcataaatgtttcatataattatatctgcgtacacaagaaaagaggaataaataatgctaataactgaatgtagctttttcatcaacgtaatttctacctgatatggcgttagctt

SEQ ID NO: 22492 - DNA, 285 bp, Oryza sativa
gagtgacagaggaatttatgcactaatggcctaagttaaattcttagtcatatcaccgctgaagccaagatgacacagaaaatgaaattcatgattgacgatacttagatgtttccttaattacatcaccggtgggcagaaataattaacgaaataataatcttaatgaaatcatcttttttctagataaacttcccgttggtccattaatctagaaataaattactcagtattgcaactgatcctaaataataagcattgccaatgcatgaaaattacattggc

SEQ ID NO: 22493 - DNA, 429 bp, Oryza sativa
  unsure (1)..(429): unsure at all n locations
tcttgcttgaacaatgtccagctgtcatcatgactcatgtcaattangttgtagaaatcaggcatagtctgcactaaccttgcaactctctcactgcgggtggttactacaatgttgcaaatttctgtggtgttcatcggcaagcacaacagttcccaacaatcccttcgctcactccatacatcatccaacacaagtaaaaccttcttacccttaatttcagctaccagaatctgttgaagaatatcaagactatgttcaggtaaaccacactcctccttctttagtgactgaatgatgccctttgttatgttaataacatcaaattgttctgagacacaaacccatgcatgcttatcaaaagatccgcgcatccttgagtcattatatacaagttgtgctaaaactgtctttcctacaccacccatg

SEQ ID NO: 22494 - DNA, 435 bp, Oryza sativa
  unsure (1)..(435): unsure at all n locations
gcttctccacctcacggtatccaaaccttgagccatcttctcttttcaaatggaatgtgaatgtagggcccattttcagaccttccacctaaaacataatacatagaaaagaatagataagtgcagagagctagcagaattcaagtgggcacttcagaatatcttattcataatggcttgttcttatatggatgacaaataatccaaaccaatggaagaaaagtaaataaagcagcagtaattcttaataagaagatagaaatataatgagatataacttagttatggaaccttggaatactgttgtccatatattgtgcaaacatttatctcattactgtgcttcaggtccagcattntgtttctcacataagtagcaagggatgtagtatgcctacaaaagaacatcagggtgtaaactatacatcatggata

SEQ ID NO: 22495 - DNA, 416 bp, Oryza sativa
tcatttctacaactaatctacatgtgtgatgctgccttgcagcaaatggtcatggagatcacaaggctgaggaatgagatcgaccagctcgtatccagtttaatgaggcaaactggagaagacctgtcatctgtgtccacagtggatgagctcatccagctgcagctgcagcttgaatcatctctcagcaaagttcatgcgaggaaggtactagcacttgcttaaatatggcagaagattagtgcagatcagcatcaaatccttatggaatatacaagtcctccacgattgttttttctttgctcacaaattcacaattagagtttatatgacagaatgtgttaactgcatgaggtgctcgtgtgcatgatgagctcatgagccagcagctggaggatatgcgtcgcatggtacac

SEQ ID NO: 22496 - DNA, 437 bp, Oryza sativa
  unsure (1)..(437): unsure at all n locations
agctttgaaggatgtctggaaaggtcctctgtccactgcaaccttctacttgaaaaatctcaatggtggcaagatgttgaaatcttacccacatgtcagggggatatttgcagttgttgatgaccacacgaaaaggaagagtggaagatgcaaggctcccaaaccctcgttctggcaacaccttatctctattgtccaatgaccagtgcatacttctagggggatacgggaggaaactcaactttgggcagtcaactgccttcataatatgcaaattacggattaagaactctctatcttcttcacccgaccgcgttgtgcaccattcttcgaagttatccattcgttctaaccaaataatgctaatttcttgaattcccttcccatcgagaattctctgcaattntttaatggtggcatatcttcatacaaaaatc

SEQ ID NO: 22497 - DNA, 440 bp, Oryza sativa
  unsure (1)..(440): unsure at all n locations
tgtgcatcgcatgcagctgccctgccatcgaagcaatgtcccatctatacagtctacctggctcaactagctaactagctatgcttgtgcattgcatggccacaccattcacacagccacagtcacaccaagcagcaggatgcgaggaagagaaaatcgcctgcatcacactcacacggatcgtttcgcgcccggagatcttgacgcgatctaccaccgttgcgttcgaaagcgacggtggatggacagtcactgaggcatctgcagtttctgcacagacacaattcattgtactcgatcggaacagctactcgacctgagcttgatgggtgggaaaaaacgatgattnttcctggagtgatgtgtgatccctgattcacagatagggaaagaatataagaatgtttctcttcaacattntctcctgatttgatcctctc

SEQ ID NO: 22498 - DNA, 427 bp, Oryza sativa
  unsure (1)..(427): unsure at all n locations
atcatcctatcatccgcttatgtgcctgggttaacactcatcttttggagattntaccttctataaatgtgcctgggtattaactcgtgctttttaagtaggtgaattgttcatgcattacatctaacacactaatctttgtttcagcctttcagattatactgcatgatacctttttctaggttgtaggaactacacagaattttttcatggatttgttcaattatattatcaatattgatatatcatttattggtcaatattttgttttgctctctgactaatggtttttcctctctaattagatgccagacttctagattgctgttcgcgtaacgatcctgatattgtcaaatttctcatggtgatggctctttgcaatacnagtgttcctatcaaaaggtaagtggcatcttcttcatgttac

SEQ ID NO: 22499 - DNA, 428 bp, Oryza sativa
  unsure (1)..(428): unsure at all n locations
gcgacatggagactacatagtatgatactgctgggttccccggtgaccagcaatggcgggaggagttcaaccagcanggcgggtcgtttgatgtctccaagagcactgatctcaactcgtggttttccgggtacgacatatgtaacatctgatgatgatttgcacacttttgttcaactctttgtacctttgtattgctagcattgcatgttgtaccaccagctggtgagcacaagagaggaagaaaagagttaatcctgaagatgtgtgtactacctcttcactgtcttgtgatgagggcgcggcaagattcttcggattctcccccccaaaaaagaagtgtattgatctgtctggtaattcaatggacactttcatatgaaagagcacaacgatgttatgtcattgtgattatatgacttacaatt

SEQ ID NO: 22500 - DNA, 402 bp, Oryza sativa
  unsure (1)..(402): unsure at all n locations
agcttctntatagntggtttgctatgtgtattttcaatgatgtagacagctttatgttgcacgcatcatattctacaaagcagtcggtatatcacttggatcatgttattcaaggattcacaccgcatatgctattaatattaagccacttggttgattataattattaaaatccactcaggtgggtagattatttattccttgactatatgcttagtttgttcagctaaccacatagtcgggggctacacctattaggtgcatctagttgatgcacataactttatttttcagccctcacagtcttcatatttaagaaaagtactcgggagaccatgacgaagatgattgaagcacttggctttggagtaatctagtccgagagaaattatcttttcgact

SEQ ID NO: 22501 - DNA, 404 bp, Oryza sativa
  unsure (1)..(404): unsure at all n locations
tgcactctntcttgtccactcccaaaagccaaccatcttatatatgtcatatgctactaaggagatatataccaaaagagaactgaagagaagctctccatatgaattttgcattgtgacaatctataaaaagatgttgaatagtctcatctttcatacaaaagcaacatcttaaattaccattccaattccgtcttgtcagattatctttggttaacacaactcctttgagtaagtaccatgtaaagattgtaatcttaacaggcatcctaagcttccaaattatcttgttcctttcaatataaccattattgattaacgcaagatacattgaccttaccgaaaatctaccattctgattaaagttccatcgaaaactatcagaagagtgatgtaactggata

SEQ ID NO: 22502 - DNA, 368 bp, Oryza sativa
  unsure (1)..(368): unsure at all n locations
tctcgtagaatgatttcattanggaatcatgtgttgtccgcatagctaatactgcttgattaccatcagcttcgaatgtagaaaaaaattgagaaatcttctaagaaaagcagtgagttagtctactcggtggtaggatgagatatgtcgtttgaaaaaaatagacccaccaaagctaaagtatgaaaaatgcctttgttgatcagccagatctatgaacttgagatagatttatggagaaaagtaccaatactatggctgtgtgttacaccggtaaatgtgctttccctcatagcaaaataaggaagataggttttgcccttcgacaatgcccattatgactagagtcgagccaagatatgcgagtg

SEQ ID NO: 22503 - DNA, 413 bp, Oryza sativa
  unsure (1)..(413): unsure at all n locations
tatgtatatatatataacattcctatggtaaggtaaatatatggttttataggttaatggttcccgatttggtaccggtttccgatctggaccgacattgttccgtccgtattgttcccgttctggtttttcgatatttccgatatcggttttgtttccgactttacgtttcaatttcgtttccgagaaaaatatggttacggaaatggttgaggctgttttccgatcgtttccgaccgttttcatccctatccacgatcgcgcaaggagaacactntcccagccgggtggaggagttgcacgtagccggcgcgggtaccgtacgtgacgctttggctaggctcggctgggctcccgtgtcgtgtcgtggcggcagtggctgcatgctgaattggttgaccccgtcgccccgc

SEQ ID NO: 22504 - DNA, 407 bp, Oryza sativa
tctcgggtttttggtctctgcccgatgcatctatgccttccccgagaagatacgagctatatagcggatgcgcccccccagcatgcttatggatgtgcaatgcgtcaccggttgcatggccgccctaagtcggttcatatcgaggctgggagagaaggcgctacccttatttaagctcctcaaacgctccgggccgtttacttggacggaggaagctgaacgtgccctcactcagttgaaggcgtatctcagctctcccccagttctggtcgccccggagccaaatgaacccttgctactctacttatcggcgaccccgcaagtggttagtgcggcgttggttgtggagcgcgatgaagacaatcctcattccgcgcacccacaacctgtgctggcttggcccggga

SEQ ID NO: 22505 - DNA, 433 bp, Oryza sativa
cagcttgccagcctcttcagcgacgacaattgtgtggtagacggagctgccagattggggtatctacttgctggcaccgtcttttttggcaatatcgggcctgtgctttcaggtatttaacttattaagaagaagaaaaaaaaaagctcaagaactgaactcttgtgttgctggttctgaacatgcatgaacaccaacaaatttgagcaactatgcaactaaatttgcaggtgtggcagtaggagcaggttggcaaattctggtggcatatgtgaacatcggttgctactacttggtagggatcccatttggggttctctttggcttcaagctaaagcttggtgcattggtacgatgtttctcgctgtactcctgtcttatccccattgatcagcacttctatgaagtacgactatatgtttcttcaactttc

SEQ ID NO: 22506 - DNA, 335 bp, Oryza sativa
tatatgggatatgaatatgttgtcgagtgtttatactctttgcacaaaattgagaatctttgacaaaatgtatgctgtaatttctttcaagaggatcgaaactagagaatctcataaaaatattgatacagtatcgtataatatgcatgtagcacattatgtgtcttctacaaatttgagaaatccctgacaaataatatatgccgcaatttcttttcttgtactcatactgtatgtctccttctttagatggatggcgaaagaaatcctattattctgggcacacacggtgctaagacgttggatattcagttgtatcatatccgaattgattg

SEQ ID NO: 22507 - DNA, 393 bp, Oryza sativa
agcttggctctactctctccggtttcaaatttattgatgttctgaacgggatctcacttaggaagaaatggttaataattaaggatacatatttctgttttacccatattaaatacattagagtggtgcatctaacaagtaaatcctcttaacccggtggttatgtctgctagtcccaaacgcttcatgtgctaagtatgaatcttggaacacaacttatcacatgatttttactattccgtaggagatgatgcggaaaattgattttattcacacgattttaatggtgctgtgctggactcgatacaccaagttaaatatgatttgcatgcattcaggcaatcaggggcaaatcagtctaaattgatcacatggatgctaaaacattatgat

SEQ ID NO: 22508 - DNA, 423 bp, Oryza sativa
agcttatggagtctattttcagacggatttggtcccacatcaaaattcctactgagctaccgggattctgcaaaacaagccacgtatatcatccagttcgaatctgatttgggttttgggctttgtaattgtgtcgtgggcttagcccaagggggtgtgcgccctatggcaactctatgacgtccctaatgatacttattcaatagccgtcatcgtttatgtcgggttgtgcttagattattctgtcaagaatagattctccgctagatcggtttgtgaaactccaaattcgactacttaatcattcatatgcaatttggttgcaatctatcttgttcttgcttgtgttctttgattcatatgcagggattagccttctcggcgaggtcaaccgggtttcagtaccggtgataactagagaaa

SEQ ID NO: 22509 - DNA, 418 bp, Oryza sativa
  unsure (1)..(418): unsure at all n locations
agaatatatgacttgcatgcaaatgtctttgattcttcttatttctcgtatgataccttgtgcttgtgaaatatatcattaggaagacatgtcatctaagcaattggtaaatgaatgattgcctgaccatatgacccttgcttttttctatttaattcttggaaattatattaaaaaaagtataactttgcctactcatcattaatgttttattcctaccaaaaccatatgttgatcttcatgataaaccttatacatatgctgcttgtatcattctatgntntgtcaaatggtttagacccttattagatttttttttctttcatgttctcatcatcaagatcttgtgcacattcaccatatattgctctccctgtcactgaatgttaactcaacattttattcaccatcatatcta

SEQ ID NO: 22510 - DNA, 380 bp, Oryza sativa
  unsure (1)..(380): unsure at all n locations
nagctagaggcgcaggagcctctacacgatattcacgattcacaagcatcacatgaatgaatcaaaccatgacagggctcggggcgctcacgatgaggacaaagtgggcgtgggtgatgaacaggtattcctggctcacggcgaaaagcggcccgcggccgatgtctaaggcgacgctgacggacggcacggggacacaagtctcgtgcccgccgacggagaccccctcgatggcgtacccctccacctccacgcccttactgtgcacctgcgcgcgcgcccggcggtactcctcctcgtacgccatcgcccggtcgagcaccgacagcagcccgccgcccgctcacgccccccgccgtcgctctctccggtgcccgtgc

SEQ ID NO: 22511 - DNA, 373 bp, Oryza sativa
agcttgcaggcatctaaaccacggaagaatctgaactattcccgcccggagggggggggtgaggcgggcaatgaaggtactatgcccgaaagagctggacctttccaaagccgtactaaccaccataaaaaccatattttaatccttcttggtaggaattcataagatctcatgaatcaagaaacttttataacaaaagtccatgttgtacccattggtttcgagcaccgcggccgcgggattccatcacaaataccaggacactagacatggtgtcgccctctcccctcactttgtttggggtactttcactgaattcttcaacgtgcgatgaagcagaacatacttgtttgtcgacactaactaatttttt

SEQ ID NO: 22512 - DNA, 294 bp, Oryza sativa
ccagaccatactgtgccaagaagcccattggttctccccgacaccacccccgcgaatccacatgtctctcggcatcaaagctcccctgattaacttattactcagccagtggtgtcccattccacccatgtggtcgtacttgacttatgtttggatgaaaatccaaggaattggtccttaagtgcgagagcgggtaaccgtacacccggtacatttcccggtccgcggttttggaaattcacttatttccaagcaccgacccaggtgtctggtttttcaagacttttgtaaact

SEQ ID NO: 22513 - DNA, 424 bp, Oryza sativa
  unsure (1)..(424): unsure at all n locations
agctntgagaagagcaacagaacccggatgctgccgctgctgctgcgcaagaagagttagcacgtcccacccacaggcgcagcagttgcgcatcaactgaagtggcagaaaattcatcatcggtccctaccggcatcgaccacataacggtaaaagtcttgtccacaatgcatgaaaggcttaacgaatccatatgttatataatattcttcnnnnttttatgaatctatcgcaggaacaaacgagctgcaccctcacaggtagggtgatgccgaccttcaaggttccggcagccgagggacttgcgtacaatctgaccccaaagacaacagtgcatggggcgcaacttaaggccaactgtgcacaagttcaagtagactcggtgaagcccgaattcnagcttttcctactcaagtatacagcg

SEQ ID NO: 22514 - DNA, 372 bp, Oryza sativa
catggttagtggcgttattcaaagaaaggtgaaagattagtttggataaaggtgatgagttcttcatgagggtagtaattaaagattaaagttgtgggtgaaaactatgttcttgtcatggagctttgacttgaactgttattgggaggagaaattaatgatcgaccttagttccttgttacaagcagattaatgggtgctaactttttctcttttcatgtgtgtccaaagctgcatttgcaaccgcattaaagcaactttcacgggagcatatataaaattcttgatgaataaagtcatacaaagacggccattaatttgtgcttaacagcacattttgccattgattaatctcatgtataatcttcttta

SEQ ID NO: 22515 - DNA, 345 bp, Oryza sativa
gattatatgaacaacaattcgcaaacttcacctcgggggggcacgaccggcgcctgccaagaccaccctataaatcttcgtgccgccaccgaccgtcgaggaaacaccagtgacaccacgccgatctcctccggggcactaccaccggcgctgtcaacgcaccgcaccacacaatgttgtgggtctccaaccatgttcgctcatttcaccggctatcccaaatgatgaaagcatggtaaaagacagatttagataaatttacatttaagcagaaacaatgaaggtgttttcttagttgatcctctacactgaaggtagactctaggaaacattttcttataagcg

SEQ ID NO: 22516 - DNA, 413 bp, Oryza sativa
agcttaatggaacaaatcatatcatcacatcctacgatttctgatatgcaggtaagaaaaacaatatttgaatatcatatataatttagttgtaatatttctgtttttattggaatttacaggaacaaaattcagcacactctacttttgttgcgagtccaagtgcatttcacgtatgaaatattaattatttaattgaatctaataattcaattcaaaagcaaataagtattgatataaaaattttgttttgcagaattcaatgatattaacaacaaatcgtactaatgctaatattgaagaatggaataatgatgcggcaaatgaggcatgttgtcttggatgtattacttcctggtgtagtattaaaaattatgataattttagtaaattctaactttgtaatgtaattc

SEQ ID NO: 22517 - DNA, 408 bp, Oryza sativa
  unsure (1)..(408): unsure at all n locations
tgcacctttggcctgcttccattggttatgttgtagtggttctacctcacggctgttttagtagtttctctagactttttatctggatttntaatcatgcactttactgtcactttcaggaggagtttgacacccatgatcctaaagaaaacagcttgctactaccttacttgaggaaaaggtcagaaattattgagatatgtgcagcacgcgacatagtttttgctttatcacagtccggagtgtgcgcttgctttagtagaggtatgtttgtgtcattgtggtgcacttctgcttcctatgatcatacttagaacagcttcatgtattatcagagacanataggagaatatgctttctgattggaattcacatgaagttattcgaagttattctacacaagataat

SEQ ID NO: 22518 - DNA, 415 bp, Oryza sativa
agcttgcccaggctgtaatatatttctgattagctactaagcaggcaattaatgcggacaatgatgttattatgccagaaagagctgaacttttccaaaagcagttacaaaccacaataaaaaccatattttaatccttcttgttaggatttcataatatctcatgaatcaagaagcttttaaacaaaagtccatgttgtaccatttgtatagagttttgcgtctgtggtattccatcacaaatacatggacatagtacatgttttctccctctccctctctttttttgtggtattttcactgtatctttcatcttgagttgatgcagtacattcttgtttgttgacattaactatttttctgtagttcttgctttagtaatactcctggtagaaatttgtctgagtgaaaatat

SEQ ID NO: 22519 - DNA, 390 bp, Oryza sativa
ttaattcttaattatatcatcatgtgattagaagcctcaatgccatttggtcacttgacatttgagcaaccgatcatccgttcaaatttcccaaatccccaatctgaaagaaccctaagccctcaaatcttaatcaaatcccaatctaaataagaaaattaagtttgagttctgtcatggttatggataccacatacccaatagtaatcgattaatcttggtggggcccaccatatcttatacggaatcatacctcgtatatagaagacactacggataagttatgacaaatagaagtctctatagaaactacaaggactactcggatcgtatcgatacttgtctctttagttctacttggacaaggggacatttataggtataaataca

SEQ ID NO: 22520 - DNA, 300 bp, Oryza sativa
tgctggatattttttttcatgattagcgcggtgttctaacgtaacggcgtcaatgacattgacaccatccgcttaatcatttcgtggaagccaagtcattgatttgaatgaagtcggcgcccacggctttggtgttgatgtcctattgtgaatacgaaataaaatgaccacaatctctttgtaataaaaaaactattctcaataaaaaatattttctactggatactaacactaatgacacttatgttcagagtctggttgtgaaaatctctcaatataccctgttaaaaaaatacaaac

SEQ ID NO: 22521 - DNA, 411 bp, Oryza sativa
  unsure (1)..(411): unsure at all n locations
agcttgataacaccatccttttttcctttattccaataataaagacaaatgatagctcgatcataagatgcttcttgagtattctacagatagaaagaggcacctcttcagcttcttaaaagggcatcttttttcattatgtacacaggataaactaaaagttgacacgtggcaatattctaaagatggttagctcttttttcaanttgnccgtggcccaataacatgctaggatcagcaccttgcaatcggtattagagatgtgtcacaactgtgactaactattatgtggcgtcaaaagaatacgctatttcatatatcttttacactaaaagttggcgaaccagtataataacaatacctaaaggcgaataacataattgaccaaaattaatcattggactaaataca

SEQ ID NO: 22522 - DNA, 430 bp, Oryza sativa
  unsure (1)..(430): unsure at all n locations
ntccaatgatatataattcactatttaacaaaatatatttataattataaattaattaatatcaaatgattagataatagttaacctaaatagtgtgccaataaataaaaatggatattgtacagtagaataattatctttaatatattctgtcactatagcaaccacataaattaagtataatcaatgtttgaaattaatggatatatatgaaaatattagtgccatttattaatctatgtccaaatataattaaaacccacgacgtattagttatttaaatagagttagccttataattattaggtaagtaaaatatagatacacatagatcggtcctaagcttgtttatggcaaataataatagagctagtgtgattaaatcacctatataaaaataatcaacgacatatcccatataatagcatat

SEQ ID NO: 22523 - DNA, 357 bp, Oryza sativa
tagcgaaatctacaagttatttagacatatcataaaaggaatttgagatttttcatcaaaatataatcatgcgagaacttgttgtaaagatctaattgttaccaacacaaccgagtaatcggatcgtataacggatgagttgtttaagagaaaattgtatttgaatatacgaggatggtgtctcttatagatggagtgggagacaaaccagctaccactatctgtgtagtcacgtcttatcacatagataatccgccggaataatgtagtagtaatcaaatagaccaagatcgtatagtctctattcatggcccgagctcgtgagtagtgactacggggatgttcacttcgatatca

SEQ ID NO: 22524 - DNA, 369 bp, Oryza sativa
tggcgttcggagcggtggcgacgaccaagaatgagcatgtgcagcagccgtcgccttcgtcctcgaacgtcctctccttcgccggtcaggttcagggtagtaccaccacgctcgacttctccggaaggggatggcagcaagacgacggcgtcggcgtgttccagcagccgccggagaggaggagcatgccgcccgcgaacgcgcaggagcacgtcatcgcggagcggaagcggcgggagaagctgcagcagcagttcgtggcgttggccaccattgtccccggcctcaagaaggtgtgtgtacatgtgccccgatcatggcgtgcattgattccttggcaaatgcggcattaacacgggtgtccatttc

SEQ ID NO: 22525 - DNA, 293 bp, Oryza sativa
tttttggttggcaagcctgaactgcctttgtaataatgtaaatattatcgatataataaaaatgctccttttgtatcatggttggttggggtaccccggcttttttgggacggggattaatacactaacgttcgggaaaaagcaattttctcggtcgcgacaggccaacattgcatatgatggattggttgattctattaaagagaaattgaaaggccagatatttcttgatactgatcatgtgttgcatgaagctctggctcaagaaagccgactggataacaatagcttaa

SEQ ID NO: 22526 - DNA, 446 bp, Oryza sativa
  unsure (1)..(446): unsure at all n locations
tggtgntggtagntggtatgattagctatagtcaattttatcgctataagggtgaccaagttctagtccttctgaactgaaaaatatagtgcacagaaaccatattaattagcagatactgaatgatatgagctttatcaagaacctcatccaatgaggcaatctaagaacatcgtgcccataatgccacagttgaaatcatgtcactgtatccttctacaatgaatgagcagaaatcatgctttagtacatctataaacaagtatcttgttcattttctctgatatggtgaattggtgataatctaaacacaattacaaaaaataaatatcacaatacgaatcatgctaatctaatagtacaatctatatccatgtaagggtcagacatgggaaacgaaagtcaacggagatgcanatctttcatcgttaatacatcaacgggag

SEQ ID NO: 22527 - DNA, 340 bp, Oryza sativa
tttttgtaaccactctaaactagcctctgtattcattatacaagaatatatggcttagcacttctacactagcacatcttacatagatacgtacaaacttgccatccgagatactaatgaaatcattgctagaaagatcccttctcataagcattggatatgcccataacgccactcaaaagtggcatcggccattgcaatatctgacgatgtatgcgcttgaacaatttcaacatcctcgccgtcccattggattacacattgatgcaaggtagaaggctcacgaaaatttgcatgaatcctacaacgacccacaataacattatagttaccttgcaca

SEQ ID NO: 22528 - DNA, 369 bp, Oryza sativa
  unsure (1)..(369): unsure at all n locations
tacttcctcataagacttgaaacaatcatcaattattttcagccaatgaaaccccaatctcctaagcaaccaatttatcttacaggccgattgatgaattccacaaatcccttcatgtactttctctcctagcaaccttagattgatcattatctaagtacttcaacaatactccatctatttttcggcgatataatatttgaacacttgccgctgaatattccgatcaaccttaagtgtangatctttcaaatatctaatcaaaggaattctccaagctatntctaacttatgggcacaaatgtccgaattcaaaattaattcngccttctgattaattgaacgtgcccccaactctctgcccggatc

SEQ ID NO: 22529 - DNA, 424 bp, Oryza sativa
gcatgcaagctgtcggtaatcggacacctctagatatttgcatgttacacagttacagcactaattttggacggcttggctttgcttagttagtggctgcgttgcaagttttaaggtatatttgcaatatgcgatggcactgaaattattctcaagcgcttgatagacaatactagggtgcacatcaacatcaagctcatgccgtatcttattttacttggaaacttggaaaggacatatgattattaagtatatgttccttacgtggttaagctcttcttagctagggatctctaaaggaaaaatattgtgctgcttggagcaattgcacaaaatattgactatagggttatgtcttctataaagatttcagaatgtgctgatgtattcaagtaggcaatgtaatgttactcttcattgtaaa

SEQ ID NO: 22530 - DNA, 241 bp, Oryza sativa
ttctttgattgtttcatcatatttgccctaaattacagggtgttagcatttggggtttattataatatgatattactcaaacaaaacaactggagaaaaataatctgctgataaagaaaataaaatgccattaaagtaaaactaaagaaataatgggtgatttcaactaccaaacaccagaaaaaaaaaaggcctagcctatcattttatccaggcataactctctattatactttggaag

SEQ ID NO: 22531 - DNA, 357 bp, Oryza sativa
atcacccggttcatacctgtgagataaatgacacgaacaagcgcctcggattcgctggcattacagtcaggcaactccccactgtccacgtgatgttgtcctcatttagcattcaacggaatgcttctcacctttgaccttggtgagatgtttcccgattttttaggacagacatttctacctacttctttgcatgaaagaaaacatctaggtcgatacctcctatcattgcatttttgacctttgtcgactatatactcatcactccgagagttcggaatgcttctgaggacgatgtaggtcttgagcctgctgcgttacagagaaaccttcaagtgactctactaaagctagact

SEQ ID NO: 22532 - DNA, 409 bp, Oryza sativa
  unsure (1)..(409): unsure at all n locations
attatataggaaataaaactgcaattgttctgatctttattaaaacatcttataagagcaaacaaaagatcctattaagacagccatatcataagcacatgatatcgaccgtcgactgaccccaaacgagcaacctatacacacaaactaacaaacaaaaactagacagtcgataaactaatgggaaaaacgagcctaatgctcggaacggctcctgcggtcggtggagtcgaatgcgttctcctgctcgtcacccggtccctctgagcgactcctggagcctgacggatcagtctcgccgctgncactgggagtagcagacaggcaacctccggtaccactggctgaacctcttgcggctgatgctggagcgaaagagagagtgaacactggagctggaactggagct

SEQ ID NO: 22533 - DNA, 419 bp, Oryza sativa
agcttcaaaatcaacttcaaaaattaaattttaaaattaaaattttggtagcaactaatgctaaatagaggaaacgatggggcctcgtacgttttgcgcataaaacatcaggagcggcaaaaaaaattagggaatgcttttccccgtagatgattcaggacatctttgttggctcattattcatcaatcaagtattgcaattaactacgtcaaggaccaactgacgtagtactacttcaaattatggctatggaacctttctactgtacctgttattagatactccctccgtactcgtaaagaaagtcgtttagaacaatgtttaagtcaaaccttgagaatataaattatgaaaaactctcaagctgttgagtttaaaaatgtaaaaattatatgtatagatttgtcttgaaaaatac

SEQ ID NO: 22534 - DNA, 464 bp, Oryza sativa
  unsure (1)..(464): unsure at all n locations
tgagcaaagctcaaacttagtagcaggaagtggctttgtcatcatatcagctgggttatcataagtacttatcttgcatactttgacatcaccttcagcaatcacacctcgaataaagtgatatctcacatcaatgtgctttgttctctcatggaacatctgatcctttgtaaggcatattgcactttgactatcacaaaatatattaatgcaagatgtaactccacaaagctcagtgtacaaacctctaagccaaatagcttctttacaagcttcagaaatagccatatactctgcttcagtagtagataaggcaaccgttgcttgcaaacttgccttccaactaacagcacatnctccaatagtgaaaacataacatgtgagcgatcttctnnctatccaatctccagcaaaatctgaatccacataaccaaaacagtcatctctagatctcccaaactaca

SEQ ID NO: 22535 - DNA, 395 bp, Oryza sativa
  unsure (1)..(395): unsure at all n locations
tccgagttntctatagattatttataacaacttatgcatacgcttgccgaccttttactggacatcacaaaggccggaagaaccctacttccccacatgcgaagaaagcattggttaaacggtggcccgtggactaaggcaggaggatgcactgccgcttcttgccgccgccggctgcggcgcaaggcgtggagaaatnnttgcggagtcctcgcgctctatgcggagctcgacgacgaggtgcacgttgcggctgtacccgtggtcggcgaggtgggcgagcacagagtcatccgctggcgttattcggtgcgcgggagaagaggataacggggagatgatggtgaagactgatagattgatagggaggatggaaaaaatgactggagtgggat

SEQ ID NO: 22536 - DNA, 399 bp, Oryza sativa
  unsure (1)..(399): unsure at all n locations
tcttaagaagtttctgcgcccatgtctgtctgtgtactgatcgttttcccattcaatcaacatatagtttgtagaatgcttgacgatgtgaagatctatcaaaaaaaaaaaaagctcgtctccccaatttggttgagataatttcagtaatcgtgactaggaagtacatggcctgcacgtgtgtgattgtgaacggcaccggcacaacgagcgctatactatgcgagtgccttacgattaggatgtttgtttcgttctgtcacttcaaagttcanacattatacgaacacgaagcanaagctatgcttatgtttatcagtcaaaattttaattttcaaccttaaatttggagtcgatcttgaagtttttttcatcgaagtttattttccagcctttact

SEQ ID NO: 22537 - DNA, 407 bp, Oryza sativa
agcttggctgagcggacttgttatggtttatgagatgaagcacgagcgcctggaaggcaagtccccggcggatccttccggccgtcggcgaagtgagggcaatcataaggcccccgctgaggacatcgatgatggcgataatgacctatgtttccaagagcctggggctaccatatccactgtctatgggggagcgtgtgcttacgtttctcccggagcctctaggccatgaagcgagagcttctggccgcggcccctactcatgaggcgacgcacctggcgcggaggtcggaggttgtcctcacttttgaccagaccgaccacccaccgtgcgttgtccggtgagggcagattgcgatggtggctttccccaccatctgcaacgtgaagttggggcgtgttcttat

SEQ ID NO: 22538 - DNA, 376 bp, Oryza sativa
acctatgatactcagctcaccaagtcatcgcctatggtattttgcgaggtttcttcacactctggaccgagaagctacccgacagagtacgtccccgacgagacggaacctaagattgacctattcaagatttgtccagcggaaaccaaggtatcgcggcacgtgagattgttaaatatgagtggtcatgtcccgcgaggtgtctcggcacatcggacaattataccgagataacggcgcctgttacttagtaagacgagacatgctgcatgcgggaccaccacgtgttctgcacaggcattcgaattggttggaagaattatgctctcgacctgcacaaaggattatgagatgattctaattatcacaattcata

SEQ ID NO: 22539 - DNA, 415 bp, Oryza sativa
cagcttatggtgctgctgattaccaaagattatagcgtcgttctgactaagtatagtgtcagttgagcccacatcattttgggtatgccatttcagttaatgaatatgatttattttgcatggatgcctacaggtgctactgacaacaccaactacaccagcagaaagaatggagaaaattacgcaagcttctgaaagatttatctatcttgcagctgctatatctttttttaacttatttacgaaatctaatgaccctgttctcatataacatatattcctgatggccagtcatgtattttgcacctcatatacctcaacgttctataattaaactgaatgctcgtaatcacagtgcactgctggaaatttgtattatcgaatctcaagaatctgtctgatgatagcgaactat

SEQ ID NO: 22540 - DNA, 349 bp, Oryza sativa
  unsure (1)..(349): unsure at all n locations
tnggttctatgcaaattctaatgctacggtgtatgcttatgtgtcgcacatgtagacttttatgttcaataaaactagtcatcttgttatgttagcttttttgtgttattgattatgatttaagttgcacatataaacaagcaccactgtctcttttttttacaaagttacagggtgttcatggtctatttgttgcccactggaatgtgttcttaaaagagagaattcttagagacttcttgaatcatatcacttcaactgcaatatgatattccagcttcgattagtataaatgacaatcttgttcaacttcttacaactgtatatatggcgaagtattacacagata

SEQ ID NO: 22541 - DNA, 210 bp, Oryza sativa
gttgcacgggtggaggaggaacagcccgctctgctcctaactcacgcaagcatcgagctacctacaacggcacccgccgcagcggctatgcttcaccttgatgagccgaaggtactcttcttcctctgcgacgggtccagcaacgactaagctgatggggtgacctcgacaccggcgccacccatcacatgaacggccgacaggagttct

SEQ ID NO: 22542 - DNA, 416 bp, Oryza sativa
  unsure (1)..(416): unsure at all n locations
taagcatactacacatgataagaanacttctcggcgatatggtgggttacttatagaggttcatcataggatcaatagcaaccccctcaattnttagctcaggatatacaggaattcctatttgtgcttgcatatgcttactaattactaccccctcttcagtgccggcacagcttgatcaacatggaagagtagcttcttctaatcgctgataaacgtgtgccagcacagcttgatcaacatggaagaatagcttcttctaatcgctgataaacgtagtaatttcgctttgctaactgactatactcgggaagaacatccaatactactatcaaacaaatcgaggcaaaatgttctgcacgcctcaactaccctaatcgatgcatatagagcgaggaggggaggggaggtgatct

SEQ ID NO: 22543 - DNA, 296 bp, Oryza sativa
atcattacgtactgctatagcccagatacgaatccagacatgattattcgctcagttttgcttactgacttgtatgatgcagctatgtccgaggctttccgacgtaacactacacctcaatataggtatggcagctatgtactatgcctgatattaaaaactagctccgtacgattgaagaaaagcagttatagcaatgctgaggtcatgacttgagaatatatgtgacgaagctctctcattgtgttgagtcttacaatgtcaaaattatgtgctatatgtgacctggaaatact

SEQ ID NO: 22544 - DNA, 413 bp, Oryza sativa
tcatttcctcaagatccaatatgagacattctccatgttgcctcatgagagtgtgaatgacatgtatgggaggctcaatgtcattgtgaatgatcctcaggggcttggggtaaactacaccgatcttgaggttgcccaaaagatgcttatggctctaccagagaagtatgaaacccttgtcaccatgctcatcaattccgatatgtcaaggatgacacccgcaagcctcttggggaagatcaacaccaatgacatgtacaagttgaagaagaaagagatggaggaagcctcaccttccaagaagtgtattgctctccaagccgaagttgaagacaagggcaagggtaaggtgaatgaagccaatgaggactttgaggaagagattgccctcttgctagaaggtcaatgatctc

SEQ ID NO: 22545 - DNA, 414 bp, Oryza sativa
  unsure (1)..(414): unsure at all n locations
agcnttgatagnntncctcatattcaaattcttatttgcatatatacacagtggtttggtggaactaaccggctgaggaaactcttgctattctaacccccggcgagttagatagatcttgctccattgtgcaaaatgaagaggcgaaaggctcatctattcaaagggtatggctcttcattaaatcatcatgatgagtcttgcgctcnttatcagctaatgtctcgatggaagacgccgaagctccgcaacgactcctgaacgacaccgacctcgaccttgtcagtgatcgggagagacaagcctactacatgctgagtgaccgggagtatgctcacacgcgagaatactcttcggagctgctgagaaagataagtatggatgttgaattttgtgctatttggaaaagctgtg

SEQ ID NO: 22546 - DNA, 427 bp, Oryza sativa
taagaaggcacagctaacgcccaccttttcttttttttcggtctatgcagccgcaccatgccgcatttaatgccgcgtgctgcgcatctgaccggtctgtgaccggtccaatgacccatgccacggcgactgtgtacccttcccttggtaatgggtcaagcggcgtgcggcgtgctccattccgtcccatcataatgaggagcttcacagcctcttatcccggtcaagagctggtccaaccactctgagctgacccgggtacttgtttcctggtgtgaacgggaacccggaagtcctcaacccataaacggcgaatgacaagggcgccccgcatgatctgatggtcccacgcagcagccgacgccagatagcttctgggctaaggcacaagacatgtgattaatatagagaaatatttcccttctcc

SEQ ID NO: 22547 - DNA, 189 bp, Oryza sativa
aagctggagagaacgctgcataaaatgtcacctcacattattgatgcactcagaccttggctttctacattaaccgcatgtcgcccatgatgaccattgacaacattaaccgcatattacatgatcttctgagtatgtgtggttagcaagctcctgaagaataatgagtatggtactcatcaagctctc

SEQ ID NO: 22548 - DNA, 410 bp, Oryza sativa
  unsure (1)..(410): unsure at all n locations
tggctgttgtccaaacaatgattattctgcaaatnttgttgttatcatgtcacacgtactacaaaatgataaatcaaaaagatcaattcataactcaagatgatgaaacaacatcgctcattattgagaaactgagtatctctataacaaatgtagaaaacatcacatatcatatttcaagtttctcctataagcatgtttgatcaaaatactcacagtggaacttactgctatgggagaacttacaagatatacatatgttagcctttntactttccttaagcaagtttgaaagattatgatgaggcaagcacacttatgtagtacttagatgaggcaagattgccattttaaaatttattataaaatattgctagactggaatacatatgtgtgcttgcctcatcaca

SEQ ID NO: 22549 - DNA, 332 bp, Oryza sativa
  unsure (1)..(332): unsure at all n locations
atattattacattgctaattgattaaaaaatggaagggctgattccattggtgtacaacggcatagtggaatacaagaaccaaggctagcagcatgcatgtcactctgaaaagcgtcttttattacaccgtcgttgacgacctatttcacagcggcgacttcagccggtggtgctacgcgccgtcagcgccggcgagtgcctgccaccatcttgtgtcgccgctgctgcgatcggagccgcgtcgccaccgtgcaagttgattaaaattaagtggtcaaatgctcaatcaacaagaagtagttaanctgcatatcatatcatattatatcat

SEQ ID NO: 22550 - DNA, 335 bp, Oryza sativa
  unsure (1)..(335): unsure at all n locations
tagctaggacgacngngaacgagttaatcatcattgtcatttattgcacttaattaaaattacccacatcaatcgatcgatccattcaaggccgtgcatgatccatcaaggacaaattataacccatcattatttagcacacaaaccttttaattatcctaatccaaggccatcccaacaattaatcttctccctgttcatcgccgtgtcggccccgtttcccacgggctntgcctcctagctactggtgggcccaggatgatcgcatcaggatgacaggtgggaccgggcccacatgtcagcgagaggaaggggaggtaggtttcgttagtact

SEQ ID NO: 22551 - DNA, 345 bp, Oryza sativa
gcttgggggtttgttgaccgccgttatcgattagttgtgaccgtctatattacaaaaatagaggagaactagtgatgcttgcaatacatatatctgttaaaataataatattccactagtattaagtatactaaccttttgcagagaatgacaataaagtggaggagaatcaacatcaactcagacgataaatcaatcggacggtgttgagaaccatcttatgtatgaatgggcctagaactcagaaataacatgacacattaggccaaaattcacaagtctacaatggaggacaacaaaggaggccgtcagctgaagatgggatgggttgggccagcccatggt

SEQ ID NO: 22552 - DNA, 288 bp, Oryza sativa
tacccttttgctatccgagtaatcagagaagtgcactcaacaggagcagagaactttatactttccaaccatactcttgcaggcgttcccatgcttcaagaatggactcgtccctttgttgctggaaacttgaaattcgtccacgcagggcattgattttgcccatcgggaagaattttgagaggaatgccgtagagcatttgtcccaggtgttgacagcaacacggttggtgtagaaccactgcttcgctctcccgaggagggagaacaggaacagtctcagcctga

SEQ ID NO: 22553 - DNA, 268 bp, Oryza sativa
cgcaagcttgctgattatgctaaaattgtcacagtagcaactagttctggtaagccccttgcctttttaataattctgtaagtgactattatttatttatttcaatcgtcagcttctgcaaaagtggaaaattgatagggtttggggggttagtattgtattgaatcgcattggactttcttgtgttgtagatgccatcaaagatcaagatcgccccctgagcaccagagaagtattgttaccggatagtaaagaagatgtatttgtg

SEQ ID NO: 22554 - DNA, 395 bp, Oryza sativa
  unsure (1)..(395): unsure at all n locations
ctcagcttacctgagatgagaaaanactgcaggtccactgcttatgacatttataagcacctcgcttatctagtccagtgaaacaaagagaataccggcgtcctgatggccggaaaaggattattccagaggcagttggatttccttccaaccaggacatgtccaaccgttctcagaatcaaggtgtggatttttcatccctggatcagcgaatgatccttggagagaatggaacaagaccatcttatagtgctagcggtaactgtaataattgtggagttagggaacgctctggcattactgcaagaactaacattagtgagagtcttggtatccaaaaagcttcanctggtgctggcagtgatggaagggtgagcatanaacagtctggatct

SEQ ID NO: 22555 - DNA, 359 bp, Oryza sativa
agcttctccgtcaaccaccataagtgcacttgcaccagacgaggaagatgaagacgaggaggaggaggagcagcatcagcaagaccaagaacacgacgcggcaacgtcgacctcggctagtatcattactgtttcagctgatcagcgccgtcgaagagctctggagcctcgctctctggagaacttctgttccgacgagcttacccgctgggtaaagttgttggcactatgggacgatcatcatcttcatcgccatcattaccacccatcgccattgtaccaccaccacccacacccaggccagctcaaggtggttcaacggaggtggtggtggccacttgagccttttcactccatgc

SEQ ID NO: 22556 - DNA, 425 bp, Oryza sativa
agcttcccaatgtctttcaactctctgctagtccatgaagccttgacattggaaagtacctccatgctagacattttttttatcttgtgaggaatttggacgctggaggatgatggtgcctgattcctgaatgaaatgtttgttttagcattacttgaactgtttgaatcaatacagccagccagcagacgctttagcttaaggagcaggatatgttttgttgcatactcaggcacctcagtttgcgaaatatccagtacctccagctcatagaggttgttgatttcactaggtagctgtgtaacatctgttctccttaggctcaaatacttgagcagtaaaatattgttgcaaatgtccttgaggtagtgctggttcctctggaagcattgacaaccttctagatctacacccttagcattgac

SEQ ID NO: 22557 - DNA, 412 bp, Oryza sativa
  unsure (1)..(412): unsure at all n locations
agctgtggcagcagctggtctgggagagcttgctaagattactctcaacggctaggagcagcctgacctcacctgctggctaaaggatcgcaaagacccaaaatcgatgaccattgacatatttgagaataagaagatagtcataactccatggaacgttaaaattgccttgggggtcccattgtgaggggattcattcactggtggagaanaaatnttggtcgggcggccgaaatccacaatagttccggatacttttataaaccgggactaaagaagatctttatttctggttggtggctacaacgggcatatgtgatctttaatcccggttggtaacacaaactgggactaaagatcatctttagtcctggttgtagagatgtcagacattgtcagggcccccgggata

SEQ ID NO: 22558 - DNA, 399 bp, Oryza sativa
  unsure (1)..(399): unsure at all n locations
cttagtcttttcccggtcttggtggttggtgtagacccgatttgctagataggcgccgtactatcaagaggggtctatgaagcgagcttgtggatgatcttgtgccatattagttcatatgcatgtaggtgcatnttgtggacctgtctaaccaagtgtgatgatttttctcaagtcctaaaccaagagagaagtgggcatgtccaataggagtgagtgacatcttgtgggtatgtccggtggatatcctntggagtgtaagccctttatccttgacttaagttgtgtttcttggatggnttttcatgggttggatggccctttgaataagctttccatagagtccaagaacgccaaattccgagacccgagtcaagagatatcgccgttttactaatg

SEQ ID NO: 22559 - DNA, 423 bp, Oryza sativa
  unsure (1)..(423): unsure at all n locations
agcttgacgacagagaccgcctctccattgtggcgtttaacgatgagacccgccaaggaatatagctccggctcgttggatgtttctggcgatggccggagcatctccggaaaaaagatcgaccgacttcaggcccgtggtggcagtggctctgcgcttatgcccgagttgcaggaggccgtcaaggtatttgcaataatgtagtacaattatttattttaagtttggcaaaatgttaccttctccagctattaaaacacatgttgtttgcacatatttcaagtcaaacttccaaaatttgaaaatcgataccttcttaatattttggttggaggcattataactgctactacctccatgccaaaacaagtgcagccgtgaaaatncgtgtgcaacgtatgaccgtgcatcttatttaaaaaa

SEQ ID NO: 22560 - DNA, 292 bp, Oryza sativa
  unsure (1)..(292): unsure at all n locations
tacttctctcgtttcttttactctggtaaggactctgctttaatctaatatcattccaaagatttaagatttattctgtgagagttacctcttagttagttgctaatcaatgtacgggatcactgatcactataacccatcaatgtatagtggntgctttaatgtttagctaacattaaagtagttattaaactgcgtagaccgtggggctgggtaagtaattttcggtgtttgctttgatcccactgtangtttgaagtgggtgtagagcggtgatagcctcaaaacactg

SEQ ID NO: 22561 - DNA, 247 bp, Oryza sativa
gatgctgcatgaatagaaaaccttggatctctccaacaacgccctcacacgggacataccaccattggtgggcaggagcccatcttttgtatatgtcgaacttgggggcaatcagctcacatgaagaattcagagatcttggcaaagagctcaaaccttcaagtgcctagactcaagcagaagaatcttacaaggaggatcccactgaccctcttcgacagctgcaccttgacaaccaattacctta

SEQ ID NO: 22562 - DNA, 386 bp, Oryza sativa
  unsure (1)..(386): unsure at all n locations
tggcagctggctaataaatataagtatctatgttgcttctgtaacagnagaagaataaagtggttcataatgccccttactcaaatcacattttacagtgcaaaggatattaccatttgaaatatgatatggtggcacgagaggaatataggagatcatattgagtattgatcagtctacccaaactactatatgcaatattgctcactcccatatccctatccagaaggagttggncatttactgattttatatattctaaagaagaacaagaaacaaactaactttatattatgaaaccttcagttatattaataaattgtagatgatttgtaatggattntctaattgggattagccaaatgtgaaaaacgatttgaacaatg

SEQ ID NO: 22563 - DNA, 399 bp, Oryza sativa
tgcaagctttctctagacactgtttctcactagttaatcctctctatcctagcctatcatctgcttggtggccttggatgaaccggaggaagatctgaccacacacgttcccttggattcgatacccctggaatactccgtatgggaagtgctacatcggtatatccgtgcgcttgcggattctatctatgatcgtaagaaataccaacaagcattctggcgctgttgctggggaacagttgctgatcattcccaaaccttgctcatccgtcgatcctatttacttttctattctacctttacacctgctattctagagaagtattcctgtgggtataccaagatcaagaatattcttcaaagacggtcaacacaatgggaatatgatggaatgataca

SEQ ID NO: 22564 - DNA, 348 bp, Oryza sativa
  unsure (1)..(348): unsure at all n locations
tgagacaccaactctagaggatgaaagttcacaaatgatcatgatagattctctttcaaagttcctcagtgttcatgctcacataaagaatcctcatagttccgtccgattagtttcacttccttgtgcaagaaccataaccgccttaaggtcctcatctctatcatgtttagaaggttggttgtggatgctnttatntatcatanatattgcaaatcttgtatgtgtctgtggcactaatcttgcagcgagatgtctccatggtcgagcttgtgaccataaacaaagcaatgccgggagatatcccggattatcttggtaacttttctttccaataaaagtaagaat

SEQ ID NO: 22565 - DNA, 346 bp, Oryza sativa
  unsure (1)..(346): unsure at all n locations
agcttatctccccatcgatcttgatccctgttatttttggtagaactatccagagtttgcctcaatttgttaccgctagcgcagcccacactgaaacactgccagctccaaaataacatgcaaggttgacatgcaataaattcaatacctaaacataagcaacagaacaaatagtctgactgaagaaaaaagaacagatatccaagtctttgatttaaatatttaattacgaaggtgttttatgctaaacagctacaccttccatcccaaaacttatgttgggattttgggggggggggggtgtgaatantaaaacacttgtgaataacttaaacgattccttcat

SEQ ID NO: 22566 - DNA, 429 bp, Oryza sativa
  unsure (1)..(429): unsure at all n locations
tgtggttcccncacaaacaggggttccatacttncattttacccatttaatatattaaaagggacacatatatgaaagggtgaatagctaatatgggtcctgaagttttgcttcgggctcattttaatccttaaggtttcaaatcgtctaaataagtcctccaaattaatcatttgagttaatatagtccttggacccacaaaaaatgccacgtgatcatgccaagtcatccttgcatgcagcggtatggatgaaatgaccattctacccttatataccatatagaaaagaaagagaagacataaacaaaaaaataacaggccagctcatgcccaacattgttgcggaaggtggccgacgaagaaatntatacgatcagtgcttgtctatagcaatcgtaagtgaccattctttntttntagcccatgc

SEQ ID NO: 22567 - DNA, 371 bp, Oryza sativa
  unsure (1)..(371): unsure at all n locations
agcttgaagacctctctgtgatgaaattaaccattttgtcaagctctggcttcaagagaactcaacaagatgatcgagccatggacaccatggtggataaaaccttccgctagatcgatttgcctcactccatatggaagccagcttatcagacaagtgagtgtaaaagacactgatacgtcagatccaatggctgacccagagtntttgtgagtgaaatcccaaaagggccagaatctgctctcccgtcactcgaacagctaaccagagcggagccatcttcgctgcttgcggttcacttggttgatatactgtacaggtactgcttcacacttcggctccacaaaggcgattggcgctctgatcctttt

SEQ ID NO: 22568 - DNA, 446 bp, Oryza sativa
  unsure (1)..(446): unsure at all n locations
attcggacctatnaaactcaagctgtttggcgaactcaactggacgagcatatgtgtactgttttagaacttcgcggctatagcacgtaggcgtcatatgcactagatagcgtattaagaatagcgcgtggttttaacaccgaagactcgtggttaattcttaaacacggttcataatcttcctaaaaaaaatataattctgtccacatttcatcgaagtcgaaataaaggtacaaatatggagaattcttgatgtatcaaaaccgatttcataaagctaatataataatgctattgtttctaaccattttcatgccgggtcaagcagggtgcaacgaatcgggggttaatgatatgcgctattgaatcacgggtgacactgtggcgcaaatgagcgccacacatcggcaatgattcatttgatttggctagacggacgacgcatg

SEQ ID NO: 22569 - DNA, 400 bp, Oryza sativa
  unsure (1)..(400): unsure at all n locations
ttgcgcacgaattaattggagttggatttgatttatgggtgaaaaaaaaagttgagaggcgaggaaatggtctttgtgaagaataaaaataataagaagcttgcttgccgccaacacaagccggcatttgatccagaatgaacaatcaagtggaggcccccaatggagtaagataacgatcatttgcattgcacattttccaacntnnntgatcatcaagtaggcacccaatggaatgagatagcgattattgcattgcgtatttgcacgttttttgaatcaaacaaaaccaaggaggtaacggacatggttttggactttggagcaaataatctctggtttataaggtaccgagganacgtggtttataagttactgttggggaaataaagaaaaagag

SEQ ID NO: 22570 - DNA, 435 bp, Oryza sativa
  unsure (1)..(435): unsure at all n locations
tcaagatgttcaagaaagctaaaaaaggtgggactaacttcttgcactagnncatggggngacaaaacacgatcaaggtgaagcacacagtgatccatagtaccatagttatcaacttgcacacgatgaataatcataaataaaacaaccgaaatctctaaatggagtaaggggggaccaaagcttgaacaaaaataccggcagatcagtacaagaaccgaggcattcatccacatgaagaagacaaaaaaaaaaacaccaaatacacaaagctagaacaaagaagctaaaaaaaaagcacaaggggcttaacttttgacccctcctggcagtaaaacaccaaagaaaacccagaaactctttgaaccaaatcattgaaacatacttatcaagaaacctagaaatactactcaagaaaccatgaaccgaataata

SEQ ID NO: 22571 - DNA, 299 bp, Oryza sativa
  unsure (1)..(299): unsure at all n locations
agcctaaattaaattccttaaggcatgtttgcgatcgatgggcttcattaattaggaccccaaagatcgattatcaataaactcctagaagaaaaatactactaaatgaacctgacacgttatcaggtatcacaagttgaacagaattttaacagccaaacacggacttgacactgttcttcaccttctgcaaagtcaaacccttgcacgttgtgctcccncaatccgtatttgacgttgaccggtcagctttaacagaggtcggaacggcataccggaggagcacgcacgaatctcaa

SEQ ID NO: 22572 - DNA, 434 bp, Oryza sativa
  unsure (1)..(434): unsure at all n locations
tgaagtggacagcatctcagcggtgtttgttgccctcattagcagcctnctcgcttccaccctctacaggttgagggtcacttatgatttgtggatgaaaaatttcacagaagagcaggagcaggcacttcagctcctcacctccctccgaaatctagaattctatgagtgccaccgtctgcagtcccttcccgaagggatgcatctcctttcttctatctgcacattaggcatcgtcggatgtcctgaaatcagatcgttgcccgaggagggcatcccagcttcactgaaaaaactactagcaatgcgttgcagcgtcgaccttgaggatcaactcaagagattagaagaatcaacccagattacaagtattctacatctgatcacccaatggaagacgtgatgtcccaactcctttgtttttactctttcat

SEQ ID NO: 22573 - DNA, 228 bp, Oryza sativa
tggagttggagcgagcccctgtgctatgtgaatgccgccggctgcactatagtgctgaaacaccattatctctagcacaccaccttgatttagcgctgccactagacctgggcttatggccgaaggctttgtctgctgtcctaggcttcgtcctgtgttttttgataactaggacggcctaaaggcttaactgtatggtaccgaatgaatatgattatgagggctacc

SEQ ID NO: 22574 - DNA, 387 bp, Oryza sativa
  unsure (1)..(387): unsure at all n locations
tttcaggatgagcgaggaaaaacaccgtctaggcaaccttgttcaagcactccttaatctgcatgatcaacaagttggatttttttctaagactttagtccaattgaggatagatcaagaagaggaaggagctcgcattgtaccagggcagagaggactgccgacgctgatcttgtaagactgactgtggcgctcggaatcatttgtaatcctaagcaaattaataagctacgtggatgtggctcttgtaatttatttggagtaatcagtttaatttaatcacagacacattgtgaaactacaccgtttttgatgccctatagcanaatttgctatctagaatagaaactgaatgactgagacgtgaatcctaacagcccacacaac

SEQ ID NO: 22575 - DNA, 414 bp, Oryza sativa
agcttagtcagtggaacgaaaggagtagtttcttgattagtcataaggtagatgagtgtttgtttcttggtcttgatgataaaagaaatatatcttaaacttttaaatggagagagtatatttatttctgaagactttgatagagaataaaaaacaaagatgaaagaactatattactctttattaattgtcccgattgatgatactcggatggaggttgctagatacgaaacaatccttttaaaataaaatttaaatactagaaatagttatatttaagggatcaaagggtggtgacttatatcacaaggggaaacttgagaaatcaaaaatagaaggaatattagagatatacaaacaatatgtctctaacttaagcattgagttatactccatctatctcagcataaatat

SEQ ID NO: 22576 - DNA, 386 bp, Oryza sativa
ctacagagtttaaactggatatgctacatgaacacgctttggttatgctgtggttagtatcttaccaagatgaaagtttgggttgaaactggtatgatgtgactgaaaaactatgtgtgtctgacatgttgatgtgatgtaaagaagtgaaagtttggatctaaacataaccttaggttagaactaaggacatcaatttttgatccaacgatggctataagactcgttaagctacagtagctataactatgtaggtgatcccaatcaagcgtacggtactccgacaaatacaacacgagtcaaaagtcaaaacctaccgaacgtgcactgccattatcttggttatagccaaccactacacactattttcgggctggtcggagtgg

SEQ ID NO: 22577 - DNA, 426 bp, Oryza sativa
  unsure (1)..(426): unsure at all n locations
agcttctcgcatgagactattatagntattagtttgttgtgcgacgcattatttatcccaaaaaatatttttatattatgaaataaaaaatatgcatttatttttttataaaaagtcataaaaaatgaaggagcattcatacaaagataggaccaatgttcacaatattttttttatgaatgctcccgatcaaaaaaatccttgtcctattaaaatttcaataaaaattttaatatattacatttgttttattttcaaaatttatgtcaaaaatttctgcactaattatttagtctcattagtttcataaaatgcaaatacggtgcactcagactaaattttcaatcgtttgtgaatcttacattcaaatctaaagcatcaagggcaaaaaagacatttgtaacgaaacataatagtgaaatgatg

SEQ ID NO: 22578 - DNA, 207 bp, Oryza sativa
gcactagatcacgcacactgtggcctaagtcaaaagtgcctaagctcctaaaagaacgcgacaagcccacctgaaaatatgggctgcaaacatattatgcctaggccaaacaatatgccttcgatacctttaaggatgagcatgtacatgctccggtgattaacatggatcgacgatatcctatgatactcaatgattaagatgatc

SEQ ID NO: 22579 - DNA, 406 bp, Oryza sativa
  unsure (1)..(406): unsure at all n locations
agctggcatatntgaaataaccatgaaactcatgctccatttgtgaccatgtagaagatgaattaggagcaagtaaactataccatgtagatgcaaagtttgacaaaaaaagaggaaacaactttaacttaagcaaatcattactaccgaccttaccacattgatcaacaaattggccgatatgctccattgttgttctagcatcctcacctgtgaatttgagaagttgggcacctcacatccttgcgggtatgggactgaatctacgtgttcaagatacggcctttggtatgtatgcatagctactttcgattctatttcactactataccgcaagacattgttatgatctttcccaacatccacatgactcgattgtgattcggtcttaagtgataatgctatt

SEQ ID NO: 22580 - DNA, 464 bp, Oryza sativa
  unsure (1)..(464): unsure at all n locations
tggtntgaccaggtttctccatagtagtctgatcatacttctacgaacattatttttggtggcggataaaatggatctccgtaaccggcaggccctgtcgtcngccggccccattgcctatgatcaaaggcatattttcacaggcgggtgaccaaccgtctagggaatttgatttcatgcaggtttggaccacatgagcttattgctattattacaaacggattttaattgatgcacatgtaaagtaaaatatatggtgcctatgaaaattagtttttatagtgccgacagccgctgcacaaacactgcgttctcaaaaccaatttttcacaactatacctctcaatatattcttagcgaaatcttcatcacaactagtatatattagtgatcaccatgnatttatagtgtggctcgaagatcaatatacatgcatngttgttaaccttacgctgaccaagaat

SEQ ID NO: 22581 - DNA, 477 bp, Oryza sativa
  unsure (1)..(477): unsure at all n locations
tccctcccccaaggaggatgaacttgagacntagacctcccagcaacctgaagctgcagcagtgcgctacgtatcacagaataggtggtgatgttttgaataggcgggaatggttcagtgtgtgcaccgttccctggaacccactaactaaatggatgcagctttgatcagcttaattgggacaagtgacaacagtcggacggctctgatgctgagatagaggcaagaagtatattcacctgatgaatctgttctcccaaaaaaaaactacattagagacacctcactggatgatgctgatgctggcgggtgtccaacggatctctctctggctgaaccgtctttttacctgaggcaagaccacgcctttgattccttggtcgagctaactgatggatcaatgacagcctttatcaaaggctggttggattgtaatttaaacaatgataggcgagagacgcaaaaacagtactacca

SEQ ID NO: 22582 - DNA, 219 bp, Oryza sativa
  unsure (1)..(219): unsure at all n locations
tttttttaaaggaaacctttccagataaacttaacttcaacaccttatggtgagacctatttagccatggctatcagcagttttttttttctgttcacttaagtgtttacaattcagcttactagatatcaaacatcattatgttgaagtgatgaagaaatttctgtcaggttttgccagctatcaagtnaattaaaatgccctaaagctggagtgctg

SEQ ID NO: 22583 - DNA, 404 bp, Oryza sativa
  unsure (1)..(404): unsure at all n locations
agcttcggctgtatgcaagagcaggttctttgttcattcgccttcaagacacattcctggacggcttgcttgcgatatataccacgcctggtacgattaacacacatcatttcataccagatagcacttgtgtgccctgagcaacaactctatgagatcgtgcctttttgataatatctttcatgaactatgtcactacgttgtcaaacactatggagntttggccatggacggagcaactttcttgtgtcgatccctaaaaaggcttgcgtgctcggaatgatgaattcaacagtagcaaccaatggaagtacccgaagttctcgcattagccaattgtacacctctgccaaattggtagtcattatgccataccgagatgcataggtgtgtgacaatagaga

SEQ ID NO: 22584 - DNA, 207 bp, Oryza sativa
aagtgcttggaaacatgcacttgcgacctttgatctcaatgaagaactttcacagcggttacagcatccaacagttgatgctgcgaactatgtgcttggtgatcctgaccagcggctgattacataggctgatagcaatgtgtctgctagctattacgagacatggaagctgcatatctggacaatggacagcaagatagagcaaag

SEQ ID NO: 22585 - DNA, 306 bp, Oryza sativa
gcaagctagagtagagagatttaggctctattgcacaacactgaaaagcgtcagaagtcggaggaattctggagaagacagcaatcctctcctatttctttagctctaggaaatactctcattgtacatagaaatcttcgattgaataactaagctctatttagtaagaattatctattaagtagttcactatgaacaactttattatagtgatactttagtgagatacataccctgaagtagatattaattgcttataagcggtgtctatgcgattaatattcagtgtttgctttgtatcccgca

SEQ ID NO: 22586 - DNA, 375 bp, Oryza sativa
  unsure (1)..(375): unsure at all n locations
tctcccgctcagcccaatggccgaacgtgcttnggcgctcaacctctctccgagcgctagcggtgacgacggngagcanaacccgcgccgtcgagctcgtactccaccgtccccctctcgccgaagtcttgggcgggaggaggcgctcgaggaggtcgaaagatccgcgacttcgacgcccgcgggcgatggagaatgacggcgagatggggagcgtcgcctcctcgtctacggcgatggcagcacgcctcatggcgcgctccaagcttgcgggcgcgctcctgcgtcacccgcccgtccgtcccgatccagagactncagctcgacgntggctggatgacctggccaacttggtcatgacagcgcaacaacgtc

SEQ ID NO: 22587 - DNA, 401 bp, Oryza sativa
  unsure (1)..(401): unsure at all n locations
ttatcgggttcctgagcacncctcattatctagctttttcccgctcaactttagaatatcacttctcctacttcctcgtctcattttaagtgcagttgtcagtctatgcgtctaacatttgaccgtccgtcttatttaagaaattaatatttttttagaaaataagtcacacataaaatactattcatatttttatcatctaataattaagagaaaagtcaaataagacgaaaagttaaacgttgaacacagaataaaaactatacataaaatgtgatggatggagtattacaaatccacaatattactattaccagtagtatacgaccgatcgattcacacgggtaggatattaacgatcgttaacactagtcactggcacaacaagaggacacaccact

SEQ ID NO: 22588 - DNA, 386 bp, Oryza sativa
ctccctctgtctcattttaagagcagtcgtggatttccgtacccaacgtttgacccatccgttttatttaaaaaatttataaaataaattttaaaaaataagtcacatataaagcactatttattttttatcatctaataacagcaaaaatacactaactatgaaaaattctaaataagactaactgtaaacgttaggtacagaaacatttaaagtgggatggagggagtaggtgtgcacaaggcttggtcgctgtcatgtacgttggccacgaacactgacgcaacaagaaattagatcaatttgttttgcttgtgcctcactccataaatgatggttatgaacagaaaacaaacaaaatttaaggggattataaacgtgtagta

SEQ ID NO: 22589 - DNA, 376 bp, Oryza sativa
tcagctgtggacaagacgatgatccttttggcactgtgaactattcagtacatctatgcctagaccagaattttagatgatctttcctaatagtctattgagttgcaaaaagaaaggaaaatgttattattggggacctcggccaagataggatcaatatgcgaagcaaagatcataaagtgcaaggatgatcatctagttctaaagaacaaaagccgaactcattttgaatgctatggctaatacaagaaggattaccagcacgattataatcaactagtgatcaaaaaccaaatatgtccagataattggtcacaccaacatcgagcatacttacaatcagcaacctcgtggatgctgttcaatcatgcaccgt

SEQ ID NO: 22590 - DNA, 404 bp, Oryza sativa
  unsure (1)..(404): unsure at all n locations
cagcgtatatttttaaaactgagattgagaggagatctcctggtagtatagcggagatagagtatgatgtgattaatgagaagcataggttcattagaatgtttgttgctttgaagccttgtatagatggatntttgaatgggtgcaggccatatttatgcattgattcaactgtgttaacaggcaagtggagaggacaataggcttcagctattggtatagatggccacaattggatgttccctgtggcctatgctgtctttggatctgaaacaaaggaaaactgggaatggttcatggtttgtttgaataaagcaattggatctccagaaagcctagtactgtctactgatgcacgcaagggcatagatgctacagtgacaagggtgttcaacaatggagta

SEQ ID NO: 22591 - DNA, 425 bp, Oryza sativa
cattcggaccttaaaactcagctgagttgctacatagtcaccacaagctatcatatatgacttgctgctactaactccctccgtctcaaaataaatcaacttctaactacgaacctggatataagttatgtccaagtttggagccagaagatgatttattgggaggcagagggagtagcttattactccctccgcttcatattattagtcgtttgacttttttcctaatcaaacttctttaagtttgaccaaatttatgtaaaaatatattagtatttttcacaccagacaaacatattattaaaatgtgttttatgttacatttaatgaaactaaattgatatttcaatggtgctagaattgctataaacttgggcaaccttacaaaggttgctttaaaaaaaggccatgacctttatattaaa

SEQ ID NO: 22592 - DNA, 379 bp, Oryza sativa
  unsure (1)..(379): unsure at all n locations
cactccctttttccaacccatcttccttgtttttcactcgcacgcatttcaaactgccaaacgatactttttttgccaaaaatatctatatgaaagttgcttaaaaaaatcaaattaatccatttttgaaaaaaaaaactaatacttaattagtcacgcgctaatggaccgttccnttttcgtacgtactattccaagttcccagccgggaatagagaacacacccttaagggtgtgtttaattttccaagttcccagccgggaatagagaacacacccttaagggtgtgtttaattctctgggtgtaaagtttctgaagtatatgaacacacattttgaagtattataacgtatactaataacaaaacatattacaga

SEQ ID NO: 22593 - DNA, 378 bp, Oryza sativa
  unsure (1)..(378): unsure at all n locations
tcgatgagaaaaaaaacctcanaatcagctccaaatgtttcattgaaaattcaaatttggctgataagcataagcataagtaaaaatatgaggcccttcctctctgttctcataaaaaccggtactcggtaggagggatgcagcggttgataagaaaagtaaaatgtgtttgaaactcacaacgcgggaaaagatgtagtgcaaactacatatatagtggaaacatgataactaccattagaacgtaaaatggatgttcaatattcgtccacgtatgagtaaaatttttactcctgataatgtggacgaatatcagacgttcatttgatccaacgatagntttcagattcccactacatatgtagtttccaccctata

SEQ ID NO: 22594 - DNA, 372 bp, Oryza sativa
agcttctttttgaacacccacttgcatttcacaggtttacacccataaggtcgctctgtctcctcccaagtcccgttagcgataatggaatccatttcactacggacaggctccttccaataatctgcatcaagagatgcatatgcttctgaaattaacttaagagtgtcatccacgaggtacacagtgaaatcatcaccaaaaacttagccgtcctttgtctcttactccttcgaggagctgcactgtcatcctcctcagagacatgttcatgtgtatgttcagtttggtctggtggtgtgattgaactacgaattatttcagatgattggctcggactactatgtgtattcttcatagggaaaaaactct

SEQ ID NO: 22595 - DNA, 368 bp, Oryza sativa
  unsure (1)..(368): unsure at all n locations
tcggcaacaagcacanaaattgtgcgacatgaattgcttctgatcaaggaagatagctggcataccaattgctgaagcagaacaaagcttttgagacataaacatgaattgcagcagacttgcttagaacattgtgattttgggaagaccagattacatgggagatatggcatgtactaacttcgcattgtagaaagatcgtactccctctgtcccataataattgcagttgtgggttatgggttccagtgtctaacgattgaccgttcgtcttatttgaaattttttttatgatttctattntttattggttttagatgatacaatatgaatactactctatgtgacctaaattttaattttttcat

SEQ ID NO: 22596 - DNA, 198 bp, Oryza sativa
gaactgacgctcttgttcatatctttgccgggaagtattgacataaaaagtttgctttgcataattcattgatgttaacaccgaatcggactgaggctaatattgaacaatggaataatgatgcggcaaatgaagcatgctgtcttggatgtattacttcctgttggagtattaaaaagcatgataagtctagtaaat

SEQ ID NO: 22597 - DNA, 278 bp, Oryza sativa
  unsure (1)..(278): unsure at all n locations
tgagttcatcatcggtgagaccaataggattcctttcagactgtccaatccanatctaagtcattggaagaacacctttaaatcttagccgtctctagaaaaaacttcacccgagaaaaagtggattacatggttcaagcgcatgtcggctagcaaaagagttcactgggacgaaatcggaatcggccaagcacttgacctaaccatagcanactcagccaaggatgaacctctaatggcagctacctcttatttctggtccaacaccatcaacgcct

SEQ ID NO: 22598 - DNA, 349 bp, Oryza sativa
cgcaagcatgccatcttacggatgtgcagtgcgtcaccgtgttcttagactccctaagtctgctcatatcaacgctgggagagaaagcagttcccctatttaagcgtcctcaaacgctccaggccgtttacctggacagaggaggctgagcaggcccttactcaatagaaagcgtacctcaaatctcccccaagactgtgcgccccggagccagatgagccgttgctgctctcctggcggcaaccccccacgtggtcactgccggggtggtgcgggagcgcgaccaggacaacccttacttcgcgcatgcctaccctgtgtggactcgaccccggagagagcacggaag

SEQ ID NO: 22599 - DNA, 114 bp, Oryza sativa
accggcgctgatggcatgtcttttccgcgaggtacactaccccgggttttctgtggcgtaattcgcaacatacaggcttacagaatttacaaggcaaatgaactgctggttaac

SEQ ID NO: 22600 - DNA, 424 bp, Oryza sativa
tgcagctgcagctgccagaacctatcgacagggtttgcactctatatcctcttcgccaagaccttggatgatatgcagattcctcgctccgagctaaaaccaagcaatgcgccttttcacggagtaattccaggattattcgcaactccactcggccagatcaccctcccggtcacttttggcactcgggaaaacttccgcacagagaatatcagctttgaagtcgccgatttcgagacagcataccatgccatactcggacgcccggcgttagccaagtttatggccgtcccgcactacacttacatgatgatgaagatgcctggtccccgaggagtcctatccctacggagcgacatcaagcaagccgtcacatgcgacaaggagagttgcgacatggcccaaacccgcgagatggcgtcag

SEQ ID NO: 22601 - DNA, 209 bp, Oryza sativa
  unsure (1)..(209): unsure at all n locations
gcccaccaaagtcagcgcacacgctctctacatattctctagntattganagactcgctcggtctggccatctggttgtggatggtaagcggtgctgaaaatcaaccgggttccccaattttcttgttatttctgccagaactttgaagtaaattggcttcctcgatcagacacgatcttcttatgtacaccattgtaacacataattc

SEQ ID NO: 22602 - DNA, 424 bp, Oryza sativa
  unsure (1)..(424): unsure at all n locations
agcttaatggaacaaatcatatcatcactttctacgatttctgatatgcaggtaagaaaaacaatatttgaatatcatatataatttagttgtaatatttctgtttttattggaatttacaggaacaaaattcagcacactctacttttgttgcgagtccaagtgcatttcaggtatgaaatattaattatttaattgaatctaataattcaaattcnaagcaaataagtattgatataaaaattttgttttgcagaattcaatgatattaacaacaaatcgtactgatgctaatattgaagaatggaataatgatgcggcaaatgaggcatgttgtcttggatgtattacttcctgttgtagtattaaaaattatgataattttagtaaattttaactgtaatgtaattcacattccaagaag

SEQ ID NO: 22603 - DNA, 426 bp, Oryza sativa
  unsure (1)..(426): unsure at all n locations
tatcctgaaatgtgacaaaaattcagagaaggttttnttttatttctggatgcatccaattgagaagaaaaagaaaaccagtgtgcgaaatactttagcctgttaggcagaataaggtaccaagaaaattttttatatggatggacagaacaattatgaatagatttttttttttagaaaccagactagtttcagtatgagaagtccaaattggaggtatttaaattctgaaaattgtacagatattcaaacaagtcagaaattcggcgacggcgtaatactaaaaagtataaaaaagatagtaatatgccttttgactctacctattcccgctcattattgtcaaataaacacatcttttttgtggagacaactgcatacttcattttccattgagatgtggaagtgtgagaaaaaaaatgaaca

SEQ ID NO: 22604 - DNA, 269 bp, Oryza sativa
cagcttgcagccccagttgcagaggtcactgtagcatctttatggataggaagagccatcgctgtggctctaggcaaagcaaggtgcaaagcaattatttctaggctgatatgttcaacagccgagaaaccaacaaccttgattactgttgttattccttgcaaaggaacaataacaaattttcttcttgtcagtcttctagttgttttctcagttacttactatacttgcacaaatatatgaaattgcaagttcagtataacgtcata

SEQ ID NO: 22605 - DNA, 379 bp, Oryza sativa
  unsure (1)..(379): unsure at all n locations
taaagaagaacttaaagaagaactcactggcgagctggtagaaattgaggctcggatggaagcacccattanggataggtcgaacgatgccaactccggtcccataatacaagtgagccccacgcagaggcgtagcaactgcgcatcaactgaggcttcgacagaacagcctgaaggccccgccgcggtggaccacataacggtaaaaacaacttaataacgcatatattatattagcaccacaatacattgcaacatatactaaggacactaatgaatctatcgcaggaacgcatatattatattagcaccacaatacattgcaacatatactaaggacacttatgaatctatcgcaggaacccacatcgtgtaccct

SEQ ID NO: 22606 - DNA, 297 bp, Oryza sativa
  unsure (1)..(297): unsure at all n locations
tttaatttgacctgcaacagaaaacattgatggataaataggaacggtcacgaaaatgatggccctcactgtgaaatattcccctaaggactcatcccaaactttcaatccatcttctcatatatcagctatatcttccaacaatggtgtncaaagacgccaatattaataccatgctgatggggtccctgtgtgaagatacagagtagtacgtatactcgcttttgacgaagcccggtaggaagactatatatggtgagaatcacttgtcaagttctatgtgagctgcttatgtca

SEQ ID NO: 22607 - DNA, 447 bp, Oryza sativa
  unsure (1)..(447): unsure at all n locations
tttcttttcaataaaagaaagataagggaatatttgccaagtttttttcatagntcagcacactatgtgctgccccatatataagaaagaataatggtgattagttcacacagtcagtcaatctaagtaacatatatatagtgaaaatataaggagataccaaactttgaccataattctgaagtcaaaataaacaactcaatataaaggaaatattctatatacttcacgtttcaaagatatatcacaatntatctcacgaaaaggcgcctattgatntgactcttatagatatagtacatggacctgggataccggtcggaagctgtcaattcactgacgacttgatgacaaattaccgagaataaagacatatatgtggccaagtgaccaaagaaagctagtcttgaggcatataactagcacgaatatctattgatttttttt

SEQ ID NO: 22608 - DNA, 401 bp, Oryza sativa
  unsure (1)..(401): unsure at all n locations
tgcaagcctgtttctggggatgctcgtctcattttgccgaggccactcgatcattcataatattatcacatgttgacgatcttctctaaagattcttaatcaatctgcacgaggtgatgatggggagctaacactgggagttcgccgcgcagctcaccttaaaaatgggtctgcttttccaacactttacaaccagagatctaatcttggtacattgccaatgttgcacatgcagcggctacagaaagtgagttcaacatatactacaatcccaggtcatgaagaacctcgagttattttggtaatgcaccccacagctgatgttctagaactttcttgctagtggctggtggcaagcttanattgcgcccattatttactgctatgttgagctattctgt

SEQ ID NO: 22609 - DNA, 365 bp, Oryza sativa
  unsure (1)..(365): unsure at all n locations
tgagcaatttgcttggcaacagtacatgcaacaacctcttcctcccncncccctgcccttttttttttctttttgtgtgtactgataagatcagtgtacaaccgttcatgaaacatcctccctccgtttcaaaatgtntaataccgttgactttttagtatgtgtttgactattcgccttattcaaaaaaatttaagtaattatttattattttcatatcatttgattcattgttaaatatactttcatgtacacatatagctttacatatttcacaaatttttttgaataagacgaacggttaaacatgtgctaaaaagtcaatggtgtcaaacattttgaaacggagggagtattttaaaata

SEQ ID NO: 22610 - DNA, 411 bp, Oryza sativa
cgtgcaagcctcacatgaatgttttataccacccactatcctgattatccaaacggctatataaagggccgcactggttgcgtcctagacagcctccatcgcctatccaaggtgtgtttataggagatttcgccgctccactcggccagatcacccttccggtcacttttggcactcgggaaaacttccgcacagagaatatcagctttttattcgcgatttctagacagcataccatgccatactctgacgccccgcgtttgccaagtttatggccgtcccgcactacacttacatgatgatgaagatgccttggccccgaggagtcctatccctacagagcgacatcaagcaagcctgttcatgcgacaaggagaggtgcgacatggtccaaacccgcgagatggtgtt

SEQ ID NO: 22611 - DNA, 337 bp, Oryza sativa
ggcttccatcgtcgacatctcctccttgatccgagttttcgttatggccggactacttgcctctctggccataaggaaagcactggagaagctctcctcctacctggcagcgagcctttcggcatcgtcgtcctcgccgacgtctgggagggcaaggcaggagaaggaccacgaggacctgaggatgctggagcggaccatgcgcaggatccacgctactctgcatgacgcggagcagcactggaacatcagggaggagtccaccaagctgcggctcaaggagctcaaggatctcgcctactacgcggaggatgtggtggatgcgtatgagatgaat

SEQ ID NO: 22612 - DNA, 352 bp, Oryza sativa
  unsure (1)..(352): unsure at all n locations
ggtgtggggagcccaaacagaactcgaagcgaacctaagatgagtcgagcctgaacagctcgcgagcctcgaattactgtgatagccttagacctgaaggctctaaggccctaaccctcctgggatgaatagtgagcatgcctatgatgcctcatgtctggctctacatcgaggctnacggagagaggatagatgttttacctgaggtaaatggcacaccttgaaatagtagatggcagccacttagaagcatcttttgcaaaggcagctgacatctcataatcgcaggggcatgataaggcttccaactctaaacagtaagactaagaggcttgagagaacacaacaacgt

SEQ ID NO: 22613 - DNA, 384 bp, Oryza sativa
  unsure (1)..(384): unsure at all n locations
tgtgcacgaacttgtcgatgccatcagattcgcggagtctaaaccactgaagatggagaagtggcgagcccaaagatctgaaaggcgtgcatccaaaatgtgttgtttcttggccatcttggttataaacccatgaattggatcacataccatacaactcttgacttttcctgcagcaccaatatcgctaggccaaacaagccaccggttgatgagagcatcaaaacatctctcggcatgacgaactgcttgcggccaatcttccttggttatcagcccttctgtaagccatcgtgctattatagttgatcgtctgattttgtgacctgngggaaagatagctaggtatagcaagcaggtcctatgctctcttggtagatctct

SEQ ID NO: 22614 - DNA, 415 bp, Oryza sativa
cagcttgcaaccaatcaaaatacaattgctttaagggatccttcattctgcacatatacaaaagaacttctctcacaatctatataatattattagcttgatttataatcatggattgatctgtcgtacgatgtcttctttgcatgcatgtacaggtggctgatgaagtccatgggccgtcgaaccaacacgtctgcccgggagggattttaagtccgtgatgcccgaaatgaatcccatcgcactagtcggcgaaaaacatggcgcaacccctacctgacgcgccaactgtcaaaacaagattccggcaatactaaaaggggtagcaatcaagctggaaaagtggatatgttatgacgtatgaggcaaatgtttatacagcccgggaattattccaccgagtgtattattgatc

SEQ ID NO: 22615 - DNA, 369 bp, Oryza sativa
  unsure (1)..(369): unsure at all n locations
ngcttgtgtgtgtgtgggtcttgcatgttatttacatctatttgtgtggatgtnagtgcatgccgtttgtgttgcttttgagttgttatgaagttggtgaggttagttggtgtgagagttttcagtttgtaataatgatactcagttaagatcaatataagttaaagtaattctctgtcctaagtagtttcccccagtttctcttcttgtgccctgtctatgccagatggtgaacactcacagcaacgggaatggtcccaacctcaacaaccccaataataacaacaatggagagaatccaacccttgctcatgttcttgctcaacagactcagttaatgaacatgatgatgcagcaactttagaatca

SEQ ID NO: 22616 - DNA, 416 bp, Oryza sativa
  unsure (1)..(416): unsure at all n locations
agcttcttcaacttataatgcgggtgacttcattggccctgagggaggtttcttctgatgcgtggtacatgccatatgatgtggatgacatgattgatgatgattccttcctctcagatataatagatgaggatcaacctggtaccgcttcagaaatagcagagaccaatgtaaaatcatggcataatggcaaaccagctgagcatgttnaatggttggttgctggcttgctatgaaggaggtaaatcttttcacttggcttacttctgttttgaaagctgctcttcaccagctttatttattnttagcttctcaccggatgcagtaaattaactctccaaaatccttaggttatcaatgatacagtatggttataaactgggcttccgatgaataatagtatcgtagtatgcagt

SEQ ID NO: 22617 - DNA, 450 bp, Oryza sativa
  unsure (1)..(450): unsure at all n locations
tatataatgcggcatatatgaggactcatggtgaanatgttcttgatgaagcagntggtttcactactaaccgcctaagatcagaattgaaacatttgaaatctccggtagccgatgaagtgtctcttgctcttgatacaccactattccggagggttagaataatagaaacacaaaactatattcctatttatgaaagcgcgactacacgaaatgaagccatattagaatttgcaaagttgaatgtcaatctccttcaacttatttattgtgaggagttaaaaactatcacacggtaagttaattactntaaagtgcataatgattctacaatttcgtgaaattatgataaataagttagtacttacatttatgtacaatacagatggtggaaagagcttaacgttgaatccaacttaagcttcattcgggatagaatagtggaaatgc

SEQ ID NO: 22618 - DNA, 297 bp, Oryza sativa
  unsure (1)..(297): unsure at all n locations
gctagcttcttatcacatggacagagaacatgacacctatcttaatttgattcttgtatacttcctccatcccataaaagatcaatctaagatcaaatgtgacatattttattactataaatttgaaaacatctgctaaaatatgttatatcatcagatattaaggtgcgtttttattggacggaaggagtatgtatctactanactttcttttttatggaaccttgcatatctatgtcagacgccccttttcacccttcattttaatgaacagacgaagaccctattttaacgtac

SEQ ID NO: 22619 - DNA, 375 bp, Oryza sativa
ggaccttaaaactcagctgcttgtttttcttttccatggggttttttttgatgaagggacgagcaaccacagcaatggtgatctctgtttcgtcccttcactcacgtttcaacctctgttttcgtccctcttcttgggagttgggatcgaactctgctgcttcctatttctcatatctcctcatccatcgtctaattttttccacgttttcttttgatgttgctccaaacaagtttggaggaaccatggtgatctccgtccctttttttttcatgttaagttctttttttcgtgaaaagaaaatccctgttagtgtgtctctatttgacgttaatgtatttgatccaatttcttgtgaaacattcctcccctcct

SEQ ID NO: 22620 - DNA, 310 bp, Oryza sativa
  unsure (1)..(310): unsure at all n locations
tgttttttctactcggctttgaaaccctttgagagcactcagtgactcactcctttcctagattgggccgacaagagacgtgcgtctcgtttccacttaacagatgcttttcaacagctcaattggtaatgtgccgacctcccgggccagatcattacttctcagctcccaaantttcccacgcgattaatcggctcccagagcctttttcattttctcggactcccagagtccagctgcccagcagcaccacaatccgcttccactctggaagcctattctatgatgcgcggggacattccgaatcaca

SEQ ID NO: 22621 - DNA, 420 bp, Oryza sativa
agcttcctggtggcgcgaggtgccgcgccatggcgaggtgggcgtgtggttagtcaagttttgggctcgccgctcgcgagctcgagtagtgtccagtgtgtgtggcggttggttggggacggtttatgcgcggcgatggctgcgacgcacgagtggatggacgaggtgtgtttctgcggctctgttggcctgtggtggatacatctgccgtgtggtgtgccttatcttggcgtgatcgactccagtcacacaaaaaaaataggaatgggacaatgaacttttattttgctccaaaagcaccgcgtgaggaatactcacaaaattcaacacaagtattcgctgccaaaaatttaaatttttaaaattaattttaaaagtaattttgaactatttttcatcgaggtttattctttacattga

SEQ ID NO: 22622 - DNA, 382 bp, Oryza sativa
  unsure (1)..(382): unsure at all n locations
ataaaagattctaacaatcaacggacgttttatgaaaacaagaagaccatctggganttaaaatggtgtcatagatttgctcacttaataccacctctaccaactaacagttcataacaaatatttttactatactctggccaggaacatgcgatgcttccttgattgtaagatatatagtgctttgcacaagtctaaataagtgcaaatagaaaaacgaaattctaaacgtagtgttgaacgggagatcccaagttacagcctatatgagcacaaatatggacaaatgtaacgatgagatatatagcatcttgaaagtactaaaacaaataattagacaactgccctaactgacctttacatcataaatccaattatttgt

SEQ ID NO: 22623 - DNA, 413 bp, Oryza sativa
agcttctcttactgaaggggggaaagatttatcaagaattattacaaccacagtacttagcaagccacaccatgagatgcatgattaatgcaagggggtacaaggggataataataggggttaagtttggcactaaacagcatttaaaaatcacttagttgcccaaagctattttgtaaacacgatcctagagctacacaatattattaatcaaggccgtaacccacatgaacctgccttaacccaaggcctacgatgattcagaccgaactggcaacctgacctggttccaactcgtcccaagccaacccaggccaaccattctcacattttatttgttaagcaagttttaagaaataaacaactaacttgggtacattgctaagcttgcccataaccaaaggcgcggctat

SEQ ID NO: 22624 - DNA, 346 bp, Oryza sativa
  unsure (1)..(346): unsure at all n locations
tggcgagctcttctcgatggcttgattacggactggtgcaaatctttgtaattttgttatactggcatggcatccgatctcaccatgagtttgagcgcaatcaccctccttgggacccccgacatgtcagacngctgtcaagcaaacatgtctgcattgtcacagaggaagatgatgagcgcgagtacctatttctcgtccaatgacaccccgatcttgacagtctngtcgaggttggcacttgagagcggaacgatcttgattgcgccgtctagcttcagcgacttggttgttttgctcactttcttgagtggctcaactgtggccggtagattgggggtgtgct

SEQ ID NO: 22625 - DNA, 420 bp, Oryza sativa
  unsure (1)..(420): unsure at all n locations
agcttgcatattcatatttatcaaatattatatgcttaagcaattacctttgggaaagtaattgagatgcggcatgtggagacatgagcaccacattgccaagataatggtgacatgaaaggaattaaacatttgttctagaccagggcggatggcggatttgagtggtattcgggaaaggctagtaccttccccggtcaattaaggaccaaagtattagctaagcaagaaacgaccccgtacaaccacattgctcgaatggggatatacctagtggagtaaataatctaacggaggcaatatccatgcatagtggcttctcatgtgtaaagcaagggctctacaaaggagtcgccattgctatgactgtcgtgtgtagagttgaacccatntataacttaattacataggggttaaact

SEQ ID NO: 22626 - DNA, 450 bp, Oryza sativa
  unsure (1)..(450): unsure at all n locations
gcttaactagccgatatggtaagtggccgatactatatggtttagctcggaaattgccaattagagatagagctcgaataagacaattgcatctattaattaggatatttaagttggcttattgaagatttgttaagagaccgccatgtggtcttgtttgtattttatctttangaaagtttgagtcgtgtccataatggactgagtttgtactcggggtataaatatagaccccagatcaatgttataagggacaaaaaaaaatccaatacaactctggtgcattgctagcctttttgttcttcttttcggcgagttctctcgacaagaggtaacttgtctcgatggcttgagctatcggngctattatgtcgctttagatgttttagtccttttatcatgaccatctactatcatatgtcttaggtaatctagtcctagtatctcgat

SEQ ID NO: 22627 - DNA, 339 bp, Oryza sativa
  unsure (1)..(339): unsure at all n locations
agcttgttagatacgccacaccatcatatataacctcctttgcggggatatggatggaatggctaagttccagggcgtggatgttctattttaaagtgcaatgtgctatacagacttcgctataaagtttttgcgtgcatatgtactttttcatattacatacgacatgctgatatacttacctgggcgctatacttgattctccgttttgttttntnccacatgtacgactaccgacactattaagttttgttgtgatgaactttctcgggaataaatattgagtgaatactggccttaaaagcatgagataatcgtggctgtgtttactgaaacaaa

SEQ ID NO: 22628 - DNA, 349 bp, Oryza sativa
  unsure (1)..(349): unsure at all n locations
agcttatcatctgatggtacaagttggtctcgggttaattttatgcacctgggtccctcgttctgatgagtgacggtccaacagaatgcgctgtttggggacaagatttttgacacgaaaggcctgttcactttgatgccgaaaaaaaccttatcaaaatttggcattgctaaaattttggcaagatttcttatatagttaccaaaatttggtancnnntaaatgtagccgatttttgacaactataccaaaatttggttagggtgaaaattgcatcaaagtgaacaggtgcgaaataaacatctgaaatttctgaatcttgtgctccatatgatttgaggactcctct

SEQ ID NO: 22629 - DNA, 309 bp, Oryza sativa
  unsure (1)..(309): unsure at all n locations
ngcatgactngagacaatcatgnagnctcttgagggattctttgcaatcgaagcttcaagttgtctgacaatgccctgcaacggcctgatttctttcaacgctaatagttcctcacaggaatctacagctgtcaagttctgaggatggttgcatatcttttggagcagctggttaaatgttaacatgaaatatctcaatattatgaaaaaagatactatccatctctaacgaaaatactcgactagtgctacagaccatcactgaccatcagatcatgagagagcaccatacataacttaataaaggac

SEQ ID NO: 22630 - DNA, 389 bp, Oryza sativa
gcgcgggacctctccccgatgtcgctggccttcttggctgttaaggtcacaaagaaagattggaagttggtgaccgtcgcggtccacggaggggactaaggaagaaggagtatgctgccggcggtggctgcagctgcgacgtgatgtagcatctattaaaagagttggagcaagcaccactagtgccgtcttttgaggagatatgacataaggggagctgcgccgaccgtggacgtcgaagtggtggaagagctgctgctactgtcattgctccagtcagtcttgctcggactcagagcagtcgtctccccttccctgtgcctaccaaagcatgccactaaatttggtcgtgcgggcgagccctctacgaccgtgacaaagtaggcgac

SEQ ID NO: 22631 - DNA, 418 bp, Oryza sativa
  unsure (1)..(418): unsure at all n locations
ntacagggcactacacaatatacttgtaaaaatcttttctaatatctcagggatcctataatatctcatctcttattctaatttagaggcatacgtgcacactatgttacttttatactacctacaagatggcgccagggcatggcagcgtggtgatgcgcacagatgcccaatggtggcgggatgacttgtgcaagatggcggtggcagtgattgtgtgcccgttgtctagacaaacatgctggcggttcgtcagagcttggcgacgcgtgaagaacaagttctactcctctggtctgctagcgccaagggaaagaaaaatggaaaattacgttggtagtttaacagaaggatcacttttntaangttttggaaataaaattaaatgttctcttggagagatctgttttctactttc

SEQ ID NO: 22632 - DNA, 393 bp, Oryza sativa
  unsure (1)..(393): unsure at all n locations
agcttcgcggcgtaccatattatgtcagatcgtatgatgtccaacgagtacgcaataaggtaattggtagattggtttttcaaatagatctactaatttcatatgcaatttatcatacatattcagatcatacatcattatcagatccatgatttattatgtttacccagagcatgttctttatacaataatatctgttgcgcgagttttccgatgttaaatcgactacggtctaacgttgggggctcgctctattttcttctgtataaatcatgcttgtttacggtttacataatgcctgatatttacatctgctcgttatatcctgataatactagaagatccatgcagtttttgagtacatactcgattntatctgctatacatcttgtc

SEQ ID NO: 22633 - DNA, 464 bp, Oryza sativa
gacctataaaactcagctttcaaaagaaaactaatctaaagaatatcaaattattaattccattgaattgtatttttattgatcaattagaactgccttctagaacgtataattgtctcaaaagggccaatatccatacactattggaccttttgagtaagacggaagaagatctgatgagaattgacagttttcgtatgcaagatggaaaacagatatgggacactctagagaagcatctcccaatggatttacctaagaataagttctagttttaaatccattgcaattttttcctcttcttctttttcgagttagaataaaaagaaaaaagaaaacaattttgcatctttgggacaatctatattttcgcgaaatggatcataataaaatagattataggtatctagggaagattcacttggaagtaactatttcctagatacctatgcacgggtcttcac

SEQ ID NO: 22634 - DNA, 425 bp, Oryza sativa
  unsure (1)..(425): unsure at all n locations
ggatcttaagcgactgagctgcagctatatctgattgacaagtgtgagtggaaatgttgatcgagctcattattttccacctcctgacgcagctagtaatcaaacaactaatttgctcggtgaaattattttttatgcatacaatgtaaattntgcacgttgttacaaattaattgaaacatacggccaccatttataattctattgccttaattaaatggncatatatacgctttattgtttttatacatttagttatatctggtgtacccggaaattttcgtatatatcgctttctgatcatgcaagatttgtcatgtgcatgttggggcaaagcatagacagtctatggataattgttgaacaagaagaacctactcttctctttctctctcttactttgacacgtttataaggcattaata

SEQ ID NO: 22635 - DNA, 359 bp, Oryza sativa
ttgccagcagagtcaccaagtatacaactttctttcaatcatcttcagggcggactttctcacaagactccgctttataccagttgaagaaatcgttgaaagataaccgcagcttgagctgacgattctattctaatcgtttgatctatggcctatggctgaaaagccgtagaaaattaaagaaaaaacatcccaaaataaatatacaagttaaaatttcatatgttattagcaatcgaaaagtaaatactagtagaaaataaactcggaaggaaaacaaacccctcaaagtcaacataaaatcaaggttgaaataatttcaaaatttggtcgtggctgattagaccaacgagcaaaac

SEQ ID NO: 22636 - DNA, 406 bp, Oryza sativa
  unsure (1)..(406): unsure at all n locations
agcttgggcaccgtgtcttctacctcatttattcctaaaaaggcagattgtgacatatgattttaaagattattttatgccagttttaaagtcttcttcttagacatgaaaacaaggctgggtaacgaaaatgattaatcttataactctaaatgagatgcaactcttcttctttcttttaatgaaaaaaaaacaatggcaagcgggttncaatgtttactctagattcacatggacattgactaatttatttatgaaaaatatttacacattacaaacagggactagcacaattggaattggaacatctcatctcactgtgggattctgatcaagacggagtagatatcaacctaaaatagagtacctacgcagctagtctaagttcaaatcttttctttggata

SEQ ID NO: 22637 - DNA, 446 bp, Oryza sativa
  unsure (1)..(446): unsure at all n locations
ataaatctcagcttcatagngggaaagacatgcccatgagaagctattaatactttagcctatgaatgtgtatagtagtagagtactacgcaggtccattcatggcaatgcaagtcgaactagtaatctcactcgaggtttgtgaccgatctatcattcgctctgtacgtagatgaatgttaaactacattcttgatgtacattgntcccaccgggaaatgaaattatatgctgagtttcatgagttactacttactggcggctaccagtcatttctaccgtgatataaatcaaggtctcatttggaatgcggaaattttcctgctgactcctgagaanagctttatgttacacngaagacacgatcatggctacaccatatggcgattagtcctcaccacttngtcttacactgacactgttattgtcttacttgatgccacaaa

SEQ ID NO: 22638 - DNA, 381 bp, Oryza sativa
  unsure (1)..(381): unsure at all n locations
agcttncgtatcccctgattcccatattcttctctgcaacatgggaaccttgaccaagatctgaatgctcctcaatagctccaagtctatcctgcggatggagatattgaacttcagatgaagaatgacacaacacgatacagattctgaactcatttaacaaaagatatttcaagggattattggcttattgtcgtacanaaaccccttattttttctggtagatgccctataaaaatgtgtcagagaatcaaacatcatgtgctgtggaagtagtaaaagctacactttagttcacttcattttgccatggcataatgctagtcatacaaatggtggtcaagactgaaggctcacgagcatcatacactgaacctagta

SEQ ID NO: 22639 - DNA, 441 bp, Oryza sativa
  unsure (1)..(441): unsure at all n locations
tcgtgcagttcctttttaacccagccttgaggtttctatctgtngcttacatagatttggtttggtttgacaggatttgatgaagacaggagaatgcaacaggagacgaacttgtgancaatttctgcattacttgtgctccgttacgtttcagtggcaactgaataccgaaactcctattgggcgattgatcgccaggggccgccaggagcgatcggatcgggtctccccctccctctacctagttttcttttttggcaccacattactttcctattttagtaaatttatgcatctaaagtttatacacctcaagtttacacatctaaaagttaaagaccaaaaagttataagtcaaaagnttatatatccgattcaaatttgaatttgaatcaactttttttatatataggatntctatatatctaaagttatacacct

SEQ ID NO: 22640 - DNA, 394 bp, Oryza sativa
  unsure (1)..(394): unsure at all n locations
agcttgtgtatagataaagatagctacatattgctagagaaactgaacagagagcccattactgatttctctggccagttgccaacattacatcaatctatcatgcctgctctatttacatggcaacagttctgtatgtcagaccaactccacaaaaaaacaccgaagtataaaagcaaaccctgttaagttttcattatnnttacctgatgcttggtcttatgcctcacgggctcatcttttcgcttatgcttatgcttatcagccaaaatttgaatttccaaccttgaacttggagctgattttgagattttttcatcgaagtctatttttcagcctttgcttttagatagctaagaacacatatataaaagtttattcacaaaatactttt

SEQ ID NO: 22641 - DNA, 425 bp, Oryza sativa
gcagcatgccagcttgactgctggtcgcagacaatgatatattctggtgaatcttctatgaagcttactaaagacctaagatatgactctatatgctccacccgaggggtagtctacagacggtctagtaccagataacactttgagtgaaacttgcttgcacaagacatgcaattcaaagcgtactccattgttcaagtttgggagtaaagtgtcgcttggagttctatgggaagatcaaccttgagtagactccatcgaaacgttggtatataaaagtacattggaaaaggcaaatcttagtgggattttgatatttggtgggggattgttggaattgatagatgggctaaagcccattcgtagaataattctttgggaaatcacaaaagcgcacctcatgggatggcatgcatgtggagttt

SEQ ID NO: 22642 - DNA, 429 bp, Oryza sativa
  unsure (1)..(429): unsure at all n locations
atgctatcgctatttacatatacatgattagatggcctctagctgatgggccagcacacatacacacacacacacacactattctatntacagcccaacactccccctcaagatgggtgatagatatctatcatacccatcttgtcacacgaacgattacactctttaacacctaaaccctttgttaaacaatcagcaacttgtccactagacgttacaaattctaattccaaaactccctcatccagtttttccttgataaagaaacgatccaactccacatgctttgttcgatcatgctgaactgggttgttagcaatgttgattgctgacttgttgtcacaccacaatttcatgggagtattcaccgacgactntaactcagaaagaagattccttaaccataacaactcacttcaactcactgac

SEQ ID NO: 22643 - DNA, 461 bp, Oryza sativa
tcttccaaagcatacggctttctagatgtatatgacgatctctagacagtatggatcttatatgaatcgtatgatgaagtaccacatgagtggatatataggaaaggaatccaaatctgccgaatcgctcatgttatgatcttctacatcctaggtctccgcgttccgtcatctggcttatgttcttcatgtagcattcagatcgaatgactctatgaaattacgtcgatacttctacatattatgggtaacgtaagagacatccctattttcccccgggggtcttaattaccactgcttagctttcaattcgcctctgaccatcaaattaaatgtgaataacccgtcctcccctctttgaaacaaggagcgcttacggttctgtgcgtgcctctaaacaattatgtcttctccatattacccatatctctagagtccatatatttctatgaggaactact

SEQ ID NO: 22644 - DNA, 255 bp, Oryza sativa
aacggataattggccagagaccaaaagttcataaaatgctcaggccggaattgccacgaggcaaaatctctccttgtcaggaccggcgccacatgctaacactgaagcgtcgaaacaagacctcgtgtacttttaatttatttcaaccaaaaaccgaacatcaggcatactagctagttgatgtgcataagcacatgctgatccactctatggtgcatattaagccgcgaacgaggagctggaactgagacaatt

SEQ ID NO: 22645 - DNA, 425 bp, Oryza sativa
ttcaaactcagcttgaagcctacagacaaatgagcccatttcaatttatagagactgatcgatctgggctaagaggccggtgaataagtttgtgtccggcctctctctggatatcttgataatatacgaataagttcacttcgtgaccgtcaaagtgatcgagatctaacccgtgaccctaaaccacaaaaccggatatctcgacccccaactcttaaaaccagtgcaatttgactccctcggcggttttggagggcgggtccgctgacgtggcgcatacgtgacaatattgactcggtcttcttgccacgtggcgttgacgtggcacttacgtgtcataagacataaaaaatatgggtgggacccatttgtcattaccaaaagacaggtggacccactgacatgtgggctacataatcatatct

SEQ ID NO: 22646 - DNA, 414 bp, Oryza sativa
agcttctaaaatatgcaaaaccatcatccaaaaccaccttaacggttatatggatggtatggcaaagttcaaggggttggatgttcgattttaaagtgcaatgtgctagacagacttcaatataaagtttagggatgtatatatactttttcatattacatattacatacgtatatacttatttgggcctaatactttattctcgggcttctttttttcagatatactcctcccgacactattttgttttgttgtgatgaactttatcggcaataattattgagtgaatagctagccttaaaatcatgagttcattgttgctttgctttactgaaacaaaaaacacttatttgaaaatgaaaattgatatgtttttagtccgggtaactttctcgagactgggataagtattat

SEQ ID NO: 22647 - DNA, 399 bp, Oryza sativa
  unsure (1)..(399): unsure at all n locations
agaaaccagacagatacctgaatgttcttagactatatattctatggaacccagccttgtgtagtcataaaacttttgctagtcatatcatagaaaaaggcttactcaatggcaagccataaaaatatagaatcttaaaaatctctaatgcctggaaactttcacataatgtgaagcatatcgtccttgtgtaacatttatgggtacaacagacatttcttgcaaacaaaacagataatatagtttcaatttcagattaagggttatgcccttttgtgtccacatgaacttgtggaattttcactacatttgcttgttcaatatcgtgaagcaccttangtgcttccttgcatttgctgtaaatgcactatacaacccaactgaagtatacccattatg

SEQ ID NO: 22648 - DNA, 423 bp, Oryza sativa
  unsure (1)..(423): unsure at all n locations
agcttgaacctctgctcgccccgagtgattatcttcacattaatcttaacttagnagttgatcaggagttgctactatgttgtatatctcaaatgtacaagtgcaaagtatatctactctctctcacattaaataagtttggcacggaggcttacccttacacctaattcccacgagacactgcatttccttgtcttaagcggctgatagatannnnnncatcagagtactagacacccaatctttattcaacttttatcccggaaggatttcaaatgaattttgcaaaagaaatccaagctcctcaaatgattcacttgatctctcaaagtgtatgaatatgaattcctcaccaaatttgcctcttttattcctattctaaaggtgatatgtggagcttggtagggatcaaacatagaatac

SEQ ID NO: 22649 - DNA, 278 bp, Oryza sativa
ctggtgacatggatggatgcgcttgcgatggattgggtgtgaatggcaacgccacaatgggatctgagaagaagaaggtagggtaccttgattccgctaatcttgatgagatcttgttcattaaaaaatcgacggagggatagagaaatatcaggcgactgattaataagtgcccccttctctaattaaatagagcaacaaatatgttgttcctacatggtgaagagtggagactggaagagtcacgctagatgtgtatgcccatattacccacactt

SEQ ID NO: 22650 - DNA, 395 bp, Oryza sativa
agctttggaataaaaatatatgcacttatattagtatggataggatcaccagctcccgatgatatgaagagtaggaacatcttcgaaagatatggtgcttcttgcaaggcgcaagaagagcctcagccccacatgacacaactacacgatgaagaagaaaagtccaacaaaaaaaaagatttgagcatgagcacaccttacgcttattcaaaccaaaaacatccggacgcgcgattgcatgaatcaaaacttcacatcaaaaacattatattgatttatatatagagagatactagaaaaaaaaagtctcgcgcgttgtaataagtaaaagatagtttaatcttatattttatacggggtagctaaagtagcattcactgtataaatttgtttag

SEQ ID NO: 22651 - DNA, 372 bp, Oryza sativa
tgccaaacttttctatgaacataaattatatctctggatgtattggtcagagaccatttacggcagtatgtagttcgctactttattcataatgcaatatatcgtaatttgcgagttggacaagatttgtttttctaattgtgtgtttaccttttacttcagattctgaggacttgaagttgcaaggctattgctctcttctgttactgattagtctattttacttattgcagaatcttgataggataaagtgtagattgttgaaggaacaaatgctcaagatgtcagagcacttgtgttggacatgcaaacaagattgcttctggatatgcttggcaagggaattgaatctgccctgataaatcattcact

SEQ ID NO: 22652 - DNA, 412 bp, Oryza sativa
agcttagtatatctcagacaagtgagatcttaatataaagggcagatttagtatatcaagcaaacgtaaaaggagcaggataactaaaccaagtaagattggctgaaactccgacgctatctctattggcaatcataaagcgagctagatattatggttctaagtattacttaataggtcagacttaaccgatgcagcattaagcgcatatgaaacataagatctaaaccaactgatgatagccttttcaagatggtagatatactgtataatctaactcagccattaatgtttaaccttgttagctattttcgatgatagaggctagctgataagattaagcagcgggaccgatctagattatacaacatatatgataactcggcgattcacataagcaggactagagtat

SEQ ID NO: 22653 - DNA, 427 bp, Oryza sativa
ttgactaagaattactcttaatttcatgacataaattttatcttatttgatttgtattcaaaagtagtctttaagtattatgtgaaggctttattgtactgaaacaaaatacatacttcttaatttttagacggagggagagtactactaaccgcagtttatcccctccttgtcatcggtgacaatgtagcgatgccccttagattcaagccagccgcgaatgccgagagcggagtcgacgcagccgacgaagttgggattcttgtcggcatactcgccacccttgtagaacacacccacgaccttcttgctgcctgctgatgtctgcggtacaaagagggaaaccataaggtgtcattcgtcatatcgagctgcatagaacaaatttgttgatcaagtgtgattgtatattaagggtgaagtgggt

SEQ ID NO: 22654 - DNA, 411 bp, Oryza sativa
  unsure (1)..(411): unsure at all n locations
ctgcagcatgcaagcttgtatcggntaatataattctgctttgttttcctcttttcgttatgtgctaagtccgacagaacaattatgttttgatcaatttatcatcctattaggtgtactccctaatcgtttactaaatagtctgagtctaccttatatatatagggaatggtgaagcgggaaacttgcttcacatctcaatgtacaccacaggatatctttctaaaataaaagaagcttgtggacctcttggtttcaatgtgcggaaacaaaattataaagtttgtagcattttagaccgctatgtattgactagtttgctctattgggggtttctggtagtctccttgagaaattgcatcaatatgttcgcccttcaaaagaaacttgatttgttcttttttgttggct

SEQ ID NO: 22655 - DNA, 438 bp, Oryza sativa
aaaactaagctgacctatcatcatgatcaagctttttatctttttatgcagcacgacaactctgatgacatttttttaataatggacacgattcacatctatatttctctaccaatttataaacacacggacaataagttctaaaatatgaatatacagactcatctaggctatgtgaatttatctgattagcatgatagtaattagtatgcctgtagaattcattttcaccttgttttaataatatatgcatggatggacttgttgtcggaatattatactactgatgaccagtaatcgatttatatctcattatatttgcgtgagttggtgaatttttatgttcaactcgatcagaacatatatgcatcggagtcatatgttaattccatcaagtttccagcaacgtgataatccatcctggttgacagaaggcct

SEQ ID NO: 22656 - DNA, 324 bp, Oryza sativa
agaatcccaccactggcgacttgctaactctccatcggctgatgtcccagatactgtcacccgcaattgtaactagcggatgacgaccctgccgatcccccaactacacaagaaaactcactttttccctaaccacccgcctaatcaacacaagctggcacatatatcctttatcaaccccatgttcaactaattgatggagggacctgcaccccatgatctcaacgctccatgcaaacagaactatatcctttaggtatagcatttacacgtgcgatgcctaatcgagcctaatttgaacacgcgcaggcaggacatggctac

SEQ ID NO: 22657 - DNA, 395 bp, Oryza sativa
  unsure (1)..(395): unsure at all n locations
ntaagtgtataaactctatatatatagtattactatatattgataatattcgaattcaaatcaaatttgaatcgggtatgtaaacttctgacttataaactttggatctataaaccttaggtgtataaatattagatgtatataaatactatatataaaaaatatttgaattcaaattcaatttttaattagatataatttaaattcaaatttgaaacgggtatataaacttttgacttataaactttaggtctataaacttttgatatatagaaatactatatataaaaaaaatattcgaattcaaattccaatttgaatcggatatataaacttttgacttataaacttttggtctctaaaccctatatgtgtaaacttgaggtggataaact

SEQ ID NO: 22658 - DNA, 409 bp, Oryza sativa
  unsure (1)..(409): unsure at all n locations
catgcaagctntatcagattctattttccgaagttgcacctacaactattcattgaaaagaatcctactcttatgggtaaatgctcaatatccaagtgggcttacaaatttgatcatgatcaattgcttttgggattgtctcgcgtctcttgattagttggtatttatcccccccaatattgcaagtttcttacgtccaagcnnngtnttacttgttactaataaaaaatcaaaaagtttagcctacgttcttccttagatcccttcttttactccgatagtattgcagatcgcaatcgatgcaaagaaaatgaatgcatttccatactataataaaaagtaagtggtataaatagagaattggatcatgtcacatgacttattccatttctactctatgggatcttac

SEQ ID NO: 22659 - DNA, 326 bp, Oryza sativa
tacaaatcctgttactttgatacagtcattacttgataaggtagatacaacacgtccatttcaagctcaagttactactgcatataattgcgtcaagaatatgaaaatggtttacatcgccatcaatataaaattctacctgcgatattttcatagtgattaacggagcgaccgcaacatggtgaacttatcagaccatgacatcattgccacgagcctatcactagctgggaatgcatatattaagtttgctccagacctggctgaacactaaagcttgggatgggcttgctcaaccctcttacctgagacctgatatacatcct

SEQ ID NO: 22660 - DNA, 245 bp, Oryza sativa
  unsure (1)..(245): unsure at all n locations
cgccatacctaataagtgacataagcctgtgagtatgtccattttaacttgaaaaacactcatctatcaataatgtagctgtaattatcaattaagtcggtcatgcctgtgaaccactaccagttggacaacaatgctcaacttttaaaacttgtagctgaaagttgaatatgattntgttcaagattcctagtgctgcatatactgacctacccaagcaaatatcttaccttgggatacacttg

SEQ ID NO: 22661 - DNA, 406 bp, Oryza sativa
  unsure (1)..(406): unsure at all n locations
cagctntattatactattggagagaaaagcatttgattcagcaacctgtattggttccaacaagtacaactggaatgttctgaaatgctgaatgccacttttgaacttctgatttggcaacctcccgttccacctgcgacacaagaaaattcaatatttcaaaaactacttgcttgatcaaaaaagcaatattggtaaatacttttctcaacttctgcacacacttttaattgtaggtaaatggatttctttttcactaggtcaagtgtgaacgtgataggctttgcagttaatgcattttatattgcagatactagcataatcaaaattgaacatgcaaaatgatgtactaataaaagaacattcttctatttcaaagagttgatctttatataaagagctccag

SEQ ID NO: 22662 - DNA, 410 bp, Oryza sativa
  unsure (1)..(410): unsure at all n locations
tctcatacgctccggaccgtntacctggacggaggaattctaatatgccctcacccagttgaaggcgtatctaagctctcccccagttctagtcgccccggagccagacgagcccttgttattctacttagcggcgaccccgcaagtagttagtgcggcattggttgtggagcgcgatgagaacaattctcatttcacgcttccccaccctgtgccgacttggcccgggagagagcatggaggagaggctcccgagccgaacggtggcccaaggcccccgacgaccggagttggccctctgcccgcttgtcagacggtgctaggagcccccgacccccatgaaagccctgaggccactgtgggaaagccgcacctattcgccttcgaccccgatctaaccctgtgctgac

SEQ ID NO: 22663 - DNA, 421 bp, Oryza sativa
agcttaccggcaaaggttttcttggcctacagctgtgtccgatgctgacaagattgagcggacatgcgaaggttgtcaattttttgccagacaaactcatttgccagcccaagagttgcaaaccatcccgttgtcctggccgtttgcggtctgggggcttgacatggtcggcccatttaaaaaggcagtcggcggttacacgcatctctttgttgctatcgacaaattttccaaatggattgaggctaaaccggtcatcacgatcacagcagataaagctagagattttttcatcaacattgtgcatcggtttggggtacctaatcggatcatcactgataatggcactcaattcactggcggagtatttaaagacttttgtgaagacttcggcattaaaatttgttatgcctccgtggca

SEQ ID NO: 22664 - DNA, 396 bp, Oryza sativa
  unsure (1)..(396): unsure at all n locations
cagtaagctgccttagttcaactataaattatctctggaactatttgnatttaaattggtcctggaaagtgcatttaagatccctttactatttgaaattcgctggcaatctttattgtggcccaatatttatgtattagttccttaatactctgctggtatttgctcctgtaggaaaaaattaatgtacatggaggagctgtgtctttaggacatcctcttggatgcagtggtgctcgaattttggtcaccctgcttggtgtaagtattaccttgagaatgtcctttgttctatgaatgtctctctggtttcctaatgatttatgagattctgctgttcaagacacctcatccatgttcttttaaattgtactgtataattccttccttttatct

SEQ ID NO: 22665 - DNA, 421 bp, Oryza sativa
  unsure (1)..(421): unsure at all n locations
agcttactgtagtagaacaattaaacaaatatgccaaaattgagtactctcataccgtcaagattttgccgaagtttggatttttaacatctgacactctgaaatcccagtcaggaacataaatcccatatacaagggacaggtagatcacaaggatgcaacatgcaacaatcctggtaagtacacagaaccctcaattagttgtctagaactgaaatnttcacaaatcatgggttacatgatcataaagctcgcataccactgggagaagtacatcctgaaaatcgagaagcccgaacttgactggtcctgaacctttgcattcttcgttacgatctctagaactgcaaccaccaagtatgcaagagcaatcctttggagaataccacaccatctcacgtgcgttatgtcaactccataa

SEQ ID NO: 22666 - DNA, 321 bp, Oryza sativa
  unsure (1)..(321): unsure at all n locations
actcaacttcacaatgactgagctacaaacaaaatacttcttagaatttatttctgtgttactggacataaataactccgaacacactgcttaaatgaccaataaaaacggctataatacatccacatcgtaacgaaaatttaagtacattttcgagaccaaaccattgggattaagacatgtggagctcattcccaaattcattgaccaaatagctccccggcgttgaagccacaaattcacacagataaaagcgaacgcggggacttctcaacctcaatatcatggacatatgcnatgcangggccaaatcgacggatg

SEQ ID NO: 22667 - DNA, 261 bp, Oryza sativa
  unsure (1)..(261): unsure at all n locations
agctagcggaaaatcttaatagctgccattattttttttgcttgaggtgttggagatgcaatcattaacctgggaagcgcttccagcgtgatgtgagaaaaatctcctgatggcctaaaaacagccagccgtggacaatgccgcgttgacctgccaaaagataaacatcataattagaggtgtctaaactttgcgctggtgctgtggtggatggtcnttaagaaatataccactggcgccgtgcattggaggaagagaagg

SEQ ID NO: 22668 - DNA, 224 bp, Oryza sativa
gatgataaattattaaaaatgatgcccttttgtaaagagaaacaaaatgcctcaaaatggagttctatcggcgaaataattatcttgcttgctgcaacatgaagcaaacattgaaagaatgaaacatacatgctgctcacctgggacttgtcccttgctatctgtgtcaatatcatattgactacgagcctcatctttctcgaccaatgctaggcgggtgatac

SEQ ID NO: 22669 - DNA, 424 bp, Oryza sativa
agcttttcagaactagattagtttgaatgtcttcctacatgctggacaatgtgtttcaagttgacagaagatgtccaagaatttgattcgaaggtttgaatctccactgtgcacctttattctcctttctgtgccaatttgaacatcatcttatgcgcgtgtgcatgcccgtatgctcacactctaaaggcttcttttgtaggtgcaagtgttgaatttatttcagaccttcttgaacatgctggagacaaggttattccatttgcaagtcagctatcacattttttccagaaagtatggcctaaagcccccatttccttttgtatgtacctatatttgtagaaaggaattctctcgttggctgaactgactgagcagtatgctcttgacataccatcatttgaaaaattttatgtttggaaag

SEQ ID NO: 22670 - DNA, 411 bp, Oryza sativa
  unsure (1)..(411): unsure at all n locations
tctggccgtattttttctacctttcttgccacccaatgtctgcagcagtctcttgtcgtcgtatgtggccggcacttctgaagtccttgtatttgagaagaagcttagaatgacaggcacagagtcatagcccttgaagttgaatggatcagcaacaacggatgtaagctgtagaaacatgtcagcggctggtggatattgatactccactgtttcttggatcacctcgtcctcgtccttgaggtgtgcangcctcccagcattgtttttcctaagcctcccgcgtggcctcccgcgtggtgcaccgctgcccctgccgcccttggagaccctcttgcggtcgatatcgacttcggaatcggagtcagtggcacccttcttgcgtgggtcccaagtctcatcggagtcatc

SEQ ID NO: 22671 - DNA, 296 bp, Oryza sativa
  unsure (1)..(296): unsure at all n locations
tacttcaccgtccccctctctgcgaagtcttgtgcgggaggaggcgctcgagggggtcgaaagatccgcgacttcgccacctaccgacgatggannnnnnncgcgagacggagagcgtcgcctcctcgtctacggcgatggcagtacaccccatggcgcgctccaggctgcgggcgcgctcctgcgtcacccgcccgtcgttctcgatccagagactccagcccgacgttggctggatgatgtggccgacttggtcatgactgcgcagcagtcgctaagcgccggcgggcggtcct

SEQ ID NO: 22672 - DNA, 331 bp, Oryza sativa
  unsure (1)..(331): unsure at all n locations
ctccacccggttatccgagcttcccttctctcgccggcgggcgcttncaccacgggatcgatcgatcgcgggcgacgtggctgattggcggcggaccccattcgcggcgcaacaatggccatgcggcgctgggcggggcggaaccagcgacagcgcgaccgcattcactgtcccgatcgacctccgattccggtacgccccgctgatccagatgctgattntctccttggtgtttgccgttgcttggtccttcctgtactagtataccggacagcgttgagaggtcgctatcttgcgctgctcacagtgatgagctntgctttgatcgatt

SEQ ID NO: 22673 - DNA, 446 bp, Oryza sativa
cctatgatactcagctccttcgcggaactcgaggtgacgtcaggacttgttttcctgaatttcatgtggtctttctcatgttgtatccaataacgcttgaaactcggcgtgtagcttctctggcacggagaacgaacggctcattacggccccacaatggtatctataagctatctacaagatatccatgtcaacatattttcctacttggaagatattaaatgaagagagagagagcaaagctatctactagcttagagataggctatagagaaacacgatgcaatgcatgagagagctatagatacctatgtagacatactattgaagtgcgttactattaatctaagctattgctgagatgtacatgttttatagagagcaccctactgttacattggcggtgctcttagtgcgtgaatattaaatatttgctattttttaaa

SEQ ID NO: 22674 - DNA, 415 bp, Oryza sativa
  unsure (1)..(415): unsure at all n locations
agctttccccaaacaagccctaagtacagtatatcctatccgcccctttctcaaaggaaatggcgcaaggcttaaattaaaccgagttatttgacttgccctgtccatagaagtctttaattttagctgccttagcggcttcaaaaatgactcactatgtccataaaagactttaattttagctaggcatattaagtaagatacttaaanacaatatgacattcattaatatggagagaaaacaagaagcagaggcgaataaggacataaaggaagtgtaacgccccgatttccgcgtggcgttaaaagctaattcaccgaaaaccctaattgcgaaagttttgattcttttgagtgatgagtctaagttgtgccaaagatcacaattaagatccctcagatgtctcgataccct

SEQ ID NO: 22675 - DNA, 413 bp, Oryza sativa
  unsure (1)..(413): unsure at all n locations
tctgaatcttctgcatcactccagggttcttaagatgcttctgagaagccctagggttctcctgcaaatcgaccagtacctgcaaaacattttcgatatcattaagattatggacagacaggtatttgtgatactttatgaactgacatctaaatttcagctaagaacaaatattctgtgttacctgtcgcatgatgggatctgtaagaatattctggatctctggatcctgcatagccttgttctacacaaaaaaaaaaggaccagttaatacagttgtacagtatttaacttttaaagcaacaaggggcatgaaaagtgcaacaggcttacctgtcgttcctgaatctctntctgagtcaaatcacccctggtggccttggtgatcttgtcgatacaccttgcaacatgtg

SEQ ID NO: 22676 - DNA, 314 bp, Oryza sativa
tgctccgatctcgcaaatcaatatatggagttaactactaatctgatgaaatgtacacacgctggatggggggggacacactgacactgcaaaactacagctctctataccaaagtgttgaaggtggtcgacggctatgtacgcgtgcacaagtgccctttcagatagagcagtcgcttcctcacgttcgccgacaccaacctttctgggcccgccaccatcgccgagagaagaacgcgcctcatgctcaccattgtcgacccgggcatcactggattctctggcgtcaccgacagcgcccatgggcaggagac

SEQ ID NO: 22677 - DNA, 297 bp, Oryza sativa
agagtagagcacaagacgtctgaagaattccgaagttgaccgatatcttctctcatctcttttattctgtttattactccgatttaaatataatattctttctgagtaatatagatctatcttgtgagaattatctcttgggtagttcctaaataacatacgggattactattaactggaatcaaataaaatatagtgattgctttggtgagttataaacactaaagtagatattaatcgcttagacgttgtgtttaggtaattgttatacaataattgctgcgtatcccatactat

SEQ ID NO: 22678 - DNA, 378 bp, Oryza sativa
  unsure (1)..(378): unsure at all n locations
agcttctctatctcaaaagttatgntgattggaagccggtctctaagatgctagtagatggaggtgccgccgtgaacttgatgccgtattcattgttcaaagaagctggggcgtgaggatgatgagttgaaaaagaccaacttgattcttaatggcttcaatggtgaaccaacggaggcgaaagatatcttgtcggtggagcttaccatttaaacaagacgctatgaaccgctttcttcatcgccgatgtgcaagggaactacaatgttattttgggtcgttgatggatccatgccaattgttgtgtgccttctaccttgcatcaatgtttaattcaatgggacgacgatgatgttgagattgttaagcggatgcatc

SEQ ID NO: 22679 - DNA, 417 bp, Oryza sativa
  unsure (1)..(417): unsure at all n locations
ngtcaccctcctcgtcagaatcaaatgtgaatccatcatgggtacctataaagataacatgcctggagtattagataataaccattgcagcagatgttatcattatatcaaatgatacggtcattagtcatcacttcatgcagaatgactgttcctgactacactgtcaaatgacaatgcattgcttaatagctccattaaagaaagataagatgtgctgcttttattggcgcgcagtttgctgctcagctntataggtcagaaacagtacgatatatgggctgaagatttctaattagaccatctagaagactgctaaccttccatcataatctctgcttcaaataaattgcattgcggttccaattgaataaagtcatccatgatagactctatctgcaaaagggaaaaatgggt

SEQ ID NO: 22680 - DNA, 330 bp, Oryza sativa
  unsure (1)..(330): unsure at all n locations
actactaatcgccctatgaaaagggtcagagtaaatacatataaaccacgtgcgctagaaatactatgatgatcaaccagctaccccttcagttgaacccaagagtcatacataattactcgccgaaagcaacacccgctgaaaatagtnaaagggaagcgagccgaactatacccatgcggctatatcaccagcttgtcctacttgagaacatacagaggaatataatcctcggttcaactgttcaaagatatcaccgtgagcaatggataaggattaataggacttcagtcatgcccattcatcgatgcctatgaaatcgccgtcaga

SEQ ID NO: 22681 - DNA, 356 bp, Oryza sativa
  unsure (1)..(356): unsure at all n locations
tgagccgaatcaactactggtgggtatggttttgcaacacaatatgagtgatggtttatgtaattatgtcttttaagaaaaattgcatggtgacccgcgcatattgcacggctagcatcgttatattttttatacatatatatttacattttattataaaaatatgttaaaacggtnacataattctaaattttgtactatctcgatcaaactgaccaatgtgtaattgtatatacgtgagagttattaattattcttaattctacattttaggtatttctacattgcattctgatatggaaattttttacaaaatgtatggcatgagtattaanaaagtatgtgtgataatgatc

SEQ ID NO: 22682 - DNA, 406 bp, Oryza sativa
  unsure (1)..(406): unsure at all n locations
nggcatgtgtacgtaccgtatgctcagaggtaaatgatttctgcgtcttagcttccctttgtntaatacggctcttctcggaatatattccttgggttttatgatatgcttgataggggaaaaattactttcaaacaatattggatatgagcatgatttgccaagggatttaacgagtgaagggcgaggtcggttatgtctggtacccgagagttttcactccctctgctatttttttatttatcgcttaatttgcagatcgacaaatcgtttaattcacgtgtttgatcagtatatttctacgtgataaaaaagacattctatacacagaattactaaactgctttttgaggtctgtcttccactcttcatacatgatgactacgtattgtgagtcagaaatatc

SEQ ID NO: 22683 - DNA, 409 bp, Oryza sativa
agccagcgaacgactctcttcatgtctatctataagacaatcatacttttccccgaaacaaaaggacaatccatgttcatctgttatgagactgatcattctcttgattaaagaacaacggacaatattattatcatttttttactgttacaagcttgataagctgattagacaattggctcgcaatttgcctcacaagctttcagctagggtagcatacatatttacagcagaccttctattgggagaaaatgttgcatggtacgggcaccaaaccatttatattgacattgttgcgtgcttcattcaaggatgcacttcacgtgtaatccagatttgtacctaaaaaataaaaaatattttactatgacagcctgaaagatatagaacaaccgtatgctatacatgg

SEQ ID NO: 22684 - DNA, 370 bp, Oryza sativa
  unsure (1)..(370): unsure at all n locations
ntgagcagctcanagaatagctgacctcagcgctctattttagttcttcccgacatcaggatagactttgntatatattgtgatgcatcaaggcaaggactaagaggagtactgatgcaagacggaaaggttgtggcctatgcatctcgacaattgcgaccacatgaggaaaactaccctacccatgacctaaaactctcagctgtggttcatgcgctaaagatttggagacactatttgattggaaaccattgcgatatctacactgaccacaagagtctgaagtatatttttacccagtcagacctcaacttgatgcaaaagcgatggctggaattaatccagggatatgacttaaaaggtcactatc

SEQ ID NO: 22685 - DNA, 411 bp, Oryza sativa
agcttctacttcaagcctcgcatgcgtgcagcaggattataaggcctccttgctagctagcccgagggggcaccaagaccctctgtcaaaatccctctctaggagatctagtgccatcgcgaaatctctctcttcaaaacccaaatcaaagtgttgatcattcaaaacggcgacgagccaaccccatacccatcctccttactccataactctcccctattgtttccgccactagaactatgacgcattcacgatgggtgatggagctctaggcaatatgactgggttgcgggcgaagcgtggcttgaggcaacgtgagcggatgcggagcaccagacgacgtctatctctctttcttcgtccacagcatcctcgatgagctctccacaaacgatacagagctaggtgagc

SEQ ID NO: 22686 - DNA, 416 bp, Oryza sativa
  unsure (1)..(416): unsure at all n locations
agcttcaagtggtcctattgctgcttcacctataggcgagcaactgatggtccgataagagcttcactgagttgctagagctcttgaaagaaattctcctatggacaacatctagccagaatcgacatacaagccaaaaaagttatatgtcccctttggtcttgacatacagaaaattcatgcttgtctaattgattgcattctttaccggtatgcaaggcttctagctataagtggggagacggggatgatgagggtggaaataagaaaagagtgccggtgaaggtcgttcggtattttccaatcatctcctgtttggaacgtatgtatgcaaacaaaaagcatgccaagctgatgcgttggcaccacanagagtgtaaaaaagatggaatgatacgacatccagctgatgggtc

SEQ ID NO: 22687 - DNA, 418 bp, Oryza sativa
agcttgtgaccttagccttgccggcatacactatgatgtgtgcttaagcgctggcgtggtgacggtgtatcgcgggcgttaaaaggtttaaggcgtctatgggtactgtgacacacctctgcagagtgtatgaattgtgatatgtcactccctgtttcgggtagaaactgcgaacgcagcaggaaaggaacctcacagaggttctaatacttctggtgccttatatgcagtagattttataattacttaatatgagattttattatactgttttatgaacatacataaaattccttgttggattataggatttggagatatatgtattatgcaggtggattatgggcatatatttgttggattgctatagttggacttgttgaataccattcgtactcatctcatatatatattcttc

SEQ ID NO: 22688 - DNA, 394 bp, Oryza sativa
agctttctcttttgtttatcaatgaatgaaactagttattgaatatttgccgtgcgccttatcaatggattacaaagttgaaatacaatgaaacttggatgtacaatttgacagaaaatattaatataatcaatacaagattggaatacgaaaattcacataattcacatttatacactaagaaattattgcatgtcagtcaataagaacataaaaatatctagaaatactgatgaggaaatagaggacaattgaatagaatttataaaaagtataatcaatgcacatacttgtcaacagccgtgaagggggaaatatcttcatcttttgtgctactattaagtcgctgtcttatatcatcatatctgaccacggactgggagaggctcatata

SEQ ID NO: 22689 - DNA, 401 bp, Oryza sativa
ttaattggatttctggacaatgaaattatctatcggatttttttggagtacgagaaatggcttatagaacttatagaaataatattctcaagagtattattgacagtcactaacatgcaggaccaatgggttgaattattgaaatccccggattaagaggaaggattttatggaatttggaatataggaaatgttttatggagcaggagatatgatttattgcatttatggaaatgaatattctcaagaatacccttttatcactcattgacatgtggggccaacatatggtgagagagaggtgaattgggagggagcatatatagacttttggtcattgtgcttggcggagggagtaaaaatggactttctttgtttcaatgggccgaggagggggagct

SEQ ID NO: 22690 - DNA, 414 bp, Oryza sativa
  unsure (1)..(414): unsure at all n locations
agcttgctgctgactctgtcagctataatgtttgaagcactggtggtaccatattgatgttgccttttactgtcaattttaagcttttgaagtaaggccttgcttcagacctcaattntagaaagaaagtatgtagccatatttttaagtagtaaatctaaaacaaaatcagttaatctatgcccccctttgatttatagaaaaaaaaaacatcggaaacaaattcttcaaggacttttgaaacaaatgattgaatcatatccttttctttgaaatttctactgaatgaataatcctatagatattttggaggaaagttagaagtgctccaaacccttggaagatttacttttgagttcctctcttatccgctttctggggtttcttatgggctattcaaaagattatttatgt

SEQ ID NO: 22691 - DNA, 412 bp, Oryza sativa
  unsure (1)..(412): unsure at all n locations
agcttgccgttcgccttgggaacgaccactgtgttcgccagccactccggatggatgacctcgcggatgaatccggcctccagaagtcacgccacctcctcgcggatgaaggcttgacgttccggggcctggcgccgcactttctgccggaccggccttgcgcccggccgtacggcgagacggtgctcaatcacctccctggggaccccgggcatatccgccggtctccatgcgaagacgtcagcgtttgcccgcaggaaagagacgagcgcgtcttcctatntgccatccaagagaccaccgatccgtgtggtcttggacgggccgtcgcccaggacaacctccttgactgggacctcatcgcacgtgactatccgctgcctcggggcggcgggggcggatgtgccaagcc

SEQ ID NO: 22692 - DNA, 399 bp, Oryza sativa
agcttgggttggctggcttggactggaggctgcttttatctatgctgaaatgaaatggtacggagtttccacatcccgatcacacacagctgtgcagacattggtcggacggctgtcggggcagggtacagtacagtgtttgttaacagatgcctgcgatgcgaggtgaggtactgaggtgaggcggcctttcgatcggtctcatctcttctgccatgtgctggtagaccctcatgtcgatcctgtcatttcgttaatttgtgcccgatcgaaggtacggcccggtcgaggacaacttctatatgtatgtacgctttgccaagctcaatgttcgctccccaatttaccatagaccaactacttttgagtccttttttctgcaggattacaccattacat

SEQ ID NO: 22693 - DNA, 407 bp, Oryza sativa
  unsure (1)..(407): unsure at all n locations
agcttctcagtttgctactgcaaaggaggattgatcgtgtagagtacacgtccttgcaagcttctcagtttgcttgcgagtgcatatatatttctcactctcagatctaacacgggggcggcggggtctcgagcctccactactggcgtgaaaactatgagagcccccacgaagataccgctaaatttttttattatatatagatgggtggggacattgtaactctatttaatttgtttagacccaactactatttctttctaaatccgccactgcgcaagagtgacacagnggattttcttctcgttgttcatcatgttccatcacttaacgttgctattgttaggtccctttatttctcccaaagtttntcccaaaaacatcacattanatcttttgatacatgc

SEQ ID NO: 22694 - DNA, 403 bp, Oryza sativa
agcttgccgttgatttattggtaatattagttcttccacttgtattaattgggccaaaatggcacttctttctgtgctccggccatagttttcgaccgtcggggtcagaaaagattgggctgaatcaacgatcgattgtttgatggtcatatgggactgaagaccgaaatgctgagctctagcttggagcaccaagtcaatggctctgtttaaagagctggaggtttaagaagcagctttagctagtgagaatctgaaagctactgcttcatttttctgaattctgtcggagtggttctagagtccttcctctcagaaggtcatatgtagtctttagctagcattgccgcttttggagatttctcgggagtgtagcgttagcgtggctctacccctttccgct

SEQ ID NO: 22695 - DNA, 412 bp, Oryza sativa
  unsure (1)..(412): unsure at all n locations
agctttcatgatcagggggtgatgatgtgatgggttatgcgtaagacgaatcggtgtaggcagtcgtcactaacagcaggagtacctagctgctaatgccagctactaccgtgatataatgctacgctatcgtgtctgttctacctgtcggccatttgggttgttcactagcttatgctttgtgctggaaaagcgtggcctaactactggagtaccaagcaagagtgtcgtcccaggcgacgatcgaacggcccaatcacatttagaaaacctggcatcttgacctttacgaatttcgtaatggaaaacccggaatttgatggacttgaccaacgagacatcgttgccgtcatcccgtcacatgatgatcctgcattatgttggtattctttntctaataaagatttttatc

SEQ ID NO: 22696 - DNA, 420 bp, Oryza sativa
agctttgctttgcgcagctgcgctgccgaccgagcgttacaaaagtctctcgccaaagccgctttcacctttatcccgtccgtgccgcgtcgcactgtaatggcatgagaaggaatgatctctgttttcttttgttccttcatgtgcgtgcatttttcttcgtcgagagcgaggccccgtgagctagagaatccggttcgctgatggctagtgtcgaggtgtgcaaatgtgctagcaacagctggacaaaaaattttgatgttgccactatgcagctggccctgcgtcgttcgtctgttcccagaggttcgtgttgatgacaatgagagatctctcggcggctagcggctagcgcgcccgtgaccgcacgcatggcaaagaggagaaaacgatatgggcgtgacgtcgatagtgatttcg

SEQ ID NO: 22697 - DNA, 407 bp, Oryza sativa
agcttatggacttgtcgatattgtaggggatgaaatgcttgacgagcactgcgatactgatccagtgtggtttccagaaatgtttaaggattggtagtggccagatttcttgtaaatttatttcaaccctaaattcgggttttatgcaatttaatggaaatacttcataatgatcaatcattcaggttaagatcgatctaaaccaatccattttttctatatacatacgacatgccaacggttaaacaacttattagaaacgcaagacagccaatacgaaatgctagaaaatcggccgcgcttaagggatgttctcagcgtcgaggaacatgtgctaaggtgtatgtgcgactcgttcggatcatgggttcaaacaaataagacaatttttgaagtattcatgatcg

SEQ ID NO: 22698 - DNA, 418 bp, Oryza sativa
agcttctcgggttcttggtctctgcccgaggcattgaggtcaaccccgagaagattcgagctatcgagcggatgcgcccccccagcaaacttagggatgtgcaatgcgtcaccggttgcatggccgccctaagtcgtttcatatcaaggctgggagagaaggcgctacccttgtttaagctcctcaagcgctcggggccgtttacttggacggaggaagctgaacatgccctcactcagttaaaggcatatctcagctctcccccggttctagtcgccccggagccaaatgagtccctgctactttacttagcggcgaccccccaagtagttagtgcagcgttggttgtggagcgcgatgaatacaatcctcatttcgtgcacccccattctgtgctaacttggcccgggagcgagcg

SEQ ID NO: 22699 - DNA, 411 bp, Oryza sativa
  unsure (1)..(411): unsure at all n locations
agcttttctactttatcaaaatcttcaatagtttcaccaatatcgntttttgtagaccgatatttttgcaccctcttttgcaaccactctaaattagcttatttactcattgcacaaagtgatatggcctagccgtgtgtaacaacccaaaaattagccgtctgctaattttgcatcatgctgattcttatgttcttaataaccttctaaacctaggaaaatataattagcgggacctcctaaaaatgacttgtacgaaagcctctatggtatttaatctcttttgtgtttttcatttaaaaatatgttttggttaaattgaggtatttcttgatttcgttcaaaaccttcttttgactaaaattccttttagtcaattntgcttgaaaacccctttttattaattttatg

SEQ ID NO: 22700 - DNA, 419 bp, Oryza sativa
  unsure (1)..(419): unsure at all n locations
agcttatggacttgtcgatattgtaggggatgaaatgcttgacgagcactgcgatactgatccagtgtggtttccagaaatgtttatggattggtagaggccatatttcttgtaaatttatttcaaccctaaattcgggttttatgcaatttaatggaaatacttcataatgatcaatcattcaggttaagatcgatctaaaccaatccattttttctatatacatacgacatgccaacggttaaacaacttattanaaacgcaagacatccaatacgaaatgctttaaaatcggccgcgcttaatggatgatctcagcgtcgaggaacatgtgctaaggtgtatgtgcgactcgttcggatcatgggttcaaacaagtaagacaatttttgaagtatccatgatcggtaccaatgaat

SEQ ID NO: 22701 - DNA, 396 bp, Oryza sativa
agcttggtaagatgctccatttggctgagttgttgagaggcaccactacaccgcgtagcagattattatggataaccatcactgtttgttgttgtttttgtgtttgcaatgataggtatgggtggcgctcaaaatgagcgataccaacaaggtaacactaatcgcgtgcctgatgatctttatgctaagtttatgtttaaaataccatcttttttgggttattatgatgctgagaaataccttgattgggagatgacaataaagcagaagtttagtgcccaccttgtgcctgagcatcatagagttcaacgagctactagtgagtttaaagaatttgctatcatttggtggactgggttagctgcagagggagttttacctactacttgggaagaa

SEQ ID NO: 22702 - DNA, 413 bp, Oryza sativa
  unsure (1)..(413): unsure at all n locations
agcttgaccccaagatggatggcgcaaggcttatgtataatgtagctaagaatgttttcttagtcttttcccggtcttggtgtttggtgtagaccggatttgctagataggcgccgtactatcaagaggggtctatgaagcgagcttgtggatgatcttgtgccatattagttcatatgcatgtaagtgtatttggtgggcttgtctagtcaagtgtggtgagttttctcaagtcctaaacaaagagagatgtgggcaaatcctataggtttgggtagcctcatgtggttatgtccggtggagtatcctttggagtgtaagccctttctccctgagaaaagttgtgtttcttggatggatngttcatgngttggatagccctttgaataagaattccataaagttcaaaaaca

SEQ ID NO: 22703 - DNA, 406 bp, Oryza sativa
agcttcggatgtgcattgactacaccgaccttatcaaggcatgtcctaaggacccttaccccctgccacgcatagatcagattgtcgactccaccgcggggtgcgaccttttgtgttttctagatgcatactctggttatcatcagattcgcatggctagggaggatgaggaaaaaactgcattcattacccccataggaacttattgttatacgacaatgcctttcgggttaaaggatgtgcagtgcgtcaccggctgcatggccgccttaagtcggttcatatcgaggctgggagagaaggcgctacccctatttaagctcctcaaacgctccgggccgtttacctggacggaggaggctgagagggccttcgctcagttgaaggcgtacctcagttctccccc

SEQ ID NO: 22704 - DNA, 407 bp, Oryza sativa
  unsure (1)..(407): unsure at all n locations
agcttagaattntaagctcccaaacaggcgtattacataaaagattacctggcttattatgtccagtagctgcactagtagatagatcccctggtcgaaagcaaattaacaagccagatcggctgcatggaaatggacagccagcagatggaccgaactgcaggctagctagctgaaagaaaataatctgaatcgatcgatcggtggctggctggtcggttaattgtgcaacatgcaatgtgcagagcccacatgcagatgcagatgcagtggatgatcgatgcagtagcagctagctagcaggaagcagaaaccggtggtggtccattgtattgcagcagcatattgcctcaaattgagtattgaatggaattgtcgagctagctagctactactactgggtgtac

SEQ ID NO: 22705 - DNA, 404 bp, Oryza sativa
agcttacgttagtgctctagtactaagaggaatagaatatgatatttctcggagtcctcgagtcttcggaagatctcggtatggctctagtagcttttctttcttcttttgtaagacttctggaattaataaaatattcttctttatataccttcgacactttattttgcccgagtactagttttactttagatttgtgccgatatagttgtgtgactggcctaccagagaggtgcagaggagtgggtttaatgttcatgcaaatgattactctatattattctagagggtatagagcagtatttgataatgtaagcatggtgcttagattattagatattattaattgggcatatatgctgcgggacagtagaggtgggccgctgatcgtgatagctcaatac

SEQ ID NO: 22706 - DNA, 407 bp, Oryza sativa
  unsure (1)..(407): unsure at all n locations
agctnggcaggattcagatacggcaaacaggagttgctggactataccaaccctgtcaattctctgttgctttccctgtttccatcttctgcatgggccaagaagacctcgagagtgaccagtagagtagtacagtgtatatgtgtgtgtgtgtgtgagtgacccaataattggaggaggctatctcaatcttgcgtgctctcccgaggcgagggaatcagagccattttgtctctggaagacaaggaaaatggccatcacgatcaatcaccagagtttgtgaacgaatggctgcttgcttctcttgctcaagaatactccttttgttaaagggtagtggcatcgtattcctatcatgctatcatatgtactcctttttatcaaaaatataaataacctagaagtga

SEQ ID NO: 22707 - DNA, 417 bp, Oryza sativa
agcttatgtggagaagagaggtatacagaagagaaggatgttggctctcatgtaagagctagcttaacacaagctccaagacaaatacattaaatgtataagtgagagatagagataggagaagaaaattatagctaatcttatagctaatttattatatgtgttaactttaggataggctaatagtaagaagtgggctatattattaatgtaggagtagtagtacgtcaaaaatccaaagatcaatgaggcagcaatcgagggggagggagagagagagagcaatgcacagatgttgagacccctcgtgtgagaaattaaccggcggcttaattagctacgactcgtatagctgttggactgcacggtctttgagcgtgtgtggacaagcgcgcgctcggcgggcgagacaacatg

SEQ ID NO: 22708 - DNA, 399 bp, Oryza sativa
  unsure (1)..(399): unsure at all n locations
agctttccatagagtccaagaacgtcaaatttcttgacccgagtcaagagatatcgccgttttactaacggttggttgtgctgaaaagtgacctgcggtctgacagtgggccttatgtcggtctgactggggctgttagccggtctgaccgacctggtaaggccggtctgaccggctccactggtctgttgcactggtctgtnttttggtggcgatacagagccgctatagccgcaaccggtcagaccgagccgatgacggtctgaccgagccgtggacggtctaaccggccgctacactgtggtcagaccggccaggttgagtgggctcaatgattgccctgtaatggctagttttctagccgctacatagtagtccggtctgaccggccactctatg

SEQ ID NO: 22709 - DNA, 397 bp, Oryza sativa
  unsure (1)..(397): unsure at all n locations
agctatatgtgattgatgagggatctagctttgtctaaagtatatccaagggttttctgggcggngagatcatcgctataagtgaacaggtaacctatctcgcaaccggatgctttcccgatcccaccgttgtagggtttctccacccctttgatccacttttgcgcattctccagatcctccttgctgcgcttgccatttccggcggcggcgaggcggccgaggctctgcagcgcctccctggtgatgttctcgccggcggctacgctgaagtcatcgacgcaggcgttcaggttcgggtcccccttgccggcccctccctggaccttgcgcaattggtcgacgtaaacccagaggttggtgctcaggatggtggcggccacctcggcgaccttca

SEQ ID NO: 22710 - DNA, 412 bp, Oryza sativa
agcttttatgcacttgaatgccagtgggactccagcatgcttgcctgagatgcgcacaataggttataaaagacaacccagctgtataaaaataatagaacagaagtgtccagttttgtgctcaaattacatacataaccccaaagtctcatcccatcttgcacgataggtgccatttatgtggatcattaatttgacggtacccgatgcctgtaaagtgagatcaacaaaaaattgattatatggttcaatggtagtcaatgttcacagctaatgaggttaaaagacttagaagattagtcaaacctcatgaaatgacacaggcccagcccacccacatagtgaagctccccatatctgccaagatgaaatacatattaggtgctatgagtaaattatagtcatgtctcat

SEQ ID NO: 22711 - DNA, 395 bp, Oryza sativa
  unsure (1)..(395): unsure at all n locations
agcttgagtgatgccagcctcatctgcttgggatttcatgccttgtgccttaataaagaaagaaacgaagcgaaatgagaacatggctagtaccttggaagcaatccctgaatcaagcatccagtcagtgggtatcctcaattctttgtatgacggcatcgccaagctcctcagattcaccaatctgctcatgctcttctccagcctgacatccatttcacaagcatgtcaatttcacaagcaagcagatgagaagtgacatatctcatcataatgacatcttgcagagcttttttgatgtagtgtatacttatgttgcaaggctgatgtcttggtgagaatagcctcacaggaagtaagggtggngtcgtcattgggagggtacttagagatct

SEQ ID NO: 22712 - DNA, 410 bp, Oryza sativa
agcttaaacttatcaccttttgggtaccattttccaattgttgaggaatgctctaaatatcttaaaattcttttcacggccactaagtgacactccttaggagcggtttgaaaccttgcacacatgcaaacactaaacatgatatccggcctagatgcgcgaaggtaaagcaagctaccaatcatagaacgataaagctttaaatctaccggtttacctccctcattaaggtcgagatgcccgttggttgccataggtgtcttgatgggcttcgcatcctccaagccagacctcttgagtagatccttgatgtacttggtttggctcacgaacgtcccatccttgagttgcttgatttgaagtccaaggaagaagctcaactctccaatcgtggacatctcaaaattcct

SEQ ID NO: 22713 - DNA, 415 bp, Oryza sativa
  unsure (1)..(415): unsure at all n locations
agcttggctcagctcgtcgtttgtattttattatgagccgagctggcttcaaagctcgttggagataacgagctagctcgcgagctgctcacgagccttaacgaggcagagcacatgagttgctcacgaaggatacgatgaattataataggaagcagctgtgtcatcagcaagtgaccgtcatgagactttatgtttgtgaacttcttatccttcgngcttattattctctttatatccgaggagtatccgaacggtaccttgatgctctccaggcattcaaacatactctcctttttttccttgctcggggtgtagctcgctagactcaagtaatggcttcctttctcaatcggctccggatgaaggcccaaataaacaattagaccaacaatgtctgctaacaaaatgtcac

SEQ ID NO: 22714 - DNA, 398 bp, Oryza sativa
agcttaagatcctgtaataagaactccaacattgtggtatcagagctgatctttagtccactcaatccctcataatcacatcatccctgtgattagaagccatccttaaaagggttcaagattgattcggcatgaacaattttgaattagattagattaatttttttaagtcttggttgcatattaagccatgttatactgttggtcttggccaacagtagaagaagcaaagttattaataatttaattttgttgcttagcagtagaatttaagagaagaatgaggattgggataaacgagattgaaattcccaaattctcacacaaagaattcccagaccgaagctatggtttcggccagatattagaggggaggatctgtcaagtcagatcgaaaa

SEQ ID NO: 22715 - DNA, 404 bp, Oryza sativa
  unsure (1)..(404): unsure at all n locations
agcttaatggttgagtggaagctatctgatcttacaaaataagagaacgccccttgattntagccgacctctttgcaagaaaaacctccacaatattctttttttcctttgtttctttagggcctccaatcgatgagcgttcattactagctttaagtgtcttttctggctctagtatccacagaaagccctgtaaacatacagcatctattttaagcacgatcatccttagtaactaaaaaacatggaggctctaaagaggaatctaaatgaaatgttattgcaaatatagtatgccaaagcaatttggatgagctctggattgcaatggtatttaaagcattttatccaaaatgcaagtatatttttcttgaaccatattgttcaacctttataagcccaat

SEQ ID NO: 22716 - DNA, 408 bp, Oryza sativa
  unsure (1)..(408): unsure at all n locations
agctttgtcttctagagattctgaaggttcacaatgaggtatgctgtactttatttggcaatgagttatggtttatgataatgtctgaaattggttttttgttgcttattatacatgacaagttcttgtgaaattttcctttctgtcaactcgttcatggcaaggaatattgttgagataggccatgcaagtttttgaaaagtgggtcaaatggaatatataatttaaatgatgaatcctgatccaatggagaaacagtaattgtgggcttgcatgcagtaaaattcttgtttcatgtttgaatttgcataaggaaatatgagatatccggctcctgatgggaaccagctccacgcgacttttggatctgtttacaattnttttgtccctcctctaaacatgccatat

SEQ ID NO: 22717 - DNA, 413 bp, Oryza sativa
agcttgcccgcaggtacaccgaacacgcacttatcgttgttcagctttatgcgggcggagcggagactctcaaaagtttccgctagatccgagagtaaggtctcttggttgcgcgtctttacaaccaagtcatcgacataagcctcaacattacgtcctatttggctacccaaagaaattcgagtagtacgttgaaaagtaggacctgcattctttaacccgaagggcattgtcgtataacaataagttcctatgggggtaataaatgcagttttttcctcatcctccctagccatgcgaatctgatggtaaccagagtatgcatctagaaaacacaaaaggtcgcaccccgctgtggagtcgacaatctaatctatgcgaagcagggggtaagggtccttatgacatgcctt

SEQ ID NO: 22718 - DNA, 375 bp, Oryza sativa
gatccttaatcaccgcggctgcagcttggacgcagactcaactacaacagctactggggggttagagttatttaatgcggcaaaaatgataagcaccgtttgaatcgagagatgatcttatgggcagcacaatttcacaatagcaacatcacaagatcttttattcatggaaagaacatcttttgaatgtcaggaatggtgccaatttccagcttaaaaaaacaacgatacgcacataccatcatagactgaaacaacggctgtgatgctattgttcaagaagaacaggccacgacaggacagcgaccacaatttgatgaccagagatctaacgacttgccgatacattagagatggaaagctcaggcctagaca

SEQ ID NO: 22719 - DNA, 379 bp, Oryza sativa
agcttcggcggcttgacagaggtgaggttctacggcggtcatgaaggggcagcatgatcgctttcgcgcgatgtggcgaccattttcagagagataagctatggcggcttatcggaggcggggctttgcaacgatgatgggtgatggacacattcacgccaaggaggcatagattgttcgccagatatgaaattgacgcttggtgacatgagacggttggatagactagcttagtccccttcctccgctgatggtagagcgaaggagtttttacggttgctgcaacttcaacgagatggcgtggtggcgaaaaggcgggttaactttgcatcccccaatgtttgaaatgttgaggaaaaacttgaagcaatcttctagt

SEQ ID NO: 22720 - DNA, 329 bp, Oryza sativa
  unsure (1)..(329): unsure at all n locations
tagcttgacgtgtacgcatgagagaaggaatttttgattccctacgggtgaagaatgccgcatatgatacctgcagccgcttttcttgtgcatgccccatctcaactgagtgaggcctccgtgtttatgagtaccactttgtatcgctgacttatggacatcttactttggtcattaaagcgcanagtctcgagggatgtctggaagaccccattagtgaaagcgcttggcacacccgttatcgcatggggactatctctggcaccctacgttaacggttcaaataatggcgctccctggccgtgcttactggacgggtcacgcgatct

SEQ ID NO: 22721 - DNA, 408 bp, Oryza sativa
agcttgagttcatgttaattggtcttttcttgtgcttaattatgaagaaatcttaaaaaggttgattttgatgaccacataaacatattggaattttctaccaaatcaagcccctcagtacaagaactgtactgaatggcattaggcttaaacaagcaaatataatatttctcaatcctttcaagaagaacagtaaaacaaaatcttaggattatctttttgatggaagtattataaaattctggggatgctcataggataggatgtacgcatatgatcatagtggcgagtgtgtgtatacacgcgtgtatacgagagcatcatctcatttgttctgcgtttcagagaaagaattattttgggccgcgttaattaattgtctatgctcatgcagaacattcgatcagt

SEQ ID NO: 22722 - DNA, 397 bp, Oryza sativa
agcttaataagtggatgccgctgatatatctgtgattaaccctaattaccaagttaattatcgctgaaaatgttacattttgtacgtaaccgtggacattaacactatattattgaattctaacggatgatggccaccatatgtactgacaacatcgctactgttcggaagatatatatattcccagactttatatgtccgtgcagagatttttcgattcaaatccgtttaaagttttatctgagaaaaaataagtgtcacgtactgtgctctgaccgcctagtttaatacagtactaccatgtactgtagtgacatacgaaatacattcactgcggctacagaaaataatttaatttgaagacgactaaatacattcgcaaagatggttcgaccga

SEQ ID NO: 22723 - DNA, 414 bp, Oryza sativa
agcttgaaaagattgagtgcattggcatggtaggtgcctcaaaattgcaggtattagaaccaaccttgaaatccaatttagattgtttcaaatggaaaatacaattaaatgaagttcaactaaaatctttctttcacattgatttcatgttgcatctgagcattttttttggcagcctttcttggtcacaccaataaaacgtccttatggacagcaaaaaaaaatgaaaatggtgaagcccgccgaaagcgctctgccttccccccgaaagaaccttcagctaaacatctaaacagtgtgacgagattctgattgaaaggtcgcggtaagttttgccaaacacttcggagatccttgacaatatagagcggagttgccggaccgctctggaaaaatacaactacaggatggagc

SEQ ID NO: 22724 - DNA, 407 bp, Oryza sativa
agcttgtgacgaataatccacttcccggtgtccaggttaacaccgcgggggcgaggaacgaggctccaagtgtcattggcgagcagtgcatcaaactcagcttgcatagcagcacgccaattgggatctgacaaggcttcacggacagagcgaggcacgggggacaggggcgccgcgtggagattgagacgatccacgggctgcgccatgccagccttgccacgtgtgcgcatatagtgcgcgttgtcgacgggggcgatggagaccggccgggtggccagtgtacgcccggtggccgcggtactactggcagctacctccgctcggggcggaggggcagcagtaccggccagaggagagagcgacggggtcgtgccgctggtcgcatcacgaagcgcgctggtcac

SEQ ID NO: 22725 - DNA, 393 bp, Oryza sativa
agcttatcgtgaaatatagcaatcttttcacctactatctcatctcgatggatacatatgttactattatttttttcacccgcttactaatcttaaccaatcatagtagtctctgtttgatttcacatcttttctcaacaaaaacttcataaaacgcctatatttgagaacggactgcaaaattacaaaccgacctagctaactaatcgtttgatctgtttttcttttaagaatgtgctcccatgttgttctgttgccgagaaagtttcttgtgaggtctccatttctgtacttgtttccattgcagctgatccccatcattatctgcggtactcgtactacattggcaaatgatcgtgagtggatgaccatgtctatagccactagccacag

SEQ ID NO: 22726 - DNA, 405 bp, Oryza sativa
  unsure (1)..(405): unsure at all n locations
agctntaatttttgaagaaattgagtatatttgggcatactatcatactggttgtattcatcaacatcttgaatcccatccactcataatatcttttgctttccggataaaactatttctttcttcaaatttgcagggtctgtcacatagaacacttgtgccacgcgatcggcgagtacccaggagtcatccttgtgacgcacattcccaaggtcaacaacagtaagaccaaacttatcaatgatgacaccgttaagatgttttacccactggcacttaaaaatggggaattgaattgtgagtccatagtcgatttcccatatttcttcaataaacctaaagtatgtctgtttttcccctagtgaatctattgcttcaactcggactccgctgttctgtgtaact

SEQ ID NO: 22727 - DNA, 403 bp, Oryza sativa
agcttggaattaaggaaagcatctttgttgggactgcactgagtgatatgtatgctaagtcaggggatttaaatagctctaagagggtattttatgaaatgcccaaaagaaatgatgttgcttggactgccatgattcaaggacttgctgaaaatggttttgcagaagagtctattctgttatttgaggatatgatctcagcaggaataacaccaaatgagcagacatttttagccattttatttgcttgctcccacagtggcttggtggagcatgccatgcattatttccaaatgatgcacgcatgtggtatatcacctaaagcaaaacattatacatgtatggttgatgtccttgctcgagctggtcatttggcaaaagcagaagatcttctccttgaaat

SEQ ID NO: 22728 - DNA, 375 bp, Oryza sativa
gagcctcagctttgccctgcttgtatgcgaatctatccattctttgacaccagggagcttttacaaggtgtgaagccctaacatatggtgtacttactaagacgtgagatatgtcgcatgaatcaatggtaatatcaaaatttcgccaggtgaaagatatcgatgataccacttggttctaagtcctagaaaatcttggtggagttaattatagtgtgaatctctaaagctaccataatttgatggagtaactatagcacaaacatgttaggtccattacttaccaagattccatatgtgttgaatttgcaatttattccaacatatggacccctgttggcacataaaccaatagtacgtctcaagtgtgaacaa

SEQ ID NO: 22729 - DNA, 332 bp, Oryza sativa
agcttgtcagaatggaccgcgtacaaggacgactccttgttgcaagttatctatgaagtacgaaatagtttcctaagtttcttttatcttcaggaaaagggactctatggtttccactacgcgacacttatcgatgtcctctttatacttgtacgaaacgattactttcttattctaccacgaccagcatttcccaattgatatagatatgtacaccctgcgtcattgtacactatcgccacgatcaataccattcagcgcctcggcgccttatacattctctactttattttatcatcctgccggagctgacgccatgatcacggctgtat

SEQ ID NO: 22730 - DNA, 421 bp, Oryza sativa
agcttggaagagagacaagggtgttttgcttatcctttgtttgaaatcatttttgaaatcactaagtgatttatttctttttaagtttgggtcgaaaaggagacttgcgtctcgattcgacttaagagatgcttttcaacaactcaaatggtaatgtaccgacctcccgggtcagatcattacttatcggctcccagagccatttcacttgattaagcggctcccagatcctttttcatctgattaggcggctgccagagcctttttcatttttgcagactcccagagtccagctgcccagcagcaaagcaatccgcttccactcggtcagcctagtctatgatgcccgcagacatcccgaatcacacagattcgtttctgaccactcaggtcatccatctgccacataggctaattctgg

SEQ ID NO: 22731 - DNA, 394 bp, Oryza sativa
  unsure (1)..(394): unsure at all n locations
agcttctaagtgatgcatgattgtgctgtttgatggtcatatacacatgcatgcatacatggtaacatgatcaaaataactatatatggtgtgcttgctagtacttggggataaatcccatatactttctagagagaaaaaatctaacaattatcgattaaaatagcattcacccgttgcaatgcatgggtgttnttctagtaatatcttatttggaagaattattggtttatttgatgtagtatttaatagagaaaatttaacaaaataacaaaaggttttatggttaaattaataaaagttgtagaaaaccttggttattatggcattggcgtttgcttcttccattatttaattgatgatgatcgtgagttttaaacgttgcgtctaacca

SEQ ID NO: 22732 - DNA, 413 bp, Oryza sativa
agctttgctaagatcactgattcaatatcaacacacattcatatagaacaacaatgacattgtattacatacctatgtccttccatcgtagacaggaatgtaagctttgacaaccgatcttaacaggattgtcagccagctgcttgttccatgagaaaaaaaggcaagcttgatcaagcaaaacaacctgataatggaagtttgatcgtatccagtaagccattcatgagaaagaaggctattgttgagacttaccacaagattgcctcctcagctcctgacgccaaaacgtccacctgcctcttctcgcgcccttttctgcattctcatgcgtatttccgtttgctcgcactgcaacagggctaaccaggcagctgggcctcacgcttatgtcggtcacagtgcggtgagct

SEQ ID NO: 22733 - DNA, 350 bp, Oryza sativa
agcttgaccgcagcccatcaacgagtatctctatcttgatgcacagaaacaaccgcagagcgtgatgcccaccacacgaacagaagcggaccccagaaggggaaggccatagcgaaccaaaagtatgacagcttttgagccggaatatacgatcaacaggcattgatgcgttggaacttctccgaagcgatgccgtcaaggacgacacgacgcgtagaaccgtcagcgctcgtccgagagccgggacaaggctatcaccatgagagttgcgggggatatgaaagaacaccatgacaacgcctgtatgaagggaaacgacgccgacgagcgccgccgagattgaaccggac

SEQ ID NO: 22734 - DNA, 408 bp, Oryza sativa
  unsure (1)..(408): unsure at all n locations
agcttgacagacatgcaaggactcatacatgatttctgttgacaacagtccatgcctgaattatttgactaacatattttttttcttatgattgcagtaggttagcctacaataaactctctggttcaatacctggttcgctgtttcaagttgcacgttacaagtactgttggatcactgtgacttgtatactcatgttttttcaagtttgagctttgagttctgacaaatgttaattttctttacagcttttctggtaataacttgacttgtggagcaaactttctgcatccatgctcatcaagtatttcttatcaaggtaggaagcaattntttctctgttcaacattgcacatctgtcatacagcattcattggatgcctgtcagaaatttcgctggaatatgct

SEQ ID NO: 22735 - DNA, 397 bp, Oryza sativa
  unsure (1)..(397): unsure at all n locations
agctngtgaacaaggattgacggcatatgtattcggtggatactctatcaaggccccatgaatgttatttttggaaaacaagtatacctgttaatactgtgcaacagttatgttgcacgttttcttgtgcattcacaccttctatttttcaatttactgcagggagaactcccagaaacagagttcgatatatagaaacaaacaaatggaaaatcttatactgttggtttgaggcaggatgttgttagagttacagataaattcatggagattcaccttttctgggctggaaaaggaacttggtgcattactatacagggatcctacgggccattaatctcatcaataagtggatctccttatggtactggtcattaactaactggatcaacagcca

SEQ ID NO: 22736 - DNA, 378 bp, Oryza sativa
  unsure (1)..(378): unsure at all n locations
agctagaggttgaagaaagtccttctctaattttctttggaccagccctttgataatctgattgcttcttggcgatggattttgaggtaaacatggatcacaggatcattagtcagacaaaaaatcatagcagttttttttatttatgacaagaggattcgtgcacgcttatgttctttttgtccaggcatcccccccccataaaaaagaaaaagaaatgtataatgttgctatatgtgaaaaccactaaagggataggatgatagggacatggacaaaaggaatataaaatttgagatattgtcgacgcttgtcagctatagatagatgatttattgattggtgagtttggntctagtctattctcatatatatctt

SEQ ID NO: 22737 - DNA, 369 bp, Oryza sativa
agctacctatacttttttgagaagtatggttttttattctaagccacgatttcatgaagacctccatttctttgcattattatatagtaagatgtgaaactgctgccttcttttccattccaggtggtagaggtaaacgttaaaggtgaaagtgcatgcccaataaatgtgcataataatgcatattacgctgaagaaaaaaaatatgaaatctgaactacaggcaatgcgtgactgtgacccttcatctgcacaccattggattgtaaggattttggtgagaaacattgtatcgtcgagcaaacctaaatcttctgtgtgactgacactgctggacgcatgtttgttcatgttaagaacaccaagact

SEQ ID NO: 22738 - DNA, 433 bp, Oryza sativa
  unsure (1)..(433): unsure at all n locations
acctgcggcatgcaagcttctcaaagctactccatccagagtggctagccaacctagtcatggngcagaaggccaataggaagtggaggatgtgcgtcgacttcaccgacttcaacaaggcgtgtcccaaggatcacttccctcttcctcgaatagaccaactggtcgactcaacagctggttgtgagttgttaagttttcttgacgcttactccggttaccaccaaatcagcatggcgaaagaggatgaggagaagacagcatttatcacgccgttcggtgtattttgctacgttaagatgccgtttggactgataactgcaggaaacacttttcaacgcacggtccaaggggcacttaacgatcagcttgtgaacaatgttgaggcctacgtcgatgacanttgttgcaagaccaagacaagcgactcatt

SEQ ID NO: 22739 - DNA, 325 bp, Oryza sativa
  unsure (1)..(325): unsure at all n locations
agtgggggagaaccttatattatgataagatgtgcacaatactagaaagtcttataatatgaaacggaggattgtagacccattgaattgataaaatattcttcttcatacatcttcggtaatttattccatttatattatccgaggactgacttttaccttatacttgtataaatataattgtgtagctagcctaccacagaagtgcaatggtgggggtntagtgtccgaatactcgggtgttctatgtcatctcgggggatatatagtagtatttaacaatatagacgtggtgtctagaatatttaatatcactatctgggca

SEQ ID NO: 22740 - DNA, 414 bp, Oryza sativa
agcttcgttgagctcgaacgattaattactggtacatctagccagctgaactttcgtccgagcgatttgtcagttacgtatactacaattcgtttatgacaatgtttaaatcaagttattgagttattgagtttaaaaatttaaaaattatataaataggtttaccttgaaaaatactttactagaagtatacatatatcacttttcaatagatacttttgtagaaacaagaagtcaaagttgtgttttagagaccgtgtcactgtccaaaacgacttcctctacaagtacagagggagtacgtacgtataacacgcgagtgctgtttcaacgtgttatctgtaataatataatcacacaaaacattcttggggtttgtcgtaacgagttctactactacataaagatcttttg

SEQ ID NO: 22741 - DNA, 394 bp, Oryza sativa
agctttgtgagtgacctaagaatgtcggtcattatttttttgctgaagtgatgcggaatgctgcttactgatgatctttcaaaagggctgggtggcacgtcattgatagtcggcttatgccgtgccagtgggctctcgccagggtcactggtagctttccgcttcttctggagaatggccttcgccgcaatcgtggcaagcttttgggtggctgtatgcggtgtgatatccttgactaacttgagctgggacaacttctgagggatcgccacacccgtacgatagtcaactttgacagcaacactgccaagtctcgaggtgagcatctgcggggtgacattcttcaccaacttgacccacggcacctgtcgagaaatcggcacaacaataccat

SEQ ID NO: 22742 - DNA, 305 bp, Oryza sativa
  unsure (1)..(305): unsure at all n locations
cagcatgcaagcttgaaaagacgganaaanaacgaaaaattaccacgttaatgcccangcaaacacctgggtaaattaaacatgatgatcggggacacataactatagaagagtgtgacgaaactttggagcgggataattgcaaacatgcaccaggccactcatgtaaacatactaacgtatctatatggcccaaaggagttttaaggacctcctgggctctgttacagcccccacagcctgtggaccctcttcaagacgcaacaccgagacccctaccataagaggagataaactatcatggg

SEQ ID NO: 22743 - DNA, 399 bp, Oryza sativa
ctacacgcaggtcactacttgtttgtccatgctctcgaatattccttcttacttctgagaaggcctctattggagcaactggccgctttttcttcttctcctatatgacatagatagaatataatttatgtcagattttctttggccagaatctactacatgtttaaacagagatgcacataccaaatttttttggtaacggctcaagttagcactgccttggcggcgagatggcccttacattttctcccttcgtatcctatgaacacgtgagacagcctgccattttggattacaccaccgcaatcgtatcaactcccgccatgcatttgctgaattcaggaaccaccatggctctacctataggagaagcacagacatattcattaatcactaatc

SEQ ID NO: 22744 - DNA, 413 bp, Oryza sativa
agcttatttgttagtatacatctcaacaatcttatttggaagaaggatataaaggaaatatcatagctataaactgtaagttacacaatacactctcaagcaacatgaagatgaagttatactggatgttcacagagaggttgagacatgaatcagttcaattgatcacttctcaaataaatcatgacatatataagaaatcttaaagtccatgaatatagcaagcatatggtgtaagcactgtcaaagtgtagaactactcacttgccctatgattaacaatagataataatctacatatactgtctacagtagtcatctactcacctgcaacgttttatccaggaatgagatctcagatgcataaaactaacgaggtccctctgagggtatattttgatgtagctcaaaat

SEQ ID NO: 22745 - DNA, 412 bp, Oryza sativa
agcttcaaacaagataaactaagtattagtttattagaaaacgacctgaaaaactaagaatggtagttttgaaacaaaacaaaatgaaggaataacttatagctaggagcgaaatttaacttgcatttgccatgcatggtaatgatcgccatggtggaggaggcttcggcgaagcatatctaggttgaaggcgatgtccttggactatcagtcacatatacacttcagctctgagagcaaggataataatacagccgatctgttgactataaagttctttgtagccttctttcaacatataatagttagctctttacaattaatacagggcccacttgtctttctcacataatctcttggttcttgtgtccaagccggctgtaagtttacagcccgcttctcctatctctca

SEQ ID NO: 22746 - DNA, 395 bp, Oryza sativa
  unsure (1)..(395): unsure at all n locations
agcttttatgaaaatcgcagnttccatgtgacaaacgtttctatgtttttcgcttgacgcttctctttccgtccttttgtttaaacattatggtttcagctggatttctttattttagaatgttactctttattcatgctttttacatgctatttggacttaatttattttggtttctcgagtggcggtagttttttcacccttgaatttccacttggtactatctttttggaacttctctttggactttaaaactttattttagttctgaaatctcaatttcctaaattttatatgtacttatgcttactagtttgtgaaaagattgcttgcatttaaaccttgcggtatttttgtgctctgacagtttaatcgtagacttgtaactaagttct

SEQ ID NO: 22747 - DNA, 398 bp, Oryza sativa
agcttaattagctagttaagtgattataatgttacaaactattcgattatatttgtaataaaataaagcccacccctttgaattatacatgcaaactaacagtgatgttagaacacattttctgttgggttttgctgatatacagacaaaaggtgtgaagtctgaaagagatgtacaacacagtttgtgttgggagtcttggaggttgcaccattagggtaacaatattattagtatagtgaggaaactttcaaactggtgaatgtagagaagacaacgtaactagtaaattacatgcacagttgcccaaagtaaactatttaggtctcgtgcaacaaaagtcacagctataaaaatacagtatcagtaaaatgactaacctgtaacagcgaaaaccg

SEQ ID NO: 22748 - DNA, 391 bp, Oryza sativa
agcttctttttcgtaccctattctctacgatcgccgccccccaagccaaatccacgcatcgacgcggcaggagcgggcggctgctgcgagatcggcggcgccgcagatctcgcgcccaccagcggagatgaagatcacggcgctcctcgtgctgaagccgtcgtcctccggcgggggagcatcctcgtccggcggcggcggcgggtcgggcggccccgaggcggtggtgctggcgaacgcgacggacgtgagccacttcgggttcttccagcggggcgccgcgcgggagttcatcgtcttcgtcgcgcgcaccgtcgcccagcgcacccagccaggccagcgccagtccgtccagcacgaaggtaaacaacccatcgttctcctcagatct

SEQ ID NO: 22749 - DNA, 398 bp, Oryza sativa
  unsure (1)..(398): unsure at all n locations
agcttgatggagcaaattattttngattctttatctgtcacttgggagactatttcggttacgcttatgcctaaaaccggaattgttagtaatcctctccctattagtactattgatgatgataaaatgaaagggaaaaatgttattattggggatcctcggcccgagacaattcggatcaataatgcataggccgaagatcgtaaggttacaaaggatgagtcatctagttccatagagactaaaaagctgaagctcacttttgagatgcttatggctaagtataagaaaggattagccagtcaacgatttgataatcaaactagtgattcaaacagaccaagatcatctcgtatgaagagatttggtcaaacatcaatacaattagagccatcaac

SEQ ID NO: 22750 - DNA, 423 bp, Oryza sativa
acctgcagcatgcaagcatacagggagatgcgactagacgattttattgtactggtttaaccttacgccattcaagcgatgatatataacatgtgaagaccattggctctcatgtgatctttatatacacgtgttacaaaacaatcaccactcagattgtgatacagatacttgtacaaatgcgatgctcagtaggcatgctcttccattacctactgacagccagcgattgccagtcatggaatgacagcttgtcgactgccgatggctggaagacgataggaacatcatcccaccctttgaagcatcctatagaccatctcattctaacaatgccgatctcaaggccaaagatgtgcttcagcatcataccaccggctcggtgcttcaccatcatttcggcatccaagcctgtgatcatac

SEQ ID NO: 22751 - DNA, 419 bp, Oryza sativa
  unsure (1)..(419): unsure at all n locations
agctngcaagaaacacaatccttttaaatattcaaattttttatctgtggaatcagattaaccattagatgttttcacagaagtacaagtaaattgttatcaaagaatttttcgaagatgggtttacctacgatgctcagtgctcacacggtcaattcagattatacatgccagtgtatagatgccacaagaaacaagtgctgaccggtggaaagaagcattttggtccttggactctatttaaaatccaaatttcatcatcaactctaatatgaactgcttttcccctagaacttagtagtaattccaaaaaagcagagtacaagtatgcttgtaagagatcttttacagtctaaaaatataatataagccatgtgtaccaactagtcggtcgattcggcagtagagattaatatttt

SEQ ID NO: 22752 - DNA, 412 bp, Oryza sativa
agcttggctatacctacaaagatcatatcaagattatgtaaagtttttacagtaatatttatccaagtttacttgaaaatgctactattattaactgaacaggtaattagaatttcacctattgacgcgtcaaagccgttgctcctgcctctcctgccacacacgcagaagcaggcagtgcaggcccgagactgactgcctgcctgcctgtgcctcgctctctcttctttcgcagtgcataaaaagcaatcatcaacagggtagatgctggccatcaggccatacttgtactgctgcattctctgctcagagcctcagtaacaaacagattatagatcactatactaaacagagagtactgtagcattaggcattggtccttgattactgcatgctgctgctactgcttctc

SEQ ID NO: 22753 - DNA, 420 bp, Oryza sativa
  unsure (1)..(420): unsure at all n locations
agcttgacactatggtcgcgggttatntttattatttattggtcactgtcaattcatgaaataagtttttcaaaaggattaaattgtcaaaattttagaagcatataattctgagcccattctcactcacgcaccaactcccatacctcactaaaatcctattgcactgtcaattctttttaatattagtttgcatttaaatttttaaatcctaatggttagaagtgtgcgcctatgactctactacgagcacaccaacggtgcttatccccaaagcacaacttagatcatttttaaaaagaattatatctataattaaacaacacaagttattaaaaagagatgccataatgtcaattatagtaatatagctttcatgtgtccaactttgctgatggcaatngataaaaactttagatc

SEQ ID NO: 22754 - DNA, 398 bp, Oryza sativa
agctttccaattccaagaaccgtttctatatgttgcaagtaatttcatgctaaaaaatgaagctacaattaattggactctatatttatccattactaataacaagtttattgctcccccatgctaaactacttaaatacatcaacatatcatggaggtcatgggcggaccacctaggacctcctgcgtattcctaggaacacccaatttttttttggatattttatataggtatatactcatgtctataccatggtcatacactatgctggtttaggtcatcagtgatgggctcagaccatcacctctaacgggtagggcgctggtcagtgatgaccaaactcatctctaatgggtgaaggttggacacctctaacgggctgcaaatgggtacccat

SEQ ID NO: 22755 - DNA, 411 bp, Oryza sativa
caagcttctttaatgaaactttctttattttaacccatcaagaatccgactgctggcgacttgatgactcccatcggccaattccaaaactctaaagccgatattgattttaggccgatgatgacttcggggtttacccaatttcattgttaacaatgggtgggtgtggtggcgatttttttgttcgcccaaaatattttctcaggcaggtggctggcgcctgcaaagatggagatggtgtggctatacatcccgaagaagaagcagggccagtccaaaagtcttgaggcccttaagcttgtgcaaaaaaacataccggccctcataaacaatatatattttttcttccattgcaagagttaacataataattcattacatcgtggaacagaaatacccatacgtcataac

SEQ ID NO: 22756 - DNA, 386 bp, Oryza sativa
agcttctcaaacgcttcggaccgtttacctttacggatgaagctgaaaaagccctcacccagttgaaggcgtatctaagctctcccccagttctggtcgccccggagccagaccaacccttgctactttacttaacggcgacacccgcaagtagatagtgtggcattggttggtggagcgcgatgaagacaaattctcatttcgcgcttccccaccctgtgccgacttggcccgggagagaacatggaggagaggcccccgaaccgaacggtggtccaaggcccccgacgattggagttggccctctgacctcctgtcagaacgtgctatgagcctccgacccccaagaatgccctgatgccactgtgggaaaggcgcacctattg

SEQ ID NO: 22757 - DNA, 395 bp, Oryza sativa
  unsure (1)..(395): unsure at all n locations
agctttanacttaacattaaaaaacacaatattctcatacagataaaaagccatgatagatagtctccccctttggcatcaagacaccaaaaagagaggacgatgagatgacgactcaagcgaagggtgcctgaggaggatcctctggaggtggtggaggaggatagctatagccatggccatatccaaagaagtcgaagtcagaaggcaacccaccaaaaggatcctcaatcgcttcatcctctggctcattgggctcggcctcgaaatccggaggagaaagagggatatcaatgtggtggtcctcataataccttgccttgaggaacttgacatcacgagccgttttcttcaccgaatttcgcaatcggcggttctttttggcctccgcggag

SEQ ID NO: 22758 - DNA, 364 bp, Oryza sativa
agcttgtcgtttgcttgcacccactccaattaagcaagcagagtctctgtagtatatttgcggctgccggtgagtgccgcggcacagcaacggtggaaaagcacatggcaacatggcgatcgatcgattgattcgacgaccggccagccagccttgccttggctttggccttagccttgcactgcactgtctctcctcccaccggccggacatagcaatggccggctttttcttttgccattttacatgttgactttgcagctgctgattggtctgtgtactcttcggtgatgaatatacaatgcatcgtatgcacaaatcatgctagcttgcccctgcatgtgcagctcagagcacaaaattc

SEQ ID NO: 22759 - DNA, 394 bp, Oryza sativa
  unsure (1)..(394): unsure at all n locations
agcttttgggttgaacacaggtattaaaatataactaaaattaattggaggaatattgtgattggttgataagagaaagtagatggagaaattaagaggtcgacgcatgcgattgcttgagaagagaataagttacatttgggacaaattttcaattctagaagttattttatttcgggatgaaggaggtaagagatttccagtattcagaaacttcgatacgaataagttcgattcttcatggcccagcaacaatggacaggatacacaactagaacctaattcatgtaaaagaacagactcgtcatagtaacacaaacactagatcaaaacaatgacaaacgtgcaactcanactataatcaagaccggaacttgacacaacaattcaactt

SEQ ID NO: 22760 - DNA, 405 bp, Oryza sativa
agctctgcaaaagcacggtcccgggagaggccctgtggccaattgtgccacactctcaatgcattgtcgtttccttagtaacccaaagtgcgagagtggattctaaactctaagaggacatctccttattattcacatgtcatctaaatggttatatatattcttaaaaaagtatatcataagatagattaattgtgaatatacgttaattagccgtagttttttctttttgcaacttgtagaagtttaattttaacttgcatgtttgtgaagttatctatcacatattaatttatccagttgaattttataaatttttcataaccatttggatgaaatgcaagcaacgagagaatgtcccctcgagagtttagaatagtttctcccaaagtgctcttttcacca

SEQ ID NO: 22761 - DNA, 417 bp, Oryza sativa
agcttaattgtttgaaatctaatagataactctctttaatccaaggaggcatagagttctcacatggaccattatcttcttgttctttcattagtacagtagtgtacgtttaagcacatgaagattgctaggccaacctaacgtctgcttatgaatacctaccacatgttaataggaacttgcatcagcatgtttgcatgctctacactttatatgattacgcattgctttcttattatacatgtttggctttaaaccaagtttttatatgccttcaagtaatgtactccattgatttgcagattctgaagcatctgaagattgatctaggagctataacattacccttggattgtttcagtcaatactgattcagtgtttgttgtatgttggtcataatgcaggtaatgatgactg

SEQ ID NO: 22762 - DNA, 411 bp, Oryza sativa
  unsure (1)..(411): unsure at all n locations
gcagcttaaatgtttacatgcaaggaaantattaacattgctaagttgtagtgcgtatgtgctcacacccattctgtgatgcatatattggcatattcatattatcttcagtgagaaattatgagcatgtttaccattttgtaaagcatatattggctatgcatattatataaccttggatatctaactggcttctataaattctcaaacaaatgatgcacagcttactacaatggtagcagagcaggtatttcttgacatctactatgaactgccaaacttattagttttaatgctattggtaatgctttgctcgagttacggtttctgctactatcatttgcattctcccgtcaatgtttgtctgttggaatatagatattactgttgtgcatattgtatcacttatat

SEQ ID NO: 22763 - DNA, 374 bp, Oryza sativa
agcttcaccctcaatccattgacggaatttcttattatctattgtcaagggtttcatcctattgagttttcccgccttcattttgagttctctgccctggctttctaggtcttcgcgctggctttccaattctctgctctgcctttcgagttcttcaccatgtctttggacaggcaatgtgggggtttggctctcttcttaaggtgcttctcctttacttcaagctcagatctcggtttctcatgctcttctttttctttgagctgcaataaatagaagaccttatcatgagtttttactagtttgaatctgcaatttttctttttgacaaaagaacatggtaatatctttggtaaattatcaggcgctcaaca

SEQ ID NO: 22764 - DNA, 408 bp, Oryza sativa
  unsure (1)..(408): unsure at all n locations
agcttctcaaagctggtttcatcatagaggtactccatccagagtggctagccaacccagtcatggtgcggaaggccaacgggaaatggagaatgtgtgtcgatttcaccgacctcaacaaggagtgtcccaaggatcactttcctcttcctcgaatagaccaactggtggactcaacagccggttgtgagttgttgagctttctcgacgcttactccggctaccaccaaatcatcatggcgaaagaggacgaggaaaagacagcattcatcacgccgttcggggtattctactatgttaagatgccgttcggactaataactgcangaaacactctccagagcacggtccaaggcacgtttagcaaccaactcggaaacaatgtcgaggcctacgttaatgacattg

SEQ ID NO: 22765 - DNA, 376 bp, Oryza sativa
agctttagattacaaaaagcatattctattattgatggttcagatcaaagtacaaatacgaacaactgttccaggacagctaacctgaagaagaagataaagaggacgaatccaccattgttttaactcgaccccatcaatgaggttaagctacttattaaaatatcatattgctgcactagtgtttcaagtgtgtagcttgaaatacggtttatggcacatgccgaaagccagcatatctgacccagcaggtgccaccgatctcttcccaggtccaggtgctatctgttctcaagtgggacaacccattaaatattgaaaaaaaatactccctccgttttttaatagatgaactacgtctctactttatcgcgta

SEQ ID NO: 22766 - DNA, 357 bp, Oryza sativa
aaaaatagtgaaatggcttctctggaactaactgaactaagaaaagttgagttcatattctgtttaccactacgtctattcaatgagttacaagagtgattaaactcacattccatgtcacacatgggtttattgttggcttttttgcaggaagatataacggtcaattgttatatacaattttaacgacgatggacacgctgttgaccatcaaatgccgcagactatgagaccagatctatagtgtaccttatgctgatcacatatatattcatttcagcaatgcactctcgcattactgttataagactctagcatctccctctgatgcttagaagttgaatgagctttttatta

SEQ ID NO: 22767 - DNA, 210 bp, Oryza sativa
  unsure (1)..(210): unsure at all n locations
caagcttacatcatggaggccttagtgtaatttattttgcttggactacattggttgtggggaattgatggaagcattttaactttngcatgatggcttgatctggaaataatcacgactcaatggtaatatgaaatttgaccatttgaggtgtttatttgagacaaggtctccctccgcggtttagatggcggttatagcgatatggct

SEQ ID NO: 22768 - DNA, 351 bp, Oryza sativa
  unsure (1)..(351): unsure at all n locations
agcttgaagcgctggaagcaggtttccattatctncgtcctggccaaggtgactctccaatgtttgctgatatattagttaaggatcttaaaatccccacacatgagactggtctcagtgccaattatagaggtttctacataaatagtagtgctcttagatcttgttcggcccacattaatttgttcacctctttggacattctgtaggacttcatggttgcgtctgctgattggggtaattttgtcaaagctttgggtgatatcaaacttccacgctggtatcttactgctatgcgatcacctgatatgaagaaagttctcttctgtgatgttaattgatcacattact

SEQ ID NO: 22769 - DNA, 406 bp, Oryza sativa
  unsure (1)..(406): unsure at all n locations
naagctncattcgnccatgaacttaattacttatctttcttggngaaccggaccaacacaacaaaccacataaatccggtgaagtagtaataattttgttgcaacaaattagacatcaataaaggatatgcacaccgtctatcgaagtgttatgctcccagtatcagagctagggcttttgatgtcagaactgggctattggctggtacctaagcactgctaataaaaagaatatccttccattgcatatcctgtttgtagaatgctctcatataacatataatctttatacttatagccttgtagtaatacctagcatggatttctttattcttcctgatgtcattctatcaaggagtgtcatacaatgcagcaactaaaccaataaccatggaacttttgatac

SEQ ID NO: 22770 - DNA, 182 bp, Oryza sativa
ttttttctgcctccaagatttgggacgtgggcccagggatcccgcttcgcatacgtcttttggaatttatcgttctctaccattctcccagttagatgctggtgccccatgagtgaccccacgtgcgcatgcaggtccccgccctcgacgagaccgttcgagcggtcggaatcgcatcaact

SEQ ID NO: 22771 - DNA, 143 bp, Oryza sativa
tattacaacatacagcccatattcctgacggaataggcaagtaaagataaaatacaatcgtaatcgactaggacccctggaattgtcttgaacacacggtaggaatataactcgagatccttatagatattcaatctacatat

SEQ ID NO: 22772 - DNA, 252 bp, Oryza sativa
  unsure (1)..(252): unsure at all n locations
ctgctggctgatttaaaaaccatacaaatgcccttcatgtacacatggggatttcttattccactatgagaattgctacagtccaacaaaaagtacctcaaggtcccgatacatcacgctgatccaacgatcggaaacggacaatttggtaccatgaagtaccggaccttgagatacttttattagatggagcaatctccccactattactttacctcatgttgatngaatatagctttagcttttgttgtt

SEQ ID NO: 22773 - DNA, 339 bp, Oryza sativa
ctaaaaaaattgaatggcatgcagtgctgttatattctattggttatcattcccaattttctatatatatgcgacagaagatctacagtacaattgtggtggattacactgtaacttacatgtaattacactataagaataatgttactgttaaaaactctacgtaacatgtcccccaccaaaatagagatcgcgggaacaaatacttgtacatatatgagtgctgtgagtatatttgtcttcctcaccaaacaaatcgtgtaatatatctaacgattcaaattatgtgaaacttacatacaagtacactatagtacatgcaattacagataattcata

SEQ ID NO: 22774 - DNA, 216 bp, Oryza sativa
tcatattataaatctttatatattaatactatctaagataagcgtatgttaaagggctaaaagaaatgaattgactggaagagatgtcaaaattgtcttacacgcttttactgtcaaccttgtaactaatatgacctcgctcacatcattaagcatggaaaactatgccattataatatatgcaggaaattaatataccctacgccaactatataa

SEQ ID NO: 22775 - DNA, 287 bp, Oryza sativa
  unsure (1)..(287): unsure at all n locations
tgctctaatatgtgtgcctcaacgtcgcattttccatcatagattgaaaatgcttaaaccattctggatgtatgttgtcagagatatgggtggaggccaaatcaantatttgggacctttgaagtgatacaattttggtgacgacctttaagaccccttattgtgccattgagtttggtggatcttaagacaaggactcggagaattggaagttacccaaccaatatgggaaagaatcaacaatctgattatttcagcatcaggagctccaatattggcagtatgat

SEQ ID NO: 22776 - DNA, 262 bp, Oryza sativa
ccgtataacatatgcaccaaaaggacatacttgcaagttgtgagagaataccttgcatctgaaccaccaacagctagataactatcgctaagacaattcactgaagataacaaaaaacatttgtgcctactctgataatggaactccagtacaaataacaaaaatggaatgagatgtcctgtcagctacaatcaaaatcctagaaagcaagatatatcctatggtgaatgatcaacataatctcactagttggctatatgta

SEQ ID NO: 22777 - DNA, 184 bp, Oryza sativa
  unsure (1)..(184): unsure at all n locations
tttagaataaatttattgaagaagtaaatcatatttgactttgaatgaccttacatggctataactaaatttgttgctacaaacactgtatgagaaaaagacaccctctcaagctcgatcaccttcttatatttngngataaggggagatatattacctctcacatttatttatacacttctca

SEQ ID NO: 22778 - DNA, 385 bp, Oryza sativa
ggcacctaacccctcactttcaatcaacatacatcacttattgtgtgttttgttcatgggcaagaaacgatacgatatggccatccatgttttaaaggatatggtggtccacctttttgttggttaggtggataatggcattcatttccttgtttggctgggtggatgagaatggattgaatgactccaatcacatactaattaataattagatatgttaattatcattaatatagccatcatctatactacttaatatataaatagagtaactatatcttatcaacacttaatttgaccaagtaattacttaataacaatataattacttaattattgctaatcaagaactaatgatcaagagtagcaaatgtggatatcctca

SEQ ID NO: 22779 - DNA, 336 bp, Oryza sativa
cgctcgacaaagtcctacctctatatctatctctgaggtggtcgggttttgcaaaactccatagatatgcacaagagaaatgctatcctcactccgacccagacagagactttaccaaaagtttattgtgatcccttgttcaaataacaattaaggtgaagcagggtcaggaacaacgaatctctttatgataaacagatccactttgcaagctcgttattacaggtagttcctacacagaatcggactaatgacgtatacaatgcttgaattatcgacgtagatgctacatagtgggttctcatccttcagagactacgagtgtaatatgagcat

SEQ ID NO: 22780 - DNA, 343 bp, Oryza sativa
  unsure (1)..(343): unsure at all n locations
cgcgacagagaataatcgccaaggccatgggcacatttgacaggttgacactgcacggtttacatgataatgaatattgggctttcttcctacagtgcacaaacatcacagaggaccacagcttggctcgaataggcacgaaaatagctctcaagttgtatggcaaccccttggctgccaagaccatggngagaatcctttcggaaaaccacgaggaggagcatnggtgcaagtttctgaatagaaacatatgggaactaaaacaagagcctgacgacgttatgccggnttttgtgttgagttatcagcatctccctctaagcttgcagcgatgtttcaccta

SEQ ID NO: 22781 - DNA, 384 bp, Oryza sativa
  unsure (1)..(384): unsure at all n locations
ctaagcttgaggctgccaacttatcatctcaggagctagcctactctgttgntcttctatcatcatccgcactggtgctggtcaccttttgtagaatatgagttgtcaacccaatttgagttcgatttctgtaagacgggttgatgcacttactgacatgctcacttcttcgatatgatccacaattttgactcccatagcttcttcctgccacacagcaacagaacaagcagtattcatgtcttgaggccgctgtactaatacaactgttcgcacttcatctttcaatccattcatgaacttattgaccaaataatctggtggggcagcactatcataagcattgagctgatgcattatactatcacacctctccacataatc

SEQ ID NO: 22782 - DNA, 210 bp, Oryza sativa
gccttgtgcgatcctcctgaaggttttactccttgtggctgaaagggcaaagacactggctacttaggcaacacggaaccacactggctcatgaaaaccccgcaataaagaacgaagaacaaactcctcgctaatcttacgaagacgtttggacatgcgatgttacaaggggacagttgatgaagggacttctgtataactaaaaaccgg

SEQ ID NO: 22783 - DNA, 461 bp, Oryza sativa
cggccattgacctttagccttagacatgtttggctcgagctttttcatacgtaatataatatatattctaatgattatctctcgagaaggatcacttggtctctagtgtatcacacttattatagagtagaaaatgattagataatatattgcgctaacacatgctaatatattgcgtgaagtgatgttaatctatataattatctatttggtaataaatcaattatgtgaacaaacaatataaactatatataattaagctcggctcggtaaagctcgcgagctcttgctcaggcttgagttcagctcgtttgagcttatgcgagcttgacagaacctatgacatgctagctcgagcttgtcggagccttgatctttttcgatagccctactatagctgtgttgtaccacactgtaactatatatacttattaacacttgtattcactatagttaattgg

SEQ ID NO: 22784 - DNA, 152 bp, Oryza sativa
tcacccggattgacctgcgtgatttcacccctcgtgggacttaaattacaagatctcatctcttgttctagccatgcatacttatggccaatgtgactgcccccttgcaaccgcatgctcagcgcacgtggcccgcacgcgtggcgcacgcc

SEQ ID NO: 22785 - DNA, 156 bp, Oryza sativa
taagcttcctattgttgttggcctatattgaaaccgcctttgtcttcttgggtattaatcgactagcctgggtactttggtgacctagctagaactatatgcttaaccatgcttaattaccactaactcagttgatgggataattggagtattata

SEQ ID NO: 22786 - DNA, 233 bp, Oryza sativa
agtcaagttacaaaatgtttatgctgtgccaggccttgctaaaaagttcacgcacagtaaaaaggcttacgcatatatcaatatttgagaatttgtgtcgcctatgtggaccgcccctccacacacacaccaaaaagaaaatgatgttcactcatttggttcacgtggtatgactgtattagctatatgcatattgtagctgtatcactcattgcgctccttgaagttcataa

SEQ ID NO: 22787 - DNA, 468 bp, Oryza sativa
  unsure (1)..(468): unsure at all n locations
tgtgcgaattttgagctgccactttctatttgttataggaacgcgcatanttttgtgtatgtttcttgtattctactaacaacggcagggatacgcaagataattgtggatagctgcgctcaacatccacatcttcgtcgagacatgaggagggatccacatgaccattatgagggaagtgatgatgttctatgtaagaacaaatctgcactgccttatttcgagggagactattgatctcgtgcttacattaatngggagctagcgcgtgatagtgaattttacaagcatgtcttgtctgagaaacaacacgttatgtgtgcctctagtggtttaattaaacatgcttctaatgattggaaacatctttgtatgcataacaaaataccaccatcttggaaagagctgaacgatatttagagatgttatgttccatgtttatgctgacatttgttcacaactgaatgt

SEQ ID NO: 22788 - DNA, 439 bp, Oryza sativa
  unsure (1)..(439): unsure at all n locations
acaagaaactcagctcattcccacagtatgccaccacaaagatgcagaactggttctcttattactagcagccttaatcatatgagcattagaaatatcatactcatcaaattgtttntctactgctagctcccaattaatgtaggcagcggaatcatactatccatcatagactggtaacttacatgcaacttgtgcaaactatactcatgtacctcatatgcatcacgtgaagaagtcgtcatatcttgtcgaaggtgtagatgttgacgttgagcatgaccatcttgtttctccaggcgcaaacctgccatgggtagcagcnnacaagaaacatagacaagaatatacacgcctctatcaactactangtactggcagctcagatctcacacacactcaagcttttaacaaagctcttacaagatcttaccaatgc

SEQ ID NO: 22789 - DNA, 344 bp, Oryza sativa
  unsure (1)..(344): unsure at all n locations
nntnatcaagcttagttgagcctataaaccagagaagctatcatatatctttcttcctcgcagactacagtgcaaaaaataaacacggcgttgatcgaccacgtaagcacactacactgacaaataatcacactccattattatgatgatagcgcccgactgacaacggcgagcaaaaaacttgatgttccagcccaacacacggagatacatgataagcttaagcatagaaacggtgaagatgttcaatattccaagagttgccgacgagagtaccgncttcgcgcttgagtcgatatgaacctggtcgggtgacttcagagatgataaacggcccctcccat

SEQ ID NO: 22790 - DNA, 273 bp, Oryza sativa
  unsure (1)..(273): unsure at all n locations
cagcttcttcttccactgttgcagagagactcagtggtgaatttgtctgggtcacaatgaatccctccgcgatccactgctgggtgatgcactgtcgctcgataacagatccctctgggtacaacgcacaggacagaaaacacctcttaaggtaatatggctgttccaggtagctcatgttaatagtgctccgtatccttgcagaaatgccacagaaattgctcgagtagactcttccncattcatcctccttatgagccacatcccgtagat

SEQ ID NO: 22791 - DNA, 64 bp, Oryza sativa
tgagctgatatcatatattcttgaaaaatacccttggctgtaactcttgaacaggttttgtgag

SEQ ID NO: 22792 - DNA, 127 bp, Oryza sativa
ccctgaaccagtgcccagccccgaaccattcggatacttttctgggacgagatccgaagttcgtaaaacaagaagccacggtacctttcaaaaccatcataaaaagataaacagttcaacggctacc

SEQ ID NO: 22793 - DNA, 391 bp, Oryza sativa
  unsure (1)..(391): unsure at all n locations
gaatgtgcaacacacaatgctttctctatgtcacacactcttacactactactcctgcacatcaaatcagtggtctactccaaatcaaatcaaaagtagatggagggaagtgtaaatatccagaaagcaacagactacanttttaactggaactaatatgctagctagtctagttntacatatacccctgcatcagtgtgttattaggatcagatagtgagtcaaagcaagacacggatgcagacataagcatgacttcatgatgatgatgatcagatcagtgtgcatattcatgtgtgtacttgcagcatgcaatgatgatgcactatcatatactctctggtcgatctctgcacaaatacacgagcctagcttgtgacacataacacac

SEQ ID NO: 22794 - DNA, 238 bp, Oryza sativa
  unsure (1)..(238): unsure at all n locations
tcccgctgtcggctctttagagaacaactctgagattatgccacccatcaaatataatgtatactccatacacaattaatttacaaacggtcagaatacattatagtttatttacactacgaattacatttgtgtaagattttagaaatnttgaagcaaaaccgcgaacacgtcatcaaaaactggatgtgggctccacgagttcagaggatgttccgaacccgttttgatcgcccac

SEQ ID NO: 22795 - DNA, 315 bp, Oryza sativa
  unsure (1)..(315): unsure at all n locations
atcatttaaaaggaatttgggatcaaagtgagatggtcgtagtcaacagtgacaagtatggtgtggttagttcacgcttaaatttgaagtttaattgaaaatggaacgatttgacgcataagttgaaaatttatgtgtaggaaaagtttgatgtgatggaaaagttgggaactttaccaggccgactagctagaaacgactcaacatgttntatcttatgcaatgattctttcgtttaagagacngatataagcaactgaacatgtataccttatcaaaacagcaaagggcctcatgcagtatgcagataaaaca

SEQ ID NO: 22796 - DNA, 206 bp, Oryza sativa
ctaagggtcggactctgattcgatgctaattaatcaccgctacatcttctaacttacttggaggaagagagagctctccttgcgtgtgtgagtgagtgagaagataggggttatatagcctcctaatgccgttgtgacgttggaatagttgaaataccctcaaccgttattgggagcaattcacaccgttcagaagaaaccctgca

SEQ ID NO: 22797 - DNA, 235 bp, Oryza sativa
gtgccaataattattcttttcctgttttttcttaggtcttggatgtatttagctagaaatctctcctggacgtaattggttgattttctgccattcaaaggaactagcttctccttgcccaaaaccacttccgaggacctcttcacaattaaatgcaacttgtaatcctgtctaaaagccatcaactatatttttgacgaggatctagccttgttctcttgtattcgcacttgag

SEQ ID NO: 22798 - DNA, 444 bp, Oryza sativa
  unsure (1)..(444): unsure at all n locations
tatagaaaaactaagcttggtgaaaattggaccatgcacaacatttaacagatctatgtatcttactattgtcaaaaaagaactatatatgatcgagaattatatgccatgcccgtaatggcaggtaattatgtaaacaagcaattgatttattagtatccatccaattaaaactcgtgtgttacgacttcgaatatataaattttctgctcgtccacacctctgaaaacaaaaaatgattcctacacaaggagaagaatcaacgaacacatccttaacaaatgctacaggagcaacatctcctggggaaccccctctgtggttggactgctggatagtagcttgaataaaaaaaccttcaacctttatcagctctaggcncatcttattattcagttttatcatggtgagaatgcacacgatgcatgtaatgttgcagcgctg

SEQ ID NO: 22799 - DNA, 421 bp, Oryza sativa
  unsure (1)..(421): unsure at all n locations
cgaaatgacccattccttgacaattgaagcgacagatgtacttcccgactcggcattatcttttctcatttcgataactctgtcctggcactggagttaggctgaaactgcaatcttggagaggagtggngttgccttgatgcttctctacgatggaactggcgggttggttaaccatcttcttcgtcagcagaagactgaattgacaatcttttggtacatgatcagctccttcacaaaagacacaagtgatcctgctcgtcggacacctgtctggtggatggtcttcatcgcatgaacgcatatactggcacacgagctggcgacatgaccgaattctcacaacgagagcatggcttacgtctcatatcatcttccttatctgaggagacttgatctgaatcttactatcgacactcta

SEQ ID NO: 22800 - DNA, 369 bp, Oryza sativa
  unsure (1)..(369): unsure at all n locations
tagatactcaagctttttagtagcagtggttgcccactctggtgccccaaccaacatattataagaaccactcatgttgccaacctgacattatatatctaagattggatggcggcacgaatcaatcacaccaactatatcatcttcgcggatctgaatatgaatactgaatccccggtatgtcaaactagtcctaaaccagcagactcaccgctcggacatatagaagaagacaaagcaaaaggagacgtntacgaaaagcacagtgcaggtggaaacataagatactctccaccactggcttacatactactaccacatntgtaaaatttatgatgccatnggacttttcacaatactcgatcattc

SEQ ID NO: 22801 - DNA, 468 bp, Oryza sativa
  unsure (1)..(468): unsure at all n locations
gcacttcatggagcacaggtcgtgccgncatagctttggtgaactctacattcccacttatgtactctaactagtagagtactcctggctattagatactccctccgcctattatagtatgggatggagggattagtcttttaataaatcgtaatttggataatcctgctgtatttcgggatggaggccgacccgctctaccaaatcttgattttgttattcctgctggtactgcanagcactgtaattgacatgcatgatttgaaggatgcgaatttagtgactctatgaatttgattcttttatcatgctgcataagcgcatatagcattggatcatctcacgcaatgtgaaaaacttatntcttcaatcatcattgncgtacatgtgcaatctattgtgaataacccatattgctgcatgtaaaagtattgcatatttaactcgtcccaaacatatactcttaac

SEQ ID NO: 22802 - DNA, 311 bp, Oryza sativa
  unsure (1)..(311): unsure at all n locations
atctgctgtgtgcggtgttgagctaacacaggtatttgacagtgttgtaacggagtgcgatagctcatatnttgcagagattcagtggcgtgaacctgatatcgcgaatagtaatggcatattggtaaacttgcataacatgatccaattaacccatatctttggtgaggctaatgcgcacgtacgtgctatcaatttagctggcgcccgcgtcagttggccccctcctctgttcccgcgtgcttttctttctcacttattttttacgactatggcgcctggatccgggtgcgcttttctttttttcgcca

SEQ ID NO: 22803 - DNA, 435 bp, Oryza sativa
  unsure (1)..(435): unsure at all n locations
ataagtttttattaataaatctgaacaaattttctattaaaattttattaactagncgcccatcgccgnttggaagaggagttttataatacaccctaccagagggcaatattgccaacgtggcagaaggcctgtgaccctcccataacgactggccaccgagggcgccgaanatttctgaagcggctccttgctacnctccagagggcagtttttggctctaagggccacctgcaaaagggtttgagcgtggctagcattttgcatgtacctcctgtcccatctggagggtatttctatgtgcagagagagatttttgagttgcccctgccgctttggagacatctgaaaaacagccgcctcgtgcctatgacgccccccccccccaccaaaaaaatatttaaatttcataaattaaaaacctagggtggtgaa

SEQ ID NO: 22804 - DNA, 374 bp, Oryza sativa
  unsure (1)..(374): unsure at all n locations
atcagatcccgcaacaaccgcgaaccacatcatctaattggattccgcaacaacggcaaccctcatcgctagcccacgctcacgggagtcgcggaagtccttaagcccgcacgataaagccctcagaaagaactactaagctagcactgtccattccaagtcatatggtcgacatgatcgctacggcgcttgaatgccatataacaagntgctatttaaccttatgatgatatatatatgctactgaaccaccaccaccatagcagggtcagaatacatctgtagtatgaccgacttctccaccggtcaatccaatccatcaacatatttatntcaattatagaaagtataatttaatgcaaagtgatacatat

SEQ ID NO: 22805 - DNA, 262 bp, Oryza sativa
cttgactggctgaagaaaaaacctgaatacgcctctaccctattcatcctataaaagaacctcctactactagatatatcacatcctagtaccagtgaatctgaatatgtctttatccagattcgttctatatagatatgtcgcgtccagatctagatttgtttttttaaaaggatggagtatgtgtgacggctgttaagaccaaggtaacaccgtaatacctgataaacccatattaaacatccacatgtgtaagattatt

SEQ ID NO: 22806 - DNA, 276 bp, Oryza sativa
cgcggaattcagtgtgcttctcccactcgtgatgttcattgttccattcacaagacaaggactcacgatctttcgagctataaggtctttctcaatgccatgaggacgtcacctcctaaggtccaacagtcgtgaatctctcttatagatgcggacaaagaacgaggagcaaccactacgagccattcgttgggtaatcgatatcgaccccacgagccatatgtcttacatctgctcgaagaacaagcctcatcattaacgagtacaccacgcgat

SEQ ID NO: 22807 - DNA, 183 bp, Oryza sativa
attgacttgaatgtatagatcctttccaacatctttggtacaatgacttgttgtcctaaaaacagggcctataaatgttccatatttggatggagagaagataattatattattagcaatagcccccatttatgtgtcatacgtttaattgtccctcagacatagcttatctagattatctac

SEQ ID NO: 22808 - DNA, 186 bp, Oryza sativa
  unsure (1)..(186): unsure at all n locations
actggaccctgactctatatagtccctacagttgcactgttaccgtgtgttaccggtccctgcaagccgattcttataataaggccacgcttgctagagttcattgcccatttatctacatctgttcatggcataagtttagagaccaacttatggcccccctgcttgcangacattacccaacta

SEQ ID NO: 22809 - DNA, 390 bp, Oryza sativa
  unsure (1)..(390): unsure at all n locations
tagagaggtagatgatcagtcacccggtagtcacgtctaagcatctatgcttgaattctatcggtacgagtcccactatcgaaaggatgagcccaatccattcacctgttgtggtaggctttctgatcagctcgctgtgaatgctntctcatgtatagagacatctcgactcatataccatgccctccccacaagaaacttcgctctgagacacatcaaggtatatctgatgctgttgctacgggagacagtgatggaaaggatgttggcaccaagtaattttgccattcaagttcataggaggaaggcgatacatggttcacaactaccatgattcaatggcaatctgcctgtcttacgggcctcctcaaatattctcaactttcacct

SEQ ID NO: 22810 - DNA, 303 bp, Oryza sativa
cttgagactaagctgagatactaaggcagacagagttcactgccgaatgtgatgatctataaatatgcgacagacgaatcttggtcagatagttactagttgctcacgccttgatgacatatggaatgaattcatagcaaatgtgtatgactccatgccctacggcagtctacaagattggctacaccctgatacacttgcgatcaagcggagcataagcacttatatttgaatcaaagagtgaacatactactagatgacgcatgtgcattgcactatcatcactgccttggacctgaatct

SEQ ID NO: 22811 - DNA, 293 bp, Oryza sativa
ttaatattaaatatgggatcatccctataaaatattatcgatgcaaaaaaatctgtcaatagtcctaatgaagaggggccttaatgttgggaatgctaccaaacgtaatgtgccggaactggcttaattatacctctgatagtacataaatgtgcatgtatagcacgacagtatatagtactgagtgtggtgtagtaatgcatgttcgattgtaatatactgtttgcgaaaataattggatgtacccgagaggcgatcgatcgaattacacccgagctaactcacatgttcac

SEQ ID NO: 22812 - DNA, 272 bp, Oryza sativa
  unsure (1)..(272): unsure at all n locations
ccttagaaactcagctngcttaactaatagaaacatcttgcctaaactctcttgtcttctatatctgacctttcttatacaccactagaaacactcctccttcagtctggcatctatataatctcacgatgcttactctcagatgatgtactaacctcaaaagcctatagcaattcttcaatcgtggcgacactctgtcccccacgacaaatgccatgtgaacaacttgctctatcttgatctcactcagctcaacataaacacttttccct

SEQ ID NO: 22813 - DNA, 292 bp, Oryza sativa
  unsure (1)..(292): unsure at all n locations
agatgtaggggccattataagattacatttcttaataccatgaccaaaatgaactcccgcttctatcatctctttcaaattgatgttccaatatcttcttgtcattttttccacacttccttttgattttttcttttttttcatcctacccttccattacgagatttctttcttttcgaaaataagacagaagngaaatagcttgaataaataaaanttgtccgatgaacctctacatgtataagctaccttatgaatactaacttcttttaaataaataaaataaaaatta

SEQ ID NO: 22814 - DNA, 310 bp, Oryza sativa
tttgggtcccttgatgttagtcatcaaaagcttttggacccacacacaagtgcggtactcatcattgtaatattcattaaaataaacaaccactttgccctcttgaattttggaaattacatatgaatcataataaagaccctctggccggactttcttgcattatacccggaacttcctgtcagccccttcggcctatcagaagcccggaacttcctgacaaaatgtctggaacttctgtctacaaggcaggaactttcggtcattttcccggaacttctggttgtctgaccagtgaggggataagtca

SEQ ID NO: 22815 - DNA, 281 bp, Oryza sativa
  unsure (1)..(281): unsure at all n locations
tgcacatggcgacaagagtcaatcaaataccactcacctccttgctgccacatattcacacacactacacattagcgccacaaatacagacaacagttgttcaaatttaaacttgatgcncagaaccaggccaacctgctcactctcttgctctcactcacagggataaaaaccaaagctctcaattattctcatattagcaacctattacaccacgagagaccctctactaatccatggaagaggacgagtatgagatgcctgatctcaaccttgatcct

SEQ ID NO: 22816 - DNA, 389 bp, Oryza sativa
  unsure (1)..(389): unsure at all n locations
atatgtgagacacatgctaattgctctttctnggaatgacaagttatattcatttaatgattctaacaaactctctctaatagagattgagttcatgacatatgagctattcatactccaacggatacaaaagtttataacttgataacgcattttggtactgtctaccgcctacccaagataaaggttcattaaataatatgcacataacaaatgaactgaattctagggcataaaatgaactgaaaattacatgttcaaagttgatctgtctagtggcatgaatcacataattaattccggataatattaatatccactattatttactcagaaatcatgcattctaaggcttatgaacaacacccactataactacataaatatca

SEQ ID NO: 22817 - DNA, 178 bp, Oryza sativa
acaatgcatgctgccttgcacacctgctaatcaccctttaccctatttttttgtctctatcgtcagcataattaaaaatactgcgtctaggatttctaggaattacatgtaatttgtctgctacgtaaaaaaaacttttgaggtgctcgaaaaaaatttttgatctgaaaaaaaaatt

SEQ ID NO: 22818 - DNA, 334 bp, Oryza sativa
  unsure (1)..(334): unsure at all n locations
ntctacaccatctagttctggcaagaactgcagactaaccatatattattatgatcttgattataacaagaaaaaataatgctctcttggaactatagaccgatccaaaacttatattcagtaatggtaaaggcaacttacttgattaacaacacgatcagaaactcctgcactctgtgttcctcgcccggtgcaatggattcaaactcatcaaagaacagtangcaatgtgctgcagcaactgcctttgcaaagaagtcacgaacctggaatcagattattaaaatcagaaccatgaccatgtaaaagaagaatatcagaaccattataatct

SEQ ID NO: 22819 - DNA, 233 bp, Oryza sativa
  unsure (1)..(233): unsure at all n locations
tatacctctcatcctttcacagcactacaagttgccacagctgttatcaagaatgattatgatacatttgggatgccacangtgacccctctgatcgggacataatcttcacaagtgccctgcggcatgaatagtcacactaactgatgcaaactcaacaagagctcttcttaccaccctcaaactgatggacaaactgaacggttgaatcaatagtttgaagcttatcttcg

SEQ ID NO: 22820 - DNA, 293 bp, Oryza sativa
  unsure (1)..(293): unsure at all n locations
ggatgctctattttaagtgcaatgtgctagacagacctcaatataaaggttagggatgtatatatactttttcatattacataatacatacgtatatactcatttgggcctaatactctattctcggtcttcttttctcaacacatctactcctccagacactattttgnntttgtgtgatgaactttatcggcaataattattgagtgaatagctagccttacaatcatgagttcatctgtgctttgctctactgaaacaaacaacacttatttgaaaatgaaaaatgatat

SEQ ID NO: 22821 - DNA, 491 bp, Oryza sativa
  unsure (1)..(491): unsure at all n locations
agatactcagctttgtcgngatcgaaatgttgttttgacggttttcttgatctataggtatatgacattatcttacagagcatcagtgatctataaatttccaggacagactgatctagcacagaatgaagcagcagagaaaccaataatgagatatttggagcctccacccggagcggaccaccagagagatggctgacccgccaaagatggaagtcgcggtggacatcaccaccattaatgggaagggcgatgtctcacgcttgccggtgcagctgagacacctcacagagtttcagctgtgaccacattgatgattgagtgctaggactaaggaactggattctgcataacgctttggaatttgggcgctgcgaggtcttcaacccgatactctgttacaggtctgagatatattcttttcctagatatttgcggtgtatattctttctcgatgttgcaaaaaaaccgagatgaaagaatacttcttt

SEQ ID NO: 22822 - DNA, 385 bp, Oryza sativa
ctgcaacttggccagcttgatatgtgttgcagcatattatcaactgaaagtctaaggaataagaggattacgtggtgtttgtattcacggacttaactttaatctctgtatttagacactaatttagagcattaaatatagactacttacaaaacttattatataaatgaaaggtaatttgcgagacaaattttttaagcctaattaatccatgaatagcctagcatcacataggctaatcatggattaattagactcaataattcgtctcgcgaattagtccaagattatggatgggttttattaatagtctacgtttaatatttataattagtgtccaaacatccgatgtgacagggacttataagttttagtcccatttaaa

SEQ ID NO: 22823 - DNA, 432 bp, Oryza sativa
  unsure (1)..(432): unsure at all n locations
gatgtgcatcgactacaccgaccttaacaaggcatgtcctaatgattcttactcnctgcctcgtatagatcagatcgtcgactccactgctgggtgcgacctcttgtgttctctagatgcatactctggttaccatcagattcgcatggctagggaggatgaggaaaaaactgcagtcattaccccctgagcatgacctattgtatacatcaatgcccttatgggtaaagaatgcaggtcctaactttcaacgtactactcgaatttccttgngtagccaaataggacataatgttgatgcttatgtcgaagacttggttgttaaaacgcgcaaccaataaactttactctcagatctatcggaaactatcgagaacctccgctccgcccgcataaagctgtacccagataagtgtgtcgttggtgtacctg

SEQ ID NO: 22824 - DNA, 371 bp, Oryza sativa
  unsure (1)..(371): unsure at all n locations
ctcagctgagctgttgagcagggttttcagctgcgccttgcgcggctctgttcagcggtgatgcgggcggcagcacgtgcgtggagacaggacgaccgcagagcacgatcgactctntaatcacgttcacaaacggcgtatccagctgatacatctgcggaatttgcagcaaggtctgatgatacccggncgctttcgcacgtccccgtcgcgccaggcttttagaagaatcaccgacacctgcggngcaaagttgccgctcgccgatatcgccccgtcgccgccgagcagcagggttttgacagatgatcgtcgtacccgcaagcacggtgaagtgcggatgggcacctttgacggtatggatcatgctg

SEQ ID NO: 22825 - DNA, 302 bp, Oryza sativa
  unsure (1)..(302): unsure at all n locations
agaggcgacaacctctgcaccgataagcaacggccccagtgagtagcgactntggcattgttgtgcggcaagagaggcaacggcctctgcacaggcagtggcgaccccagtgaggtcatgcctcggtctcggcaggtagcaggagtggtggcgtcctcgtcctcagcctcgagcaagcaactatgtaccgcggcattggtgacctcagcatgttggtgatcttaattctttggttgcactgaacctgaaggacacatatttcttcttattcagtttaatgtttttttattacgtatcatctg

SEQ ID NO: 22826 - DNA, 175 bp, Oryza sativa
ctcaagctcctcaaggcttgcggctctcagagaaagagacatcaacttcacgttgcacaaacttcaccaattgagtctgtctcttcatcaccacctagaatctctaacaatgacaaggtccgcatgacaaaatactgtgaaaggatggatctacatgtgctaatacaaacaacat

SEQ ID NO: 22827 - DNA, 372 bp, Oryza sativa
ctcagcttgcccgcaggtacaccgaacacacacttattggtgtttattttatgcgggcggagcggagactctctaaagttgtcggttgatctgagagttacatatcctggtgcgcgtcttacaaccaagtcatcgacataagcctcaacactacgtgctaattggctacccaagaaattcgagcccacctccaaaagtatgacatgtattctttaacccgaatggcaattgccgataacaatagggtcctatggcggtaatgagcgcagcttttcctcatcctacctacccatgcgaatctgatggataccagagtatgcatctagaaaacacacaaagtcgcaccccgcagtggagtctacaatctgatct

SEQ ID NO: 22828 - DNA, 242 bp, Oryza sativa
ggcccgtgcccttggcatatgtggtaaggacatttttaacaaccatagcttgttgttggtcagctctaaagaacagaagtgtatcatcagcaaacaacagatgggaaatgcccgtagctcgacgacagattcgcagaggggttgatttcatcttgtgacatcttttctttcaagagcaagaataattcatcagctacataaagaacaagaatggcgagagagggtcttcctgacggagtccc

SEQ ID NO: 22829 - DNA, 391 bp, Oryza sativa
ccgagcctagggccacgcactgtcgcatgttcctctctccgcgtgcggcaggtttcttcacgcaccgcagctcctaccgctaccagtcgtggcaaaacatgccggggtattttgattacctgtttacaaaagtatgcccctctgtcatggcgttagcatgaatacactaaaataatcggcgtggtgtccgctggcaaattagcacgtctatagagtctttcccccaaactcactagcgggtgctacagctaaaaccgtgaagtacaatgttttgagccaatttgcctacgagattactaagaaattgaaattgcttcgcaggcttacaattctttgactcggctataaataacttattacaatggtttttctccgattagaaaaccttaat

SEQ ID NO: 22830 - DNA, 302 bp, Oryza sativa
  unsure (1)..(302): unsure at all n locations
gctgtctaatacataatatagagacttacattctccgcgttagtcctgtacctcccattaactctaaagaattcgcacgcgtaatacccgcaaaggaccgttccttcgccgtgcttgtgacactangtacgtactaacagcttcttctttgttcgggtctattctccacccttgaacttgtaatactggtgcgcactgtactgatgtcgtaccggttcacattaagaaggatatttatttataatacattcatataagaatgcaagagtcataatcacttactactataagaattgtagaaa

SEQ ID NO: 22831 - DNA, 232 bp, Oryza sativa
  unsure (1)..(232): unsure at all n locations
atcacttngcaaggacctggaggaaagcaacgtcgctttacccctaacacccctaccgcaagacgcgctatcctaacctgttaacaagtcacctccttggagtcggtgcccatagtctcgaacatcccgacgtatttccagaaaaattaacgagtatgccaccacaccgagagattgagttcgccatagaactggcaccaggcacagctccaattgcagaaagaccctaccg

SEQ ID NO: 22832 - DNA, 285 bp, Oryza sativa
gcgaggtgtatgtcaagagatcaccacactcgaacagtcaacgtcagaacactgatgccatcattaccaccaatgatgttccgagcaagcatactcccagcagataccgtcttacttcaatattggaagcggtgattcctctgaagaaaagatagaggaagcccaggaagctttgggagtagatccacatgattttgttccactaacttatgttgctgcagtgaattggttcaacaagtaatgagatttgcccaacagtctttcttgtggggctatatatttgat

SEQ ID NO: 22833 - DNA, 250 bp, Oryza sativa
acattttggaactacaaggagatcactctctctatgccattttggacattacacttgtgttttctgacctctaaggggaaaactctatatccgattgggatgcatcagagagtgacacttacccgataatgtggactttggaacgactcgaaagtgatgacaagggatctccacagcaaacacgcaggtcggaaagacatgtaaatttgccaaggttcccaacatgataattcgtgaacttcgcggacta

SEQ ID NO: 22834 - DNA, 289 bp, Oryza sativa
  unsure (1)..(289): unsure at all n locations
attgctaattaagagtggtactgtttcaattaagaattctttggggtgtctctgtctcaatctaacctctttgtgtgtctctctgactgaaagtttggcagggtgattgaccagangatgacctcttctttttgttgttgtccgacacatggagatgcgtgtgttttttttttaaattatttgtcagagttactactgcttcattagcacaatttctttatgactggcgtttggttggggttgcgtggtgaacaagaacaatatgaagatgatgatgtgattcgattct

SEQ ID NO: 22835 - DNA, 408 bp, Oryza sativa
  unsure (1)..(408): unsure at all n locations
atcaaatcacagttcaccaccgttcatatgtttgaaccaccaggttgntacatattaatattntattactttggcatatcttttctcatattgtggagagaaatagcaaaaggattaatataaaaaattaggacttatctattcaattggtgttcaaaaaacaaagaaagaaaagaaccaatacatgtgttgggatgttcactacctagcacttgcttctgatatagcaatgaaagacatgcanttgtggtacataacactgatggtcttatgagagtangttccagctgctagtagttaaggggacacagttaccattaaaggaatatgggcacgtggaaagagagaatttgaaaatgangcaggggattgctgangacccattctangaacaatatgtgggtcaat

SEQ ID NO: 22836 - DNA, 501 bp, Oryza sativa
  unsure (1)..(501): unsure at all n locations
agctttatgtttatgggtgtcaaataaatatgaatttctgatttatttcttataattggattatanttttttaagaaagacttgaatttgcgatgagagtgaagcggaaggtcagcgacatggacactgcagttgacgctcgatgccgaccagattggtgttgagaattgagacatcacctgncgctatgcgatgtttatttgtttgtcaaatgaccacctaataaggaaacgaaaaaaagagaggaagaaacggaatgaactagctagtaaatgtcttcctgagagagccccacgatatgaacagcttataactcttggttccaatgtggcccaagaggaatgtaacctcctaaaaaaggaataaaagtccacttcaggtccctcaatatagcttcagtattaaaacgtgcaatttaactacactagtaatatgcccgtgctaacgctacgancgatatttgatgatgcaatctcttgcaactactattaaaactgaaat

SEQ ID NO: 22837 - DNA, 496 bp, Oryza sativa
  unsure (1)..(496): unsure at all n locations
agcttctntaatttccacacatgcttntaattgttgcgctctgcacttacgagttacgacatctcgtatgatctatctggcactgaggtaattaaactcattttcagttgatttaatttacatatttgaagctttcaggtcccctatgtatgaaactgattataagccgtaatacttattagcgactaaaactaatttatcgcggggttaaatntatatatgtatnttttgcttaaaagtcaacgcaagtaaaacaaacaattaaaaacagcaaaatcaaccttaaaactaagaattaaaanttaaattaactactaccgaagagtggaagctgtactatttagttttgatgaactctctctatatactccctccggggtgataatacttggtcgttaggcaaaggcacggtctcanaaaaacaactntgaccattattttctattataatatgtaaaaaagtgtaatanatatattatttattaaaagtactttt

SEQ ID NO: 22838 - DNA, 167 bp, Oryza sativa
cgactgcagcatgcaacttcccacagagtggatacactaatgttgtctatgttattcaccgagcgtggcgaggcgttcttctgcagcagtggtatcatggccctgaagatgcttcacaagtacccccctgtgaggatgtgaaagctggcaaaaacgtccacaaattc

SEQ ID NO: 22839 - DNA, 365 bp, Oryza sativa
  unsure (1)..(365): unsure at all n locations
agctntggatgactatctctctgggttaataaaattttgagtgatcttagatctggtgattcttcttatgatactaattatccacgatctgagatttctcgtcactttttgaatggtcttaatatgtctatttgggagatgaaagttacatctattcaggagtctgttgacatgtctactttactttgattcactttagacaaaattgaanacacatgagatgaatgttctttcttgaaaagttgattctaagtcgactgctntggtttcttctacttcttccttggatgttgatgcttcttcatctatgccttcttttcttgctgcttttaatgccacatccgatgatcaactcgaacaaatcg

SEQ ID NO: 22840 - DNA, 488 bp, Oryza sativa
  unsure (1)..(488): unsure at all n locations
agcttatgttgatgatgtagtcgtcaagaccaagtctaatgatgacctgattgcggatttagaagaaacttttacaagcattcgtgctttcaagatgaaactaaacccggaaaagtgcatcttcggagtaccgtcagggaagttgctcggatttatggtatctcaaagaggcatacaggccaaccagaaaaatcaacaccatcctcaacatgaaaccgccaagctcccaaaaagacatccaaaagctaactggttgcatggcggcgcccagccggttcgtttcatgactcggcgagcggnggatgcccttcttcaagctgctgaagaagactgacaatttccagtggggacccgaagcacagaaagcctttgaagacttcaagaaacttctcaccactccaccagttttggcttcgccacatccacaagagccgctactggtatatgcgtcggcgacctcccaggtngtgagtacggtcgtagttgtc

SEQ ID NO: 22841 - DNA, 442 bp, Oryza sativa
  unsure (1)..(442): unsure at all n locations
ctcatgcactctaagtgtccatgtttataacagtgtgaggagttctggcgcttccggaaaagagaagtctcacacatatttaattatgggtcaagtgagagtctctctcacacacactcatggcagnnctaccacggcacaccgaagtagggcacgcctctctgccctacctcaacgggtgtcccatcagagcgcacctgcctcactcangggtgaaccatctatgcagggatactgccttcgctcggctatctaatccgctaggtctatacccattcgagaagtacgggtgtacggaggtcgtctcatgcttaacttcatggctcggtccttaattgaccggngacggtactagctctttccagataccacccagatccttcgtccacgccagtcgataacaattgtctaactatatgtctctcttcacacatcatgtcat

SEQ ID NO: 22842 - DNA, 463 bp, Oryza sativa
  unsure (1)..(463): unsure at all n locations
agctntattaagaaataatntctcccaaactttttttgttgctttcattttatttgctcttggttatgagatcatggcacaattagatgttgacaaatatcaaatttcagagtgatgttccttttaagtattgtcacaaaagagaacctatgtacatgccaaactggagttttgggctgtaccaccaatgtcatttggcttgatcactcaaatttctattgtgatagactcctattttttaagctaaagtgttgacaggtgatagtttgagttaagttctgtatagatatgaaatgtcttggaaagaaataaatagacatacctcatccctgtcataactgtcaccactgtgcggatcanatagcacatctcctgtggcaagctcaaagcatatgcatgcaaaggaccacaagtcagcagatgtagaatacttggatcccagtatcacctcagggcatctgta

SEQ ID NO: 22843 - DNA, 494 bp, Oryza sativa
  unsure (1)..(494): unsure at all n locations
agctngaatggtgaaatttgcctttcttcttctgctttngtagatacaaaaacaaaattacacaatgaacggacatttctaaggctggcaatagttttagccaatatgacacaagatatgtgaaaattacctggccaacatacaagctctttgatgtgctaagaacaaagatccactttcatctttggcccacaagaggtatcgaggatttgccggcttttcttgtacaagaacttgccatcctcaagtataacttcatagtcctctctttctttctgcacaaaataatttcagttttttcatgttagccactttacaacttcgtgatgttctaactctagcaattcttagcnatcatgttgcaaccacttacaggaccaaggtacttgatgcatnggctcanaagcttcgacctggagcactngccctcaagaatgatctctttccctttctccacatcaagcctgcattacataatcaaatcaggatcatga

SEQ ID NO: 22844 - DNA, 403 bp, Oryza sativa
agcattatccggagccactgcgctacagtcacatgtaccaccagcacgaccgacaggtggaccaatggcgtccgtgagaccgtgatccatgtcaaggcacaccacttcgctacttcgctcgggcttgctccacctccaacaactccaagcagcggcggcgtgagagcgaaagggaaggaccgcctgatcccttgaccggacaactacgtgatacgtctatgcgtaggagtatgagatgagatacgaatagatcccgacgcgggattcaatcaatcaatgcagccatatccaatcttcatagcccaagttgaggtcatgcctggagctgcctagtatgagatgtgacactactaataccatgaatctggacaggtactaagtagagtcacattccgtactgagc

SEQ ID NO: 22845 - DNA, 505 bp, Oryza sativa
  unsure (1)..(505): unsure at all n locations
tgcagcttcactagcacaagtgcacaaccgcacccatgtattcctgctctttcactggtcatgtctgggaaacatgtgctcctccttctcatttcctgaatatttcttctcataatttttccaagagaatatgcgggagagttgcgttatcttggacaaacagatctatttcatttattcagaattaaatccgcaccacttgctatcccttccttaataggattcaacggtcctcattcagagaaagatttagacaatntatcgcctgcccatcataattaagctgagatcctgcttccaaacagttctttttcctctcttcatttattctacctttntgctgggttgctgccgatgagatcggaatgaacgattctcctcatgctgctctgcattcatccaaacttncanagtaacagtattaaaagagatttactaattcttcggttcatattacatggtanntttgacttaataagatagatnaagttatagaacatttacg

SEQ ID NO: 22846 - DNA, 486 bp, Oryza sativa
  unsure (1)..(486): unsure at all n locations
gcttgtatcctctacttcttcttatccaatctggttggtattttntttcatgagattaaattggatttgattgctcttgagataattgagttgagaaacgtcaggaagcggaagcggaagccgtgtccaactgtatggaagatgccacgtcctgaatccgttntcaccggcgttcccgcgttgccatctattctagctcgtcgtcaccctgtcccttgtacgcagctagcctatgcgaaggcaagggcgacgccagagcagtgagggtgcctctggagggccgtgctagctccactggatctgagcccctcggtggtaatcattctccctcagccatccatgttaattgctggacagacagggccgtctatatggaattggggcctcggggtgaaatgcagagtgggaacctataattaaaaaatcatatctaatataaataaaatatattntcactttaatatatagatgcaatatgtgttctaa

SEQ ID NO: 22847 - DNA, 335 bp, Oryza sativa
cacggagcagcagctgcctaagaggggatgggaccacttgtcttttttatgggaaacgaaaggaggcggaaacaaagattaaagcacctgccgtctataacaactcaacatctagcatatgggtggaacggtagaaaaaacaaactagtcaaaccggggtcaaccacccaacccgcccgctcgcagccagtgagatcgtacccatgactgatattgcaaaccacccgtccatctcagctacgacaccgtagatcaccacgcctacgccaacgtccgcgaccgcctcgcggcacgacgaactgccgacgccgcctcgaaccaacgtaaggccggga

SEQ ID NO: 22848 - DNA, 295 bp, Oryza sativa
  unsure (1)..(295): unsure at all n locations
tgctgcatgcaagcttgtactgctggaacacgcccagtgaggagatttctttgtcgtttctgatgaacctccccgcctgggggcgcgagaagccggtgagcatccgcaagaaggtgctcttgccggagcctgtggcgcctgtgagcaccagcgccgtcccgtcgtggacgctgacttatatgacgtagggcaccgnctctctctccgcatgctggagacgccgtttgagatgagcctcggcggcggtggcttcagcggcaccatttcaggctcgcgctcgcgcgtgctcggtgcc

SEQ ID NO: 22849 - DNA, 502 bp, Oryza sativa
  unsure (1)..(502): unsure at all n locations
ttaagtcacctgcggcatgcagctntctgacaacanaaggtcatcttttttatttctttacatgtgatgcaattcaatttgtaggtcaaaataacaccttccttggagaatgtcaaatcaacatcatgaactgctctcaataatgattccttcagaacttccatgtggaatgatcgatctagaatagcaggtaaagcccacatgactgcattttttcagtacagaacatcttaaattaccctgaaaacaaggtttgcatccttctaaatgccattcaaaaatttagtagtttaagatcaacgaaacaaaaatttcattttttttgttactacaaaatttgctagttgatatatcataataatttaagcctgcctgctccaacatgttaaatgatgtaaaaccttgtcatacaaacggcagaattagacatggaatatactatngtatcangtaagccacatggtacttactttgttccatataggaaagactctatggaaac

SEQ ID NO: 22850 - DNA, 431 bp, Oryza sativa
  unsure (1)..(431): unsure at all n locations
agctnttgtatctcttttccaaggctcgcctggcctgtggcaggagaacccgagcttctccgccatggggatctccgccgccgccgncgncgnccccttncttctcctcgtcgccctgctgctgctgctgccgtcccccgccgcggccttctccttcacctacaacttcacctcggcggacacgcgcctcgggcatcgcgttccagggcgacgccttcttcaacaagttcatccgccttacccgcgacgagcgcatcggccccatcaccagcagcgccgggagggccttcttctcgcgccccgtcccgctctgcgaccccgtctcccgccgccgcgcctncttctccaccgncttctccttctccatncgccgccccgacccctccgccggctccggcgatggcctcgccttcttcctctcccccttcccc

SEQ ID NO: 22851 - DNA, 496 bp, Oryza sativa
  unsure (1)..(496): unsure at all n locations
agcttagcacanatagtcagcttgttaagcttagcatataggataagggtaagaaaagataataatgtaaaggaagacaacaaaaatcaaagtatgtaatgagctttagtttcagtacctcttctgcagacaagggcttgtcacgttgacaagatccaccttcattccagtcaccaccttcaaatgcctagagattgagtgcggaagagtttcaccccattgggtctcattgctttgttcacaaatattatctgatggacattgtatatccatagaatgaggaagataggttgagtggcataacgacagaaaacaggaagttagtaatggtcaccttggatacatacgaaggctactaaggcccaacaatcaaataaaattcacaaggtggaaatatatatattcaagtaaaacanaggtggannaaatatttctatatctatanctctttaaagaaggaagtgatggtggtactgaatctgccaccctatctact

SEQ ID NO: 22852 - DNA, 464 bp, Oryza sativa
gcttgagagttatcaaggccatatggttgttttttggcgttcctaaaaatagtgcagatagaggtagccagtttacttcgaagttttggcagaaattacaagttgagatgggtacccgcttgaatttcagtaccgcttatcaccctcaaacagatggtcagacagaaagacccacaaattttagaagatatgttgagagcctgtgttctagattctggtggaagttgggataagaatttgtcgcacgcggaattctcatataacaatagttatcaagctagtttgcaaatggctccgtatgaagcattatatggtcgaaagtgtcgtacgccgcttctttgggatcaaaccggtgaacgcaggtttttgggaagacatattggagaggcagaagaaaagtgaagattatccagaaaggtgcgtgtgctcagctcgttgaagactatgcgacatcgcgcaagatt

SEQ ID NO: 22853 - DNA, 458 bp, Oryza sativa
  unsure (1)..(458): unsure at all n locations
agctnntgttcttgcagacggatctagttctcttcttgagaagtggagagggcttatcccggccaaatggaatctatgagcagcatgcgtactcttttcttcaggcaataggcgtttccaaaatcagatactgcacttcaagtatgcctctttttttttcagaaataacaanaaataacccacgcaatcggataatatatgtgccttctgatgctatgcattgaagcaacacctgacctgagagacagtgtaatggaggagaatccaaacaatgacaggcgaaccgtcgtaaattatcctagaggcatgttcttgcgggcgaacacctatggtgatgtcagtttcatattgctcaatactctattctgcagctgacagcatcagcggtatgtggttaatatactttctgaatatgggagactaacggtggctatatatatntgtacacttattatgag

SEQ ID NO: 22854 - DNA, 484 bp, Oryza sativa
gcttctctgtccaatgaggaatccagataataatttggtatcttattatcatcgcaaaattgagtaatcttatatctgagtctgctcttgcaaagcaaagcagctccaaaaaattgcaggatgcttgagtaacctccactgcattatcggtttttcttcgaaactttcgggttcttgcacatgcggtgcttcaggagtaacctccactagctcatcttcttgaataaactctatgcagtcgtccagactgtagcttaacgcttcatcgagaaccactgcagcataccaaaacggatggaaattaatcgtctttctatcaaaagttgggagtttgacagttgatgtgaaacttatgtaacaaatcaatggaaagccagctaggcaggctcacagatgtggaaaggcccaggaagatatatgttaacagcatggagtacagagcacagggctcctctgcttgcttccatgttgcctctagctttgt

SEQ ID NO: 22855 - DNA, 458 bp, Oryza sativa
  unsure (1)..(458): unsure at all n locations
agcttattgcatttttttcttatgtagtaagactagaagttggaaacttntgaagctgtagaaccgtgatagtcctgtgtgtttttggaaattctaagccattcatttatgtctatgaatatatttttccctgttaggtctgtttatcttgtggtatgaatgcagaaaatttaataaacaacttctattacaatcgaatcggccctgagttcttggtaaatgtcaaattcatcttttatagctgntaatttcaattntgttgcatcgtaagctttatcttaaacgggcgcccaatgttcttaacaatgtgttgttggatagttggcaagattgtagctgcttgggcagtgtgttttcaacagacaatgaaacaagatctagtagtacatattntcaagttctcaaacaataagacaagacctaggagtacatattttggagctttgtgagtgaatctt

SEQ ID NO: 22856 - DNA, 450 bp, Oryza sativa
  unsure (1)..(450): unsure at all n locations
agctntccanatccaagttgaaattgaagctaaaaaataaaatccaagttgaaatctagttcgattttattggttccgaatcatccaaatcaaccaactgccaaacaagccaggcagccagcccacctggaatctgcagattacaattccagattttcagccctaatgcctaggagttaaacaagccaattcttcccttttttttttttcaaatttggcctgcttggaaaaccaatttttggcccaaaaccagtataaataatgggcatgtaagatatttccgacctttggctcaaaagtctgcttgaatggactgtaaccttaaatttagtgggcgtggtgactgctgccatatatatatatgtagcgggcattaacgagctagcctgagtacaggatagtatgaaatttgtggattggngatggagttcattctcccaaataaattga

SEQ ID NO: 22857 - DNA, 440 bp, Oryza sativa
  unsure (1)..(440): unsure at all n locations
agcttaattaatctgtcattagtaaatatttatgtctctatttgttaggcttataagccaacttataagccgaaaagtctaagcctaaacaaacaagcagcttatttgttcggcttttttgaagccataagccactctaacactattaagccaaaaactaggttggagaagattttttggnttagtgacgtgatgtatgactccaccactaaacttaagacattaaatccaccggcttataaatcatataagccaataagctgacttaaaagtctaagccaataagcctaatcctaaacaaagagggccttaatgtagtaccacattgtcagatcatagactaattatgcttanaacaatcgtctcgcaatttacatggaatctgcgtaattagtattttgtttctataataatactccatacatatgctaacattcgat

SEQ ID NO: 22858 - DNA, 456 bp, Oryza sativa
  unsure (1)..(456): unsure at all n locations
agcttgcaagtccacgagatcaccaattgcagacattattggcctagcgaggttacagccaaacaaccacaagcttctcaaattcttgaagttactaatggatgaaggctntgtgctagagaagtcaaactcagatagtatcaagcatgtcaagttcttgtgggcccctatccatgacaacaattggacctgaatctcctaacaattccgaattaaggagttctagatggcatanagaccagatcaaaccaaacgacgtgagaaaatccttagaaattaatttcccttcaagacccaactccttcagcatattgaaattgctagaagaaattcgtttagcataggaaaagttggtcccctctagtctcaatgtctccaaagaggttggaacttttggcaaatgccctaacagattcatattanaggacaaatcgaggattcttagaattttcagtt

SEQ ID NO: 22859 - DNA, 400 bp, Oryza sativa
  unsure (1)..(400): unsure at all n locations
cgagcagcaacnggacagagcaaacaacaaatgctatatatgacacgatctattctacctcttcctcatgagccgagcatcatacaaacagaccattagttgacggtaaccaccacaacaggcacactaatcaccccatcaacaatcacgctaatgagcactccctcgttggggtntntccaccaccggagcgacgattccacgaattaaagttgaaaacgaagaatgtgaagggggcataagacaaaaaggactggaaagactagaacaagagtggcaacgatgctttcgccataatatcattcacaacactggagatgggatcaccacagcctgatacagaaattaatggtgcgcaaaagccagcaataatggacatacataatagagcacgcatcat

SEQ ID NO: 22860 - DNA, 485 bp, Oryza sativa
  unsure (1)..(485): unsure at all n locations
agcttattctcctatangtttaacaagctgagcctagtatagccaacttgttaattgttatccacccctagtagttgtgtccccatgccaatgactcaagatataaacaatgactgaatagaaactagggatggtttagcagttattttccaccattaggagtaaatggcatgagctgacattacgcctgctggtcagcgatacagagaaaattaatatagaatcgcgaatcaacttgattcagcttgctggtggggaggatttgttggggctcaagatgactagagggaagggaagctgttcagtgttcacctgtcacgcggaccaatgctcactgaaacaattgaatcaataaaattaggaaagttatgtggaaacgaacttggaataagaacaatngtttcgataaaactagcagggtggcccgcgcaattgcgcggctagcacccannacaaatcatttttttttaagtatgaatttactt

SEQ ID NO: 22861 - DNA, 487 bp, Oryza sativa
  unsure (1)..(487): unsure at all n locations
agctngtntagatntatcatagtaagttgttatattttaagacaactgagtatagaatatctatgattcanaacttatatttctatgttacaactaanaaagtgtaaccaatgtgctactagcagtgaaaaaatgactttatcaattattttcaaaatatgccgttggagcagatattttctaaactgtctttcaagacatatactgattgataattgattgattcgcttaagttaaatttttttaaaaaaatgtgcgcagcatccttatataatgcagaactttntgtgtagattcaagattttttcatgtattaattnttttaaaatataatttgttttatttgataatagaatatttctgtgattgattntcttttatgaaaatcatctttcatgtgataaaagaaatttttntgtcgcgtctatcnntttaataagtaattngtctttcagctacataanannagtctttaaaaacatggaaa

SEQ ID NO: 22862 - DNA, 487 bp, Oryza sativa
  unsure (1)..(487): unsure at all n locations
cgaccggatctctaatcacctgagcatgcactggactagctgagttcgttctattgttgcgaatcgagctcgagccgagtctacagcgagccgagctcatgcagctcgcgagcctcgagctnttttgacagccctagagaagatgggccagatggcctggcagtcatcaagcacagagcagtaatatctgatggataatctaccatctgatctagacaacacacgacgaagaaattaaggactactttntccaaaaataggcatgtctaccanttatcagatcaggaaacaaaccgttcttatcagcaattaacaaagatgaagtttggtctccacgactaagagaaacctactatcacgtacagattaggtgaatgaatcccatgatcgattgcgacccaacaccgtntttaggtcgtatctgcgggttctttaacaagcgaggatggacactagagtaggaaatctcaaatctttatgtccatat

SEQ ID NO: 22863 - DNA, 473 bp, Oryza sativa
  unsure (1)..(473): unsure at all n locations
cttacttcttgcattgattttacacttggagtttcttccttgtaaggtntccgaaaatactcccttcagcagaccataacaagttttcagtaaaacttgactgagttgattcagtacaagatatgaaaataagaggcaaaaacaacagagtaacttttgtgtttcggtaacctaaatggctaaatttatgtgaaacacctcaaggaagtaagcactatgtttaatgttgatgactggatgcggtataaagcatctagacaattatggtagcatgtaaatgttgccattactctctatcagtagctaaaacacttcgtaaccatcaaaagcatgaccaagtcaaaaacatatgcattcattntatatcagtaaccacacatctttcgatgcaatngtggacaaggagcatcagatatgcctgttcaattaggtaaaggctgtgcccttcgcatatgtngcangggaagcacaca

SEQ ID NO: 22864 - DNA, 487 bp, Oryza sativa
  unsure (1)..(487): unsure at all n locations
gcttaatacaaaagtgttaaaaaatcttattgttctatttttttaaagaaaatagctaatacttaattaatcacggactaatagaccatctcgttttccgtgcacaagacatgggttcccaactcatagaaaagaacacactctaagagcacccgcaatggtaaagtaaggtgctatctataaacatgtcatctcagcaatagactcgattaatagtaaaccaccttaatagtatgtctacattggtatctataattctctcatgccattgcctcgttttctctatagactatctctaagttagtagatagctttgctctctctcttcatttaataccttccaagtaggaaaatatgctgacatggatctcttgtagagagcctatagataaccattgtgggtgccctaagcactgaatgcagtgtngaatattagcgtatgactagttaactattagcttaannataactaaaaataaattaatat

SEQ ID NO: 22865 - DNA, 483 bp, Oryza sativa
  unsure (1)..(483): unsure at all n locations
gcttgttattaccgtttggagaactgaccacatatatgtgataccttcagggtatggcacatccttgccattgttattgcttttacttcattgatttatttaaatagatattacattggactctgtattatattttgggtatgaatggtttccctaataagccaggcaccataattttgctggtgtagcttgcattgtcctatttgtataacaagcctgtttttgatatggtaatggatgctagctctgctatttattttgtatgtagatacgatcgagtacgaggagtggagattggcaacaaagacattaagcttgagtacttggaggaggcattcacaacttcgaactggatagtgcgcatatacaaggtcaaacccncgaagaatatgtcttgaggagaggaatcatctcttgngtagtatctggtgctattaccttgaggtacattgtgtcaagtcaaaacgtatttggagttctaca

SEQ ID NO: 22866 - DNA, 461 bp, Oryza sativa
  unsure (1)..(461): unsure at all n locations
agctggccgngatctttctaccttcttgatagcaactatattatgacacaactacaatcattttcaataagggaagcagtgtccactgaaggacgtgagagatgctttccatgtatgcaagcatatatttgattctaaggcatatcactacagtgatctatcgactggccacgaatattggaaagcagaccgcccacagtatcatgttgatacccaccctgacagtatctctgatctatctaccttcgtgatacccagcaatatctctggtaatggtgctctgactaaccaaaaggataatctggattttggaaatcgacaatggatggtgtcttcaccgtcaaatccttntataaagctctgaaatggcaatgagtcccttacacttcttaaagacnntttgaagtgaaaattcctctaanaatcgaagttntaccaggttcctcttaaggagtagtatc

SEQ ID NO: 22867 - DNA, 405 bp, Oryza sativa
  unsure (1)..(405): unsure at all n locations
agcttctaaaatatcttttaaccgcctaatgaagcttcatctactatatgcaggctagaagaaaaataattgtgtaaaatctattcatgaaaccagaattcagggtagttcatttgccatatcacactaaaacaagcttttaataagaagcaatatgccctgaacttcactgtccatcttactatcttacgaacactggctaggaatttgatggtgaaaaatgagcagcagacgaagttaactatgcatattaagagattaatgatggatctggatgattgccgaatcagagaaacttgagatattcaaacttcagattgatggagtatcagctgtctaaagttctgaaacaaaagaaaatgaattaataaatcanactctaaagtgctatgcttcaccaacaaa

SEQ ID NO: 22868 - DNA, 333 bp, Oryza sativa
  unsure (1)..(333): unsure at all n locations
gcagcacncaaccgcggccgaggctttctttttctcttcgttctgcggcggggctcgctcgcacacgccacagccacacggatgcgacacaagaatccgacaaatccacgcctcggcgaggtgtgcgcgcgcggcgtctccggggccgccgagctgggcggaatggctggacatccatccagagaaccggttatcctatttctaaaaatatgctgggcggcggtaccgggagccgaagacgaagagaacgggcttgagaacggacgcattcgcgcgcagagccaaatgatgaaactgggacatatcaacgcaaacctcaactgacaaagaaaa

SEQ ID NO: 22869 - DNA, 508 bp, Oryza sativa
  unsure (1)..(508): unsure at all n locations
ggatccttaagtcacctgcggcatgcaagctnttcgccgattagtgcaatgggttccgtcttctgcatcgacgacctcgtcttcccacccgggcagacgtttcggttcggcagcctcgacttcgtcaccaacaacttcggcaagatttctctccttgactcggaatcagaccagtcgggagagaatcgacttccagtcccgtttggattccaaaccggctgaaagttacttcaagaccatctcgatcgagtcggcttcaaaccactcggccgagatcgcattttctccaacgacgccagatcaagatgatggggcttacccaccgatcctgatgaagctccccgacgatctagcggccgtcttcaccacgacagcgtcttcatcccgtaggcctaggcggaagtcggcttaacaccgatttcgctagcttagggaagtcggcgtatcttcaacactcgcacggttcgaggatcagtgatgactacacagcctccaccgtcactacgtc

SEQ ID NO: 22870 - DNA, 465 bp, Oryza sativa
  unsure (1)..(465): unsure at all n locations
agctnggacagagcccgtgcagccgccgagtcgtgtgtgacgctgccgtttcctccgcccgattcgctcaattctctcgactgtttctaanattagttgaggggatttgtttcccttatcctcctctaactcttcccccaaaaatcctattntatccctttgaattcggcgcgaatttggatcgttttgagtttatctctccaccaaaccctatgttttcccggcgcgattccctgcgttccacgcccgatctctctcccgtggctataaatagagtcccctccctctcctcttttgtttgccaccctcgcccgagctcgccgtcggccgtagcgccctagccgcgtctgtcctagcgccgtcgtagccgccgatgttcaagccgcgccgcctttgcagccgccttcttcggtcgccgtcgccaccatctggttcgcgagaatgagctgcacaccgtccaccact

SEQ ID NO: 22871 - DNA, 452 bp, Oryza sativa
  unsure (1)..(452): unsure at all n locations
agctntaacaaaatgatagagacatagctgtcgctcttatctgccatagttcccgctaatgactcagggaggatttcggggcaaccggaaccttccgttgaaaatgttaaggtgatcaccacgaggggaggtaactccactcangatccgccatatcctaactctgcaggaacaatgagcancgcaccaggaagcgtcgcctaacgacactggtgagatagaggaggcagctcagcctgaacgaattgtgccgcaggagtattgcgatgcaaggctgttgtcgttcccccagagacacaagaaggccgtagtggacgagcagtttgctcgttttcttgaggtgatccanaagatccacatacacgtgccactgctggatgccatgcaagtacccacctatgcacggtatctcatggataacctcaacaacaagacgccactacccacaactg

SEQ ID NO: 22872 - DNA, 489 bp, Oryza sativa
  unsure (1)..(489): unsure at all n locations
agcttaacaagggtacaggttgaccaaaaccatctatccggcgcaatacctaaatcatttgccaacttaagaagtgtgaagcatctgtaaggattgntcatttccattntgttcctgctttgttcttcaatctgaattcagtgctagactcaatttcccctttcatttcagtcacatgaataaaattcttaagtgggcaaatcccgtccgaattgtccagactgaatacacttttgcacctgtaagtggaagcctattgngttgcattttttctaatgcatgttgtatcaggtaacatggaattaatcttattatatactctaactaaaactntgcagcccttgtgataacaacaatttgtctgggcctcttcctccagaactagctgcggcaaaaagcttganaatactgtatgtatccattgtcaatttgtcaaactcaattgaaatagctngctatgatagcatacacctgtntcttatattcgta

SEQ ID NO: 22873 - DNA, 476 bp, Oryza sativa
  unsure (1)..(476): unsure at all n locations
agcttggtgtggncatgaaggctgatgataatgatcttatgggcaacgctctcatgaagcgngttatgcaaacttggctgccagccagtaatgcacttcttgagatgatgatataccaccttccatctccttcgaaggcccagaagtaccgtgtggagaatctgtacgagggtcctctcatgagtctatgcaactgctatcaggaactgtgatccggaaggtcctctcatgctgtatgtttccaagatgattccagcatcagacaaaggtagattctttgcctttggccgtgtcttctctgggagggttgcaactggcatgaaggtgcgtattatgggtcccaactatgtccctggccagaagaaagatctgtatgtgaagagtgtccagcgtactgttatctggatgggaaagatacaagagtctgttgaggatgttccttgtggtaacactgtcgctatggtcggtctggatca

SEQ ID NO: 22874 - DNA, 485 bp, Oryza sativa
  unsure (1)..(485): unsure at all n locations
agcttganatggaaaggaacagaggattataggatattctatacgtccatatcatcatccatcatatatctctcgtactctttccttccaattctgattaatcaacatatattctccatcaaatcaaaggctagaaatccgattccgctgatcatgtccgtttacaaacacaattaaaattcctcctcataacatggaataattaacacaccaacatctcttctctctatatatacaaacgacgccgattagcacacacacgctctttaatttcatgtcatatatggcggaggatcttgaacaaccatcaagcgaccgtcgcggcggcggccgcatgccggcagcggcagcggcggcggcgggtgatcgtcatatagaaccatgggagcgccgccgcagcaagaggccgatttgcgccgacgtgtgcgcctgcttcttcacgttgatcggcatcgccgccagcgtctaggcttcgtcttggctac

SEQ ID NO: 22875 - DNA, 451 bp, Oryza sativa
  unsure (1)..(451): unsure at all n locations
gcttacatgtggcattaaaaaatgctctcaagtttacatgtggcgctntaataaattagataaaatgctaagaaaaaacaaaacatatcacttgattttcacttaaaatggtgggtctaatattatgaactattatgttatattcgcagcaagccggcatctcgtctactccgagcaccaactgcnaacggcctatcggccgccgctgccgagcacctgctgctccaccaccacgagctcgacaacagagaacttggcggtgagcctcaccttcgcgtcccggatgatgcgcaccatgtcaacgatgtcggcccccggtcacctcgcctctgctccccgtcgctgccaccgggtagaagcagttgctgtagaaccccatcgccgccacgccgtccgccttgagaatcangtggcgcgtgttggcgaagaagcagacgcgcatgatgcactc

SEQ ID NO: 22876 - DNA, 434 bp, Oryza sativa
  unsure (1)..(434): unsure at all n locations
tcgaaagtacgcgtgaaggtcatcatgatgttactgcatcatgttgttgatgttggcgaactgagcattaacagaatggtgccattcttgtgtttgagctatgtgtaccgtgagggtgtactggatctcccctngttgcactcaacgtgtccaattgcctagtgatttcacccaagtcccaacgagaggaacttgagcaccattcacttggagatggaggcacaccacttgatctagagggttggttgtccccccagtggatgtcatgatgcgcatgccaccggtcctcactggcgcttgaccaggttgagactccgatgctatggcgtggagcttggatccatccaggtgcatccctagttggtgcccaacctgcctcatacatttgcacgggtgtcgaggatgatgaactttctcgttcgttccttgcatgt

SEQ ID NO: 22877 - DNA, 412 bp, Oryza sativa
  unsure (1)..(412): unsure at all n locations
ctccagcccgagtgaaggagggacaataaatggacttcacaagaggaataaagccagcttaaaagaagggagtattagccgatgacttaaggtgaacttttccactttcagcaccaaaaggaaaaggggttttcatacttttccaattaattaatcactgaaatgatccttgaattggtaaaaatacttccaatgctcaaataatttcaagaaaaatcctgaaaatacttggacaccctaagtacttaacaagattataataagaccatttaatgattcaattaatatgtggataattactgaaatgttctttgtatgaataatattangaattgagctccgaaaaatccgagaaattccagagagtcaattaacctggaaattaataaaataaatccatcatgcttatatt

SEQ ID NO: 22878 - DNA, 424 bp, Oryza sativa
  unsure (1)..(424): unsure at all n locations
agcttnctgtcactaacacccctgatatatatatatacatttattgtcatganacgagaatcagactgcggaataaaagaatagctgtctatagacaggtatctgaagattatataattgagctagtaaatgctgagatgacatatgtttaacttcatgtggtatttcaggtgctgaagaacaccaccaacagaagagggccatacagcagtgccggtggatacagctaataaccgcaatcttgtagttggaatctggagttcgattaatcttggtagcttggctagctccatttggcagagtcacaactaagactcaaagggaaggctcttccttttgattgatctgaatttcttagataaaattaattactacattaaatacaaccattcttggctatgcacctgaataagtactctgtagt

SEQ ID NO: 22879 - DNA, 519 bp, Oryza sativa
  unsure (1)..(519): unsure at all n locations
atctctaagtcacctgcggcatgcaagctttccccagccccttttcatcaatggactcctgacgtcttctaaagagtgtggttcgttcgacaaattcctacctctatatctatctctgaggagattgggttttgcaaaactccatagatatgcagaagagaaatgctatccccactccgaccaagacagaacttttaccaaaagtttattgtatcttttgttcaaataaacaataaggtgaagcaaggtcatgaacaacgaatctctttatgataaacagatccagtttgcaagctcgttattacgggtagttcctacaaagaatcggactaatgacgtatacaatgcttgaattatcgacgtagatgctacatagtgggttctcatccttcagagactacgagtgtaataggagcatccgttgacaaaaggatcaccctaagatgatcatctcatggctatggggaacgaatcanatcagatggttctatttctcaacctttctgacttgctccctac

SEQ ID NO: 22880 - DNA, 500 bp, Oryza sativa
  unsure (1)..(500): unsure at all n locations
ctgcagcatgcaagcttcctcaataccgaggaatcttcaataatgctattattcctaatcccgacagagtccaactgcataaacatattgatgtaacaattccacaggtacataatgttctgaaagtatcagttccaaaaaaagccttggtgcagttgtgatatatcaaacagttaaccatatcagtctatgttggccacgtatgtcttcctaagcttgagctaatgctgttaacctttcactggagctagactttgagacataacaataaacaatgacttacatgtaagacaaaagtctccaaggctggggaagcgtcaagaaaaacaacaagagacaacaaatcatagcacgggggtgattcctttctcggtccaataaacaccatctccaagtacctgaggtagagatatntattatgcaccatgggtgcgttgacattctacacaacatacatacagaataaaaattagtatcatatgaaggaatgacaatgatat

SEQ ID NO: 22881 - DNA, 475 bp, Oryza sativa
  unsure (1)..(475): unsure at all n locations
gctaagatgcatcataagaaattntttcctattgctaacttgcacaatgtataaggtgtgtctcaagaatatatttattacttaagcttacctttttagcacattgtggttagcagtgtacagctagattgggaatgtcgcaaagcacgcctgctttacaggcacagactctgaccgagaccgagcctgaggtagtatgtacagtactctgagctccaaacagctaaacatctttgccatcactcgcccgaatcagattctctcgttgcgattgcacactgcttgattagattaccagaccagatcattatgctattattgcgtgtaccgcttgattgggatgtacaaagcgaacctgatttcaggcacacatctgaccaaactgtcatatganacaaatctgatgttgaagactctgaacatgagccattctgggtaaaatangtcatctgtcgacaatgttgagctgttactc

SEQ ID NO: 22882 - DNA, 479 bp, Oryza sativa
  unsure (1)..(479): unsure at all n locations
agcttcaccgtttgtcaccatttataatgcacaccttctttanaaagntgaggaagagcggtataaaaggagtttaaggtattgggcacttgatcacgcacactttggcctaaacaaaaaaaatgcacaagtccctaaaagaacgtgactagccacacatgaaaatatgggctacagggtgaaacgtcatggaaattcccgatcgaccgagcgtcatttccgtataatgggtaccgtttctgaccgtacacgtttttggctatttttaaattttggtttttctaatttctttctgcatcatattaatgttgacactggagtagttaaatgataaatatggtcaattattggccattcgagcatcatttccgaagagatgctatcgattccaaatcgttgcaactgtntncctatagacatattatgcctatggcccaaatatgcccaccgacacccttaaaatatgacgtgtataacac

SEQ ID NO: 22883 - DNA, 414 bp, Oryza sativa
  unsure (1)..(414): unsure at all n locations
agctntgaatatgaaatcaactttagaatccatatgttggttgaatataacgcgngtacacttgggagagatgtcaccataaagaanagcatggtttcaattaacatggagaagaataaggaacatcaaaggaaattactcgtctgtctagagccacctttggctatggaaatattactgctgttcgaacattgcgtttattaaagaccttggcaggcggaggatgatcagttgaatgtattccgnttcccccctcttgttgctcccatcaaagtgcactgtccttccacttgtcaagatcgaaaaatttgaaaggtgttgccaagaataatttcgaaagcattgacagcagcaaggatgtctcacataattgatatgacacgtacactattgaactatgtgaagcatatagca

SEQ ID NO: 22884 - DNA, 440 bp, Oryza sativa
  unsure (1)..(440): unsure at all n locations
agcttggctttctcttcatgcacaagntgccgattgtcttgtatagtggcttcaatatcattnttctctcgccgatcggctatcctctgcttaacattttccagcttgaactgatgttgctcaaggtacacagctggagagatggtattcgccaaatcatctggaactagggcttgaatctcacaaactggcccggattgaaccacagtcatccaccanagtatctaatgatgactctagtcgatgagatatatcttcaagagttcttttgacatcttcatctagaggggctagagtcttgcttgttgnttcctcttccgcctcttcgctaaagtagtccttgatgtcaaaggagaatagatcggctaagacctgcaagaaagacaattgaagacagttgatgatcaaacatattatataaccgatctgagatctatgac

SEQ ID NO: 22885 - DNA, 452 bp, Oryza sativa
  unsure (1)..(452): unsure at all n locations
atccttaagtcgactgngcagcaactaattaatactcgctccgtttctaaagttttggcgtnactttgaacgatcattctgcttaattaaattttttatataaatatataaggtataaatcatgctcaaaatacttttagacataatataatttaaaagataaattataattagataactttttaataaaataacctctaacgtgcgataaaagataacggtgttaccttttataaaacggacgagggagtaacacaattttgcacaaccaatatcggacgataacgagtgttgtgctaccagctgacgtcatgagaacgacaaattaaaattcgattaccgtgagctatggccctgtgtgctaacacacatgttcaatactaagggccggatacaacgactgttntggatatgctcgcacgcattcatgaaatatgctgctcatctttaca

SEQ ID NO: 22886 - DNA, 423 bp, Oryza sativa
  unsure (1)..(423): unsure at all n locations
ataataccaaatgcatatgctatgatcattgcagaagttntttccacttcaagagataaactgctttgcttcgcttncgggtagaaacatggtctgcctcaacactgatgcttgcgaaacaacggacaatcctaggatgctaatgtccatccagaaatccagaagcatgccactagaaccacatgacagatgccatcctaaccaaatgtcggtacgcctttagcactgatcagccacacccctacatcaaacagcactgaaaatatacagtgtattctcaacattggcgacaagcggcacacagaatcatcactcatcaaccagaccccaccaacattcacagatacgcgtacgaaacagcatcccctacgtgtgtgtgtgtgtgtggaagaacangacgacgatcacgcccaaattataaca

SEQ ID NO: 22887 - DNA, 404 bp, Oryza sativa
  unsure (1)..(404): unsure at all n locations
caccgtggcgtcctcgatcagcctgaggaggaagccagcaagccagcacactggtgaagtccacatcaagaataaaatgaatgtaaatgaatctaaataggaatgggcaaaattataccttcattacgtgctcgngttggcatcctcgaacgctggcgagaatgcagcgcttgaattgtgaaatggtgatgaggctgactgaacgagaagcagtggtgcctggtataaccgtgtctaagtgatggtggcaagagagaggagtttgtacaggatactgtgcgacgtcgcggacacgctaggacaaactgggatgtacatgggcataccacccatcttgtaagctgcacataggagccgcagcccaagcttaggcaactcatcgcacgaagcctacgctatgcatg

SEQ ID NO: 22888 - DNA, 422 bp, Oryza sativa
  unsure (1)..(422): unsure at all n locations
agctttcatagcccctgcttatataagcccgtactccgtggtagcgtgtatccgcaatcccttgctcattcgatccatcaacacaggcattccaagcagaggcgctagtagagctcgtcgatcggcaagcaagcggcgaggcggatgacttctgtttcgtgcggcggcggcagcgaagagatggcttcctgcggtgtgcgtgcagtgcgggacgcacagcaacccgtgcaggtgcaaggtgctcggcccgacgctgngtttcgtggcgttcgtggtggccggcgtcgtggagtggccgctcggcgcgttcgtgtacctgttccgccaccgcaagggtcgccgcattatggggcacccggccaacgttgtctacccgctgatcaccagcgcgatccccatctaatcgacccggcgtccgctga

SEQ ID NO: 22889 - DNA, 461 bp, Oryza sativa
  unsure (1)..(461): unsure at all n locations
agctntanaatgtagcagcaccttctgcaagcagaatacttgataaggctggaactttntacatgttaaactagtaagaaattatcctttacagcatttcaatggagggcgtggtctggaaagatgagatgccctcggataccgccctgacaaaaattactttggcagacgttggacctataaaattgtggtattccttcagaacatgactgtaactctgtaagtaataagctcagctgctcaggcaacaacatgcaaagggtcagtcctcgaacctggttatcttgaatcagagntgttcttaagtgcattgaacgtttccttgtcanaattcccttgttctatggccagttgcaacccctgaaaagcagtggcacaaggccattatcagcaccagcgccaaaaatatttaaatccagacttagttggtaggttcaaataaggtaatgaaatcaaacact

SEQ ID NO: 22890 - DNA, 382 bp, Oryza sativa
gcgatcgagagtagcagtacgtctcatgaacaagatgaacttgcacaactgcttcggtttcgcgttgatccatcgcttcctggaaactgtaatcgtgacagcagtaaataaacaagaacaagaatcgcatcgacatcctgagaatacattaattctttctgctcctctgcaatcacgagataaaaccgatcgatcgatcgagatcccaagaacgtaacgggttggcatcccaagaacaacatccatggcgtctcctccagacctcctcctagattaattggtgtggtactattagaaattgtgtgacggccagctcgaggctcgatcgatcgctcgctcgcgtgctgctaatcattgcatagttcatgggattgctgatctg

SEQ ID NO: 22891 - DNA, 445 bp, Oryza sativa
  unsure (1)..(445): unsure at all n locations
agcttatagagcactttctgccatctcctgtcttattatacaaggggacaaacctaaacaaatgttttcttaatgctatagcattcaacagccaatggttgtgtaaattctacttacagatcgaatgtagcgtgctctttgtgagttctactttgacattttagttctgcctgttaatcatttgccttattcttctttatgacgaattatcctttttggttggagaacaatgttcttcaccctgcaattattaattggtagctacaaaatgattgctagtataagtgaatagaaagatagatctgtcttcaacattngttcgtacgtcttacattggttgttcactgcacatatattgtttctttaatgaactgataatttcaagtttagggaatatgtagcagaattcgagtttgacaatgttcttcttgctgatcttgacaag

SEQ ID NO: 22892 - DNA, 482 bp, Oryza sativa
  unsure (1)..(482): unsure at all n locations
agcttatcgtgactcaagcgagctaacgagccacttgctntcgtccacccctacctggaactaagtccaatgttgtagcatgtatatgtatatgttaagtgtatgattagtatagaagtacaccccatttgtatcgtagtttcctaattttattttctatgacacattattgtagaggtgaattcctcatgtccactaccttatcaattattatcttaacccatgtntacactatggtaaattaattattggttgataaatgagacataaaccatatctttataccgccgccttccttgtcggatataaagacgatatccttgggaatatcatgggtgaaatgcaacagcggtatccgtgcgctttgcaaattatctgtgaatgtaagaaataccaacagacagcagatccggtggcaggatatggttggggacagtatgagggcagaatgctaccgcttaccaaagctaggttcatatttg

SEQ ID NO: 22893 - DNA, 463 bp, Oryza sativa
  unsure (1)..(463): unsure at all n locations
agcttatttatgctgaaaactagtgtgcactatatgttcatattgatctacagntagcagctccaaattagagagtgaagcacatttactcacaggagtcaaaagcacatataaactttacttgtagtgaatcagaaacataaattgtcaaaatgaatattgaaaataagataattacttactattaaagatgtgttttccctgggcgcattcatttcaaagaatgtgttccttatcataacctcctgaccagcacattgtgcagcagccttcacttcttcttcagaaagaccctattaaacaagtggtatgctcaattatctacaggactatgaaacttgnggaatgaatgcatcagtgcagctaaaagttatggaccagtagtgtataagtgcaatgatgaatganggtacagataaacacaaggcaagaagtgtattggccagtgtactgtctgtacccc

SEQ ID NO: 22894 - DNA, 506 bp, Oryza sativa
  unsure (1)..(506): unsure at all n locations
gatcctctgagtcacctgangctgcagcttattctttttcaagacgnatgtacgtactgactacgtatggnttttttctttttctagcctaattgatatataggtctcccgtatacgtacacagagtaataagttattagtttttaaaataaaatacatctaatataatggtctaaactattggattcatcaatttaagtaaaacgacgggatatttgcttaaatttatagaataatagattttatctttaaatataagaaaactctattttaaagataatctatttttttaatggtactacgcacgtatgttttttttctttgttggttttatagaaagtctgtgcatagttttttttctttcgataaacagtaggtaatagattctctgtgtgttgtcttatgtatgtacgtacatatagagtactcggtgttttggtttctcttttcgggaatagtaacgtattaagttctttttaaataaaatacatctaatctaatctaat

SEQ ID NO: 22895 - DNA, 462 bp, Oryza sativa
  unsure (1)..(462): unsure at all n locations
agcttataaagacgactaagggatatatgaatttattttatgaattccggagaagaaagacactctatttctccatagacgatcaaggcacagtttggtgcggtccacgcatctgtgtaccggtcaagatagagttaagagatctcatcatataggaagctcatgagtccgcctactncatcctcacgaagtacgaagatgtacctagacatcaaggcatacttctggtgtgctggaatgaagcgagatgtcgcacaatacgtagccttgtgtgacatttgccaaagagtcaaggcagagcatcagaggccagctggtctgctgcaacctctaccgattcccgagtggaaatgggaagagatcggaattgattcatcacctggttgccaataacctctagcgcgtacgactccatctgggtaatcgtggatcgactcacgatatcagctcatttcgtaccag

SEQ ID NO: 22896 - DNA, 417 bp, Oryza sativa
agcttttatggcgacttgcgttctcaggtatatttcttacatctttatgacactctaatcttgtttatgtaaatcgtcgagttatcatatatgctatataatctagattgacattactatctggtctagtcgactagcctccatcatcgagatcagccgatagaattagattacttctcgcgtagattatatagtatatccaccatctcgaaaaggctttcattggtttgttgatcacatcttatgtttctctctatgcttaatgctgcatcagttaagtttgatctattaagtaatatctagaaccataatatctaacttgcttcatgactgctaacagagatagcatctgagattcagcctatcttacccggtgtagctatcttgatccttcactatatttacttgatatgctaa

SEQ ID NO: 22897 - DNA, 438 bp, Oryza sativa
atgcagcttgcacatcttcgtgccagcgagtccgccgctgttgtcgtctcttcgcaacgagtccgccgctgacgccgtcacgtcacatagagatcgccgcggtcaccgtcgcgtcgcatcgagtccgctgctgccgccagtgcatcgcatcgagtcgccggggcgcgtcggttgatgaagtcgtgcgcagcatcgcggcgagcttccgacgaatcgtcgtcggaaccaatcgcaagctcccgatgaatggccgttgcaaccatcggcgggcttaccctctatccctctcttctcatagccgcatacgcgtgccggcgtagcaataagttccgcgcggccaccgtcacatcgagcttgcgacaaatcaccggcgcaaccatcggcgcagtcgtcgtcgccgatgaatcgacgccgcaaccatcatcaagctcccgacgc

SEQ ID NO: 22898 - DNA, 312 bp, Oryza sativa
agaaaagaaaggatataatgggggggaaaaaaaaataaagagatgggtagggaagggaagaggaagataagggaaagggaaagtgacgagtttggccccaaagggggggaaaggaaggggagggaagaagaaagaaaaaggaaagggtcttcgaaaatagaaggaaagagacagggaaaaatgaaggaaaaaggagaaaagaaatataaaaaaagaatggaaagtgagaggaaggggaaaggaagcataggaaacataaagagatggaaagcaaacgagaagaaaagaaaaggattggaagggaaaggagga

SEQ ID NO: 22899 - DNA, 432 bp, Oryza sativa
  unsure (1)..(432): unsure at all n locations
gcttccatcgaaatacatatatgttgatcacatttgtttatccccatgttggaagaagctgctaactgatctggcgatcttaattagcttcttctgccctctcttaagtggcagcaggctcggcaagcagaatccatttatacgaaagcagagtcatttggttggagtcaagttgcacgaaaagttgaagttgtatagagatggttgtttccttgtgtcgaggggcttttttttaaatgtgattagaattccttgttctagttggattcgtggttatgagcaaccatatttttggatataagtatatgaggggttcataatagcaagtacgagacttttagtagcgaataatcggtggttacttcgaggcttcagttatagttcgcgagtcgagagaantattctttagatgccatttgtaaacgcatcttg

SEQ ID NO: 22900 - DNA, 444 bp, Oryza sativa
  unsure (1)..(444): unsure at all n locations
caagctttctagatctcctcgagatcaatagatntcatatattttctctcttcattcgggaccattcacaaattntaaaaattcatttatccaaatagatctgagaacttataacatgttttcatacgtccaaacaacgtcaaatgaaaaggtcatcaaactataaatttgttgatctcgtcaagctccttacatgatataaatctcatcttcatccaacttcatataaaaataaaagataaaaaccacacgtatatgagtgacaaaatcatatatactggcttttaattataaaccggcacatatatatacaatgctcatatatgacgggtcaaaatgaaaacccgcacctataatgctaagctcattggtacctttttttttaattaactggcacatatatgatgtctacaggtgctgatctgatgggacaactgttacatg

SEQ ID NO: 22901 - DNA, 462 bp, Oryza sativa
  unsure (1)..(462): unsure at all n locations
tgcacgaaacgcaccgtctagcaatttgtttatcgtgccactattacccacaagtatatacacttctttcaatggattcgaacaggacctaaatcggcatttctgttattgaatatgtgataaatatggcaaggttcattagttgactagtctaatgaaaccatgcctactntancatcctctgttggactcacataaaccaaattaccacatgacagtttcagcgcacctcaattagagctgcttaggtgacaggcatcataagtatgccatggtattttgtcgttttcaatcttacgtgttaaggaattcatacatctagccaatagcctaaccctgtaatgacccttccagaattgcatggctcgatctccccacatattcgacaagaccgacatagacaacaacagacaatcctcatctgccttctaagtgtatgtggaatcagctgcccactcactc

SEQ ID NO: 22902 - DNA, 484 bp, Oryza sativa
  unsure (1)..(484): unsure at all n locations
gatccttnagtcacctgcngcatgcaagcttcagctgcaggtaacttacttatgttcttgttcatatctganatacatattaatgttaaggtgttcattacatatgcccttccaaattcaaaattctgttatataattggatattagaacatctagaaattgcaagacattgtagttcatgactgaattctgcatttatgtcatagtatacctaattgaatccttagcttgctcactgctcttcatgtgcttaaaatctacataaagttatcatgaacatgaagttaaactgttaaagcaactaataaaaaaagtgggttttagaactgatcatgtgcagcttactgctctgcttgcatggagaatgtacggtctatntatttcttgataaaggataactacattgaacatggggttaaagctgttcattaaaatgtagttttagcaaataattatcccttctgtttgcgttggtgagtgttga

SEQ ID NO: 22903 - DNA, 458 bp, Oryza sativa
  unsure (1)..(458): unsure at all n locations
agctnttccatacaagctgtcaagttgttcattattatctatcttaatcctaagtcatttntctaatattaaaacgttgacgcttgcataatactttatgtatttctctgaaataatgcaacctgtgggcatttctaccacccaagatgtgttgcgcaattgcttcatcctaacagccgaaccgacgttccgaaatggagaaaaagattatggctgggttttcatatacatgccctgtacattggtgccttcattgtaaaggtctaaaagacaggactcaagaaccactgctatttgctgtttgcagacgctgcccaagatcgtatcatatagaatgcttgccaaggttttaatttgtacattgttagntccctgtctgagatcattgcatatgacantccttggacttctcactcctgnaaatatattacagggaaatgtcctttgaaatattaaca

SEQ ID NO: 22904 - DNA, 343 bp, Oryza sativa
  unsure (1)..(343): unsure at all n locations
tagacttgtgggctgaagctatgagcttgctgtacaaaaaaatanaagtatgaatatcctatctatttagaatgaaaatatatcagaagtgaagagaaggaaaaaataatagaagggaaaaaaagaccccgcgctgttgctgctgnggttgtgttattttcgtgctatttatgagttggtacgctcgtgactaggctcgcgtctctaaagggttttgcctaggaccaacacaataccatcgttgaatgattattcaacttgctttgattaatgcgagtctagctgtaccttgatattacttgcagccacctatagcttcacatatttttatctactatatcac

SEQ ID NO: 22905 - DNA, 424 bp, Oryza sativa
accttaagcgactgagctgcagctttaccgattgagattgctaatctgttatctgcagctggcaaatatactgatgatgcaacaggtatcccaatgatacatctcgtaatgttacttatgactggcgatcatgaatgaaaatatgttcaactgatattgctatgtcctacccgaaactcagtagaagacacgttcaatacaaacccaaattctagtcatagatgctttattgcttcgagacacaagaacacatgtgccatggcatggagagcaaatattgactacgacacaccatatatcaaccaaatttcatgaacaagatcagaccatctcgatcgatcatgaccatacaaaggtatgaagacatcttgatacaccatgtctaaccaactcattcagtatattgtacactacaaagtggtgc

SEQ ID NO: 22906 - DNA, 358 bp, Oryza sativa
agcttccccgctcgaagatttctatacttcgacatatgtgcacgcgatactaagctatatgcctttgatccttactctcttcaaaagacaatacataggtggtttatatctgtggacggatgaacactatttcataaattattattttcgatgagcaccccaataggttgtaaattgccatcgtggccgcatttgcatacattgacccctatttttgtatacggctctcttagacagacccatgaaaataaattaatttttgcaagcgggcctcttaactcactcgcattcaaaatcgcccctctcatgttttattcttccctcctttctctctctccacgcactctactccgcatct

SEQ ID NO: 22907 - DNA, 481 bp, Oryza sativa
  unsure (1)..(481): unsure at all n locations
agcttgtgttcggtgacgacatcangtgggcgcatgtgccgtcgatctgtcacatggcacatcttctcgaggcttgtcggagcaagtttccggggctcaaggctgttcttgtcaagtacaaagacaaagagggtgacctggtgacaatcaccaatcatgatgagctcaaatgggctgaggatttggccaccccagagctcgcttatgctctatgtcaccgaggccaatccggagcatgaaccttatcttgatgacaccaacagcgggcctgtggagagaaacgtgaattccgacaatggaagtaccagaagcaatatgcaggatgaggataggagcacggtgacttgcattgacgactggattgtgcagtttgctctagctttcaagaaccatgtcggtgtcagctctgatgagtattcggacctccatgaggtcagcatgaagcttgacaccgaggctatcgacgacacaagtactactg

SEQ ID NO: 22908 - DNA, 436 bp, Oryza sativa
  unsure (1)..(436): unsure at all n locations
ggaagaaaatcgacaaggagacaacccgcgcttatgtcaacgccgctcgccgtcaccaatcctctgttcgaacccctcgcattgcaacctccattcttcggttacatgggctcccttctgnttgatcgccctgctggactgacgcatgtgcagaccacccgaagccctaacacgaaaggggccatatgttagtgatccacatcagagagaagtaagtcagagaatttttacatagaactgacacatgtgcagcccacccgaggccctaacacgatatgggccatatgttagtgatccacatcagagagaagtaagtcagagaattcttacatagactgcatacgagaacgttgatgctgatatagtgtccaccgtgctcgacgtaagagaatatacttagatgctcgagggaccgtgctctaacaatacacactac

SEQ ID NO: 22909 - DNA, 468 bp, Oryza sativa
  unsure (1)..(468): unsure at all n locations
tttcttcatcctttacttagatgaattataaaggaaagaatcaattttatgcctctactctacggagtaaaaataaactttcacttaaccttcaaaattgaatcagaataacccaatatccaccctaaaaaaaaagaagaataacccaatatctaatacatggtgtttcagccttattccatctacaaggtcaggtaattcttaactgttactgcaagaacataatacaggaaaatctgttctatctccctcttgtttctcttcaatttgctgacatccaagcaattggtggtcttgttggtcatccattggaagttggaacaacattgctgttacggagcacttatgttccgatgcttctagtctgtcctgtggaactctatgatgagatcctctagaagattttgaaacttgagtcaacctttgggtgctntcttccttcattcttgattaatggctgggattcta

SEQ ID NO: 22910 - DNA, 434 bp, Oryza sativa
  unsure (1)..(434): unsure at all n locations
agctngctattgttggaactggcggaattggtaatttcactcttgctcagaacatatacaatgataagaaagtggaagggaacttctacaaacgtatatgggtttgtgtttcaaagagtaccttggaacgtctctattgagagaagttcttctgggtatgggtgtgcaatatggagcatatgatcactggtgagctgcaagtcaagcttatctcagccgntagtgagaagagttttctcctagtgctagatgatgcgtggcaatctgacgtgtggactatattactacggattccactgcatgctgcatcaacaggagtaattctagtaactactcgacttgatattgtcgctcaggaaattgtggcagatcacactcatcaagttgatttgatgtcagatgatgtangatgggagctactttggaagagtatg

SEQ ID NO: 22911 - DNA, 495 bp, Oryza sativa
  unsure (1)..(495): unsure at all n locations
agcttcctgcccccctttntctctnttgtgcctttgtgtgtggttcgcgaaatgaannattttggttatcacatcagacgtttaaccggatgtcggaaggagtttccggacgcgaatgaaaaaactaatttcataactcgtctggaaaccgcgagacgaattaattaagcctaattaatctgtattacacatgtgggttactgtagcacttatggctaatcatggactaattaggctcataagattcgtctcgcgatttccatgcaaactgtggaattagttgatcttttcgtccatatttaatgctccatgcatgtgtccaaatattcgatgtgatatttntgggaaaaaaaatttgggaactaaacaaggcctttgtttcgtattatgttgcattatgataaccttgtttagtgcaacagcttntggctatntggcaaatgacttttngtctaatctatngtgcanatgatgatattattatgtatgagaata

SEQ ID NO: 22912 - DNA, 470 bp, Oryza sativa
  unsure (1)..(470): unsure at all n locations
agctngngcctctggtgcaaagcactaccgttcttttacatgtctagagggtaaggcttattttgcggctcaggctggctataaacaaaagtacacggattggagatggatgaagtcaggggtcgatggacattctccgaggcaaatgaatgctacacgagctgcggcccggtantcnaaattcatgcacagggttggtgccctgctgctaggaggctcagtcctgcctgcctgtcccgggtgtcccggccgtaagaggattgggtcagtactcttgtttatggctaggatggggtgggaactatggcatcgtttccgtccgtatactgtggtggtatgtggcacgtggttgcacgcgaggaagatgtgtcctgtgggtaaagatgtacacctctgatcagagtataatctattccgatatccacgccctctgtatgggcaactcagcaatgaccaaagtcgtgttcaaa

SEQ ID NO: 22913 - DNA, 478 bp, Oryza sativa
  unsure (1)..(478): unsure at all n locations
agcttcccgccattctgaccacgtgacgccttgattttatcttgccgtgccgcatgtacaaaactttgacgcaacgatcgtctcttcacgaagccgaacaagtgtacatgttggattggatgttgccgagtttatattgagtgaatccaagatacgtcactcgtgatagccactgagtgacaccaacataatctagtttttctttgagtaaattgtagtggtggtacacaaacttattaggtgggtgcaatctaatatactaacttataaaatgtntgtttcagtatacaaatttgtctagttcgtgcagacgaggaccataataactcgactacgttaattttacgaaactgatgttgattagaatgtgacgtgcatacgtatagtgcgacatatataacggcatgtaatattacttaattggtctctactatatccttcatcatcgaagtggtgaatatcatatatttctaacttt

SEQ ID NO: 22914 - DNA, 387 bp, Oryza sativa
gaacatattctgcctggtgatcctatataaaccgcgtatgtagcctgtaattggattgagaactgcgctgtattgcagaaaatggaagccaatcgaagaagggtgctgctgggagccatactcataaagcaagtggcaagtgaggtctttagctcaagacatggatgacacctgtgcccgaccactggagatgtgaagagtgtggcgcttttgctatccctgttttaagcctgaagatggtgtagcatggcccttctgttcttgctggctttcgatcttttgttagcagtcttttgtactaacaaagttgtccctggctcggagtagatgtttacgctgttctgaacagacttagttctatttcgatctctccttttactggtttct

SEQ ID NO: 22915 - DNA, 455 bp, Oryza sativa
  unsure (1)..(455): unsure at all n locations
agctntatacagctgccccgctgacttttatatatatatcaatgngctgaatgagttcttaagcaattgattggatacaataatcattgctatatagccacgtacagtgtgcatatatattgaccaatattatggcttaggctgattatatatcttggtcatattccacgcgcgtggnaacccctatgagcttgattactcggatgttacaccatatatgccgtatatttccgagtgtggtgaaaccatgtgtcttttatggacttatgcatatatgtaaagcagtagcgcatggcgtatgcctgatactctggaaattatttattcatagattcaagctattttatacgtatttgcttgcgaatatcaatgatgaatcaatcttaggttgctcgatcaatcgtacaaagaatctgtatatacttgtatatattattgggatcacaccgatatct

SEQ ID NO: 22916 - DNA, 381 bp, Oryza sativa
  unsure (1)..(381): unsure at all n locations
ctctaaancgacccgcagcatgcgagctcaacaccacttattagacctttctactatctttcaaacaaaaaagacccanatccaaaatgcaaacgtcagcttatccaaaacacaaatcatcacatccctctctctgccacttcacacctcggaacgcactggactcataaagagaaaggggctttcccatcttcttaacgctcacccacggccgacgagagggaggttccttctggggggtacacccagaaagagaaccagaggagacggggcgagcctgtaactcagaagatcacaccaccgggctaccagacaccgtgaccggcgtcgaacacctcctccacacagccttccaaaggcgaacggcctcactttcccccc

SEQ ID NO: 22917 - DNA, 383 bp, Oryza sativa
  unsure (1)..(383): unsure at all n locations
catcactgaaggtgttgcagagactcacaagcattggaggagagatcggcataacattacggtacaagatattgaaacattccctccttttaagaaaccttgccgaaatcttgggagacaacaacaacaatcaagaattaaggaagcatgtggcaggaatcctcagaaaccttgccattgatggtgacacaaggaagaagattgtgcacatgcaggtgctcataaccaggctgatgaaagcattcctcaattcagatagaacctncagcacaaatgttgatggcttgctaacaaaggtagctgggcaagcactggcaatgctggcaacagatnatgtgcacaactgcttatgtatgttgaaagaaccagatttatcataactc

SEQ ID NO: 22918 - DNA, 408 bp, Oryza sativa
gagctgaatataagatgatctattggactttattgtatactagattagagagagagttgagtagaagaagtcagaggagttccggagttgtcggcaatcctcttcttatttctttcactctgttaattactctgattataatagaagtatcttttgagtaatttaggtgtacctgtgagaattatatcttggctagttcctaatcagcatgtatgattatcgttcactataatccagtaaaatatagtgattgctttagtgcgtagctaacattaaagtaagttattaattgcttagacgcggtgtctatgtagatgatttccagtgtttgctccgcataccacagtatgtgtgagatgggtgtagaggtggtgacagccctcgagacacttaagtctccctgccggt

SEQ ID NO: 22919 - DNA, 407 bp, Oryza sativa
  unsure (1)..(407): unsure at all n locations
ggacaaatgaaaccagaattggacaaatgatgaggtaccggtaggtgaccaatcatggttgcggaacaagggtttaaagcaagaataaaaagcttccattatttgtcaaatgccacttaaacatccaaacatcatgcatgcaaaccaaacagcaaagcaccatacacatcgtcagacatgctagtctgcgacgccaaagctcaccttctctgccgaagaaatgcctgcgcgagaatacataatcgatatcctaagagcatcagaaacacgcagagcagctgccaatcgctggacaagcaatgcgtacgtncgcacgtctgggctcgcccacctncangccccagcttgcagccggcactttcacaccacaggactcagtacgctcaatcccaaacataattcactac

SEQ ID NO: 22920 - DNA, 400 bp, Oryza sativa
  unsure (1)..(400): unsure at all n locations
ctctttgggtggttgaactatattaagaattaagaaaacgatcttttattttttttccaatcctaaatggaattaccttaccaggtctctggtaaagccattaggcatgcctttntccgcattaggaagtcataccacctcaagtggcatgccaacagttgaaattcgagtctctgactttgcctgacaaatcttagatgcaattggtttcctatttagctntagaagtttattgccacagcattataatttctaataagtcatggttacctgtatgaattgaaaactattgtattngactctagatgatgttctccaatagatgtcattttataatataatgtgcggcagtcaaacgtgaaatctaactctctattcatttaagaaatcattactggta

SEQ ID NO: 22921 - DNA, 248 bp, Oryza sativa
  unsure (1)..(248): unsure at all n locations
ccttttatatgcatcgtggtaattccaaagaattatcaaactgcgtgtaaaatgattntaacagcatcgggtcacatcattgtgagcacatattgccaaagcaaaacgcgcctaagtccctatggatcaacgggccacgctggtaataatattgggctaaagtactgtacangcctatgcccattaacacttccgataccctaacaaaacacagaagtccaagcgacacttcgtcttccccgcgaaac

SEQ ID NO: 22922 - DNA, 254 bp, Oryza sativa
  unsure (1)..(254): unsure at all n locations
aaatttatgaanaatattaataaaattagtcacacataaaggactattcatggtttatcatctaataacaataagaatactaatcataatcttttttcaaataagacgaacggttaaacgttggacatgaacagtgctaaaactgcactttatttgggacagagggagtagtaatagtactagagtactagtattaccctggtgaatagtatataataatataagtgatgaacaaatgtgatattggatgaaca

SEQ ID NO: 22923 - DNA, 356 bp, Oryza sativa
  unsure (1)..(356): unsure at all n locations
atcgagttgcatttactgacatgatggcttaggcttcgntcgagcgcatgatgaagagagaaagatagttttgttntccgggcgcacgtttcccgaactactaaacggtgtgttttttgcaaaaaatttctataggaaagttgctttaaaaaatcatattaatgcatttttgaagtttaaaataattaatactcaattaatcatgtgctaatggctcacctcgttttggttatcttcccaatctnctcaatcccctccttgtcaaacacacccttagccttcatgtaaaagcagggcaagaatcaaaaagtggtgctgatgttctttcatggtggaaatattntttttcatgtatg

SEQ ID NO: 22924 - DNA, 411 bp, Oryza sativa
  unsure (1)..(411): unsure at all n locations
tactggagcaccatattattcaatcatggactaattaggcttaaaaaattcgtctcgcaatttacacgccaactgtgtaatatagtttttttttctctacatttaatattctatacatgtgttcaaacgttcgatgtgatagggtgaaaaaatttgccagaggatctanacaggccctaatccatcataacttatgaggcnacattatatccctatacgttattgacacttgttaaatgctatgctatacaaatataagtatcatgtacatatatatcgactncatgntaaatattcgtcctatgntnttttttaagaaatattcgctctatgctattgttgngtacttgcgttctgnggtctcttttatgtaaaaatggttatgcctttattcttcatcgtcatttgcca

SEQ ID NO: 22925 - DNA, 418 bp, Oryza sativa
  unsure (1)..(418): unsure at all n locations
ctaccagtagtagtactaactggatagaagccagtgaggaaaagaggaaagaaaaagagaggagaagctaagcttagctaaccctcgagctagctaagcagaaagagagagaagagaagagtgagatagtactaggctggcagagatatggtggttgctgcaactgcaaggccagggagaatgcgaggaggaagaagaagaggaggcaaagctagcaagagagagcagtatactagtagtactagtactggtcactactgtagcagcagcagcgatagggctgtactaaatataatactagggcggtggagaagaaagaaagaaagaaaggcactgtgctgtgaagaagaagaagaaggcgagganagaaatgcttctgcggatcgaacgtgatgatgacgatgatgatgtgagagat

SEQ ID NO: 22926 - DNA, 447 bp, Oryza sativa
tagcttgcataatgtatgatgctcaacgcttcttatatgatgatctggcgtttgacattctcgcagaatagtatactattcgtgggataagatcaagaacgtccttctcccccaaattccataaggcaaacaaaatgcttggattgagctttacttcaagctaaccacagatggatctgcagctagctagcatcgatcatatataatcaagcagttgaggctagcttatcttggtagtgcatgcattcatcaccatgtgggccttcagggagatatctgcaaaactccttaggtcccatcctactagggccttgtgggtcatcccagcttccgtagtgagcattcgatcgatcgtcgtggacactgagctagtcgctacatttacggctacactgaatctcctgctggtgaggatgtcgtcctcttttacactgcgactaaaactac

SEQ ID NO: 22927 - DNA, 402 bp, Oryza sativa
  unsure (1)..(402): unsure at all n locations
acgaaccggagctaaaagtgctgaaatccaatatgcttaaataagaataaggcttgctattattagaaatgcccaaaaaatatcatattcgtgaagcagaaacataaatgtactcccattaatgtggaataagcggaactgaattagtcaattcaagtcagcattgtcaatttatacagaatttctctcttttcctcggtgaaacaaggatcggtttttctcaaaccanagggcttagtttagcctttgtttcctctttgccacgtcttctttaaagattcatccaatggaatcccgaccccctttcttttngatttcctttctatttaggtatggtggagacataattcttatagaaacaaaactctctcgcttcactttgtctcattttctctagaatct

SEQ ID NO: 22928 - DNA, 350 bp, Oryza sativa
  unsure (1)..(350): unsure at all n locations
gcagctgcagctcagacgaggcataataacacctcctttgttgttatatgctggcttatcatgctgctggcgagcagaagacgaacactcacacctntgaaagggtgaagctgagtacagcctcggctgattcaacagaggcaaggcctgagcgtagaaactagggataaattatccaacagcccggaagatgaaaaacaagaccaaacaagaataccctgtgcaatgctacacatacaatggatggagtcagcttattatgcctgagacacctcacgagccgatgaatcacatacaggctgcttcagcttagatctaatagcagctagccaagcatcaagtgtgtgtat

SEQ ID NO: 22929 - DNA, 272 bp, Oryza sativa
  unsure (1)..(272): unsure at all n locations
tgacctaatctagagactanggagctcgatctactttaatattatgggatcttcatatancggggtaatctagacgatttataaccaagaaggaagattaaacgactaaatcagggtagatcagctgataccccgacactatctctattagcagtcaaagaatagattagattaaaggcctcaggacagtacttaatagatcgaacctaaccgatgcaacattaagcgtgaagagtggcataagatctaatcgaaccgatgaaagctcattc

SEQ ID NO: 22930 - DNA, 304 bp, Oryza sativa
  unsure (1)..(304): unsure at all n locations
ctgtgctggatcataatattgtgaccgagcagaattgagcgggctgcaacggcgtactagagaaaagaggaaccgggacaactaaagattctggcatactggtattctctggatgctgatggattggaggacgacaatcagagtattttttttttttttgatgtagaaaggcatcaacaccttacttactttaggatggatatagataccttgtggcgaaacggtatggaagatactttaccacccncaattntctcatcttgctcataagttttgtaacttggatgtcaggtgatgataatgc

SEQ ID NO: 22931 - DNA, 423 bp, Oryza sativa
  unsure (1)..(423): unsure at all n locations
gcgcttatttatatacccagcgacatgccatattaagngggattcacatcttaggacggtgcctttatgcattaatgttatacactgaacatccatcaagattcacaatgtataagccattcatcatgggtgcatggaaatagaaaatgtcattataataaactgaacaaccattgtccacagatctaaaaccataaccctctgcttgcnacacgaagcagagaaacattcttacacaaagctaatatgcaataacaattatttaactccaaaactaatcctgacggtaaagataatggcatattgccgaccgcaacagcaacaacacttgctccattgccaacatgaatgtccacttcacctcttgctaagttcctacttcttttcagcccctgcaaagaattgcatatatgagcaactgac

SEQ ID NO: 22932 - DNA, 294 bp, Oryza sativa
  unsure (1)..(294): unsure at all n locations
tcgattcataattcattttttgtatggcagactgggagacatctattctcgatccattattaagattcaacagacaaagcaagccaattcaactggtcttttagtgttggaaaatttgactccttggntcatgaaaatgctcaatatttgtgcttttgcatgctcaatctgggttgatgcgttgtatgaaggggagctatggtaaatngtctaattntgaagtcactcaattatatgtttcctttntgtgtgaatcatacaccaatctcattatatgtttaattggacatatat

SEQ ID NO: 22933 - DNA, 389 bp, Oryza sativa
  unsure (1)..(389): unsure at all n locations
ctctgctcgcactcttctgaccacttgtacttcatacgttctgaacagtcgtgtaagggcttggccatcttggaaaaatactctatgaccctccagttataacctgcgagacccacgaaactgcggatctctgaaactggcctcggatgtttccagttggttaccgaatccacattactaggatcaacggcaactccttcagttgagatgacatgaccaaggaacttcacttcagacaaccaaaattcacattngctaaacttggcatacaactgatgtcccgcaacttcttagtgccgacgaaatgtcttatgctttcatggttacgagtaatgaaacgtctaataagacaccccacttgttatgattcataacacttggcacaatta

SEQ ID NO: 22934 - DNA, 275 bp, Oryza sativa
  unsure (1)..(275): unsure at all n locations
agatgctggtaatttacagcagctgcgacactgatcgatggcgaagcgcattagccgactatacgtacataagtaatagtggacgtctccaaattaatcatcttctggtctgatatactccctccttccctaaattttaacgcccgtgactntttaaaatatatntaaccggtcgtcatattaaataaaatttgagaaatgtgtaaaactatatgtatacgaaaaagtatatttaacaatatattaaatgatagacaaagaattaataagtactt

SEQ ID NO: 22935 - DNA, 315 bp, Oryza sativa
  unsure (1)..(315): unsure at all n locations
catataccatctgatgcgatgatcaaccttccttccatgtttgagagctgcgattaccgagttagaaagtgaccacctttgaaaagaaattattcttcaattcaccatagaanaagaagcttgaaattgcattcactttctaatagctacccaccttcacttgcttcacatgtggaatcggcacaatgaacctcccgacattcattgtcccgatagatcttgaaaggcacaggccaccttggccgcaccggagaggaccacctataacaaagcatcaacaacaacatgcttacaaacaaacatggcgactggaac

SEQ ID NO: 22936 - DNA, 299 bp, Oryza sativa
agcttgactcagcggaggtgcttggggacgtattttgtgttatccatagtggaacatgtcatagacaaccgatggcatggcaatgcccgcctgggttctcactggatatactgcatgggtgtgttcggggagagcagtggcggcgcatcatcgcccaccgtatggatggaaggcaacgcacaaagagaaatttcctcctccgcgcactcaaaaaataagccgaagcggaacatgtcatatgacaaccgacaacatggcaatgcctacctggttctcactggatttgctgtgtgggtgtg

SEQ ID NO: 22937 - DNA, 232 bp, Oryza sativa
acgttagagtatcaatgtctgcaactaacaacgcgtgagggtcgaaacctacgtatgcaactatcactcgggaggtcgcaaccccagtcaagccagttggtggtttcttctcatatcatacaggagccatgaagtttgtatttggcctctgttgagaattctatagctatatctttgcgtatactgttaaccacctggaatgtatacttcttgagcatttattgcgtggtaa

SEQ ID NO: 22938 - DNA, 288 bp, Oryza sativa
  unsure (1)..(288): unsure at all n locations
agcttctggcttctactgcaagaaacactacttctttatttggcttctctcctaagctggctgtcgacgcaagttttcttttgtagtaagctctccattcatatattaattcgtcttataatanaaatagagttcataacacttttctaatttattgacaccgtattctttctgttgatgaatgttacttgtataagacagcggtggtatttgcggtcttgctgaggcatacaagagaagggcggttagttttgcaggcaaaaactaaccgcagtccctatccacgac

SEQ ID NO: 22939 - DNA, 228 bp, Oryza sativa
  unsure (1)..(228): unsure at all n locations
tctaggtgatgaatatcatatttccagtccttaaaacccggtaattatcaaattntgtaccataacagaaataaacattttcgagctacataataccaaatgccagagtaaaacatgtgctcattcctcagtacctttccacacatattaacattctaggtaaaacaccccaattaatcaattacttatctcgaaattaatatcggacacacacaagtttcactacag

SEQ ID NO: 22940 - DNA, 266 bp, Oryza sativa
  unsure (1)..(266): unsure at all n locations
cgaactactaaacggtgtgttttttgcaaaaaatttctataggaaagtngctttanaaaatcatattaatgcatttttgaagtttaaaataattaatactcaattaatcatgtgctaatggctcacctcgttttgtttatcttcccaatctcctcaatcccctccttgcaaacacacccttagccttcatgtaaaagcagggcaagaatcaaaaagtggtgctgatgttctttcatggtggtaaatatttttttcatgtatgcatt

SEQ ID NO: 22941 - DNA, 277 bp, Oryza sativa
  unsure (1)..(277): unsure at all n locations
tgtttactgtagcaccatattatcatatcatggactaattaagcttaaaaaattcgtctcgcaatttacacgcaaactgtgtaattaagtnttttttctctacatttaatattctatacatgtgttcaacgttcgatgtgataaggtgaaaaaatttgccagaggatctaaacaggccctaatccatcataactaatgaggcaaacattatatccctatacgttattgacacttgttaatgctaatgctatacaaatataagtatcatgtacatata

SEQ ID NO: 22942 - DNA, 449 bp, Oryza sativa
  unsure (1)..(449): unsure at all n locations
agcttagcttttgatcatgagccttggtgcgacttatatgaaggttcatcagtgatgaaatgaatagtgaggcttcgttctggcatccctagggggcgatctcgtctgtgtctctttggtggtctagcggcggtcggtcacgcttaacggcggtcgatccggtgctagccttctcctgggattatgtgttggcgatgtcggtgtgtgggtgggtgtatantttttcctttttcctggttacgaccctccagggttgtaatcttgtaattnttttcctgctctatcaatagaacttcgcaccgtctcgtgcgagtcgttcataaagaatagtgaggtttcgtgaagaaccagttgtgggaagaggaagaataagagagcaatgctttacatatttcanaaagtggttcgaaaacatgcttcaaaatgggatatttttcttgtgtagttct

SEQ ID NO: 22943 - DNA, 477 bp, Oryza sativa
  unsure (1)..(477): unsure at all n locations
atccttggcagcgacgaaatggaaattatgcagccagtgccaaggccaaaaatgcccaaatagttggccttttcagcatgagcagcaggaggtgggctaaagcaatgcaaccaagtcgatgacttaacatgcacctaatcagcagtaggagcacagaagagtagcgtttaaaatgagctgggtttaatcagcatgagaggcaggagggaagttagaatgttaatggttcaaatattaattctgacagtttatgtgttcttgaagatgtcgcttcactttaccaaagggccaagtagttagtgcatgaaaagtatataagaaatangatgtangtgataaggacagactaaccttggaantctcaagctatagtgtctaccgtactttgcatgcangcatacagaacggtcagcacacaaaaatgcaagttttgagtaatcatcaccaaggacctacagaaagaatgcaatatgtgta

SEQ ID NO: 22944 - DNA, 259 bp, Oryza sativa
tgcaacggatgaagctgagcgctgcttccatgccatgattgatcgaaggcttctcctttctggcgacaacaccgacaacccttcaagcaaagtgaaaatgtgcactgtcgatccacatgttttcttcttcattgccaggttgcacaaagacgatggccgtgctccagctgctgatagcatcgacctgccgcccgccctggctcatcgcatctccattgccagaagaatcaactctccaacaagacacgacaacgagtca

SEQ ID NO: 22945 - DNA, 479 bp, Oryza sativa
  unsure (1)..(479): unsure at all n locations
tgtctctgtgaattatgttcagaaagtaccaaccaagtttttatggcttcagcattatntggatgtacactcaaatctgctaagggaagaagttcgtataaccatcaagtctagctttgtgaaagttgagactactcaatgctttcgtgattntgntgtgtcggttgctgggccaccttccatctattacatngatattgatctttatggaattgataactgtcagcatgttgtgaaagatggngatctgttttttctcagtagtcaaccattaaggggtcagttatcaggttgttttggtattgccacagatgttggctgtgataatcagtttcaaagaagcttcaagatngtagttcagaaaatcagaaanaactgattagaatcaatcagatatattgtttctactaacattgtggataattgacatatanaggcaatgtcacaatgcatctgcagatgtggatatcaattcatat

SEQ ID NO: 22946 - DNA, 398 bp, Oryza sativa
  unsure (1)..(398): unsure at all n locations
acatcagatattgcagaggaattcgactgatttactanaagattggcaaatcaagatggacaaggaaggacaagaacctgtctatggctctgtgttgcattgaatgatgcgagtggtccacaaatcagcgaggagagattgaggtggtgcaagccactgctgaattcctgaataaaattgcagctcaggctggtaggtaaactgaagtatcatggtccgattctatctcagccttnagctaactaatactgtaccgtgctgtgcctgcttatttagatagcgactaatcggactattattgcttaacatgcgatctactgaaagaattacgtcagcatgtgcataaacacaaagaccaacatttattggctcatctcccttctggcatctgctgctgc

SEQ ID NO: 22947 - DNA, 412 bp, Oryza sativa
  unsure (1)..(412): unsure at all n locations
tcacanaaccacattgttaaccaatntgacatgattctatatcattaatttaaaatgctatacatacatggacgcaacatttatatgatggataaagaaaactcatgaatattatatgtgattgtagaactaaaaatgtgttagatcaaagtcaaaatgatcaatagtgtggttttatgatattttatgattatttgtcacatgctaaaatttctgtgatattgtgtaacttagaccataatatgtgtggttaggttaaatttactgtgaatagagagaaagaagacaaatacaaggagatggaagcatagaaggtgacagcagatgataattcagtgccaaagttgacgaatgagctntactatcgagggtataggcctntgtggaatatcattatatntatttgtcctaa

SEQ ID NO: 22948 - DNA, 371 bp, Oryza sativa
  unsure (1)..(371): unsure at all n locations
tgaccattcataatacagaaatattttgaccatccaaaataaagaatatttatacaattaaggaatggatgaaactccatgccacgaagatacacgaagaattgtttatgtgatcaatgacatgtgggtttacatgtaagtgaccacgtccctctaacttaccttataagatttaatccatatatggcatatatgtattcaaaaatgcaacgttgtggtcatgaaaggggattctcatggntattattgacatatgttacaagtatatacgtatccacacatttaaaatgtanttgatggaatttgctctatatatacatgccactagtcaaaccctctacattcaaaatatacacgtcatattcatctta

SEQ ID NO: 22949 - DNA, 158 bp, Oryza sativa
  unsure (1)..(158): unsure at all n locations
atcgatagagcagcaactacgacgtatcctccatatgcaactgacttatgaattngatctttcatgaagatttcagtgcgacgctcatcatcgaaggatacctcttcagcagtggacatggacatgccattgtctgaaacaagaagcatgccttttga

SEQ ID NO: 22950 - DNA, 191 bp, Oryza sativa
gggatgccaagaacagaggaagactcattgtcatctgaatattgcacgaattcctgcccgtcaatgcttgcctctaagatcgcttgcaggctggaaaagaaaagagactatcattagttcatacacaagcaattaaatgaagcatgcaatacagctgcataccttcgtacagagaaaaatatcaataatag

SEQ ID NO: 22951 - DNA, 412 bp, Oryza sativa
  unsure (1)..(412): unsure at all n locations
tggatgatctcgatagaccaagntgtcgattttattatggntccgatatgggtaggttggatcttcctctcagctgaagtcattgagtaactcgctatcggagaatccatctcttaaacccatctcgtcgaaaccttgaagcaccaaaagatcccctaactggcgcgccactgtctaacgttgatgtcgcgattccggtatttgcatggtatggggatcgttggtactatggtatacgcgagactgaggtaaaagagacngagacggntgattttatacaggttcgggcccctgaattgcaggtaataaccctacatcgctgtggccgaagccggtattgctcttattcaccataatcacaccagtacaatattntgggtagcctatctaactgntgtcgacatggcggtct

SEQ ID NO: 22952 - DNA, 226 bp, Oryza sativa
  unsure (1)..(226): unsure at all n locations
gatggaattgagctgagtgccacgtcagctgaaaccgccgtccaaatcaccgaggagctttacgtgtcatgtttactatagcgaacttatcccttncccttgtgatccgtcctttgttggccctctctagggtttccacttccttcctgtcggattccatggacggccgtcggttggtcctgaggtccttcgcgctcacaccgggatccgcgggctcctcctctgc

SEQ ID NO: 22953 - DNA, 156 bp, Oryza sativa
tcacatttcatgaaaaaacgactgcttctttagactatttgccaccacaagaatttaacccacatacttctcaacctatgattctaacttaggaagatctttactttttttggtagcctataatatggtgataaatttaatttctagacatcttat

SEQ ID NO: 22954 - DNA, 429 bp, Oryza sativa
  unsure (1)..(429): unsure at all n locations
ttcaatgttgagcttagttgactcatgcattttcaaaataaattcagcgcgtgccttggcatcattatgaaccctctcactagtaggtaaaggcaaaatatcaattggagcccgagggttgaaaccatacanctacctaaaaggacttaccttggtagtagaatgtgttgcccgattgtatgcanactccacatgaggcaaacattcttcccacatcttcaaatttttctttaaaatagccctcaacatggtacccaaagtgtggttgactacctccgtttgtccatctatntgtgggtgacatgttgtagaaaacaatagctntgtacccaactttgtccatagcgtgcgccagaaatgacttaagaattntgcatcacgatcttgaacaatagtagaaggcataccatgcaagcgaacaatctcatg

SEQ ID NO: 22955 - DNA, 292 bp, Oryza sativa
  unsure (1)..(292): unsure at all n locations
cgcgcatctagcacacgtggttgctaccattcacgaatgctacccactctcgtcgttcgcacctatcaccgtaaaattgggctcgctcgccactgtcgggttgctgcttttcccggagacgtcgtcagccgccgtgctgtatatgcgaggcgaggcgaggcgaacgcgctccccctcttctctctaccacacnatgcttaagtggctaggagggcattctcccttttaaggaggtccccctcttctagaataaataaggtgatactaaactccacatgcatgccatctcatg

SEQ ID NO: 22956 - DNA, 263 bp, Oryza sativa
aactaagtgacaaaaattgtctttccactatggaatgatgtaaaaaacatcttgtatataaatatagttttactgaattgaagttctggaacattggtcaaactgggttcgtgaataatcacataatggggtttatgaccgtaaggactctatacttgggtttgtaaattactctcttgtagatcgtaccaccactgcgagccggcagcttctctcacaacaccagggagaagatgtataaatcccaaaacaaatgggatcat

SEQ ID NO: 22957 - DNA, 260 bp, Oryza sativa
  unsure (1)..(260): unsure at all n locations
ttttgagagataagaataatctacttcaaccgatatgcccttaggcacggncttcctaacatagaaatcacacgtggaaggggtgggcaattagctagaacagcatgtgctgtaacgaaactgattgccnaagaagggtaatcggccactttaagattaccatctggggaggtccgtttggtatcccaaaactgcttaacaacagtcggacaagtgggtaatgttggggtgaaccaaaaaagtttgggtagagccgggtc

SEQ ID NO: 22958 - DNA, 228 bp, Oryza sativa
atgctcacctatagattacccatatgataattgattaaaaacactaaagattagcagttcaacccaccaactactttatcaactaaacaggacgccatatcaagggtaaggaagacaatcgacctacttgagaaacattcttgctgtcctcaagatgccttgggacgagaattaaaaatagagtttgatacgccctgtgtaactcatcatgaacactgagaatgactg

SEQ ID NO: 22959 - DNA, 283 bp, Oryza sativa
  unsure (1)..(283): unsure at all n locations
gatgtgtgtggaaaggggaatggggagaaaaagtatgtgcacggacctataaggtccatatattgacttagccatttggactangatgaactatccatgtcagctgaaaccactcgagagagagtcgatgtgcactcattttataatttggaggagcctctatgcactagtctcatagttgaattggacctttcccattgttgatgcagctcaactttttcgtgcctatatgtgggctgagtggcaccaagcttttaacccgagtaggattttgcgatggaca

SEQ ID NO: 22960 - DNA, 205 bp, Oryza sativa
catggcgcggcagcgttcccggggatccactgcatcaaacggagcgagctcatggataattaaatcaacggcacgcataggggagctaaaaacgggatagagagggtacgtcgacgttgacccgatggacggaggcggcgtcgccttctttccagccggcgacgctggtgatcgaggaaacactcctccctctctctcggtttct

SEQ ID NO: 22961 - DNA, 385 bp, Oryza sativa
  unsure (1)..(385): unsure at all n locations
atctaatttaagtcatgtcatattctcattaattaagaggaaccagttcaacatatcacagcttatactcaaaccccaatattagnttactctcacgttatcttatactttttttagagattgtgtggaggttgccccttgcatatataanggatagctcattctctctctcgtaacttctctcctccacctcatcatataatcctatgtggtaaatntaggagcaacatgtaagggcttgtatagtaagttgccttggaggttgtactggtggagccttctctggtctctctctgtatgtgttntattggagtatntgtcagtttatgtgtgcgtgggccatttaattacacttgcatgtcagcatgtagaaagatagatcgat

SEQ ID NO: 22962 - DNA, 226 bp, Oryza sativa
  unsure (1)..(226): unsure at all n locations
atgtacangatggcaagcggatttgcagctaggagagggcggttccaagaatcttcaacaacttctaaaaaccctggaattttaaccagaaagcttcaaatctggaatttgggggtttacccctcatttcatttcctattaaaaagagtgccgcatgatccgaggtcgacgaagagagaggttgcaaagaggcgtttgaaaacatgatatcccagtcaggtatgac

SEQ ID NO: 22963 - DNA, 370 bp, Oryza sativa
  unsure (1)..(370): unsure at all n locations
tgtcatcgattgcaaatatttgtcctgaggcaataacatatcttgaaaaagttgggaagtatttgcaagaagataaagatgagcaagaaaagcctgagaaggtatttcaatgtaaggatgggggatatcgttggggaatcatgacaagcaatggatccgagtccttgaacaacgtttttaagttttctcgaaggtaccagtggcagccattgtggaggaaacattntcaaagtgcttagaatggtttgttgaacgaagacggatcgctctcaacttagtgcacagtgtgtaagcttggtctcaacgggttgaaaagttattggttaagcgaggagaccaggctagacgtatgagtgtaatctcatatgga

SEQ ID NO: 22964 - DNA, 370 bp, Oryza sativa
  unsure (1)..(370): unsure at all n locations
agctangaatgtgtaatgcgtcgctggatgcatggtctgcctgagtcgatttatatcgaggctgggtgagagggcgcttgccctattcaagctcctcaagcactccgggcccgttgtatggactgaggaagctgagcaagctctcaatcagctgaaagcttacctcacttcccncccatcttggtagtcccgggaccggaggaaccatngctactctacttggccgcgaccccccatgtggtgagtgccgccctatgatggaccctgagttcctctcgacactcaagggctgtgttggcccgatctttcggtgagttgtgataactacgaattgggagaaacgttgacgatccgactacaaccgtacgag

SEQ ID NO: 22965 - DNA, 272 bp, Oryza sativa
cacctaaacctaatcctttccggaagagtagttcggtagattctagatcgtgtgttgtttgcttgtgtgtacgggtatggtttgcatcattggtggggatgcgactatactaggttggttgcttaagcaacttgaacaataaaaatctattaacaacatatcagtaggcaagtggtttagtaccttatctttagcgacccctctcttcacctctcttccgtctgcagcagatggcagtgttgagatagatcattaagcccagatcatggtta

SEQ ID NO: 22966 - DNA, 406 bp, Oryza sativa
gctggatagtttcctcacatcaaacacttatctgcttatataccaagttgcttggtgaaactaaccggcgggtgaaacttgtgctatttctaaccctcgccgagatagaccgttctaactccattgtgcagaatgaagaggcaactgccttgtctgatcaagcagtccggctcttcatcaagtcatcatgacgagtctagtactggttcattagctgatgtctcaatggatgatgtcgacgctccgcgacgtctcctgaacgacgccgacctcgaccttgtcgatgatcgggaaagacaagcctactacatgctgagtgaccgagagtatgctcacacgcgagaatactctccggagctgttgaaaggataggtatgtgtcgacgggggatacccgtaaccggata

SEQ ID NO: 22967 - DNA, 379 bp, Oryza sativa
  unsure (1)..(379): unsure at all n locations
gtgtgatatttgagctgccactacctagtagttgatatgagcgtgcatattttagtgtgttcttgtttgctactaaccatggcaggattgcgtaagggaatacgagaacatcaacttctacaccttcgacgagatatcacgacttctccacgtgatgcatatgaggtacatgactcataatttgaacaagttgcatctaagttaccattctatgatgggaagtacgattctgttgcatacattgattgggagctagcagtagacaatgaatttgatatatatgantnttctgatactcaaatgattaaggctgctagtaataagtttacctcttctgcattantttggtggacttatgttagtaataaacctgaaactt

SEQ ID NO: 22968 - DNA, 315 bp, Oryza sativa
  unsure (1)..(315): unsure at all n locations
agcttcacagttcacacagcctgaccctctcngctctcgtctttgntcctgtatttctctaacctatctcatagccagagccggcccggacacctttgntcctgtattactctaacctgtcagagctggacgggaggggcctctcctgtcgctggtacactcctcgagtcttgacttgtatgctagctagctnttgacactgcatgattggagatcgcgtgatagatcgattgcctttctcagcgagcggcacccgtaacgttcttcgccgtctgccaatcgctaccactcgatcgatcgctagtggccacatta

SEQ ID NO: 22969 - DNA, 440 bp, Oryza sativa
  unsure (1)..(440): unsure at all n locations
tatcgttcttgggaagattcgtgggtggttntatactatagcatgtgtgtttgcctgtaatgttcaggaccagatttaatagcctctttttttttcttggtgctgcattcaagtgttagcagcaaacattttggtacaaaaaaccatcgacatccgcgagggcnaaaaaagaaagaaaaaaaaaaagaaggtgcgaataggaaacgaattctatcatcttggtgcgtgtagcggtgtaggcgaatggtgttgtggtccctcattcaggcctatccgttcgtgttctaactgtgttcgtttgagaattggattgctcgaatatctgataggcaaaccttgttgctcaagcacgtacaccctcgaaagtaaaaaggaacagattagatgattagataacacanaccgacactttgcactactataataatgangggtacatg

SEQ ID NO: 22970 - DNA, 378 bp, Oryza sativa
  unsure (1)..(378): unsure at all n locations
caggccgatccgtttgtagtgtaagagtgataaatccctgctcctattaaacatgaataagtattgagttagaagagaatcttcaaaacagaagttaaagacaagtcaacattaaatggtataaaaatcaagcaacctttcaaagtttcaataccacatgctagatcttcttcttattcattctggtgtttgcgaaaacaaacacactgccaaaagaaaaaacaagtcgccagttaccaccgcacatgacacgtcagatatctgaatgggaggtaagcaaagatacaggagcagctggcgcacacatctggcgcggctagcagcagcagaacgagcccatgcatgcggcacactgacggncagctagctcactaatta

SEQ ID NO: 22971 - DNA, 432 bp, Oryza sativa
  unsure (1)..(432): unsure at all n locations
tcagtgaagtctcggtgaacaagcgattcgtgacagtaatgcttgatccatgccgcttgtgttggatgggcccacgtggntgagttcgtaggcatgcatgaaggttgtacgttgagtggacacatgcatgcacagtcagcatgtagtacatgtgaggccattaaacaagtactccctccgtaaatgtacgaagccgntaacttttcgaccaacgtttgaacattcgttntattcaaaatttttgtgtaaatatgaaaatatttatgtcatacttaaagaacanttgatgatgaatcaagtcataataaaataaatgataattacantaaatttttgaataagactaatggtcaaacgttggaaaaaaagtcaacggcgtcatacattaaaatatggaggtagtacatcaatgtatgtagcanacagcaacaa

SEQ ID NO: 22972 - DNA, 357 bp, Oryza sativa
  unsure (1)..(357): unsure at all n locations
tatgattcttccanacttgngtggatcgatgtatttgtgatatatattcactaatattattccactctaaccattcgttgatgtgtattattaattagtgcaggacttagtagctttgtgcctccccaaggtggctctggaacatacaaaaggcacgcggacactcgttatgaagtgacaaaccttacaggtaaatgtttttcttcttccaagatttgttcaatccaaccatccacaatgcagaacttatgtataatattgttcaaaaggatgtataatatcaactgtatccatctatcccaattgtctcttgaaaaatactgtatatgacacatattaattactacatgatcattt

SEQ ID NO: 22973 - DNA, 371 bp, Oryza sativa
  unsure (1)..(371): unsure at all n locations
cgtcgatgccggtgagcaaatcggggaaggtcgtgagggcgccaagcccaattgagctatgcatgccattggtggaggacaatgtgttagctgtgatgggtattgcttgccgagagctacataagcaatacatggagctaagcaatgccaagcggaaaatgagggagtcatccatagttggacatcacgaccaccagccgttcctatcgtcgcctgcctatataactataggctntgatgacctcttcgaccttttcaggatccggaagttggacactggtcttctaaaatggctactctttgtagtgcataccttctatacttgtgatatgactggactatatctnnctaattaaatagttctaatacgt

SEQ ID NO: 22974 - DNA, 269 bp, Oryza sativa
  unsure (1)..(269): unsure at all n locations
caagaagctgtatacttgtgcaaaatctggcataactacattaaaagattaaaagttaacaatgccagtctgaaattttgaatcattgtaataaagcattggttgaagacagaaacctcaatattgttactgatcaaatctatgaanaaaataatatctgtaaggtgccaggacctgngaatggactgtgctgtcgtgtaacactacttttcagttctaaaacacctcangcagaatcagtaatttgttggtggaattgtattctaaac

SEQ ID NO: 22975 - DNA, 402 bp, Oryza sativa
  unsure (1)..(402): unsure at all n locations
ttaatgctagagatgacctcgaatcccctcagcgagttgacattatggaacgcaccctgctccccccggaaggtggcattgtcggccaacagtatcgacgcgtcgcatccctatgaaattggtaagaaaattaagtctatgacataagagacatgctattgaaaaaaatgtgaataagccataacggttacactgaacaaagtataaagtatatgtctaataaactgtgacaacaaanaaatgtggtgtggtaaagtggtatcgtgaaccaaacaccctggcctgtaaatcacaacatcctacctagccaattcatggtagtagtatatcccaatagaatttcactgagatcaagaatatatctctctaagcgtgtgtatgaggacacattcgtggatatat

SEQ ID NO: 22976 - DNA, 260 bp, Oryza sativa
  unsure (1)..(260): unsure at all n locations
ttctcacatgtgccaatagagactagntaaaaaaatagatattttattactagtcaattaaaaaacatggtcgtcctcgggccacattggtccccttttctctttaactgcgattgggaggaagccgtggccactaagaagctgctacagctttctccagaatcaaaacttccccaaacaagttagcttttggttaagattatatcaaactgtaggtgtagaatccaaaanaagaactaataaccaaaagctggaaaacc

SEQ ID NO: 22977 - DNA, 344 bp, Oryza sativa
aaatatctctcgaagtgaacagtattgaacagtaatttaaacagttaactgaatagttgttttgaatagtaatcagccgaataaacagtatactgaatagtattcagccgaataaatagtggttttgacagtgtttttgtccgaagcatacgtgtggtatcagagccagtcatcatagagaaatcaaattcagaagctaatattggaaaggtaattactaccacagataatctgaatataaggtgtaggctaaatcacattgaagaccataggtggcactctaacaatagtcaattaaatttaattggtgatctgatatataacttttatataaattgggataa

SEQ ID NO: 22978 - DNA, 409 bp, Oryza sativa
  unsure (1)..(409): unsure at all n locations
agctttaccaaattctctcacgccgtctctcgccgaatctagactctttggtcgccaaaaatcagagcgcttttatcaagaaacgctgcattcaagacaactttatggtagtgcggcaatcagcaaaatacctgcatgatcgtagaactccttccgtgcttgtgaagctggacatcgctcaggcctttgactccatctcatggcagttcattctcgaagtgctggagcataaaggtttcggcgttcgatggcgctcgtggattgctatgctctttcggacagccagctcgcgagtgctcatcaatggtgagccgggttgcccgatcatacaccgaagaggggttcggcagggagatcccatctncccgatgatgttcatcctagcaatggatgtgttgagttctatcct

SEQ ID NO: 22979 - DNA, 243 bp, Oryza sativa
aaaagaaatattaaggggacattatctagcagtatgttcttgagaatttgaacaccagtgtactcagcagatatattggtttgatctggttttatggtgcctgtatgaccaaagaattggttgcttagtaaatattcgagaaaagtgggtttttttttacccgagtctacacatgaatctaatgttctgcactagtttatacattgacatacatcatacatgcaaagaccattttcaacgtct

SEQ ID NO: 22980 - DNA, 326 bp, Oryza sativa
  unsure (1)..(326): unsure at all n locations
ccacatcgcaatcaacagaatcttatatgatccaatggaaaacaaaaccctacaaacctgtgttaccttngctcttccggaatcgtttaaccactgaatatggtaagggtgtggatgtgtacgtgtagtcaagccaagcttcttgaccaaatcagaactcaacaagtttttgcagctacctccatcaatgatcacacgtgcacgatggttgttgatgacgaagaanatctgaaacaaattatagcgttgcaacttgtcatgctgctgtacatacgtgctgagcacccgctgcacaataatggtcctgtagttccgtgtgtcatcac

SEQ ID NO: 22981 - DNA, 341 bp, Oryza sativa
  unsure (1)..(341): unsure at all n locations
gacacattcacccactaagcacacaaagctcaacatggtagcatatagttattatatctacaatttatttcagtgtataactaaacgtacacatgcctaattatcattctcaattcattttcacacatatttaatccaaatcatttaatcatttgtacaacatctaacatatatccctcaacaaagcgctggtagttatccaactctttcctagatgcatccctcacaaataagtacaaggaaatttgcagtgaactagggcatatcatgctagtaattntggttgccactggggttagacaaaagtgcagaaatggtcagagaatatacaaaaagaacag

SEQ ID NO: 22982 - DNA, 351 bp, Oryza sativa
  unsure (1)..(351): unsure at all n locations
acccaatttctcaaaactctgagatcccncactntctctctctgaattctcccccaaatcaaaattcactggagattgaggaaatttggacttacactttaccaggggtcgctcttgggcaaaacttgccccagtagcattcccctggtgattctcttcaacgcagtgcccttcgggcatttgtccctttggagttgtagtctcctggcttcggttctccaggatcgtgacttggaagttgacttgatctacagcttgtcgtagttccttcacgctagcgtccaccgatggaatccacttctccatcccctgcagcgacccgaggatggcgttgaagctacctgtgagctc

SEQ ID NO: 22983 - DNA, 390 bp, Oryza sativa
  unsure (1)..(390): unsure at all n locations
ttcttggtttctactaacaatggcagggatacgcaagataattggggatagctgcgctcaacatcgacatcttcgtcgagacatgaggagggatcaacatgaccattatgaggtaagtgatgatgttctaggtaagatcaaatctgcactgccttatntcgagggagactatgatcctcgtgcttacattaattgggagctagcggttgatagtgaatntcaaaagcatgtcttgtcggagaaacaaaagggtatgtgtgcctctagtgtttaattaaacatgcttctaatgattggaaaacatcttgtaggcataacaaaataccacaatcttggaaagacctgaaacgatatttcagagatgtttatgttcccatgtattatgctgac

SEQ ID NO: 22984 - DNA, 375 bp, Oryza sativa
  unsure (1)..(375): unsure at all n locations
ctactgctctcaatggaatgtggaatggacacatgcctgcagccaatgcaatagatgggcantaatggatggttccattggcttttggtctttttgattcagagacccacagattacttgggttggntcatggagcaattaggtaattcaatanggccagtagagaattagttgtgcatactgatgcttgcaaaggcctagaaactgctgtaaaaaaagttttccatgggctgaacaaagagagtgctttaggcacttgatggagaatatgaagaaattgtttcatgggaacatatatgggaaaaagatgtggcctgcagctatgacatacatgcctcagaagcatcaaatgtggatggatgaaagtgttgaata

SEQ ID NO: 22985 - DNA, 477 bp, Oryza sativa
  unsure (1)..(477): unsure at all n locations
tcgcatcctgccgccatgggtggtggagcacatggccatgtgagccttcaaggagcaaccaaaggggtcgccgccccaacccctcgcagacgccggcgaccgcggcggcggagcctgaggtgtgggaggatctctccggcatgccgctcggagccgacctgatctccggccgccggagaggatctgatggngacggaggggagggaggcaaagcggcaaaagaaaaaggactactgtgtaaatctcaccataactaacaagggtatttctataaatgtatggatcgctatcattcctggctcttttgttgttggtaaattaatcacagaaaatctacgactagcgactcaaaccagcgaattcctcgcaaactttgaattntccttaccgatcaggctgagttgtaaagagtagctggagaggctattctgtcctttntcatcatgggcatgggttctagactattaattgatgtat

SEQ ID NO: 22986 - DNA, 380 bp, Oryza sativa
  unsure (1)..(380): unsure at all n locations
agctntgaaaagttagatgtcatgcttcacaatggatgccatgtatgctcgaatcttggtgaagctttgaaaagttagatgtcaatttggaccataccctcggttgtgcatcctcttccccagccggtctccgatgtaaattaatgcttcaccagcatccttggatatcaccagtaatgtgaatggttgcaggagaaagaaagaatgaggagattcagagagaatatgatttaggggggcaacgtagatatttcacgtcatccgttcacactgngacacctaagagaacaatattaagaatttagaggttatatctccattgacaaaaacatctaaggccanacctaaanatggacatttttcaaagttgtcgcgtttta

SEQ ID NO: 22987 - DNA, 361 bp, Oryza sativa
  unsure (1)..(361): unsure at all n locations
ctcaagctgatagctcgtgcttgcccgggctcagnnttaaattgtcgttaaatctacactcttgttcagaaagaattgtcggaaagaacttttgttggggtaaccatgccagcccccctagcccggggacggattangaaatgttcaacaccttacaaccgtacccatagctgaaccaacgcaccttgcatttattcaacaaacgagattatattcccacgggctcgcgacctcacactacacttctcattcaccggttccattcagaaatctatattcatancttaccccatctacaaaaataacatttttcacattaatggtacanatggacaccctgtagacaccaattnctaacaca

SEQ ID NO: 22988 - DNA, 348 bp, Oryza sativa
  unsure (1)..(348): unsure at all n locations
agcttctcatggatnnttgacctanatggcatatcttgcatgtacaagtcctatgaagagactaacttatggtaaatccttcatgattcctttntgtaatcatctagacctgcaacatgtattgtctattaagctataaactatttggatgtgccgttcacggggattgtagagaatgtaccaaggggtgttcatattaatntccttaaagctgaaagaagtttgcatagatgggctcttgatgatctccagagaattcatactgctgaggaactggctgcatatgatggtggaggagttgaaatgcacgtgcttgaagatgctggacattgggtatgcttactatat

SEQ ID NO: 22989 - DNA, 282 bp, Oryza sativa
  unsure (1)..(282): unsure at all n locations
gcatgcagcttactaccaagcgcagggccctgtatgttatgagaacacaatacacagagaaatacacgaggagagaacagataaagaaacctcctaccagatacaatngatgaaccacacccgccaaaatatcttgccaaattccaaaacctactggttaacccaactaatcaacaatcaatttctcacacagtcacaagctttgccgaaaaaaagagaggcaatggatagctgttgaagttcaacgccacccgcatgaagccatcaagatactgacttgat

SEQ ID NO: 22990 - DNA, 400 bp, Oryza sativa
  unsure (1)..(400): unsure at all n locations
gntctaggggggcatttgntctggtatgctttngaagcnatgctatagcatttcttgaacattgtgtcattagcgcgtgattaaataagtattagctatgttttccaaaaaaggattaaattgattttttaagtaattttcttatagaaacttttgcaaaanaaaaacacaccatttagcagtttaaaaagcgtgcgcgtggaanatgagtgagatgggttaggaaaaaggacaaccctagagcttatttatttttgcaccattcatcaccagcaagctgtgcccatgctgcatcaagcctgngaccaagggcatttangtattntcgccaaggcgtccacgtcggacagagctaanatgcaaaacgaccagccacgtggatgcaaaaccggtgaaaagt

SEQ ID NO: 22991 - DNA, 384 bp, Oryza sativa
  unsure (1)..(384): unsure at all n locations
agcttttataggaggcgcggtctgctctgcacgctttgccaagaagaacaagacgatggccgcagcatctatcgggtggtccggcgtggggaataaaaccctcagctttngtcacgaaacgtaccgggaatcaagtcattatgtggtcgagctagcacgcgatggtggcgccgtggtgcaacgcgaataaggtgcctgcctgaatgatgaatcgattgaattggctagtgcgtggagtggttgcgatgcatgcggtttggttagtagctgcaggagaacgtacgcacgcaccggccggcgtgtcgttcgtcctccgcgcactagggtgatgggtttggtataacctgatccatctcatctatcgatcgatctgcaatctcgttc

SEQ ID NO: 22992 - DNA, 397 bp, Oryza sativa
  unsure (1)..(397): unsure at all n locations
atgcagtccttttggttgtgcttattgatattaaattttgatgattctttttgtacggtgccttaggtgtgatggctatacctcctgcaacgttgcgttttctaggatgtttcatatatgagctgaaaatgtatcagcataatgtgaaagagaaagtatgccgaagtgaatagcaatattgttctatctacttgtgacagnnttatttgtgtgcattgaaattgtgntccctttacttgtgacattntttatttgcctgcattgaaattntgttccatttaattatgatatctttttgtntgcctgcattgaaatttaccatagtttgaatatcaaatatatattttggtgtcttcatatggtcgtacagatagagggatggttatctgatatcgct

SEQ ID NO: 22993 - DNA, 265 bp, Oryza sativa
  unsure (1)..(265): unsure at all n locations
ctgtgtagggtgatggaagtagtatcctaattttctaactaactcctatgggcttatcccattaaagggggttgtgttgatatggactttgttcgcagcctggtggataaactcatttataatacaagcacaatagatatcataacatcacagagtttcacaaatgggacactaaatatgaagcaattgactgcatacatactgcagccanataanggtcatcccaacgatacatcataccaatcatcanactactcgtcaatct

SEQ ID NO: 22994 - DNA, 414 bp, Oryza sativa
  unsure (1)..(414): unsure at all n locations
agagaaatgcgttttctgtgttcattgccggtagttggtgggattccttgtgtccgaatgggggatcgaagcgaatcccgagaaaatcgatgccattcagcaaatgaagccaccatcgagcgtacgacaagtacaaaagctcgcggggcgaattgcggcactaagtcgattcttgtcaaaagcagccgaaaggggcttgtcatttttcaagacccttcgaggngcanganaattcagtttgacgcccgaatgcgaaacaacctttgatgagctcaagcagtacctccaaagccctccggctttgngtagcccggtgtttggcgggtgtaaatgtcgattctattaccgcaacatctgcataaagatcagattattanacattcaacatagagatatgcacttaatctcacatat

SEQ ID NO: 22995 - DNA, 228 bp, Oryza sativa
aagtgggattaattggttctcttgggaaacattaccttatagttagagtggtcgacccttgcatttaatagtcgaagtacctatctcctgagaccaggaaaactaatatgaagcagcttgtggctagtttgaaagaaatgacaagcatgatattcttatgatggcatgcattggattctattaatgacgagctgatctcgaccacgacatgaagttgataacttggtt

SEQ ID NO: 22996 - DNA, 339 bp, Oryza sativa
  unsure (1)..(339): unsure at all n locations
tgctcgtcccgagtgaaggacgaaatgaaacatagacttggntggtgatcaagagttgctactatgctacatatctcaaagatacaagtgcaagatatatgtactctctcttaggttaaataatgtttggcatggnggcttacccttacccctgattcccacgagacactgcttctccttgcctttgggcggtgaaagacagaacagcaattagagcaccaatcacccgatctttattcaactcttgttccggaagttttcaaatgattttggaaaagaaaaccaagttcctcaagtgattcactcagtctctctaagtgtatcaaaatgaattcctca

SEQ ID NO: 22997 - DNA, 394 bp, Oryza sativa
  unsure (1)..(394): unsure at all n locations
ctcagcttgatttctgagaaaatgctcaacttgtaaatccatataaaatcagatataactcatcttgggatgattccagttgctgtatattcacaaagntatgaactctattttagaaacataaaacttggcactcactgtacaaactntgtctctaaaatttttctaaggtaaatcatacataaaacatacacaaacttataaaatacatagaaaatttaatttaacttattttgaaacaaactcaaattctacagattcatcatcatgcactntctgattaggtgaaataaaagtaattacttactttgtaccanatgctactaanactattgtctttaaaatgactagttctagataagctaaactttagaaattcataananaattaact

SEQ ID NO: 22998 - DNA, 358 bp, Oryza sativa
  unsure (1)..(358): unsure at all n locations
gcttaaagaaaatgtttcttctcttcatctgggaaatctactttgtggtacacaactgtctcaccttcctaggcatataaatttccacggtgtagctngaatttgcttctcccacattagtaacagtccgggtcaccacaagcttgccagcacttgcccttactgctactgatggatagttaagtncagcttcagttatttggcttcctttgcaggcatctttctgatntgcaattatctcaacttgaacatctgtgtaacccaggccacagagatatgaaatgtattgtgcatcatcaatgtcatagatcagacccgggtcaatggctctagagggactacatgttcaacaccaact

SEQ ID NO: 22999 - DNA, 274 bp, Oryza sativa
tgggaatacccatgagtatgctcatttcattaagaaagaataaaagaccgggaagtgactaaagcgtcattcttccccaaagcacttaaaagaagttacaaaacaaaaagctcacattacccaactttacccaaccggggtaagcgaccttctaaagaactctccgagcttagtggctacggtcaaacaccaaaagctacactcatttgctacaagtggaatgacagccataacactatgactagccccattaaaacatataatcattcctatg

SEQ ID NO: 23000 - DNA, 335 bp, Oryza sativa
  unsure (1)..(335): unsure at all n locations
gcctgtctctagcggttccgagatccttattttgtttcagctgtaacggcataacacgaacaagctctgtgcaacttcagactcatgaccctcaatggaacggttagtagatctcacacgtttactcactaatctcctatcttaatgtaattcatcatctattacaaactgacagaacattcagagaataatggagttgatgccatggaagaaccacctgctacgttggatgttgaggttttcaattntgatggaccatttgatctgtgcagttctctgggacatgctgaaattaacttcctaaacacacgtcagcagatctatcagatatatgg

SEQ ID NO: 23001 - DNA, 412 bp, Oryza sativa
  unsure (1)..(412): unsure at all n locations
tatcagagagaatcagcgattggcatctagccatgtcgtcttgttttatgttattgntgatactgagaaagagatgcaaatgatccgtgctcacctaggtgatgttcagacagagactgatatgcatatgagagattngatggagagaatgagattgatggaagcagatatacaagctggtgatgcagtgaagaaggaacttcatcaagtgcatatggaggcaaagagacttattgctgagaggcagatgctcactggtgagatggataaagtaactaaagagctacataagttctctggtgacagtaagaaacttcctgaattactgactgagctagatgggctccgaaaagagcatcagagtctaagggttgtgatattattccttttttacatntttcatacactcctg

SEQ ID NO: 23002 - DNA, 329 bp, Oryza sativa
  unsure (1)..(329): unsure at all n locations
ttatctggnncgaataattgagggtataaaacgtatggtatttgagttttctttggcggggtaattcaatcgaccgtaatagttcagggggataattcatattnttttcccttaatatatctctatcctctgctattataaaaattgaagatgnttttaccatcagaaaatctagggaacgaagtcccatagacatgggataactactactagtaaatatcttgccctcactcctcacaccacctattcaatcttatcctctcctttatctcttccccttccnctccactctctctgactaacaccctcatgagcacggaggccactat

SEQ ID NO: 23003 - DNA, 412 bp, Oryza sativa
  unsure (1)..(412): unsure at all n locations
gctccttgatctggtggtgtagaacactggttttatgtaattaaatatccgaagtagacttgtcttatgattaattggattttttgcagcagtatcaattatttatatgctaagtttctatcgtacaaaccacaattttcatattctatccaaaattcaaatcaatgcatgatgcatcgtttgaaatgattggatgcaaccatacactgcatattntagttgaacctactatgataaacactatgcatgtgtgctctgcagctaaacaagattntatttagcaacgtgcaaaatanaaatgaaatgaataaattctggccaaattctcaaaagaatgcatactatcagcagatatgatgattagaattcanatggtttaatcagagaagcagacagatgggacataacagaa

SEQ ID NO: 23004 - DNA, 379 bp, Oryza sativa
  unsure (1)..(379): unsure at all n locations
ctatgatgtaccnaatatggatgaatatgaaggactgacatgtctgtcaccacctggcgcctacctttgctttgcgtggggcacacaaaataaaggtaaccactaacctagactccacggttatgttatcaattactactctagcctcagtcaagaactttcgccttatccagactcttagtactagagcaataagcataaatactaagcgatgaacccgtaacgatgagaatctgtctcacttaaataagaaaagtaaataccaaaagaaatcccaaatacttattgatgtagaagaagtatccatcgaggtacaagatcgaanagagtgccaacatctatgtttgacacttcctctagaactccccatggagtaaca

SEQ ID NO: 23005 - DNA, 347 bp, Oryza sativa
  unsure (1)..(347): unsure at all n locations
agctgtcgctcttgcccctctcgccattcgctcgggcgggtggcccctctctttctgcctcggttcacctcgccgtgcgacgcaccgtcggtcatcgtcggccatcattcgcaggcattcccgtaggtcgcggcgagcctcgtcgagccccatcagagaaaacccccaaaaaggttagttctttttatcctgaaccctaggtctgacaccctagtcgccacccncatttntgggttgtgatttggtntcctttgcggatctagaacaatcttgttgaggtcgacatggatccgaatcctcccactggcttccncaacatgttcaatgacccagatctggtcaccaat

SEQ ID NO: 23006 - DNA, 393 bp, Oryza sativa
  unsure (1)..(393): unsure at all n locations
ctaagtcgtcggcgtacaagcgccgtgccgtccaggacgccgttatggatctcgacgtccagacgccaggtccgtgcacggttttttctctttttttttccctgcgatttttttttgggtggtgagattttgaggtttttnttttctgtgctcggtggcggtttctgcagcgaaaatggcggacggcggggccccgtcgtggcgcatgtcgctgccgcacgtgtgcgtcgccacgctcacctccttcctcttcggctaccactccgggtgcgtgccatccattttctcatttcttcttctggntgtggntgntttcccaactcacggtgtggagcgcgtgccgtgtgatggttggtttggtgcanggtcgtgaacgagccgctcgagagcatc

SEQ ID NO: 23007 - DNA, 336 bp, Oryza sativa
  unsure (1)..(336): unsure at all n locations
cagcttgtaatgggatcctcaccaacgcanagatgttgatcacaatgaaatcaccatgagtgctcatgtcatttccaaaaacattttcgacggcagacaagcactctctnctgtgctccacttgaatgggctttttcctctgcganaaggagtcatgctcaacattagattgaacagaatcacctatcanaaatgcttacatgataaaccatatttgcaaaagagaaatcacgaacatgaaattggacagacttcacggcacttacatgagatgctctcgagctgttcggcagcaaggacaggtgggctngacacaggcatatatctaacattaca

SEQ ID NO: 23008 - DNA, 252 bp, Oryza sativa
gaatagagattatagcgatgtgacaacacctagatatgcgaaggacgttctgcacgcatgaaactatagcacacatgtcgttctttcgccatgttatgagtgggtttagccatctctacctgaaccgtgcccaccgcgcatatgacagtgttgaattgagtgtatcacaatcaatcatatatctacgggaggcagtccacatgccagttggaacatccctgccatagtgcactctggcatcggcaagaacat

SEQ ID NO: 23009 - DNA, 97 bp, Oryza sativa
tagcttagcaacagtctccttaagtaagcgacatatatgtgttatatatatgtgcccgtgtgagcgtgcgtgtgtgcttgcacatcgcttatttaat

SEQ ID NO: 23010 - DNA, 268 bp, Oryza sativa
cagttcatagcttatattgcagacaatgctcaagcgtacacgtgaaccttctggataccgataacatgaaagaccagtgtatttgtttgtgaggaataatgtcagtgtatgcgtatactcttactaagataattcttgtggatatccatgcatgtatgtcgaccctgcagggctatatatgataagatgataacacgcatccaatgatcttaggagcacgtccctaagtaatacgtttgatgttgcagaatggatcagcgagtatcac

SEQ ID NO: 23011 - DNA, 369 bp, Oryza sativa
agcttgtctgaagagcattatgctgatttttgattctggagtggatagatatgtctctgaacaatctgtcaatggagatcaagccaagctggaagcctcctttgcaattggtctatgctttatttccagatgttcagatgggtccccatttccctgcatggatcaagcaccagccaaacatcaagtaccttgatatctcaaatgcaggaatagtggatgaattgccaccatggttctggaaatcctattcagatgcagtctacctgaacatatctgtaaatcagatcagtggagtgctgccaccttctctgaagttcatgaagtctgcgctcgcgatatatctcggatcgaacaacctcactggcagtg

SEQ ID NO: 23012 - DNA, 460 bp, Oryza sativa
  unsure (1)..(460): unsure at all n locations
gcttcagccaatggaaagcgatgacgtaattctttgtctttctcctaggggatcacctgaacatctggtccagaccaagcaacctgaacaaactccaccattntggctcccttgcgaatgaagcgccgatccaaaatgcggagaggagttggtgaagtatcttgatcagcaaggaaaactggcaagtgagattgaactntntcagtaggagccaatgctttcttgagttgagaaacgtgcaccacaggatgaattaagctggaagcgccagacgataagccaccaggctgacgtgcgcaagcacctgaaatagaccatagaaccggaaagaaagctngcgattagtgcgagtcaaccgattgctggacaaagggcagcagcttcatatacacccaatctctcacagcaaactctctttcagaacgcttagcatcagcctgggacttcatgcggagttgag

SEQ ID NO: 23013 - DNA, 268 bp, Oryza sativa
  unsure (1)..(268): unsure at all n locations
gcgccaccaatttcatcagtcatgctaccttgccattaagatgcaaggcacaattatcccgtcctctgaacntggtaatctccattcgatgcccgatgaatatttcccactagctcatgtagattcatctgccttggtgtcaggaccagtactagtaactacaaggtagtctaaatcaagaagagaaagacaaggcttaacatgggctcgattctctaacctaacgctagggaacacaacacttagatagccaacacacactctaact

SEQ ID NO: 23014 - DNA, 356 bp, Oryza sativa
ttcatccatttaattatattattattattattattattattattattattaatattattattattattattattattattattattattattattattattatagaaaaggcaaatctcatcacaaatttacacgaatccgtcttgatttgccgtgaactcgagcagaattcgtcagcccaatagctaggcatgtgggtgagagatcaaaaccatggcttgcatttttttgtgtttggtattgattgttacaactatggagtatactccagttgagaacgttaagggtcaagtcaattaattccagtatttatgtgatcgcatcgatccaagttattaattaactactccgtaacc

SEQ ID NO: 23015 - DNA, 423 bp, Oryza sativa
tatcagcttacgttcgatcttctctttctaatgatctggtacattcttggtatttgcagaatcatggatatggctttggatcaggccatcaaagagattataagtcctgtcattcaaagaagtgttacaatagcgagccgaacaactaaggaacttattctaaaggtgaccaccatgcatctgtgatagctattgctgtggtagaaaaagattcttatatgcttgcttatttgtttcctgcaggattatgcaatggaagcggatgatagtgcccgatctcgttctgcacatttgatggtcggtacactagctggaagtcttgcccatgtacattcaacgtaattctgcttaaggttttcagatttagtcgctggcaggaatatactacgactactcgttagttctatccatgtttgctcacat

SEQ ID NO: 23016 - DNA, 366 bp, Oryza sativa
  unsure (1)..(366): unsure at all n locations
ctcaggccaatatgcagaaaggcctctatggtttcaggaaatcaagccgcagtcctaggtccatatgtcattgagtggaaacattacacattgaaccttataggtgtttaaattctcaaaactaggtccctgacttctttttcacacgcatagggacagagcagccatggctgagctcgatcccgggctcaccggnggcgattggtggctcggttggagttggggttaaaagataaaatgaacgagccatgtcttgcgattccaatcctctagatttcttggttaggggacatcggagtagcgccagcggcgagtccgagtagaggaatgtntcgggtggtggtgcatgtgcttctacaatcatgt

SEQ ID NO: 23017 - DNA, 334 bp, Oryza sativa
  unsure (1)..(334): unsure at all n locations
agcttcccgggtcattttatcctcaatatngcatattctcttaatnattgagaaacagaaagaactgcctcattatttctgcaatgagtctccttataaatctggcgttaattcaccagatttaatcttcgtttaacggtcaccaataatgcggccgacaagctttcccaggtcattattatccnccagttttatggattcgcttcgattacggcgaaatagaaacagaagattgagtggattaaaaatccacaactaaatctgggagatcgagacagattctgccagatttgatgcaaaggatatgctacagcatcatagtaacacatgactg

SEQ ID NO: 23018 - DNA, 329 bp, Oryza sativa
  unsure (1)..(329): unsure at all n locations
aactacgatatactccctccatcccataaaaagaggattcctagcatcccaagggcaaattagtgagaagtaaaatgactaanatgaccctcatcaatagaaaaggtagtactggtgataggtaggtaaagattatttaagagataaaacttctcgttttatgtgttgaagatangtangatggtagaagttggttctttgtgggataaacattaaactctagaaagttaagtttttttttgggatggagagagtatcatgcaaggtctccggttcctgcagcttgtccatcagcttcttatgccactngtctgngcaatctccttcca

SEQ ID NO: 23019 - DNA, 395 bp, Oryza sativa
agatcatcgcgtggtgaccggcattctgcgaagcattcccatacccccgatacacatgaaatcgaggtagttgctcatttcttctatggcggcttctcccttccaacctcaagagtttttccgggaattctgaatctctatggaagtagcctgcatcatctgaacccaaactccatagtgcatattgcacattttattcatgcctgcgaagctattctgggcattaggccttattttgccttgttccgccgcatcttcttcctcaagcctcagccaaacaagagcaaaccgtgcgttgtggcggcgctggtttcaactcacggatcactaagccaaaatattttccatgcctttaaacctctaacaaggttgcacgccactggtctatgtcaaaa

SEQ ID NO: 23020 - DNA, 309 bp, Oryza sativa
  unsure (1)..(309): unsure at all n locations
tatttaaattcccgcgttatcactgttttatctagccatgcctatttacctttgntatgaccttatcattgttgttattgttactattacgttgttcaccctaggataaacaaaaccccaactagtgggtactctattcatggttccactagtatgaatttaggtagatgcttcgctgattaattaggcaacattaggtggtctttataactctagactgtgggaattctcatatcatttggacactatggaatggttggcttatggtggaattggacatacccctctcttcctctttcaagaccccta

SEQ ID NO: 23021 - DNA, 427 bp, Oryza sativa
  unsure (1)..(427): unsure at all n locations
tctccgctcaccgatagcacattcctcttcctcatcaagaaccaccatggcccttcacttcctacttccttcgtcccgagccggtgagctcccaattgctgacatgcttagtggttgtgctcgtgaatagggttggccacaccacaatgctactatgcaggcctacgccaatgagcgttcatcattacttcctctttcctgatcccctagcttcctcgattctttagttctcatttccccctatctcctgctcgcgacatgcacttgtcgtgttggcatgctgggccggtaacaacccaagcacaacgtggctagatgggctatgccaacacaacccacagctaaatgaaatgtgttgntcttgggctgtgagttgcacatgcgtgcctgngtggacacagaaagacccaacacatntgacaacata

SEQ ID NO: 23022 - DNA, 372 bp, Oryza sativa
  unsure (1)..(372): unsure at all n locations
gatatcttcgagatgggccttcatccaaaccttgtctatattgacatgagctcaaataaactatatggacaattatctcatcgctggggtgagtgcgccaaacttaccactctacgtgcatcaaataatcgtattactggagtcataccatcgagcatgngggaaatgtctcagttagggagacttgatgtttcatcgaatggaaatgaaggacacattccaccagaaaatggtaacgtagtgtctctattcaatntgagccttgcaaacaacatngctccaggaaccataccanaggaagtangttctctacaaaatttggagtatttagacttgtcatcaaacaacctaagtggacagatacatggatcg

SEQ ID NO: 23023 - DNA, 404 bp, Oryza sativa
  unsure (1)..(404): unsure at all n locations
agctnggcttacgctaagggtccttgataatgatttaacccctgaaagcggaagtatgcttcaaggtcatcgtgctgttgctgcatcatattngttgaagtggtgaactgagcatcagtaaattgttgccattcttgcgtatgagctatgtgttccgcgaggttgtactggatctccccagtctgtatatcaagggtgtccattctcctagtgatctctcccaagtcccaacgagaggaacttgagcgccattcagcatgagatggaggtacaccacctgatctgaaaggttggttatcctccccaatgtatgtcatgaggcgcatgccatcngttctcactggcactcgcccagtttgagactccgatgctgggcgtggagcttctgtcattcgggtcatccc

SEQ ID NO: 23024 - DNA, 251 bp, Oryza sativa
tacagtggtggggccaaataataccagattggcgtctagcattgttttgcaatgccatccgaaagttatgattcaaaaattaattccgtgagagtttatttttttataaaaaaaagtttaaaaagtaaacaaaatcttctgcttcatcaccaaaccatgaaaagataaaaaaagcgattagtcacaaaaagaataacaattcttaacaatgatggtgcaaccttctaatcagctataatatagagttactc

SEQ ID NO: 23025 - DNA, 441 bp, Oryza sativa
  unsure (1)..(441): unsure at all n locations
ctaatgcacacaatatgcttaatgatgtgtatctgttctattgtgaattcactcctttcaccgntctggaacatcaacgctcacagcatcgtgtatattactcaaggccgagcccaggttcaagttgtcaacaacaatggaaagaccgtgttcaacggagagcttcgtcgtggacagctacttattgtaccacaacactatgtagntgtaaagaaggcacaaagagaaggatgtgcttacattgcattcaagacaaaccctaactctatggtaagccacattgcagganagagttccatcttccgtgctctcccaactgatgttctagcaaatgcatatcgcatctcaagagaagaggctcagaggctcaagcataacagaggagatgaagtcggtgcattcactcccctccaatacaagagctaccaagaacgtttatat

SEQ ID NO: 23026 - DNA, 328 bp, Oryza sativa
  unsure (1)..(328): unsure at all n locations
tgcttgagctgaattataagaggctctattgtctatattgtttactacaatacgaagagagtcgagtataacgagtcngaagaattcctgggtgtcggacatctcatctatctcatttagtgggaatattactgctgacttcaatataatattcttcttgagtaattcatatatatcttgtgagaatatctcttggttaggtcctaatcaacatacgggattattgttcactataatcaactaanatatagtgattgctctggngagtataaacactaaagcgcatattaattgcttagacgtggtgtttaggaaatattatccagta

SEQ ID NO: 23027 - DNA, 491 bp, Oryza sativa
  unsure (1)..(491): unsure at all n locations
ctcagcttggggagtaccttganagctgggaggagaatgaccatatggtggatatttgcttgcggaacanaatggatagaaattgtgtaaaaaatgtgggttgaagctttgggtaaactgagattggggaaaattattggtgaattgttggggaggggagttgtggctagtcttttctgcatggtttggagagtcttgactaagaagatctatgaatttttggttggatgaatccatctcctgatgaaatgaagagatacaaactgagatctcttgttggtctcgtttatatgagcatagagaatgagagccaacacccagcaccaaaggctacttcacggacacttgctcggctgctcacgcnccagcaccaactgctttagaatttatattcatttatacaccagtgaactcaanatactgtatttatttcctgtggcctgctatctcagactacttagcattaatgcatatgactacctcctgtgata

SEQ ID NO: 23028 - DNA, 432 bp, Oryza sativa
agcttctcctaaagatatgcaaatctggctttcctggtctgtatcacctactaacaacataaaagaatctctagtgttgtaatatctgagcttgatcccctgccttcccctacttgttttcccaatgtagtggctacctatttgatgaatttataaggtattgatgcttatcgtaagaattatactccctagccaagaagttgcttgtgctgctaggttgcagaagcctcttgaatcctccgtgctttctcgctgtaccagcgttcagtcacgagaaggttggtgatgctgtaattgcagcaaccgcagctgttttataattatcacggaactctgaccgttggtagtagaaactattccagctttaatattgacagaacgatacatgtgctctgcacagacaacattatctgtaccctaaaatcacatatt

SEQ ID NO: 23029 - DNA, 342 bp, Oryza sativa
  unsure (1)..(342): unsure at all n locations
acttcttgaagcagatttcggaagtattcaatccagttgcacattgctgatagtaatgcgttcatcatgaccaaacaaaactgaaactgaatttttttttgtagaaatgttatcatttgagaaataggcctggctgtgaatntcggtgcactattgacaggctatttcaggataacaatggagcagctacgagggaaaacaatgacaaacgaaacataagaagtgcagtctgcagttcagcaacattcctattctgagtgcattgatcatatcacacaatcacaaagcatagagaaaatcccctatgtacccatgaaagttcatctaattccttctataccc

SEQ ID NO: 23030 - DNA, 358 bp, Oryza sativa
  unsure (1)..(358): unsure at all n locations
agcttgtgaaagagcaactgctgtctgatttggaactaatatggctgacattattctgatcagccacaaaatatagtcatcagagagcgcaccatgtaatttcatccagagaaaaagtgcctgtcatttggacagccacgaagtctgatgagattcaactttnttgcatgcaataacctttggattcggttgaccgagggtttatggcaattttctcaatagccaccacccaaaggaagaagggtcaatttatttgctcaatttatcttattacctgatttatgtgatcaattaagctggaagcattacactggtttacacaattggttgcgagggtgttctaaccccgataatgctg

SEQ ID NO: 23031 - DNA, 378 bp, Oryza sativa
ctagctgtaaaactggaattcaaggaccgaagtttggtctaggaccctggttcttggcgggcactcttcattttctgttctctaacacagaaaatagctcgacttcttatattgtattatccaagttgaaatactagattctcttgttgaatatacctcacaggtgatcttgagctacttactgtcatttacatgaagaggagactcaatcctttagacacgagttttatgacatcttgagaggacatgacagctggaaatggtcgggacatggcttacaggtgtcttcagaaaaaaaaaacatatgcgggagtttgcagactggaatctggaagactgcccaatgattgatgaagttgcacatagtgactttctcag

SEQ ID NO: 23032 - DNA, 504 bp, Oryza sativa
  unsure (1)..(504): unsure at all n locations
gcttcacgcaacgccatctcagaagctgcaaaatgtgacaggctacacactngattattgcaaggcgggttatgaacttaatcagcatgaaatggaaggagataaaaatatgatatactcgattagatgagctattatacgggaagaaaaagttcggaggtcactgtcaattcagtataagtaaagcactagtatcctaaacacatcttgtagaagcaactcaatgatcttgtagaagcattgcatgtgattgtatgaaaaatgatcaacttttggtcatcagagtggctagtgttttacagggtgtaagtgaccccatctcgcaattggagatagcttcaaagggaaaactgaacaggatatgtgccaattaagtgattangtgcctgcatatatacgaatgaatcatttcttcaatgatttgtgtctggtatacatgccagtattgaaatgaatttggattcatggacttntcagtaactatcttttcatgatactgtatct

SEQ ID NO: 23033 - DNA, 395 bp, Oryza sativa
  unsure (1)..(395): unsure at all n locations
tcagctttcgccaccagtgcgntaaacgagagaatcaatcacaccgtttatttgtttaaaatatgtgctaatgaaaaccgaggaacatgacgtttgaagtttcagaaaagaacgctgcctttaacatgaaagttccaattcttacattccttattgatgtttgttgaaaatatatcctacagaactgcatgatttattagccccctacattcaaaaatataaggaggattttgattgtctagttctatgctttgacccttggtaataaaataatatataggttttgctatacaaaaatatatttngtggattcatgttcgaaactcctatttaatgactatganttcgtaacagtaagaaatntacggtgaaagctttgtcttggagtaaatatt

SEQ ID NO: 23034 - DNA, 509 bp, Oryza sativa
  unsure (1)..(509): unsure at all n locations
cagtactactagntagacttgtcatcatagtgaagttaacaaagntatcacttatcagtgcatcgtacttggcattagcggccgacagagaatccgccagccacactccccacctctaagggaggggagtgacagtcaagtatcccttcattctccctctacaatgcaactcatgcatagccttttgatggaaaagcagaaattccagagaggcagcaagagctataccatttgattagctcaccactggctctcctggttgccctaaagtaagaagtagtgtacgacacttttgtagttatgatgctaatctattcggctaattcctactatattgattttggaatcttgtgctctttggatttacttacctttgtattcctgcaagggtcaagtgctcaggggcggatctacagtataagcgtcagtgtcaagcgacaccgatgactntcngcanaacctataacaaaactgcttatccatatactataacactatgttctaagtat

SEQ ID NO: 23035 - DNA, 290 bp, Oryza sativa
cgctgcgctcgagctttcaagtttagtccgctcgcgcaacggtcgacgagatgcccccagccaggtcatcaccacatcgcctcgaactaccccggatgtcgcgggatcgcttgacgcccgcgggatcctgacgaaagccgggtcgcgtccactcccgctcgagagaatcgggctgatgaatctcccttgatctcgcacggatcgacagcggccgtcccgcgtcggttggtgagaagcggcttacaagcccagtccgccgtgtgcgggtaggtctctcggagggacactcg

SEQ ID NO: 23036 - DNA, 466 bp, Oryza sativa
  unsure (1)..(466): unsure at all n locations
agctgcactgtaaacacattagctcgggacatttatgagggaagctccttcctgagcagtatgcttggctggataatcttatggagaacgcaaggatgattacttgctggccaaaagtaagtgaaggataactaactatgcgatctttaaccacaaacattaactntagagctggatctaatttccgcttatgatgttattctattactgttttgttagaaaaagaacatgatcacgttactccattagttaatgcataaaggtgacttcctcagtcttttattgtgcgggattgttgtgtgtgtcacaagatagactcttgttgctatgcctgatggaagtatcgatgttttgtgaagcttctgttggacttaaacttatatgcataactaaaaccatggtgtcagtgttgcttattgaagttcactgtctgaactgatntgcacactccttacaaatgacatat

SEQ ID NO: 23037 - DNA, 299 bp, Oryza sativa
gaactatgtacgtcacagcgggtgggttgtgcgggataacgtgcctgtcagtaccgtgtactggcgaagaacaacggcacgcggagatcatgagagctttgtccacattccgagaaagagatgctgtggaccacactgctcgagacattcaccctttctgcgggtacagaggacaaagtgaaaaggtgactctgaaaaaatggcagacagtttcgagcttcagtgagatctgaccagaagtatatactgatgggagaccccgactttacacattccaaactatggatactggacgagtc

SEQ ID NO: 23038 - DNA, 325 bp, Oryza sativa
  unsure (1)..(325): unsure at all n locations
gtttcaacaatctaagtgtgtgctttccacaaccagagcgagacaagtctcagcttggtccgtgaggggggtgagaagtgaccaaatttatttatcaagatttgcacaactcccaaagttggcctcgaagctggtttcccaaaccaaaccaattttccaaactttcagagttaggtcgtctccaaacaaccaatcactttcaaggactccctgtcccgctgtctccctgacagccacttgctttccaaanatcaggtntcccagaccttaacaccttttcacaaagcanggtaaaacgaanactacgctaaggaatcacctcaca

SEQ ID NO: 23039 - DNA, 347 bp, Oryza sativa
  unsure (1)..(347): unsure at all n locations
ctcagcttattagcttaaatccttttttccttgccgatacatgaagaacgctcgatttaatgaaagcctatgaattagagaacggaattaccgcctctatcgaactctataaatattggcttgtgatgggtagctttagttttcaaaaaaggaaaaagtccaaatatatgtcctgaacttttggacgaaagtctctatagtatcctgatccaaccctataaactntgtcatatcatcaatattatccctaattaagatgggttttgatccgtagttatatattttgaaacgaaatgaataccttgaatactaatatacatatttcatatgaccaatgtaatctatca

SEQ ID NO: 23040 - DNA, 448 bp, Oryza sativa
  unsure (1)..(448): unsure at all n locations
gtcacctgccgcatgcaagcttcttgagaaaatacttgtcaagagacgttagttatgcttgtattattagtgctttaaaaaattgcaatttggcaactaatccttggtttcttcttaagcttcagagggaagtactagtagaactatagggactcaaatagtggtgaaaggtaatccattaggaaaaatatataatctttntttttcaaggagcccattgaaacgtacgcctcccctggtttctgaccattgggaattctatggaaatgaagtgactcacctaccatgaatctggcannaattcttgtgtcataaatatagttgatgctatnntntggagatgggtttatagttatatactttgatgatgcactgatcgtacaagagnctgatatatattaacactatattgtttttaaaaatagacattaacanaatcttaatcatg

SEQ ID NO: 23041 - DNA, 457 bp, Oryza sativa
  unsure (1)..(457): unsure at all n locations
tgaatgtgcaggtttcatgtgacagtgatattgttgggtatcttgtgcctaatatgaattgcaatgaaaaataaagggtctgataccgtcgtccttgattgttctccagagatttgattgtttcctataccaagaacatcttgttgaataatttcagtctatccgcacttgtgcataggtgaanaaaaatgcgtaaggatcataatttcagcttatacaaaacggatgaagcatgaacatcatcaagtgttcattcttcccttctataattagtcgaccgacaatattgtgggcgacattagtagacaatcgaaaataatccatagtccgtgttccatcattcgtctccagtacagctaagaagaggacaatataagctttttttttcatcatacaatcaccttgctcgaattatacacaatatcaacctatcaccaaccaaccaatttgttacata

SEQ ID NO: 23042 - DNA, 401 bp, Oryza sativa
tattagtgcgttaaaaaagtgcgatttggctactaatccttgcttacttactaagcttcagacggaagtactagtagaactataggtactcctatagtggtgaaaggtgatccattgcgaataatatataatcttttattttcatggagcccattgaaacagacacctaccctggtttctgaccattgcgaatactatggaaatgaagtgactcacctaccatgaatctggcaaaatttcttgcgcataaatatagtgtgatgctattatatggagatgggtttatagtaatatactatgatgatgcactgatcgtactatagctgatatactactaacactatgtggttctagaaatagacactacctaaatcctaatcatggcgcttaagtactattgg

SEQ ID NO: 23043 - DNA, 278 bp, Oryza sativa
gctataccaagaacatcttgttgaagcatttcagtctatccgcacttgcgcataggtgaaaaacgatgcttaaggatcagaatttcagctttaacgaaactgatgaagcatgaacatgatcaagtggtcatttttcccttctataattagacgaccgataatattgggggcgacattatcatacaatgcgaaataatccataatccgtgttcatcatgcgctccagaaagctaagaaagggaaatagagctattttttcatattcaccccttgtcgaa

SEQ ID NO: 23044 - DNA, 383 bp, Oryza sativa
  unsure (1)..(383): unsure at all n locations
tgcaccagttgagacaatctgcgttncacagcacgttagtggaacgcaaaacataaggactanagccacagtgataacaatggtgaattgacatatgagctactatcattataataaaaatggcaaacatctaattcaaagtgcagattgtcagcataagaaaacagacagccataaacacaaaaaggcacttgaaaatagaagttattgtaatttatagtattaacgaataatatgnggacagtntacatcagcanaaaacttctgtagagaaatatgtagtatgatgacaactacaccatctgtgaacacttcctacaatcaatgactcccttntcctgacaggttggtcaacctttnttttcagtgcatnntgctgtcac

SEQ ID NO: 23045 - DNA, 354 bp, Oryza sativa
  unsure (1)..(354): unsure at all n locations
atggcggtattctgcttctggattgttgtcatggccgccgcgagttccgccaattgttgctccatctcttgngacttgangtgcgcacgggaatagtatctatgtttgtcgaggtactccaggatggatggctctgatacctattgttacgaatctgcttgcgagtttgggaatntaggaatagaggagcagattctaacagagagaaaggggtaggaggaaggggaagaacataagagagaacttggagcatgggaagatgcagttattagggaggaatatgtttctgttcacttgttcgatgcctattcccctctgctcactcgtgcttatatactcgcacgtttacattct

SEQ ID NO: 23046 - DNA, 299 bp, Oryza sativa
acacaacttttcattacgacattctttgtatgctgccgtgcaagaaggttgcttgattattgccgatcagggcatcagatgacattgggcattgttctgcttgggtatgataacacaagcttacgggctgcgtttgtccatgaccacaagctatgactgtctcttcttgcatatggccggaagatgagcatgtacgctttggtgagacattcttgaaaatgcctggatttgcgatgaagaaccaaattttttgctaattgcccaggaacatccctccctgagtggaatgcgcgggatcc

SEQ ID NO: 23047 - DNA, 398 bp, Oryza sativa
  unsure (1)..(398): unsure at all n locations
agcttcatcttcgattggaattagactctctaatatggttaaatatgcaattaccactaaaactaagctaatatcggatgtggcacattctattaccattaatttagatggatatatttttttctaggatatatcacatccgatactttgaatcnttttagagcgggtatacgtcccactaacacgctttttaaactgctaaacattatgtttcgtgctaaaacattcaatatagaagttgctctaaaatattaaaattaatctatttttagtttgtagtaattaaaactctattaatgatatattaatagtatcttgatctacgtaaaagactttatcttcgtattcatttaacagagaanataacaccacctatatctcgcgatcgagtatttgat

SEQ ID NO: 23048 - DNA, 355 bp, Oryza sativa
  unsure (1)..(355): unsure at all n locations
gaccttgatactcagctggccggaggaaatgccttaaatcgctgcgcaccgagggattttatagaaagagaagacaaagtttgcttaagcggtgaaaacggaggtaactgtgtgacaattctcgngggtgacggttagtatttaaagcgctgcggtaacggtcggaaaaacggcaatgagcaatattctaggagaagcagatatggcaatatccgaaatattaccaaatataccggacttggggggcatgtgttaacgaccaaatttggtaattcaggtatcggagatggagataaaatcgaagcgaaatccaagatataacaagaatcggctaaagtccaaatcggctatgatc

SEQ ID NO: 23049 - DNA, 448 bp, Oryza sativa
  unsure (1)..(448): unsure at all n locations
tatgtgtgtatatacacatttagtcaaatgatatattgataatcaaaattgtatagtctatcttatcaatgaatagcacagaatgtattctttcgcaatgaataggttgcatgcatagacctttgctagatacaaaatgtatctataattctaattagaataaaaatgcgagaaacattttatgtctaactataaactttcataatcgaaattgtatagtttacattttcaatatgtagcaaagcacaagcaataggctatcaatctttaaatgtattatttggcaataaacaattattacgcgcatagatctttgcccataaaaatttctaggtattgtattagaaatcatgaacatattagccatattgcttgattaaaataaaatattggaccactaatttgtgtgcctatacatcgtcatctgncatgctacggatggctatac

SEQ ID NO: 23050 - DNA, 446 bp, Oryza sativa
  unsure (1)..(446): unsure at all n locations
tcagaaatagccatatactctgcttcagtttatataaggaacaattgcttgcaaacttggtttccaactaacagcacatcctccaatagtgaaaacataatctgtgagcgatcttctcctattcaaatctccagcagaatctgaatccacatagccaacaagtccatctctagatctcccaaactgcaaacaagcactagatgtaccacgtaggtatctgaaaatccattgaacagctntccaatgctctntgccatgattatccatatatctattgacaacactcgatgcatgtgatatgtcaggacgagaacataccatgacatacataagtgaaccaactgcacttaaatatggaactctagacatgtactcaatatcataatctgactatggacataaatatgaagataatctgaaatgtgcagctaaaggagtattcactg

SEQ ID NO: 23051 - DNA, 420 bp, Oryza sativa
  unsure (1)..(420): unsure at all n locations
ttgtctgagactatatcttgcttccaactcgaaacaagaacttgttgaaagtaaaagggtggcgatgtgccaaaaatatactgtattgatctatggagatagattacaaagaccccatgtgttcatatctatacccatgggtagatactattccttattggacangacatatacttttctaaagagaatagacaagatacaggtcctatagacactatacacacttttgtaaaaataataggacaactacttactcttcctaattaatagataaattggcatgtcgcatccttcttcgactcaactatttctggataagcttcatttaattgactaattctcttaaccgtatccactaagaatctgactgtcgacgagtgacaattctcatatgctcaattcacgactctgtagccaata

SEQ ID NO: 23052 - DNA, 347 bp, Oryza sativa
ctcagagcaactttctgtatctcttttggtctggtagtgtggaacttccatagcttgtaatgaataatcagcaaggagaacagtatgagcactgagagtgtcactgcaaagaacacgctttgtcgagcaaaattcctatgcccataagaagtttggggcagaccacctgcgcctgaattatgcacacaaggaatcaagggaataccacagagtccagagttgttctcataccgggatgctggaaatgtgatgagctgccctgatgttgcgatttcaccagtgagggtgtagtggagacatcaaaatctgcaaggaaatgcagacacccaaaccccggatggatgaca

SEQ ID NO: 23053 - DNA, 387 bp, Oryza sativa
  unsure (1)..(387): unsure at all n locations
atcatttatcatatatactataattaaaaaatataggcgacagatatattttgaaaattatgtcattctttacacgtcaagaattataaaaccgataggagtaatatctcgaagtcaatgatgttcatatatttaactagagtcaaacattccgttgattacttnttcttaacaacgtatcactctttctgtctcanaatataaactttgggctccacaagttacctcagaatataacaatttcttcacctatattattntctcaaccaatcacaaatcttcgctattcagaatctctatcgaacttcttgtctcaaccaaccataacctttcctcattaaattcatcagtttcttatatcctatgaattctagacttcttatattt

SEQ ID NO: 23054 - DNA, 369 bp, Oryza sativa
  unsure (1)..(369): unsure at all n locations
ctcagcttataaactgtatcgcaggcattcttcttcccttgctgttactttgttattcgncagaaaggttaaaaaaacacacacactaataagtgcccaattaggcaccacgacaagtttactgttccccatttaaattttattggagcccatttgataatatatcacctctagctacctggtactccttgactcctagctatagctggagtagcttagtggctggttagattccaccctaaaactntatatcctatcacatcgaatgtttagttatatacatggtgtattgaatatangctaaaaaaatattgcatagaatacgactacttcgcgagacgaatcttttaacctaattgctcatgaatt

SEQ ID NO: 23055 - DNA, 412 bp, Oryza sativa
  unsure (1)..(412): unsure at all n locations
tgttaaccagagcacatactaacttcagtttaaaatgaacaaatcaaaaactttcaaaaatatggatacaatcttaactgaagtattacaaaatcacaaagttaanacacaaggtaaaatcgtagctgaagtttaagaacagaaataagaacacaattgttcatttttacccagagatgactacacggtggcccataaaccaggctgtcttacaaggtgatcttgtgggctttgtctgtaaagcctgtgaggccatctgaaggtcgaaaacgggcctagctcgtccagattgtatgacgtcaaaatngcttgttagttgattggaataagactatcttgctcccttctctcttgcttcgttgaatcgtatccctcatcacanaaccgatataaaccttgccaattcaaaaac

SEQ ID NO: 23056 - DNA, 316 bp, Oryza sativa
cacgaatcttcgaaaaaacagcgatcgacgaaaatccgggtttctgaactattcgcatacaatcgaaaacctggaacagggagctaaagaataaccctatttatactaattaatagtggcttagatagatctcaatttacggaattataagaagttgaacgtcagccatcggagctacagatggagagatatgagatttgaagctcgaataagaatttccggacaaggaaatggattatcgaaattttctggaatgcaacggaatagttatgggaattatagaaataatattctcaagaatattattggacatcac

SEQ ID NO: 23057 - DNA, 413 bp, Oryza sativa
  unsure (1)..(413): unsure at all n locations
gcttgtctatgctattcggcacctaaantaaatgtgtatgcacatatacaaatattaatggtcactagaatgcatctttgnntttacgagaaacttaatgcattagttcactataaaatattagttacaattatttttttaactaaaatgcatcttagtatggctggaacagacagcctgttctaaaaaggtcatacccctttctggagcttgtcctcaacagcggtggcaccaagaagaagcatgtctcgctcgatgctctcagcagccgcctcaactttttcatctctgtcagcacttacagatgttctggcagtgttgaatttctcactaaatttcatgtactcattctcatccaagaaacggtacgcaagaaccaanggtcttagacctgagtcagaatacttcattat

SEQ ID NO: 23058 - DNA, 293 bp, Oryza sativa
  unsure (1)..(293): unsure at all n locations
ctcctacattggactatgctttcttcttctggaaaagttcttggctaaaaaagaatgacnaaagggggaaaggcatggctatgaaaaaaaagagaaaagaataaaaagaaggaaataaaatttgctctcaaaacattgagcaaagaaaatatagccatgccccctccacaatcatgccaagaaaaccaatttggagagaaagtataggaaaaaggagaatcatttctttattccatcattccacaacatatttcacttttccattttcaaccacaaataaagatccttgatct

SEQ ID NO: 23059 - DNA, 305 bp, Oryza sativa
tcgatgtatgagcatgccagctgatttgatcctcgcatctattatataataagacaaagaaaccgccggtaaatctattaatgatagccgatcgggctagttgcgatgacatatcatttatctttgagccgatgtcatatgtgcatcgatcggcagttattaatatgtaagaaagaactaaatctactcgatcagctgtagatattaacaaatatattatccttatgtcgatatatacttaagtcaagtgattgggatagatcggtcgccatgccgagacagtatatatcacttagatcgaaata

SEQ ID NO: 23060 - DNA, 355 bp, Oryza sativa
  unsure (1)..(355): unsure at all n locations
agctngagtagnttccttgatgcgagtgtgtgcattaagaagattgatgccacgctccttgatttatgaagatggcagtataacttggtattatagctgttgcagatgcttcatttggaggaaaataaatgatgttgtccaactcgttgaatctgagttaattggttgataactccaaactcccgaacatgtagattaaatcttgaacttgatacttgagaatttcggagtagattgtggcggcgtggagaagccacaattgccggtgtaataattagagtcgctgaaattaaatgttggctctaaagcgaagacgaagataataactcctagagttgactcgttgattgattga

SEQ ID NO: 23061 - DNA, 353 bp, Oryza sativa
  unsure (1)..(353): unsure at all n locations
tctccggcttncgattctccctgacgccactctcttcaccactcttcacgcccgctggcatggcgtacagggcgcctactctccgggcgcagctcgcggcggcttcggcgagccgagttccgctatctgattctcgtcggccgccagtatattccggaaagaacggcttctggagcggcagaggcagatcgggtcgcgcttctaccanctcgagtatggttgaggacaacgtactccgacgacgaagtgtggatggtgaccaaacttcagtccgcgctttctcgagcccaagagaaggggcgaattggatgggcagtagtcccgcttcctctacaacagcaagagtagcatgc

SEQ ID NO: 23062 - DNA, 444 bp, Oryza sativa
  unsure (1)..(444): unsure at all n locations
atgcagcttcttaacaagccaacgagcttaacatgttttctctcgagctggaccgagccaagggtttagcttggttagcttaactagttaagccgaattggctcgttcagaatataagcttgacaagctgagctatctagttattcactccctaatcttcggacaataagttataacctaaaaatttctttccaagcagactgttatgatcacattggtaggtccagtctgcaatgcatagaggagaaaatagttagtgagattcttacaaaaagtatacaagattgtttgttttatcaactcatgtaatgcttctggtatccgacccaatttattgggacccaaccgacccaacagaaccaaagtagctctcaacgaaaagggaagcttggcatgttagttntgacccgggacagctttagccgattctctatccgattcgag

SEQ ID NO: 23063 - DNA, 349 bp, Oryza sativa
  unsure (1)..(349): unsure at all n locations
atgctggacgctatggtgagcttaaacgcaacgaacaatgaaggtctaacacctcttgatgttgccatctacaagcgtgaccaatggtgtacactttccacagtaagttaaatagcacacgctcattctggtttctctcatccttttatttatggtcctactttctgtatagttcaacccacgaataatcacgatgataagctgcttggaatggcgtggngctaacagccgtccatggttgcctcctgaacgtcaaagtgagcagctggacatgagagagactgataatatactgtcaagcttgtacagtaacttgtngcaaaacctactaacaatatcggtgctgatt

SEQ ID NO: 23064 - DNA, 510 bp, Oryza sativa
  unsure (1)..(510): unsure at all n locations
gcttaaacttttcggcttataagtctaaataaagaagacctanacacattnnttcattaatctttggatcttaactggatatactttatcaatcttgtatgttctataatggtatcttcgacattataaaaaaagttggctatacaatcatatttttttagataggagtagagctcgtctactactgcgctgcattcaccactgcagatgtaataaaacctcaacaattagctactacctccattccaaaatactcctacacataccaatacaaacactaaaagactagaatatctctactntatccaatcctaagagtaggtacaatagcaggctataagccagctataaacatattntaaagagataaaggaagagggagaagagcagcgggctatagatctgtagccagctgcagcacgaactccaagacgtaatgtgtgtatgacatgtgggaccactatattaatatatagtanacaactattgtataaaataactattacattg

SEQ ID NO: 23065 - DNA, 450 bp, Oryza sativa
  unsure (1)..(450): unsure at all n locations
actcagcttattcatacttacttgtaatattgaatccagtgtcatcatatctgctgatagaagaacagacttgagccacctgattaatatataagttcaactagaggggatggatcaaagttggagagcgtattgaaattttctgaagaaaaaaaatggcattgacaatgtcacatcataactttaactgtaagcctncaagacatgccaaaacctatgcatgtcaaaagttactagttgtgtcatgcgggttacaattgcagagtgcagactaaatatcaatcagattgaagagacaataacacaagggtaagggaaatcactggagaacactagaattcagtacattntgtcctatccaaagctcatggcagtagtccgaattgatggtcttcagaanaacagtttaagccctcttggnttcttattccggtcanatatttgacattt

SEQ ID NO: 23066 - DNA, 306 bp, Oryza sativa
  unsure (1)..(306): unsure at all n locations
ttatgttatgtncttatacattagtntccaattaatatatcacattagagcaagtacatcccttaacaactgatctaggtgctacagnggacatatcaacccccacaagatccttgttatctactccctctgattcttttatgacttgtgcacaaaaatcaagaagaaaaaactcaaaatgactattgtccttcatttatgctgcactggnaaagatgataatgtatnttgtgagatggtggcatntatattggcagggcaaacaagaaagaaaagatgtaanaatgcatagaaattccaaagcaa

SEQ ID NO: 23067 - DNA, 367 bp, Oryza sativa
  unsure (1)..(367): unsure at all n locations
atctactagctgtggtggcaaagcaccacctaccangagctggagagggtggtcatggcgtaccccgaggagaagaagctgccgtacctgacgccggagagcaccttctagagcggtctcgacacgttctgcaacgtcatcatcgtttcagagcagaacgacatcatgaagagcctcacctacattcccttcaaggtaaatncatatttgagccattataagttcaagtgtagcctccccagattgttccaatataagttcatttctgagtaaccactgcatcggagttatgaacatcaagataatatgtatgagtgataaaggacgaatatcgcgtggaattataaggacgatatacgcttttatg

SEQ ID NO: 23068 - DNA, 369 bp, Oryza sativa
  unsure (1)..(369): unsure at all n locations
ctcagcttgtacaccttacacagaaggtatcttgcatgaacaaaggtatgcagatgctaagaaaaattctgggaaagtgatcatgtctgcccttatatatatggatcggacgatgaggatgatgattctgagatagctacaatcgagtgggtaacgagtaagaaagttataccatgccaatgggtaaagagctcangtaaagaggagaggtatgactttgatataaccaagactgantaaaattttgacttgctactccgagagaagcaaattcaacttcctgccggtcacacaattccaccggctgaagaattgggcacgaaaaggtattgcaaatggcataattctgggtctcatacgactaatgat

SEQ ID NO: 23069 - DNA, 293 bp, Oryza sativa
  unsure (1)..(293): unsure at all n locations
actttctccgaacttacttactggctgtactttgcttcatccatgtcctttatttggatagtctcgagttttgggtggctatgggaataactccacactgactcccttaattagtggttgaatctaatctatatcccttgaccacaataccggatatcactgacatggattaaattccggcactagttaacggagacanagagggacttattcctggctaccgcgatagaagaaattactaatgggctgctggtagctacagtagaacaaggagatgggcccgcgggctgtca

SEQ ID NO: 23070 - DNA, 371 bp, Oryza sativa
ttcttgagtaactgtgtcattggtcgagctatctcaaagaatccttcaatagaccttcagtagtatccggccaagcctagaaaactcaagtaatccatgaacacttcgttcatgagattcataaagtatgccggggcattggttaaaccaaacgacattacggtgaactcatacaatccatagcgtgttgagaatgcggttttgggtatatccccggtcctaaatttcaattgcgggtatactgatcgaaggtcaatcttagagaacaccttagcttctttgagttgatcaaaaagatcatctaatccgtggtagtggatacttggtattgatagttacttcgatcagcgagctggagtcacacacatttc

SEQ ID NO: 23071 - DNA, 342 bp, Oryza sativa
  unsure (1)..(342): unsure at all n locations
tggcattaattggcaaagggcgccgcgcgaattcagaagtgtgtttttgccaccaacgcacccaatacacttcaatatgtccaaaaatcatgttatggtgcatattgaactttatcattccggtcaaaaacatcgcacccgtgtgagccaatatatgccaatattggcattaatggacaaaagctcgccgcgcgaatcaagaagtaagttnttgccacgaacgcacacaatacactccaatatgtccaaaaatcatgttttggtgcattttgaactttttcattccgtgcagaaacatcgcacccgtgtgagccaatatatgccaatattggcactaattga

SEQ ID NO: 23072 - DNA, 348 bp, Oryza sativa
atgatcatattttggtcatacgaactccgaatcgacccgctcaagtcttctaatgtttgttataacctaaagaaccctgtgctttctttatatgtattggtattgcttctttataggcttgtagctttgcttgtgtgcttcgcgtagcttctgtcgtttcggaggttcccgaagcgtggttcgtggtctgtcccgtacgttcggaaggccgttctctctgagcaaggcaagacacatcattcttgagcatatcgaatcccagtttacaaaaatatttttaatttacattaatgcattattcgcttggttatattcccgcgctatcactggtatatttaaccatgccta

SEQ ID NO: 23073 - DNA, 526 bp, Oryza sativa
  unsure (1)..(526): unsure at all n locations
taggacctatagatactcagctttccagaccagcaggcatatgcaggtgtattgtaccttactacttacaagatctgattagaaactgctgcgatgtttctgcacatatggaaacgcacgcctaactntctaaagagattntacctgatgcacacagcaaaatgatctgttcccatgcatgcagtcttgatggctatagaacatgagactgttcttcacctattgctaagaatggagccactgaacttggagaaataggaaacagtcagcatacgaaattgaaatggagtcagaggagggtgtaactagaagaatacctccccctccttcccaaacaataatagntttcagtattaatggcacaagtaatcttgtgttcttgccatgatctgtctcctgattacaaggctctcgtctgaacctgaattgtatccccagactatgttcaacttagaatatgtccagtatattctttccataaagaaaactccatatatatttaaactattcgatttcattcatggat

SEQ ID NO: 23074 - DNA, 336 bp, Oryza sativa
  unsure (1)..(336): unsure at all n locations
acagcatcaatttgttctcgaccattgttattgaaaaacatggcctgtacgagtggcgtaacggcattggcgacttcatctctagctccttcaagcttctttgatttgttaaccaagatgtcgaattgagcctcggatttgattttgcgatctggacaaataaattcacatcaatgactgggcatgaagatgagagtgngtttttgaagttttcagctacaagtaccttcgacatctttcagagccgagtccctctgttttgccagttcgaccttgtctttcttcaaaagctggattcgcctttctagcttggatatctcggcagctttcactata

SEQ ID NO: 23075 - DNA, 402 bp, Oryza sativa
  unsure (1)..(402): unsure at all n locations
agcttattttgtaacattggctaagaacatattttatttttnttacaaacacattcatttgctgatattcatacggcttgcatatgcccaaccgataggggctaaatataatagctcttccgccctactatgtttgtcctagcctcctcctatgtgtgaagcaagaccaagtgaaaatctatcaatatatggaagctagtgatgcaagcgtntaagttcacactgatgattttaagcccctttcctaatagataatataatagattattgtcaatattccttacaaatgcgaataaactttgagtactttttaagttactctttctaaagatgtggctcaaattctcaagttgaaattgcacaagagaaaactcttttaagggtatattgagcaatatttac

SEQ ID NO: 23076 - DNA, 406 bp, Oryza sativa
agctttggcaggcagtcccgagcaatcttttttatacttaaagtgagcaaccactggaatgagcgaggtcaggccaaccaggagaagatataacatggtgccagacctaacgagcgaacacacaaataagtaggatgtggttcactgtctccaattcttgagtgcggaaagtacagggcgagtgtgtatcaataccacgcttctgcaggaggtcagccgtccagcaacgctgttggagcacaagccaaagaaaaagcttgcacttagcatggcctttagccagccagagcagatcatcacaagctaatgagtgctgactgaagaataacgcttgataagccgagcgggtctagtaacgctgattgctcattatacgccaaacaagtcggtcctctgtgagttcttt

SEQ ID NO: 23077 - DNA, 384 bp, Oryza sativa
  unsure (1)..(384): unsure at all n locations
aaacagatgtttatatctcttaaaacgaaccagtcctcatctaggttcagaaaaagaagcctcgcctctgataatngcattaagaacaggggacaccaccttcgcccagtggctcatcctgtgacatcgtgatatctgcaactgcaatcacctcgaacagagctgacaatgtgataaacaagaacgtacttggatgtgcttggattcaacaatatctctaaacatgaaaaccaggcttacaactctatgagaaatacaagtgcattcttagaaatacagattacatttttcgagcacaaatatagtcttggaaaccgtctcgccgactgggtgggacaatcggctagatccccctaaagaggtattgaagctaactcacgcccc

SEQ ID NO: 23078 - DNA, 374 bp, Oryza sativa
  unsure (1)..(374): unsure at all n locations
agctggtatgaatcatggagtaccatcaattattggtattgtcatgcttaaagggtctctaataagataatagagttcttgtacatactaatttcatgcgctccatatggaattccatgacgctaccaacatacttgagcatgaaacaagctcatctacaaaagcagataagtccacctaagataatcatgagataagtagtgacaggaaaaatcaagtgcccatcttgcttgtttgagaagtgaggaactgattctacctccgtcggtgggatgtgtgggtatgcacccncaccattgagggttcgagttctttttgactttggactagggtgcctttatttagttattggaattatatttaattcttcctat

SEQ ID NO: 23079 - DNA, 223 bp, Oryza sativa
  unsure (1)..(223): unsure at all n locations
cggacnaacacgagcgcctgggctagggcttttttttggtgctatgcgttcacggactgcgcccgttagaatgcccgacccctcgcgcggcgcacattagttgaagttataatttgctttctatatatataggtcacagcttagcccaatgctaaaaacccctgcctatgagctgtgatatactttgccggactcacggtgaacgattccgtacactggctgg

SEQ ID NO: 23080 - DNA, 376 bp, Oryza sativa
agcttgtgaggatcatacctctgaatgatgagattcatgcctgaagaagaagaacgctcagctgaagggtttcccagtgctaggaggagtccggatccgcaccacgccctgcaagtctacgactgctcccgtgcgcattcagcttgtgcccaggaacccagctcctcccgcagatcctccagttcttcccgcagttccgcagcgcccgcagctccagctccagcctgtaacgtcccgccttcccccaggccaggcccgcttacatctgatagctttcataggtcatagactgccctcacagaccaacacatgttttttctgcacactatgtcctcactcgtgtgcaccccaggagaaatttccggtcggtcaccca

SEQ ID NO: 23081 - DNA, 394 bp, Oryza sativa
  unsure (1)..(394): unsure at all n locations
agcttaatattgctcctctcaaagctggttttattttcatcctacctattaccactcagtcgtactgcagtttgttttgacatctcaataaactatacaatgtactgatgttttatctatacctatatattaattagacacttttttagaacctctcatgtgatctaaccgttgattaaacagattgtaatatgtcaaccgttgaaatttgaatccacattctatgtggtgtgggtctctttaaaatccatctaacctattgccaagcccattgaccccgatccgttaagtacaatattattttttctttttatgaaagtgcgtaatctttnttttttttaaaccgatcgatcaagcagtctaaaatcggtggtggtatacaggggcattcata

SEQ ID NO: 23082 - DNA, 397 bp, Oryza sativa
agcttgccaaatgttagcaacagtctgaagagatagagtcacagagacaagaaaggtggcgaagaaggatgttacgcacgtcttctggtgaagcggatgatagcggcatagatgagtgtagctagagcagggatgacaagaacaggcagagcttggatgggctgcctccagctcaaattgcgcctcctggccctccagaaagcataaacgaacaccaggacctggcgatcaatttaagcaagaaaagataagaggaaaaactgaagtttttcaattcagaagtaaccaaaatcacatgatacatcaattgagattaaaaaaaagaagaagaaaaaagactatccagccaacgttggaggcgacttgcgtgatcgatcatcagcatccgcgagtagca

SEQ ID NO: 23083 - DNA, 401 bp, Oryza sativa
  unsure (1)..(401): unsure at all n locations
agcttctgataaaaaacgggtggntctagcgatatttgtaatatgagtacctttacgccttgccgagatgtaaagggccattttaggattccatttcttaataccatgaccaaaatgaactcccgcttctatcatctctttcaaattgatgttccaatatcttcttgtcattctttccacacttccttttgattttttcttttttttcatcctacctttccattacgaaatttctttcttttcgaagattaagaaagagccgaaataacttgaaataaataataattgttccgatggaaccttctacatggtataagcataaccttaatgaattaactaaacttctttntaattaaaataaaaatagaaaatctacctcttagcgtctaaggcaaaaatct

SEQ ID NO: 23084 - DNA, 401 bp, Oryza sativa
  unsure (1)..(401): unsure at all n locations
agcttcaatctcgtttctaaagttccaacctattttataaaaaaanacatgacttcaatagcccacactttcttcaacatatgacaattatcttcttaagcacatagtaatgattggatattcagatcatctgtgcatttcttctgctctcccgaaaattttaaaaaaaaagaaaaagaaactgctacactttcatgaaaatcgcccccaatggtttgatagagcatgtacaatcggtgtccccctggctcacatcgttcggctccgttgctatttgagccgacgtcatcacccaacaggggcgtgcggtgcgatgaggggacacgcccctcgctcactttttagctgagccacggagccaagctctgcgttgggcacgcagtatcttgtggacaccgttc

SEQ ID NO: 23085 - DNA, 401 bp, Oryza sativa
gcttctgattgcatggagttgcgtggactgactttccggcagctatgtttctcggatttgggcacttgtcggcgaaatgacccattccttgacaattgaagcaacagatatcttcccggactcggcattttcttttctcattttgattcctctgtcctggcactggagttaggctgaaactgtaatcttggcgaggatttgtgttgccttgatgcttctctccattggaactggcgggttggttggccatcttcttcgtcagcagaaaactgaattgacaatcttttggtacatgatcagttccttcacaaaagaaacaagtgatcctgctcgttggacacctgtcgggtggatggtcttcctcacaatgaacgcatgtagtggcacacgagctggcaaca

SEQ ID NO: 23086 - DNA, 387 bp, Oryza sativa
  unsure (1)..(387): unsure at all n locations
agcttcaggaaagtaaaatcaataggttatctcattatcataactgctgcagntctcatctgtcttttaattcaaggtcttgtactgtcatcaacaaatgatgcactagaaccgccagccaggtcagggagatggttacagaagttttttgggcttgctgattctcaaaagtcactaacaagtccaggtcagtcaaaaaatgaaagtgacaagtcagatccccttatcaatgaaaagaaagaaaagaggcataagtacttgatgctgcttgcaattcttgctgcatccattgcttaccaagctggtctgaacccacccggnggtttctggtcagaggacagtcgtgatggctacaagggctgcaacccgctccttaaagacatacac

SEQ ID NO: 23087 - DNA, 338 bp, Oryza sativa
tagcttgtgctttcatgccctagttcttttttatttaaccatgactgagctcacttctggcgccgtgagctcactgctgggggtcatccacaacgaggcggctcttctcggcggtgtccgggacgacgtgcagttcatcaaggaggagatggagagcatgcacagctttctggggcacctggccaggagcgctcctcagggtggcgagcacgacgagcaggtgtggacatggatgaaacaggtgcggctggtcgcccaggactgccacaatagcatccacctctacctggtctctgggaatccaaaagattaccgggccaatggcagacttcagcgac

SEQ ID NO: 23088 - DNA, 403 bp, Oryza sativa
agctttaaacttatttacaacatttctttgtttacttgtacatgcgtcgattaaatcaatatattctgttactgttgaacggtaaataaaaaagaattttgtaaggtattcgtaaagtatgtctgaactctgaatagaaaagcactccgttttagtgaatacaagagcacactgttttttttctttttattcagaaaatatattccttttttcagcaggggaaaagaggcaaagaaattaaagcatactaaagagtgatatgaatgtgcaccatcttttattcccagccgtcggcagccagcatctagctatacgcctatatatatattttccgcgaggagcacctagctatatatttttgctacagcaaagatgtagatttattcttcattttaaaaatggg

SEQ ID NO: 23089 - DNA, 313 bp, Oryza sativa
ggatctataagtcgactgcagcatgcatgcttatataaagcatgccctagtctttctcttccgtttgccccaagtcccgagctccctcgtcgcccgtagcgctgtcggcacgttgccctagccgctagccgtcgccggcgatctccaatcgcgccgcgccatcgccctagccgtcgccgccgcttgccgccgccgtctttaggtgcgccaaggtgaaaagaaacccggacgcacctccttcttcgtcgccgggcgacgtaactcgccgtcaccgtgcaagccgagccgccgctgccgtcttcttcgtcgccgg

SEQ ID NO: 23090 - DNA, 362 bp, Oryza sativa
agcttgcctttaggtgtataagcgtgccgtttgatttgatcctgcatcaacaagaaacagagacaaagaaaccgcggttaaatccataaacgatagccgatcggctagttgccgatgacatatcatttatctcgaagccgatgtcatatgtgaatcgatcggcaaatatgaataagtaagaaagaactaaatctactcgatcggctgtagatattaacaatatatagtccttatacgacgcagaatggcgactctcttctctggcgacgtccatggcgactctccctaggagatggtcacgccggcgccacctactggatgggaattctcccgggggattccatccgcgatgaaatttggag

SEQ ID NO: 23091 - DNA, 369 bp, Oryza sativa
cagcttgtaaacaaggactctatgatattttatatcttcgagctgtccagcagcatttaggagctcgacatgatgtacgtacatgttgctacttgcttgcgctagcgacggctttgcttgtagtaagctgtccacctgccctgagctctgaatcgaggcggagagctagtttctgcaccatcgcaaggctgtccatgtttaccatctacgatatcactcttctctacactgaaaaactcttctatgttggtctattaattgcaggaacaagattaattacgcttattttcttgattatgttggaaatagaacacgtgaaaagatagatccaaatatgcatcaattaagggagtcaattacgatcttaac

SEQ ID NO: 23092 - DNA, 269 bp, Oryza sativa
  unsure (1)..(269): unsure at all n locations
agctttctttcagaccttgatcgttgtacctcttaatcctaaaggaccttaaaaagctcctagagtctatcatataagctttgcacatagtacaatctagctaatacgggtaatttgcaattagcatgcaccgtgaatattgtcacctttctccagagagagcggacattantgagccgtggctggctgctgatgaatggtttgttactgatgaaggaaaaaacatgacgtacgagtcaaaccctttcttctgcatcaacgttagcatc

SEQ ID NO: 23093 - DNA, 404 bp, Oryza sativa
  unsure (1)..(404): unsure at all n locations
agctggtagcctctctgtcccccttgatatgtatctcgttgtgccctgatgtgagatgaaatggaatggaatgaagcctgatggtccgacatgactctatgtgctgcttatgtcactgaacgggttctttccgtttgtgctccaggcaaaccttacgtttctcgggttctttgcaaattccgggtgtagtgcatcaaagtttttccactgtcgagcatcggcagggtgttgaatcttaccgtcatttttcctaccctcctggtgccatctcatcaactcggcatcggtacggttcgaaaatgtcacaccctaaaaatcctaaatttataaactattggttaaatggaattattagaaatgattntaaaagcctagaagaaaagatctaattntaaataacaaat

SEQ ID NO: 23094 - DNA, 398 bp, Oryza sativa
agcttaagcccagcctcacattcgaacggtgatatatatccttataatatgtatgtttgtaataaggtagtatctgctaaatagattttttaaaactctggtatataattagtactccctctaccctaattgtaagccttatattttttaatatggtcttgaataacatattttgaccaatattttattttattatatgatcccaacaaatataaaattagcatcatatgaaagtattttaaaatataatagtgatataatatacataatatttatttaagtataaatatagttagtatgattattaattaaaagctatcgagtttaatttttctttaaaagtaggcgccctgtagattgagatggagggagtaactttatcatacggctcttatcct

SEQ ID NO: 23095 - DNA, 404 bp, Oryza sativa
  unsure (1)..(404): unsure at all n locations
agctntcaatcttaactcagaacaccatatattattatacagacatttacgaatagcaggtggcaataaatttaactgctaaggtgcttttgttaacatttgtcaaatgtaaacaggtttgattaactactgttaatcatgacataatgcaagaataagttgctgcaaagatagaagtccatttgttcaattttcatttccacgcgcagcgcttgctgaggactactccttggcacaggacaagcttcaaggaacaaaaacactctaattttctgctctcatcttacttcgataaggcattnttttccttaaataaacaccgcacacaagcaattgcactaaaaatggctctgtcagaccaaatggccgccacatatatattccatccgattatacagaacaca

SEQ ID NO: 23096 - DNA, 402 bp, Oryza sativa
  unsure (1)..(402): unsure at all n locations
agcttcttcgcttcatatgtgcttgntggcttggagttgggttgcggaaaaagtttcttcaacagaaccaacaagtcattaaaactactgtcggaccaaccatttctggccttcaatctcataagctcaagcaccgtccgcaacaatgtgaaatccttctcacagccctttgtctcatcgtacaaaagatcattcgctgcctttttcaatgcatcaaagttatccaacccacgagcggacccagcaacaacctcaggttcaacatgacgtaacatctcttccaaatctgcaaaattaccatcatctacgctgacattaccatcatcggcatcatcaactgtattgtgctgaccattgccaccaacaagttcatcataatcatcaacgggttctactgcatgc

SEQ ID NO: 23097 - DNA, 360 bp, Oryza sativa
  unsure (1)..(360): unsure at all n locations
tggattangttggttgtgcgatgtgtatcttatgaagctacagagaatgcttctgttaaatcatatattcatattggcgctattcgctatagtggttttgctgtatcaaataagaagattccatgtttggcatcatccattgtgggattgtattttatagttaaagtgttgataaactgttgtcaactctgataaatactactagtatctgaattgtgatttgtgtttctataggtgattgttagccatttcccaattacaccaatattatattctgaatcatttccttccattggtggcaagtgtgttggctgtcttgcatactatgaagagaaagacggacttcgtattctttcttac

SEQ ID NO: 23098 - DNA, 409 bp, Oryza sativa
  unsure (1)..(409): unsure at all n locations
agcttgtgaaatatcgaaaaggggtgagattatgttattntgctaaggcttgttntgacttgttggctgaagctttgagcttgctgtacaaaaaaaaaaagaaagaaaacctattaaaagaaagaaaaaaaaatcagaagtgaagagaagaaaaaaaaaggaagggaagagaggaagctgttgttgttgctggtttgtttgtgttattttcgtgctattttgagtggctacgcttgtgactaggctcgcgtctctaaagggttttgcctaggaccagcacaataccattcgtgaatgattattcaacttgctttgattaatgtggttctagctgtaccttgatattacttgtagccacctatagctccacaaaattttatctactatatcaaaagatcgggcttgttgg

SEQ ID NO: 23099 - DNA, 386 bp, Oryza sativa
  unsure (1)..(386): unsure at all n locations
agctttactgtttgacaccttttattatgtattgtaccaactcctaaaaagttgagtaactgcggtataaaaggattttaaggtattgggcacttgatcacgcgcactttggcctaaacaaaaagtgcctaagtccctaaaagaacgtgacaggccacacctgaaaatatgggctgcagacatattaggcctagaccaaaaaatatgccttcgacaccctttaaaggatgacgcatgtaacatgctctcgagtaataaatcttccgggtgatatagaccaggtgtagctcatatgaatagcttctgatctgagtgattatcccttatgagatactccanaatatatataataattgaatcccgactggcgcaagtattcgggtgat

SEQ ID NO: 23100 - DNA, 390 bp, Oryza sativa
  unsure (1)..(390): unsure at all n locations
agctntgcctgcacgagttcctccagttgttgggtcatcatctgatgccttttgattatttggatcattattggtttcttctctgtcatggattgtcgatgctagggaacctccaatctcaccttccctctttcctcccatctcatcttccttctctaccaccttatcctgggatttcttacctgtttcccaatgagacagttcccaatgtatgaatgtggtcatgccttatattaacaaacatacaacatgctaataaagactctggtatcatttaaaaacatcaagcataactatgataaaaccatcacgcctattacaacatgggttcaacagggaaaagacattaaccctgatacatttgaagttacagaatggtggtaatgggat

SEQ ID NO: 23101 - DNA, 377 bp, Oryza sativa
  unsure (1)..(377): unsure at all n locations
agcttggaaatgatccaataactcttatttatcttgtgatgtggctcaatgcatgtttagtttatggtgccaactatataactccttgcggttctataaatattgacattttacacaaagttgaggtcaaacctttataactntaaccatcaataacataaaaaatatttattttaaagaaacttcaacaatatatatagatttgtctttcaaaacactataataaaaagtaacatgcatctatttattgcggatattataatagaaaaataacgtcaaaaatatattttgtatgccgtgtcattgtcccaaatatcaaatataatgaaaccggaagtccaattgatgggggttggtcctctaattaattgctcatg

SEQ ID NO: 23102 - DNA, 388 bp, Oryza sativa
  unsure (1)..(388): unsure at all n locations
tgctttgacatggacgtgctatgggtgttctcatcaatacgattagagcctttttagaggccaattaattgtgcacagtgatgttaatagaattttctcaagtctaagattcaactagcttaatttacataatttaattttatctttcataggtggaagatttgaaaaggtaatcttgatggatattgaagggtaggagtangtgctgctttccctgttttgggcactgattatgcggcagcagtggttctgttatgggtaattaaataacctgatctttttgagcaggtagtcccgggcatctacgggattcagtatgtcgtgagatcatggtcacataagtcctgataaacacataacattttttaaaaactaggcttataatttg

SEQ ID NO: 23103 - DNA, 329 bp, Oryza sativa
gagaagaaagttagctctcatgagaagcaacttctttattttgtctcatgtaccactttcatcatataccacacacacattggacgatcttgaactttgagttggttagacatctggcttagtctaaatttttgacttattaataaatgggaatgccagtgttctatgtttgatccctaccgagctccacatattctaccttagagttgaaatcaaaaagggccaaatggtgaggaattctaaattgatacacttggagagactgtgaatcatatgaagaaacttggcttcttttttcaaaatcattggaaactttccggaataaaatt

SEQ ID NO: 23104 - DNA, 423 bp, Oryza sativa
cacctgcggcatgcaagcttttatatggcaaccaaattgtattttttattgagagaacgatattattttcttttctaggaataatatattcaaaaccttgcattaactagtggttgcaccacgccaatggcagggttctggcctcacgcgcactttaggtacatcaccgacaggggaagcgagaacccaacgcagcaagccaccgaaccactggacgccatggaaaccggtaggggaggccaatgaacaaggtgcaagcaagaccaatcttgtgtatataaggccataatgtacagctcctcctcaaggcacgggaggtaatcgtcgttagtttgtaaatactttggcgtgggccaatggtaccgactaacttgactactgacctgacgcaaataggtgttgtttgtacatactgtatgtatt

SEQ ID NO: 23105 - DNA, 408 bp, Oryza sativa
  unsure (1)..(408): unsure at all n locations
agcttatctcgattagaatctagttattaccacctatctgttggaattaatgggctaggcccaatttattcacaattaattccactggccacaattaatgctacggggattaataccaccttagaaatttaagtggggagatctcaatttaaatagaaagctattatagaacccctcttgactggttgaggtggtagtgggacagccacacacgtgcgagctgggctgggccgggccgtgggcgaggcangcggctactctctccctttctcattattttgtaatggacgggaattgaatcaacgtaactcagccgatcaattccgtattatcctggggcgctctctctctcacacacacacacattattttgtaacggacggtaatcgaatcaatgctaattccact

SEQ ID NO: 23106 - DNA, 417 bp, Oryza sativa
gtcacctgaggcatgcaagcttagttggtataatggtttaacccattttattatttgtcgtcgaaagtgtttttctttgttgtgttgagggtgaaggtttgatttatgctacaagaaggaatttgtctcaaggtggagtttgttgagttttaatccaaattcatttgcacacgtataaaagctaacttcggacggagcgaagcggaggcccgtcgccggagacttgggctggagcaaagcggccgttttagggtttcacctttatatatacttctggaatgtaagctgccgttcggcgttctaacctcatccgatatatagtgaagatatttgctagctggcgcctatggtttttctctcctaatttaagaggggttgtcacgttaaatcttgtgtcttctgtgattggtgtatcat

SEQ ID NO: 23107 - DNA, 387 bp, Oryza sativa
gcttatgtcgcaacatcgtcgaaaaagtctttggctttcgaccccgcgtccgacctacaggagaccttcgacaagttgcgtgcagcgggtatgaaactgaatcctgagaagtgtgttttcggcgttcggcgcatgcaagttgttgggtttccttgtttctgaaagaggcatcgaggcgaatcccgagaaaatcgatgccattcagcaaatgaagcctccatcgagcgtacgtgaagtacaaaagctcgcaggccgaattgcggcactcagtcgattcttctcaaaggcagccgaaagaggtttgcccttcttcaaaaccctccagggcgcgggaaaattcaactggacacccgaatgccaagcagcgttcgacgagctaaagcaata

SEQ ID NO: 23108 - DNA, 359 bp, Oryza sativa
tctaagcaccgcggctgcagctcgtcgccgctccatttggctcttgttgaacttgcgtgaggccttgttctgggaggatagttggctgccaggagaatccatccgctgcaaggcgccggctctctatgctattatcccggctcccatttccaaataaaaatggtcacataagctctgtctgataagccggggaacaatgacatcttcggtgcccttggtattcaagccattcttgagtatttattctagtggcaagacattcgtgcagagcacctcatggaccagcccgatgtgcttttcttgagaatgggagggcgggcgattactcttcccgatccggttattaagcgttgtttcta

SEQ ID NO: 23109 - DNA, 397 bp, Oryza sativa
agcttggcccaagcggtgaggcggtgctttcatatgaggcacttggcgatgtctgccatccatcttcttcattgatgtcgccttgcttttgctagctgccatctgttgaaaagacggtggggaatcctatcggcttctcctaactgccgcataagggaggagtggagaaataaactcacaacagcgaaggaggaaaaggaagggacaactggcgggcctcacatgcggacttagtcggttagactaggctaatgtgccacatgagaaaaactactctcaaaaccaagtgaaattacaccaattttaataagtggggtggtaagatatctaatattacattttaaggatacaaaatacattggacctatatttatggagtccaagtggactttgttca

SEQ ID NO: 23110 - DNA, 401 bp, Oryza sativa
  unsure (1)..(401): unsure at all n locations
agcttctggattntctntgaagtttttcgtttagttgaaaccagtcatgcactaccctgttttcacaaaaaaagtgaaaacaaccaaggttagcctgcaaaggaaaatgattatacaaaggtaaatatgaagtattagttcaagcaatctctattatgaatcttgcccggcaacgacgccagaaatacttgttggtatttcttaacgtcattactacaaatataattcccagcaatggcgcagaaatacttctggtatattatggttacagagttcatcagcaagcgcacggatataccattgtagcatttcacccgagaatattccaagggtatcgtatttattttatcccgtgggaagatcatgtagagagagattgactaataatttatatatattac

SEQ ID NO: 23111 - DNA, 355 bp, Oryza sativa
agtctggaacatccctgagaaggtcatttttgtttgttttactccgcagagaatgatctgcaggaccagttttttaatactactaccatgtactttgtactactacttggataaatcccctaggggctagtgctacctttacaatcatgatagtctgccacttcatctaagcctgtttttgcaacagttacatgaaaaatgataaccatgttgcatgttgtcttccatcaacaaatgtacatttgagagggattcctctcatattacagatctcgttcaactatcttggtgcacttattaagaaaaaaaacaccccccctccgcccaactaacctaaaaataaataaacgtgaaa

SEQ ID NO: 23112 - DNA, 372 bp, Oryza sativa
gcctatatacccgggtcaaatttgaattttgtttatatccgagtcaaatttgaatttgaaatccaatattttctatatataggatttctatacacctaaaagtttataggcctaaaggttataaggcaaaagtttacatacccgattcaaatttgaatttgaattatatcccattcaaaattgaatttgaaatcaatattttctatatatataagatttctatacatttaaaggttaatcccctaaagtttatgaccccaaggttataagtcaaaagtttacatacccgattcaaattgaaattggattgcaacttttatatataggatttctattcataaattttctatctttgggcttttaaaaatattt

SEQ ID NO: 23113 - DNA, 198 bp, Oryza sativa
ttatctaacaaatgaaacatgcatgctcagtcatctatatagatctgtatatcatgcatgatcggggataaatgcctgtatctatataccctacaataattgccatatacacctgttcggacgtatgctagatagttattctgctcgaaataatgaagaggcagcattgtcctccatatgagtgctgctatattacac

SEQ ID NO: 23114 - DNA, 387 bp, Oryza sativa
tgatcctcccaggagacctgtaggcatgcaagctgcgtgctcgcggtatactccgcactatactatccttttgcctctcgcgcttatgctaccgttttaagatctggccccaccttccagtgagcccacctccccatgagagtatcttctctctcttggcttagctgataatttttcaactcagtcgcttgatacttcctaaaaaatccatcacattaaatgggaaacatatctatatatatctatatatatatatatatgaagcactaaatgtggataaacacaaaaatttcacaccttgcatgtatattatgagatgaaattttccggctaattacggaatgagatgcaaagttgtgtacagtaaacatcttctacaatggataa

SEQ ID NO: 23115 - DNA, 392 bp, Oryza sativa
  unsure (1)..(392): unsure at all n locations
agcttaggcctgacggtactatngaaaagttcttgctcggcttgttgctaaaggctatactcagaaagaaggcgaagatttctttgacacttactcacctgttgctagattgaccacaaattcgtgtgctactttccctagcaacctcacatggtcttctcgttcatcaaatggacgttaagacagcttttcttaatggagagctggatgaggagatctatatggatcaacctgatgggtttgtacttgaaggtcaagaaagcaaagtgtgcaaattgttgaagtctttgtatggtctgaaacaagctcctaagcaatggcatgagaaatttgacataacattgacatctgcatgctgtgcaagcaatgaggcagaataatgtgtgtactat

SEQ ID NO: 23116 - DNA, 335 bp, Oryza sativa
cgcagcagcaacaacggggacagcaaaacatttcgcgcaacgaaaacaccaacaggggaagacgcggacctgatagacaacaacagccaaagtgaacccaggccggacctggacacagggaaaaaaaacacgcagcacagaacagcaggatcccgagaacctaggccggacaagcaccagcccacaacggccggaaccaagagacccgaatcaacaaggacctgaccaccaacaaaatataagcgaggccctctcaacaaagacggagacgaagtaagaccggcaaaaagaaagcgaaacatatgagcaatcaaagcccaagagagcaaaaaccc

SEQ ID NO: 23117 - DNA, 351 bp, Oryza sativa
gctgtctttctctttcccgcacaatgaccctggccaacgggagacaaacggtggtagtgtttggcttgagatgctcccttgatggaacactaatggccaccacgtttgataatccttttgtctttaggggaaagccatgtgatttatgacgatagcaaaaaatgatgcgagagaaagaaaagggcatgacccacccgtaacaaatcaagaatgcgatgcgcaagcgcaaccatgtcggcattaaatcacgaccaaccaccatgacatgggaccacaagtccacaactcgtaaagactgtactgacattgaccatgatccaagggtgatgcaaggatattttgacttggacc

SEQ ID NO: 23118 - DNA, 355 bp, Oryza sativa
ctgcacgcatgcaagctttatgtaattaagtagagctgtctcttctttgttttcacaatgaccctggccaacgggagacaaacggtggtagtgtttggcttgtgatgctcccttgatggaacactagtgggcaccacgtttgataatccttttggctttatgggaagccatgtgatttatgaggatagcttaaaatgatgcaacaaaatgaaaagggtctgatacccccggtacaaatcggaatgcgatgctcctggcaaccactttttcctctaaataccaccaacccccatgacatgggaccacatagtcacaacttcgaaagactgtactgacattgaccatgaatccaaat

SEQ ID NO: 23119 - DNA, 342 bp, Oryza sativa
  unsure (1)..(342): unsure at all n locations
accanaaacaccgcggcagcaagccggaaaccacagcaaaaattttaatgcccagacaggagagggagcgacaagaaaacaaggccgcccaagcagacccggatgcaccgactggcaacccgggagcctcaaaagaggacagaaaaaaaggaacaacacaaaaaccaaaaaccctgaacgcagggccacccatcgctcgacttaaacgcacaacacgaaagaaacgctccacaccaaagaggggcagggaaacggcccaaagagcccaacacacccgagccgcctaaccacacggcggaaacaaaaacgccagagggagagaacccaaaacacccacaacga

SEQ ID NO: 23120 - DNA, 401 bp, Oryza sativa
  unsure (1)..(401): unsure at all n locations
agctntgccagcgcaccgcatgaggtgctattcttctctcttacatgntgcggctcgacgggtttgccgtcatcgtcgagagcaagaatgtagtacgtctccttcgacatgaggttcctgcccttctcgccacgtttttttctttggacaagctcccccgctcgtcgtcgtgtccgttcgcggtggtcccgaggtcgctgtgtctgaatcaggttcaaccctgatggcacttcattttgactgacgacgggtagccatctacacggttaagtcattagaccgcaacgacggggaaaagttaattccaaatatatattttgacaggattcagttattaccgcctgctcgataggaatataatccgggtcatcctcaggtctttcatactgccaatgcgctag

SEQ ID NO: 23121 - DNA, 67 bp, Oryza sativa
agcttatatcgaacattgagaagatttttttttgttgggtgtgggcgcgggagtgtaaggagggggg

SEQ ID NO: 23122 - DNA, 340 bp, Oryza sativa
  unsure (1)..(340): unsure at all n locations
agcttatttctttatcttagcatagctgcttctcataaaggaagtacataatgactaaccatgtgtttgcttcctaaatttacgtatgactacttatttgaccctgacgaggctgatgatcgcaaagttccttgcctttgccaaaaggctaattgtccgaaaatcatgaattagtttactgtagatgtcaaattggccattaaattactgcnctttctttctttctttcttttttctgggttggctggtggtatatgctttaccttggtctttgttggcttcccattctttaacataacatttagaaaataaatttaactatagctcagaagcgcgagct

SEQ ID NO: 23123 - DNA, 391 bp, Oryza sativa
  unsure (1)..(391): unsure at all n locations
agctttgggtcttacgcttgccgtcgccttgtactgagnggacgggcttctcgcggctcgaaaggcggtaaatcttggccttcaagtcagccgtcctctccccgtcggaggtcgacgacgacgacgacgagccccctcggccgcggagcttgtcggagaacttgttcatcaccgactccaccaacgactcctcctccttgtgctccgccatggctagctgctggctctctttctccccctcttcttctccctcctcgctcgaacagtcgaactcttctttctttattttttcgcccgaactccttttgccgttctggtttgttttttcctccttttctccgagacgggcggtgtgtttatgcgccgaggaagcgatcctggccgtggatcg

SEQ ID NO: 23124 - DNA, 286 bp, Oryza sativa
tatcaaaccgggtttcttcaagttggggcacctttgccgcgctatgacctcagctcttgacaattgaaacaacctattatcttcccaactctcgatttggttttcccatctcgaatcttctgtcctggccctgggttaagagaaaactgttgtcttggtggggaatcgcgttgacctcatgcttctcttcattggaccttgggggtagcagccctttttttcatctctgtaaaccgattgaccatttatggtaatgatcagctcctcccacaagaaacaagtgact

SEQ ID NO: 23125 - DNA, 395 bp, Oryza sativa
  unsure (1)..(395): unsure at all n locations
agcttcattctggatgcaggagggaaaatatatgacaatgatcaaactcgncaaggacaaacaagatgggaagaaagtggaaaggttgggatgtacaaattccaatcgatcaacgacgatcgatcgacgagctgacagactctgattggtttgtgcctgtcgcgtggctggaaatttgttgccgagttcgttgcgtccgcgggatctcctgcatgtttgtggaatggaaacgaaagggattgtggaattgtcgccttgtctgcttttgctggctagtgtagttatcatctccgttttctcaccgtgatggatctgatagtgcactgagggtacgaggcagcgctgatagaatctgatgcattcgtgaaatgatatcaatggcacttgttaccctt

SEQ ID NO: 23126 - DNA, 402 bp, Oryza sativa
  unsure (1)..(402): unsure at all n locations
agctntactgtttgacaccttttaagatgtattgttccaactcctaaaaagntaagtaactgcggtataaaaggattttaaggtattgggcacttgatcacgcgcactttggcctaagcaaaaagtgcctaagtccctaaaagaacgtgacaggccacacctggaaatatgggctgcagacatattaggcctatgccaaaaaatatgccttcgacaccctttaaaggatgacgcatgttacatgcttccgagtaataaatcttccgggtaatatagaccaagtgtagctcatatgaatagcttctgatctgaatgattatcccttatgggatactccaaaataaatataataattgaatcccgactggcgcaagtattctgttgatagcccttacggggaat

SEQ ID NO: 23127 - DNA, 366 bp, Oryza sativa
ccgaggctgcagctaatactcattggaacccattttctatttcaattccaggaacacgccggtacagagagaaccacacataaccctaataaaatataactatattattaactattagttccattggtggatctcattttttttaaaagaaatagacttgaacggggcaatcataggttcatattaggagatttgggattttaaagtttaaactgatttttgtggaatagaaaaaaatattaaaaaggggaacaactctcttctactatacccatttatccggcgcagtggattaataattccgtgcgggcgcccaatccacctaaagattctcggctgagaagaatttttatttttgcgtgtggg

SEQ ID NO: 23128 - DNA, 345 bp, Oryza sativa
  unsure (1)..(345): unsure at all n locations
agcttnggaagaaacttgcaacccttcaaatattctgtcatatcctggagaattaagaagatggggtaaactaactaaaaggtttgttcatgcatgtaaatcaaaatagctcagtttatcctgaaacaaggtggaaaggtcaaaatgggcttcacagataatggttacatatattgagtagttaattaactggtacagtggtatttttacagctgtaagttgtatcttgttacagacagatttgcagtccacaagaacctgtactaatgaatagcccatgcaggataaccatgcacgttaatgaatatattgggacttaaccctttattgcacattaaataccaa

SEQ ID NO: 23129 - DNA, 347 bp, Oryza sativa
  unsure (1)..(347): unsure at all n locations
cactagacaaggataccggtgcatatcagagctcacaagtcatcaatcaagtttctctgacactccgaggggcaagcacaagaaagagttaaagnttgtttattaaggcagcacatcaaatcctgaaatatgatccaaactatgaaatgggggaatccacgcactagaaccattcccaagtggaaacttctcaacttaaaaattgttgaatacacagaacagacgaacatgttaaaagggtnttgagtgcaaacttttaactaaactctactatcagtctagagctctgaaagttcattgataagagggcaaaaaacattcatagcatggtgagccctcaactggat

SEQ ID NO: 23130 - DNA, 351 bp, Oryza sativa
  unsure (1)..(351): unsure at all n locations
agctntgatacgtagaatttgatatatttattacaatatgatgccatgaaaccctccactcgatatgatatatcgagccttatatatgtttttcacattcgttacagcaaaatatatgtggccagttttctcccaatagattgataaataaatccttaatttaaataaaaatccagcatgttcgaatattatactattgcgagaaaaggcataaagcgtgacccgctggaaagatctctcggcctcctgatgcaacaacaacaacagtggtggtgaacaaccgggcaggggcatccatgggaaattgggaaggaaaagggggggttggccaccctcgcacataaccatggg

SEQ ID NO: 23131 - DNA, 362 bp, Oryza sativa
  unsure (1)..(362): unsure at all n locations
agcttgcagtcaaaattggtgctttatatttttctgctatagaacanaataatgggtgttactcaaagttggttctcctcaagctactttaagaacgcagaggcgacacagttcactctgacaccagatggatggctaaagaccggtgatctctgctacatatatgaagatggatatctcttcgtagtggaccgcctctaagagttgatcaaatacaaaagtgtccagggaaaaatcactgggtgatatgtttgatatgttaaggttcctgagagacttttacgctatccattttcttatatctgtactctgaatataatatgtgtataactaggtgcctccggcagaacatggaactcttt

SEQ ID NO: 23132 - DNA, 407 bp, Oryza sativa
agcttattgacctttcaatagattggaatatctattcttggaaatctatttactcaccgcgcataatattacaatgcattcacttggcaacggactataaattgagtgctttgcagagaagcacctgcagcttatttggaagataagagtgcaatacaacagacctaccaagtaggcaagtcctactgataatcaacttgctaaaatatgggtaacaagaaaaatgctgtgataactccactgaactaaaaaacaacactaggtaatgactagaaactggagggtgttggtgtttcattccttgaaatcgtctttgtcatttgctggaagccctctgttcctccaaaaaactgcaagagcactccctccaagctgttacaatagaacgccttaaattagacattcac

SEQ ID NO: 23133 - DNA, 407 bp, Oryza sativa
agctttgtatttccccttgctcttggtctttgctttgtgcacaacattggcactggactgcccaccatcgtccttagacgcggcatctttttcctgagctgtctccttaacaacaacagactgtatcaagccctcaacggagttatcttgtctcttgcgcttgagtgcagtacggaaacttctcccagataaaggtagatttgcaataatacaccaggccacaaatttgtcgggttagacacacttaaggagttcgagctccttagccatggtttgtatctcatgagcctgttcgactacagaacgggtgtgagccatcttgtagtcatgaaactgctccatgatatacagattactgctagcatcacgcgcacccaatttattattcattgcatcccaccactcct

SEQ ID NO: 23134 - DNA, 402 bp, Oryza sativa
agctggctcaaacttatagaagtttaacgtggtataataagtcaaaaagtcttctgatgtgggcttttcatcctctttaaaagttatgcagctttttctttgaagagcatagaagcatatctcttgtagctttcatattattattatagatatactatttgatttcataaacttattgttgcaattggaaattagtctttaaagatgtatttttctcaccaccttgattatattacaaaatttgatcctatggtttatagcatccaatcaaaatgcattgtgtatgcattacaaattcaatgtatgcatagcgggttccaaaatttaatgttggagtggactgcagatagctttttgtagcgatgatcttcagtgttttctttagctggcttttgggaccat

SEQ ID NO: 23135 - DNA, 371 bp, Oryza sativa
agcttactgtgctgatactccagaataatgatttacatggaagttcagtgagtagcttatgcttttttatatctcttcaatatctaaacctctcaaggaactggctcaaaaccattcccagtgaagtgtgcaaacttgtgaacttatattacctgaatttatcagataataaaatcaaagacttgcctcaagaacttggactcctttttaagttgcagtacttgcttctcaggtcaaatcctatcagagagattcccgaagttattctgtcaaagctctccagactgcatgttgcagatttttgctcgttgcagttggaacaacctgcttcttttgaaccaccatttggtgctcttgaatgcatgacagac

SEQ ID NO: 23136 - DNA, 394 bp, Oryza sativa
agctttctacattgaagaaagaatatttttattagtactaaggacacgaaaaccttatggtgttacccgagcaatgctgtagctatgatatgtaaaaatgcagtttgtaaatgtgttgttcgacacagggatcggatttacactgaacgaaatggaacaaacaaacatcagaactatctatggatctcgtgcacgccaaggaaatcgatcaatctactgcttccattcctttgcctttgctattggtgggataaagtaactgatcgatgcgaagacaatggcctaataggaatgccggataccaacagtgtcaccgagggggcaggtttgactggaaagaaaacccacacggcttctttttcccaagcttcaccttccatgcgccaacctgcag

SEQ ID NO: 23137 - DNA, 391 bp, Oryza sativa
  unsure (1)..(391): unsure at all n locations
agctttgaacaggttcagtgaggtatgcttgcttgaacttatgnctctgttttgaggaatactctgcagttattcaagagttttgtcagaaattctttatttaccatgaaataaattctagtgcccctaacgcaccattctctaattctcttgtgtaaagatttgatttttccgggtgtcgctgcacattatcctcaaattgcagtttgtgcactaaaattcaaaaagaacaagaatttctaaacagagaacatgaagtataatggtatgagtattggaaaaaagaagaagatactaacttcttgaaacgagataaaatacttaattcaaccggttaaagtcacaaaaggaggagctatattccacagcacctacccggctttgtttaaag

SEQ ID NO: 23138 - DNA, 229 bp, Oryza sativa
ggcatcgggtgacttattcggaatatggtaatggacttcatgacaataatccctgactgatccacaacttgtcactaaagcgtctagggagccctcaatccggatcaagatatctaacaaaggtgcttttacactatcggcctaaaggcacccagacagtacccgcgggatctcctctttcttctatttaaaaaaaaggctgatgttatctaaaacatattagctaaac

SEQ ID NO: 23139 - DNA, 399 bp, Oryza sativa
  unsure (1)..(399): unsure at all n locations
agctngtagtttattaccacaacagnngatttataacctatatatgtaaagggtttattccttcacaaaaagagacaagaggcttacacgggcacggtggcactgatcatcgcctgcagaaatgccagaaacacatatcactattcactagtaatgtcagataaataagaaaaggtctttttgccaggaagatacaagtatttgtaatggcagcaccgcagcagctagtatcttggctagatagctgctaatacagtattgactacttgccgaatcagcttcattggaaacgtaactgaaaacacgattttgttaaaagaaactcgcagagtggtaatattcagacgtgctcatctgattgtttcaagctaaagcaactaacacgtgaaggatcgaatg

SEQ ID NO: 23140 - DNA, 405 bp, Oryza sativa
agcttcaactatttctttactggcttctctcttctcaagggaaggtaaatatcgggagcatataaaattgctccctgcatagtatcagttttttgagggagcctggcaagattaatacattgttgtatctgaaattgtttcaacatgttgcactctaaagtttcttctgctcccacgggaaggaaaataacctgtcccccaaaattctggcattgattattttattgttgttgtcagtaatgtgttgattgtgttgaaatcgtgagcttgtcaattgctctgcataccttttatctgttgatattgaatgagaagctagacagcggagttcaaaataaactggtgcatttttaatacgacaacttttgatgaaaaaggtagcacacgtaggtgtatgcattgcga

SEQ ID NO: 23141 - DNA, 238 bp, Oryza sativa
acttgaatcatcccaagaaaatcttggttcatcttttactcggagggtgaggcttacacatggcctagctcttgtgccactgaactacttgtggtacccgggagaagattggatgtcatatctcacctccgaagagaacagactcactagtgaaagttggagtgcattcaatggcagacccaaaccctatgtcacccgaaccatcgactggggcccttgtggttaaagcacatattac

SEQ ID NO: 23142 - DNA, 346 bp, Oryza sativa
tgacccggatcttaagcacctgcggctgcagcttttgctacctaagtgcatcgatttgtttggggatgggatcactccttcagcgggtacattaaatacgagaatggatgggaggcatgggagcatcttatcttcccctgctcccaggagatgttatgtgtcatgttcatcaatttctcgatatgggcggcattggcggttgcacttgtgtcccttgcccttaactcagctggtcagacaacctatgaactgagcgttatcgtctccttacttaggggaagcctgtgtgcatgctgtgttgtcgagctccttgccaatcgtgctgaagcaccgctggaagctaaag

SEQ ID NO: 23143 - DNA, 403 bp, Oryza sativa
gctttttattttgggtttcgagattcttttattgccccagagtagtacaggtagcacaataaaacctaagcctctagcattttctgaaccctggctgtgacacaaattatctaataaaatgcatcacattaatcaatatgcccagtgcagtaacaatcttttcacatgacccaaaaaattcttgtaagtcatagagcatgagctttcttctgtggccaaaatgtttctatacaatggtaagcatcattttgtagtactacaagtctggctaatggaactcttgcgttttgctggaaattgcacgatcttcagaaaagaatagatcttggtgtagtttctcctgagaaactgcagaactttttcgaccttgagaaataccctgttatgtctgaactgattcaca

SEQ ID NO: 23144 - DNA, 364 bp, Oryza sativa
agcttcaactatttctttactggcttatctcttctcaaggtaaggtaaatatcgggagcatataaaattgctccctgcaaagtatcagttttttgagggagcctggcaagattaatacattgttgtatctgaaattgtttcaacatgttgcactctagagtatcttctgctcccactggaaggaaaataacctgtcccccataattctggcatcgattattttattgttgttgtcagtaatgtgttgttcgggttgaaatcgcgagcttgtcaattgctctgcataccttttatttgttgttattgaatgacaaactacacagcggagtttaaaataaactgctgcattttaatacgacaactt

SEQ ID NO: 23145 - DNA, 373 bp, Oryza sativa
tagcttcttgatcttaccaaccaggttatttactgagcttgagatttgcatctacgggctgcaaaacacatttataataagaatctgctgcattaaagagaggacagctcaaattgtcagctggccataccttcaacctccttcaaggctgaatccctttccgcagccagttctaccttgtctcttttcaaggcttcaaattgtttctccatctgagccatcctggtggcttgcgctgtttaaattcaaatgttgaggatacagtatgaatcataatccttggagcagactggaagacacctttgatgaaccactccctcgaatttgaatctgaactgccaatcgtccttatacctctcgtttcttgcatgct

SEQ ID NO: 23146 - DNA, 256 bp, Oryza sativa
actcaatgtgcactaataatcggcagcttatcataatatacgcatgtaacatagcccagaacgggactatgatcaatctattcttccaattctacagaaaatgatacctgagtgaccactatgcacgcatacgtatcaacgtatgagaatgggcccccttgacaaactaaaaaatgaccacaacacccctcacaaaataggacactcaaaagactccttactatacaccactcaatattttatgtttaagaaatga

SEQ ID NO: 23147 - DNA, 336 bp, Oryza sativa
catgatttttaacctgttctgccatctaaacgggttgcatgaaacttggcattctggtctactaattttcaaaatgaaagcctcatggcctatggtggtttcctttcgttgactacaacaaggggcagtggttggataaagaggttgagagggcgggtacgacatatgaaagttgaagtattcttgtgttggtaaataaagatgaatggttagtgaacacctgaccccaacttactccaatgatgatttcttggggagctgggtgggcaaacatatgctaaacatcttgaaattattattattataaaaagtaacagtcccaatctaggagtcaac

SEQ ID NO: 23148 - DNA, 378 bp, Oryza sativa
cattaactggttattttgggttattaggttgtgttcaccccataaaattctaccatgaaggtgggagactggattaccctacctatgtgggactgaatatgctattgtgcaagtccaaaactcctctattttacaatataaatcattttcagactctagccttggtcgaaaataaaaggtgcttttacattaatataccatcctttcatgcaatacatatcatttaaccggcaatttcggcctaatcaatgctttcttgggccccatacaacaaaaatagaatagaacatgtttatataatgctttcgcaaaagcttaaagatttaccttttaaaacaagtaaaaaatggcacctgttctaatctcagaaattaaagt

SEQ ID NO: 23149 - DNA, 467 bp, Oryza sativa
  unsure (1)..(467): unsure at all n locations
agcttgatantcgttcggtcgtgccatacaatgtgtcattgttgcgtaaatatgaggctcatataaatgttgaatggtgcaacacatcacagatgatcaagtatctatttaagtatgtaacaaaaggacccgatcatgccaatataaaattttctaggatcaaaaaaagaaagctgagtcgttgcgattgatgatactggttcatcaggttctaaaaaaaagatgcgtggttctgattttactgtgccagcaccgatagatgaaatagctgacttcattgagtgtcgatatttatgtgccaaccaatgtatntggagattgtatgagtatgttattcactctangaaccctcctgttgagcgtttagcatgccatctaccacacatgaacacggttagctttagatcagacgcanacctgtcatcggtggtttcaaatgcattcttactaaaaaaacaacattaact

SEQ ID NO: 23150 - DNA, 482 bp, Oryza sativa
ctaagcttacctctcatcaagataaaaccgatgcagcccaactcgaaagcaagtactcgttgataacaaagaaaacgaataaagggtggcgatgcgcccagagtgtattgaacttgatgttgtttgtttacatggtctcgggtcatatttatacccaaaatacatgatatgtctttgccagacacgactctatctctattacaacctaaaaatatgaacaagtcccttaggtggactcttaccgataaatatctataggaaactatgaaaatatcctaattaatagatacaattgtcttctccgagctccatccacatttggcaatacttgtgtagcacctcaacagatcctgacaacgatcccatgattgtcttgccgggattggctacattggcttcttcctatcaggttcagtaccagccgatgcatacgacagtcgatgcaacccatagctgatgctggttctgttacatgattattg

SEQ ID NO: 23151 - DNA, 441 bp, Oryza sativa
  unsure (1)..(441): unsure at all n locations
cacaaacctgacagccagcgaattatatgtgagcttaccgacaggaagtcccgacagaaatgatatttctgtcaggaaaacgacagaaaaatttattttctccgtgggcttttttctgtcggcaaactctgacggtgcacccacagaaaagtattttctgacggtaattcatattattctgacggttntcggcctacagggtagacctctagatcttctatttcttctcatcatcctccttcttgtcttccgacgactgtggccgctcaacacgggtcttctgcctgtccattggagcttaatttgctagctaactaataactatagctaatagctaggcgctggctaactcgatcgaaaagagctgcttatcccacagcttgtctgcaggttgcgatgacctatatttatagtcagtgacatcgatcattgattgatctt

SEQ ID NO: 23152 - DNA, 520 bp, Oryza sativa
  unsure (1)..(520): unsure at all n locations
taagctctaaggtgctgaatggatgctggtttccaaagaatagtatgcttctcantatctgacacaatatggtcatgtacgtatgacagatctttaacccaagaattagatggaatcgaacatatagaaattgtgatgatatcatgtggctatgtatttaataaccaaataaaaaataagttatggttacaagagtctcagtaacaccttaattcttgggtttgacttcccatggaaacgaattttttangttgtaactgcattgtgctttcagngataagcgatgtacccgtcaacagcgaggcacctgtggtgacttcgtcaatattcaagattttgctgccatgggaacgattttttacatngcatttaaagttatctatatatatgctngactgcgaatatatatgatctctttagttaattatatgcattatcgaatattaccgtagtggtagcacanngacaatactnagtntataaatacactataactacaagatttacactgtgatttgat

SEQ ID NO: 23153 - DNA, 413 bp, Oryza sativa
  unsure (1)..(413): unsure at all n locations
aacaataccatatttgttttttaaatagcgaaggagaggacgaactccaacagcaggctacctattgtaccattcctcaggtggtcatgttcacttatccaccaagccttccaactttgctctggtgccaggccaatacctcctctattgctcatccaatgccaccagtcagtccagtcattaacagtcttgtgccactcaaagcatgatggattgaagacaaaaggtgcaaacagtcaacagaaaacaaggaaccatattgaaattgtgacatatagatacaaacttgagctcctgtacgatatgccataagctagatagacaaccaanagaatgagtagctccagtgctttcacaaagtggctccgggaatacatcctgtaattctcagcaaacttttgatggcgcacaac

SEQ ID NO: 23154 - DNA, 486 bp, Oryza sativa
  unsure (1)..(486): unsure at all n locations
ctcggtagcttcactggttggagcaatattgggtctgtatttatttagccgaccgggtagcacggaaaagaggaagaggcatcangctacgtgtcaatatggaatggtccgtagaatcgctgaatgcctcgatggagtagtaaaaagaggaagaggtatgcagcgagccacacgcaacacatacttcctccgtaaaaaaaaaaaatcttggattttcgtatcagtggttgactgtccgtcttatataaattntntttataattagtatttttattgttgttagatgataaaacataattaatactntatgcgtgacttattnnttctaattttntatatnnttttaaataaaacggatggtcaaaagttagatatggaatcaggttcgtntttttggacggagtgagtacacacactatcctgcangtgtactgtctactccaccacactgtgtgttgtcgtgtgtgactctccagtctcgagtac

SEQ ID NO: 23155 - DNA, 469 bp, Oryza sativa
  unsure (1)..(469): unsure at all n locations
agcttaactagtagcagcagaatcgtcatgctaggtagaacgagatggcaccaccttatggcggtagtgatgaagaggcagaagaagacttcagcgcggtgcctcaaggaggccgntagtagtgcaggagctcgatgagggtgctggctgcgaggagctcgacgagaagaactttgtgtcggtggcttgaggaggtccgcaacgtgacaaagagtggcaaactctagtgggcgagatgataagagtttggctccagcagatgggctcaataccatagcctctagtggcgacgcacggtcagcgtggagaggttgcaagggcggtcanggtggtagagcggcagggctaacactctagtaccgatgcgtagcttggccccttcctcctcagttccctttattgctccaggagcaaatttgggaccccgtcgttgaccggtcacccatggtcctgtcttcatcgtcttgat

SEQ ID NO: 23156 - DNA, 457 bp, Oryza sativa
  unsure (1)..(457): unsure at all n locations
catacngctggccacgggcgacggcactgagctgcctaacccgtggaacatcgaacaccctcgtcgcttctacccctgaggggggggtcgggtgtcatgtttctggctcgggccaaccacgcacccactcgggcgtgtanggttggcccggggctgccacacatgcacattcttatttcttttttttcagtacttcaataaaagcagtttcaatttcctaaaggctgtatcttgtgctgtttttccttttgaaaaatcttgacttgaaataggtcactcgtgctcaatcctgcccttcggggcttcggtcggctaaaatcgtcaaacggggcccagaaccgagccgtgccccgaggcgtggtgaactccgtgggggaatctgcaaaaacccacaatctggtcacccataaccctctgtcaccacgttcccggcctgccagtctcacatgtggatctc

SEQ ID NO: 23157 - DNA, 388 bp, Oryza sativa
  unsure (1)..(388): unsure at all n locations
agctntatcaaattacccctattaaaagcaattcattagtancctttggccatagatgtggtgtntgcttggattgctagtcatagtccttttttattcctttagccagcccttgtgtactaaaccttgccctaatgggcttctttgagtcttcttagactcttttcctttatataatgatgcgcggctctcctgcccgtttgagagagagagagagagagcaatccattactcaaactcaactctgctgttcctagctatccctaattgcatatgaatgtttccacgtggcagcactacttgcattgattgaggtagattgaaatttgtgctaccctgcgcctgcttggtctcttggcatttcaatgattggaacattaattactct

SEQ ID NO: 23158 - DNA, 420 bp, Oryza sativa
  unsure (1)..(420): unsure at all n locations
tctatattctntcctttcccncttttctgtccatcctcattcagatggtgaacacaaggaatggcgaccatgcaacaggtgatggtagcagcagtgaggaatatactggaggagccaataccagtggtgcaactagcaatggtccacctccaccgctagagaattcaacaatcgctcacgtgttggccaattagacgcatatcatacaatgatatgcagcagatgcaaaaacaacaccaatatatgcaatagcagatgatgcaccatcaggcactgcagcagctgaatcagcagtttggtccaccaccaccacattagtccaaactactttagtttctccatgtcaggccacccactttctccagcaccatcaacccaatggaagccaatgactggcttcatgccattgagaagaagatg

SEQ ID NO: 23159 - DNA, 469 bp, Oryza sativa
  unsure (1)..(469): unsure at all n locations
agcttgctatagggggactaggcactctaggcttacctaatccaccccttcaggcttcagctgttcagtgcagacacagagaatgaattgggtggagtttctgaagcccgtagtcgcaatgctggtgtttgacacgctcttcgcgctgatgacagcattggtcaagaaggctttggctgatgggttaaaccacgttgtctttatcaccctacgccagtttgtagcggcagtcctgctcgctccgattgcttatttcaaagaaaggtttgtgacaagtaatctgatctcaagtgtcttatcaggttctgaatttcttgtgcaaagtttgtttatgatgatgtttagtacctggtaacaatgtgcatgcaagcgcatganagatgagagatacctcttggtatatcattcgcatttctagtagntactagtccaaagtatttgaaactccgatggtgataccatcattcat

SEQ ID NO: 23160 - DNA, 456 bp, Oryza sativa
  unsure (1)..(456): unsure at all n locations
tatacatatgccagtanatcattaggttgtgccattgagtgactggatcatttcagcagggctgtagcacattagttttccagttttccagtgattgataagcattagttntcagcagtcttattcttccaacataaatatgcttatcaataaaaacttccaacataaatacaagaaaagaataagactgaagcagaatcttgtattagcacctggatatgtntgttgtgccaaggagggactggatcatttcagcagagctgtagtacattagttntccaatgattgataagcatttgtggcgtatcggtgcatttacacttgagccatacacctgtccaagaacagatgccattaagtacagaaaccctgacatattcccaaaagtagtagtactccatctgccccaaaatatagcaacatctggctatgcacctggacaaagtngctctattt

SEQ ID NO: 23161 - DNA, 500 bp, Oryza sativa
  unsure (1)..(500): unsure at all n locations
tgtcagcttcattccagaaatcagttctctacaagcacaggcgaattactacatgacaaacttaacaatagatgaacaagattcagtatgttaggtgcagaccattcgctcttgctcagatgccttcccagcgaagcatcgatcattgatcctttttatagcaacatcggaacctctccattttccatggtaaacagtaccaaaggttccagaacccagttcccgcaattcttctagatcactattctttattatctggaattaacagtagtgaaaaaataagggtgaactatttgcctgcaaacaaaagtttacatgaaacaattntagatngcagctgtcaccaacctgaagattataatatcatctagaactttaactccttggctggttgtgtctgattgaatgtcaccgcattctgacaaagcaagaaagggaattgaaccactcaaccacaagagtatacaggaggaaaaaataacccgccacctcatntgatc

SEQ ID NO: 23162 - DNA, 192 bp, Oryza sativa
  unsure (1)..(192): unsure at all n locations
tggatagctcactacaccctgtattacatatgtacaatctcatttcatgaaactcttacttcctccataccaaaatataaaggattttggatttgaancaatcaacataataatcaactatactatatcattctatggataatatataactttcttgatcatacactcatagaaaagtatattctcggtcta

SEQ ID NO: 23163 - DNA, 527 bp, Oryza sativa
  unsure (1)..(527): unsure at all n locations
tgaacacanacttctcaactggcacatgcgctntgtcgtttattatgactacaaccctctcaaccaatccctggattgttgtgagaaaattatggttattcactagttggaaaagaagaagaatcagcacatattatttctaaaatgctcttcacatgaacaccaagagactgttcgatactgtaactcaggtttgaaataagctcacaaaaatgttgccatacttcccttcgcacatgacagagactagaccaaactccaagaatatgcataatgagttaatgtagaactatgagatccatacattagcaagtntccctattattctcataaattgcaatgagttgtgataaccaatcagccaatgcgatataaaaaggtataatcaacaccaccacagtgtgcacaatgaaaatctcaagtctgtcagacaggatacatagtatactgcataattgcgtttgcataactcaaatgaattcaatattanggaatgcctaatcttccatgttgaccccatgacacaa

SEQ ID NO: 23164 - DNA, 384 bp, Oryza sativa
  unsure (1)..(384): unsure at all n locations
agctntgtgttatggggtttgggccctgtangcagtgaagcataccttctagggcatattttagagataagattagcttgagtttttctttattttagagataagcttattaaggctccaagttatcccatctaaacgacaatggggttttatctcttattattaagcaacgaatctatacttactttaaaaagactccaattgtagtgacagtgaatccgccacctacctgctcccattgtagcttttacatatcaccccttgaacttcttaatagtacataacaactaaatctaaatggttagccacatataaaattaacttaaggtgggtacatattcaatggagaatatgnttttattatttggcaatactatgatgttt

SEQ ID NO: 23165 - DNA, 485 bp, Oryza sativa
  unsure (1)..(485): unsure at all n locations
aaactctcatgctaacttaagatgaaatacggactactaattgcaactcactaaaaaaatgtccaagcgaattcccacaatgaattttaccctagctaaactgtatagcaataataaaattaaaatagcatttacccgttgtaacacatgggcatattttctagtctttttaagaattttatataattattatttattntgatatgatttgattcatcattaaatttttctaagcataacttgtatctttgtatgtttgcaaaanaaaaaagaataacatgggtggttaaacgtatcttanaaaaattaacagcatcatatattaaaaaataaaggtaatattacaacatactacctccgtttcaggttataagactttctagcattgtccacattcatatatatgtcaataaatctagacacattgacatatatatgaatgtggacaatactagaaagtcttataatataatacttgacatata

SEQ ID NO: 23166 - DNA, 340 bp, Oryza sativa
  unsure (1)..(340): unsure at all n locations
ctgaaagtgccctcactcagttgaaggcgtatcttagctcttccccagttctggtcgccccggagccagacgaacccttgctactctacttagcggngaccccgcaagtagttagtgcggcattggttgtggagcgcgatgagggcaattctcatttcgcgcttccccaccctgtgccgacttggcccgggagagagcagggaggagaggcccccgagccgaacggtggcctaaggcccccgacgaccggagttggccctctgcccgcttgtcagacggtgctaggagcccccgacccccaggaaggccctgaggccactgtgggaaggccgcacctatc

SEQ ID NO: 23167 - DNA, 419 bp, Oryza sativa
  unsure (1)..(419): unsure at all n locations
tgtgagataggtatanaatanatctagtagcagtgtatcaccaatgaacattaaggtcaatcataacgacgaatggctgctntataagaatgttcagcacttcttatgtgtaagggtagctctttgaaaactaattctagatagctcaactgaaccacatagtttttgctcttcattgttaagacttaaaacaagctacagaagatgatttatatatttttttacaaatatctttattacaccatagcctcttgataagccacaaatgagcactntgaactntacaaaaatacgcattaaacatgttattttcctctgtcgaaataattaatacaggtgacatgagtaatgagtcaaagaaaaaaaaataanacagtagcattcaaatcctacagagcatgaatctgtttatctgatga

SEQ ID NO: 23168 - DNA, 385 bp, Oryza sativa
atgactgctctgatctttctctgtcccgtgttcgactcacatatggcctcatggggcacctgatggatgtttgtctctggctaatcatgaatgatgagttgtggtgtgaacattgataaatttacatatactataaaaatactcgtgcattgcaatgggtgaatactactttaacattattattgttatacggcttagataggataaaattcactataggaattcgcttggatttttttttaaaaaatacaagctcaattacagtcaacttttattaagtagcatgtgatgttcttaaaaaaagattcttatacacttctttgatttcaaagaaacagctaaattaactaacactattgttttctatacgtcgacttaaaacact

SEQ ID NO: 23169 - DNA, 465 bp, Oryza sativa
  unsure (1)..(465): unsure at all n locations
acacccatanggtctctctgttacctcccaagacccgttagcgataatggaatctcattcactacggacaagccttcttccagtagtctgcatcaggagatgcatatgcttctgaaattgacttatgagtgtcatccacgaggtacacagtgaaatcatcaccaaaagacttagccgtgctttgtctcttactccttcgaggagcttcactgacatccttctcatagacaagttcatgtgtatgttcagtttgctctggtggtgtgagtgaactgcgaattatttcagagggttggttctaaccactatgtgtattcttcattggagaaaagctctcanagaatgtagcatcaccagacttcatcattgaccaacatgcatgtccggtacctcggatttaactattaaacatctatatgcgatgctatgatgagcatgatccagaacaacacagtccacagtctt

SEQ ID NO: 23170 - DNA, 209 bp, Oryza sativa
  unsure (1)..(209): unsure at all n locations
taagttatgacccaagttatagtcaaagttacatactcctttcaaatttgaattngaattcaaattgtttatatatagaatttctagacantaaattttctaactgttgtttttaaaaaacaattgtgtggtctactgtaatacaaagaggaaaaagggaggataaagatgggaaacgatggaggagtatagggggagggtatactatc

SEQ ID NO: 23171 - DNA, 409 bp, Oryza sativa
cggatctctaatcgaccgcggctgcagcttatagattgctattcttctgccctcgttagaatgtgttcctgttccgattgcgtattattcaatcgacagtagagacaggaatctgttaccggatcatcaatatctgctcacgagccgatccatcagatatcatggaatctgttactaaacataccaactggtgaaatccaaataaattgtccaaaaaaaaattcagtttgaaaatttttgaacttgaccgaaaaacaagtggtttgtgttttcgacacggtctggaaagtctgtacttcgcgaaattcataccggattcctctggaatcctgaatcaacaaaacattaagctaggaagagttacagagttaaataaatattatacacgaacgtactaacaagttgagat

SEQ ID NO: 23172 - DNA, 429 bp, Oryza sativa
  unsure (1)..(429): unsure at all n locations
ctaagcttaaatcccanataactgtaccaaatgatggaacggtaatataatatgttccaaatattcngacacattgattgtctttaagaccctggggggagagctttttgactacatacaggatcagaatagggtaccaaattattggcacacatttgaaatttgctagcaattagtcaatcatatcagaaatttggtataattaaacacaacatttgagaatctgcaatggttaatcttgtcgttgaaaaaaagataagctacaaggcgttaacaacacgttttgttatatacttttcttaccctgangatcttaacatggagaggatatttaatcatgtatgaatctggataacatgcatgagatgatatgtgatatcgtttcgatgatgcttgctttatatgttgtgtcacatcatgactccttat

SEQ ID NO: 23173 - DNA, 392 bp, Oryza sativa
  unsure (1)..(392): unsure at all n locations
tgcagctttgcattaatcttttctctgatttgcagcctctttgaactatacacgtgcaaaacacataattgccagggaaaatagaggaccaaatggtatggaaaaatgcagtaaggagtgcacgtaactgatttttgaatggagacttctgtactaaagcctaagctaaatctactcatgccatgccggtttaagtaggtgatacgttcaacaaacatgaaaagagaatataactgattgcattacctcgtaatggtgtttcttgtactcatttagaaagttaactgcaattactgtccaaaaggacccaaacttctcctataacagaatagaaatgtcatgctggtgccctgttntccttcctgtaaaaaaaaaagatagatcattgtttt

SEQ ID NO: 23174 - DNA, 247 bp, Oryza sativa
  unsure (1)..(247): unsure at all n locations
gattacatgcaatatatgcatgctgcatatattcttgctggccatgctctcatgctggtctatgagacatgactttgcagaacttggagaacaccatatatacctggcgcgctcgcttataaacactatgccttgactgcttcaccccgattatttcangctgacttgttctggctacttgctgcattgtacgctggatacaccacactgaacgcatctagtgagttcatactgcacactctacgag

SEQ ID NO: 23175 - DNA, 382 bp, Oryza sativa
gtcacctgccgcatgcaagcttgtgctaaggctatgaatagacctctatggtcttgttatgtggggatcctcacaaattttacgaatcaatacaattgcttctacattccaactactgttgggagaaccacgcctctcgacgtagcatagttgtccattcgacaacaactggcgccgtccgtggggataccctgaccgaaagggcgaaatgggacccttatcgccacacgccacgcccttcgccatagtaccaataaagtactgcgtctagggctgcgggcgaagaggtttcgcccacccacgcccttcgccatagtaccaataaggtacggcgtcaagggctgcgggcgaacagggtttacccacccacgcccttcaccat

SEQ ID NO: 23176 - DNA, 277 bp, Oryza sativa
ataaaaatggcactttcttcacattaacaccagattagctgtgcggcattgttcctcccatccagtaagggtaccaggtattacattccaccacaaaccacaattccaactcttcctcagattccatgaatagcgatgaaggaaattcgacgagtaagtgcggacctcaagccggcgtgggggctggcggactgggcggagacagctaggaggcgacatgtgcgccgggtggcgaggtgcgtgagcgcgagcgcccgccgtcgttgcggtgaatggc

SEQ ID NO: 23177 - DNA, 465 bp, Oryza sativa
  unsure (1)..(465): unsure at all n locations
ttgtgtgcacggcgccaccacggcactatgctcanggtgtggttcctattacctgccgtgctactgtgcacaacattcctcagaactggtttggaggttactatcaanaaanaaaagtgtccaagaaagagttatgatccttaatcctactcatagcctgagaaatctagaaagaaaggaatcaaaagatcttcgagcaaaagaaaacggcagtctccaaccttatggcaaaaataaaggaagaggcaagaacctggataatggtaagcgcaaggcgacttgaagaattcatcccaacttaactacggcgcttatgtaattatgtacagctcttttttacttctacggggaagttttttttacgtctatatctaatgaaataatgaaatagtacaatctcatgttgattccttataaaaaaaagatgtacgaaaccatgcacaagccaatttagtgatcttctac

SEQ ID NO: 23178 - DNA, 473 bp, Oryza sativa
  unsure (1)..(473): unsure at all n locations
ctgcagcttgctacggntatgactgaagtaaattatcttatgcctagcactctagcaacaattgtggccactaattaacagaaagggtaacattaaaaaaaaatctcacaaatataagctccatattggagaactgtataacataattggagaatgctcttaaaactctcgatattggagaattctctcattatgaaattatatatgagattgtatacataattctcattttttttcgtcatttcataccagtctaataaaaaatgtcaaaaacatatttgaggaaaggtcactgggtagcctgcttttagttggttgcttctgtatgctcaatgaatcatgtcagtatttgaatttgtatgtggtgctgcaacggatataaattcttttatagttttaatgactatcacatacaagcaagtaaattgagtaagaaaacaaacttaatggcctacgtggatcatgacactcta

SEQ ID NO: 23179 - DNA, 346 bp, Oryza sativa
ctgaaagatatctatgaacatattagtcttgtgtaatatatattttgacaaggatttatctgctcggacgggacaatctattcaatcactgattaagtatattcgcacccgatatatatgtaatatctacgccgatcgagagattattcttatatcatcatactgcgacgattacatatgaatggctaaaataagaacgcatggccctaccgacggtatattatgacttaacccggtctttgttttattcttgtgatgcggatcaataactggacgctacataccaaggaagattgacctgactggagtagcagatctccagcctgttgtttcgcacatgtagact

SEQ ID NO: 23180 - DNA, 466 bp, Oryza sativa
  unsure (1)..(466): unsure at all n locations
agcttcttcgctgcacctcgatgaccgcgtgcccttctctgtccttacggagggncgactaccactagcctcctgctcctggttcccctccacattcctttccacgtgcccctgctggttccccttcgcatacctctgcacgttccctttctcattcaagtactggtgtggatcctctgtcccctcttcttcattccaatactggctgcttcccttcgcgaatgtatctgacaatatctgttcctcatcgcggacaaccatctgttgatacaagaaacatctgctaagacacgagacatttatgttctaacaatctaagccatgcatgctaagtgtaaatgtcgaacattacaaccctacacaaacttacgtgcttagtctaattacaaatcgggatataagctcaagttaagtgacgtatattatacaaccctagctagtaaataatttatactaagtctaatta

SEQ ID NO: 23181 - DNA, 373 bp, Oryza sativa
actatctgataggatattgtatctatcagaaatcaggatatagtaaaaggaaccttatcccaaaataagcctcatacgtctgcgtcgctgataagccacgtttcagattaactttctctatcaatgcagcggcccttccattcaactttccaagggcatgagttcccttatctagacaggcttgcctcatgttgtcccatgatgtaaatgggtcttgtcttgaaggtctagatagccagctaaacagagcatcttgattgctagaaccatcagtaattcttagcacattctcatcagtacctatagatagaacgcaagcgtcttgaacaactcccccaccaaaattatcacggctatcctgctcggcatcacc

SEQ ID NO: 23182 - DNA, 467 bp, Oryza sativa
  unsure (1)..(467): unsure at all n locations
agctntcactgtcttctggagtgatgctttggtaattaacaattgtgtttatgcatacatatgaaatttcagatatgcaatatgttagatgctaaatgttgaccaacatattgtttagagctaattaattgctcatgtggnttattcttttttctttctcatttgcctttcagtgtggaattgtggtacaacacaattttggttctcctcactggttatatgaagaatgcagagattgctcttgatgctctttcaatatggtaatatattccactttcaattgttgcataatggtttagacaataaaagatggggcatttgcaaatttgccaccggctttttcaatattgcaaggatgccactcgaatgacagttctaatggcattnttgcaattttctagtgtgcagtttgcaataacgattcaaagtagtggtaaatttgcaattgcccttttatgggaatcatg

SEQ ID NO: 23183 - DNA, 492 bp, Oryza sativa
  unsure (1)..(492): unsure at all n locations
ctcagcttagtgtactctttcagtgtcaaactgtccccgcataatttattgtcaaactgtaattaagttagttgtcggatcaagcatctntatccatactctntgtacattgagaagtaataaatggattgaatatgtcactggctcgctgcacattattctggacaactaaaatttctgcatactgaatgctaaccaaattatcctgaaatgttattggagtacagtaatgtggtttcctttctcatctgaaattaattaatgctagcaacaaatacttaacttttgaaagtgattagtgacttctaatatttcactaatttacaaataggcttgaataattgtgttcttcttattttggcttggttattacttactttttcggttagtgtgttctatttttatttgactacactctttctagagactacttgcataattgttatatctctttgaaaaggcacgattatatctatattagaaaaaactact

SEQ ID NO: 23184 - DNA, 446 bp, Oryza sativa
  unsure (1)..(446): unsure at all n locations
agcttcagcgagtacacggttgtgcactccggatgctcggtgaaggtcggcccaaccgtgccgatggacaggatatgcctgctgagctgtggtgtatctgcaggtgaattttaagggctcagatggcatcagtgtttttactttatcttccacgcctttctgtagcttatacttggtttactgatgctaagaattaggtgtgctatgttgttctgcacttctgcgcattttaaccgtgtctctgatcattcatgtcttcgttcatttctgtatttcactanggcttggtgcagcctggaaggttgctgatatctcgaaggggtcgagtgtggttatatttggccttggaactgtanggctttctgtaaagttctacagaggctatgctattagttaatgacagcatattangaaatggtaatattatactcatatcttcctgactt

SEQ ID NO: 23185 - DNA, 371 bp, Oryza sativa
gcttggctgaaacgtgctgagtggacccgggtagaccatttcatgtattaaccatctacacaaaaaatattataacaggtcgttggacatatactgaaccattatgcggtggagatggacgatctctacaggctgacttcgtgacatcgcgggccggccaggttccctgcacgcgccgagcggcgctagctcttagcccttttggtgacagaaatgctcgacgcgtcctatcctccatcagctgcttttaacatgcaggaacgcgtggcgccactagtgtttcacgaacactgacagaatttttttttggccagactcagtatgaacacatggaattcatggacatcatacaataatatattaggtgatga

SEQ ID NO: 23186 - DNA, 424 bp, Oryza sativa
agcttcttcgctgcacctcggtgcccgcgtgccctcttttgttcaacggagggttgactaccactagcctcctactcctgggtcccctccacatcccttttcacgtgcccctgctggtttccctccgcatccctctccacgttcccttcctcgatcaagtactggtttggatcctcgatcccctctacatcattccagtactggctgcttccctccgcgatcgtatcggacaatatctgttcctcatcgcggacagccatctgttgatacaagaaacatctgctaagtcacgagacatttatgttttaacaatctaagccatgtatgctaagtgtaaatgtcgtacattataaccctacacaaacttacgtgctaagtctaataacaaatcgcgatataagcctagtctaggtgaccgatatta

SEQ ID NO: 23187 - DNA, 353 bp, Oryza sativa
  unsure (1)..(353): unsure at all n locations
cactatctgaaaggatattgttcaaacagaaattcaggatatagtaaaaggaaccttttcaccaaaataagcttcataagtctgcgtcgctgttaagccacgtttcagattaactttctctatcaatgcagcggcccttccattcaactttccaagggcatgagttcccttatctagacaggcttgcctcatgttgtcccatgatgtaaatgggtcttgtcttgaaggtctagatagccagctaaacagagcatcttgattgctagaaccatcagtaattcttagcacattctcatcagtacctatagatagaacgcaagcgtcttgaaccaactccccaccanaattatcac

SEQ ID NO: 23188 - DNA, 314 bp, Oryza sativa
  unsure (1)..(314): unsure at all n locations
acagacaagtatgaacgttaaaaaggaggctaataagcagntccattcttgatgaactttctgtaagttacaaacgtatatgactatggttccctaagcgtttttgagtttatatagtactcttatccataataattgactccgtgggctgaaaaggtgcacatgtcactatggaatatactccaatcttgctcttttttcacaagaacatatcaatatgtatttactggagtctcaactacaactccaaactttcttcatatatttgagttgctctcactattaatntagtttaagcattctcgcacaaacat

SEQ ID NO: 23189 - DNA, 429 bp, Oryza sativa
  unsure (1)..(429): unsure at all n locations
atatgagatccctacacttagtattattggctagaccatctgaagtcaaactccaagacgatgaaacagaagtgaagaagaagaagataaaccagtgccacacaaccagcctcattttgtgcctgataaacattgaacggcagtcagcagaagcttattagatctctacttcatgtgggaaaagaaggcggttcctagaaatgtctcatgaatgcatactccatctngagtaccaaataacaaacttttctgtaatcatttgtcaaacagcacaatattagaaggaagtagctcgtgcgaaactgcaacagcgacccatgcagttgagtggtatgggctagcacagtagtacactaatactactatgtactagtattattaaaagttttgagaccaatacttaatgagacttgctggtatgggtttaca

SEQ ID NO: 23190 - DNA, 318 bp, Oryza sativa
  unsure (1)..(318): unsure at all n locations
aacattcagcttgttgagattgcacttgacatggaaaaaccgaactgctcttcagctgacgagaacaatctgtagcagatatgttccatgccgttcaaccttatgggggctgaaggcaagaacatggcacaactttggggcatcctccgcacacaggttaacttatataacactatgtgatttccaggagcaacatcatgttgaattgcccgtacaaaatattctcaagtttaaccatggattgtatntgttggacaagcttgcaaacgaagatcaccaaaccatagtttgacagatattaccatctctacctggatg

SEQ ID NO: 23191 - DNA, 379 bp, Oryza sativa
  unsure (1)..(379): unsure at all n locations
actaagcttttgagacttggcttatcttganggttttcctatgagcagagattctctttgtatgcagttcatactcggagattactacgatgatccagaagttttaagctacctagaaaggatggagggtggtggtgcttatcattaggctgctgctgctgctattgcaaaacttggtgctcaagctacagctgcacttggtactgtgaaatcaaatgctatacangcgttcaacaaggcttttccattgatagaacagttagacaggtcagtcatggaaaatactaaagatggccctgggggatatctngaaaaatttgaccacgaatatgcacctgctcatgattcgagaaatgccgccttgaagaatatctctgct

SEQ ID NO: 23192 - DNA, 280 bp, Oryza sativa
ttaacttctggaatgtgttgaagattggtgtctgccccttcacgaagatattctcggacagaatctccttgaaactctgaaactgttcaaccattttctatatagaccaccttttcactatgttctctgtacccgcgggaagggtgaatgactcgagcaatgtggtccacagcatctctttctccgaatctgggacaaaactcttatgatctccgcgtgcccttgttctgcgccaatacaccgtactgacaggcacgatattctgcacaacccaacagct

SEQ ID NO: 23193 - DNA, 374 bp, Oryza sativa
  unsure (1)..(374): unsure at all n locations
acactaagctaactacttaaaggagggtcttgtatgagcgcanattatactatctctgtatcgaaatggaagtcaaacgacttagataagctaagatcggctgaaactctgactctatctgtgttacttatctaagaaataactatataaaatgcttcataacagtacttaacagatcgaacctaaccgatgcagcgttgagcgtggggagaaacatttgaactagttgaatcaatgaatactcattcaagatggtgggtataccgaggtatctatactaatatctgaggctaagcctatcgggcttctgcgatgatggaggctagctcatgaagcttagatgacgagatcaatctatattacgtgacatatat

SEQ ID NO: 23194 - DNA, 407 bp, Oryza sativa
  unsure (1)..(407): unsure at all n locations
cttaccaactaacaaaacagcattgataggcatttcttttgcgcactgagctntgataagtgttgtgtacgcaaattttctcaacttaatgccattttctctgagggactccaaaagtatttctgcttgaataacatttcccttcaaacacagcacattaataagcaagttataagtaacaagtgtcggcacaaggccacggcataacatgatgtcatgtatgtggaaagccatctgaacgttttctgattcacagaaaccttgtataagggtattgtaagttatcgggtcagcattaatacctttgctatccatatctttgagaacatngatagcctcatcaaatctgagctgcttacaaagccctttaacaatgacactgtaagttactgcatttgccttgatcc

SEQ ID NO: 23195 - DNA, 327 bp, Oryza sativa
  unsure (1)..(327): unsure at all n locations
tgatgaaatccgcatatatattttccgcgcacggatgtgtatatttgtgactcgaagagaatttcttataatatttatgctcccactcacctttttaattntgcggtattaaattntatcatattccttatttaaccggtttactggaagtgtagtgcgtaactgtgtactcctaataaatttagaggcccctctttaaaactctcttctcttcagtggttggcagaacccatgttccccctggtacagtgacatcttggttgtgtttgccgatgctggtcttttagtaaatttatggatgctagttaacttgatgaccatcaaata

SEQ ID NO: 23196 - DNA, 500 bp, Oryza sativa
  unsure (1)..(500): unsure at all n locations
agaggcacnctgcggcatgcaagcttcatggaatcagctcgcatcacctaacaccaaattcttattttccacatcgccaatatcatccatgttggtgaagccttcttgggaattaaaccccacttcgctctatttcgccgaatcttctttctcaaaccccaaccgaacaagagtaagccatgtgtaatcggaggggccggatttcatctgaagggaactctgagcccaaagtacttctcgatgcccttcaagacttcaaacaaaggatggcatgcgaactggttttattgtccgaaccctgagcctgctctttccgagtactcttgtattactctcgtgtaccaagatacttggaactctcttccgaatcgggatgaagctgctgtctcgctcagaaattcacgaaccagaaattctaagctgaatgtgcattaaacctctgtccaggaccagccacggtacacatacgacaattgttgacatacagatccaccgtctac

SEQ ID NO: 23197 - DNA, 396 bp, Oryza sativa
  unsure (1)..(396): unsure at all n locations
gctgttcgtcagtccctggcatttacctgcttcgtcgagacccctcgtgccgagcccgttcttcgtggatcctcaggaggagcgggcctatggcgttggtagcacggaggatgcgctgctgctcaccttccaccctgtcccgtcgcagaagtagacgatcagntagtaggctcgcgcgtatggtcttctcgtttgttatcctgctagagtcgtgtggtgcatggttataccagtgtgtggtataactgtgtcggagcctgcctatatattattggcttaagcaacctgaaccttaatgaacccattttatatcagtaataagttcaataattttggtagtcgcgggtgggtagttctaatagtcagctctctcttgttgccggttctgtgtgggat

SEQ ID NO: 23198 - DNA, 452 bp, Oryza sativa
  unsure (1)..(452): unsure at all n locations
agcttctgaggtctctccctcctggngatctgatttgtgatatccatacctcacagttaagtatgtagttgtagtgaggtggaagatgagatcttgacgcgagaaccttgaactttccttgaggtctaacacttccaaacagaaaatcttgctaactcaccatgggaactgcagcttcactctgaggaaagtttgtgtgataatctaccatgtcctgaacagaacatgtctgatagtcgcctagaaccacaagatattcagaggaaacattgtttatcatcctaatgtatgtgggttcaaccgggtgccaaggacagtcaatattggcaccgtatcctaagagattcttctgcttgaattctctgattcctgccagagccatgctccaaaacctaacattgaaaattgctttcagaatacacctgtcatgcttgaacccatgtggcacccat

SEQ ID NO: 23199 - DNA, 500 bp, Oryza sativa
  unsure (1)..(500): unsure at all n locations
tataattcacttccactagacngatgaatggatagaatgttagttatatatgacgaactattactagatatgtcgcggcagcaatttattcactgctattcctattaagatatgttcttgaagtacccagttagtataagtatacgtagatggtatgcataataaaattctcacctttgcctcttatgctcttactagagaaccgagatactagccactgatcccaactctgagaagatttggaagctggccacgtcacatgcatagaattggcctagtggcgtactggtgttattgaattgtattgatggacctggacaaaccatgcatgtatgacagtaagagtaagcagctgtcttacaaatgaactaactcgttatatatgaagaagtatagcagattgagattatcgaatattactaaaccttaataatataatgagtattcaaagagtaatttactgagttaacatataacacagaagagactgaaagtttcac

SEQ ID NO: 23200 - DNA, 470 bp, Oryza sativa
  unsure (1)..(470): unsure at all n locations
agcttgcagtgtgtggtcaaccgagatgtgcgatttgctcttcttcttagagtactagggactgcggncataacaggagttgatttattgattaacatggctgctacataatatgatgatggtgcctcaagataaaagtacgctaagatttgcttcactttggcaataactgtaaaagccgtttgttgactattttgtttgatgggtacttggtcttatgatgtgcaaactatgaactgtgaatggaagcttgacaagcatggcatatgctttgttgtaccattgaaattacatagaatagtttgtttgatcacaatagatcgaagtatgaactgtgaatgaaggcttgacaaatatgccattttctttgtgcctttgtttcaccatagaaattacatatatatttttgntcgatcacaatagattaagtcattgagtagctatccttggagctggctatgacctatgta

SEQ ID NO: 23201 - DNA, 443 bp, Oryza sativa
  unsure (1)..(443): unsure at all n locations
ggcgccacactgcacagcgacaggacgattcttatagtgattctaacgttgggaggatcaacgaagattatgtcttctcttggaacgcacgagttttacaggatattcgtatgaaacgattcattttctccaaagtttctctaaactctaaaggccttgccatttacgtgaactggtgcgtcgaaattcgaagtgcaagtgttgcttgactgcctgtagaactgcacagcgaccatctgatggaacctattcagatcagagagcatattcttcgtgctaatctaaaccatctcgacaaaccgatcggagagaccagtacaataattatctgtcccgaataattaattgccacgcgtagcttggcggtgaggcctttaagcaaatntcatcttcagtatacaccaatctgtcacgcgacataaacaacaaacatatatgggtac

SEQ ID NO: 23202 - DNA, 471 bp, Oryza sativa
  unsure (1)..(471): unsure at all n locations
agcttaatccagaaaagtgtggttttggcgttagatcatgaaagttacttggtttcttggtgtccaaaagaggaatagaggcgaatcctgacaaaatcgcagcaatccatcaaatggagccgccaaaaaacacaagagaagtgcagaggttgacaggccgaatggcatctttgagtagatntctatctaaatcagcagaaaagggattacccttcttcaagactttgaggggagcaaacacgttcgagtggaccgctgaatgccaacaagctttcgatgacttgaagaaatacttgcatgaaatgccaacattagcaagtccgccaaaaggtcaacctctgttaatgtatgtggcagcaactccagcgacagttagcgcagttttggtacaagaggaagaatataggcaagtgccggtatactttgtctcagaagcattacaaggaccataaacacgatactcagaagtag

SEQ ID NO: 23203 - DNA, 438 bp, Oryza sativa
  unsure (1)..(438): unsure at all n locations
tgggtcatcatctgatgcgagttctttgctattgatgtgcatcgtgtttaagtccaaccgccgcattgacgagtgggagctgctacaaatctctgaatatatctctggatccgtcacaccgcggcgtgcccctctcgtgcgctcatgctagccgcatgctcgctcacgggggatactcagctcgctcggcctatctggccttctatgtaggccagcactcttttgcttgcgtcgacctactttggcaggccaggggctctgcgaaatgtaaactatttcattggcttgcgttgctgcatgactaatcttcttctacagaagcgagatatagacagccacttagcttgccctttntacgcccagaaactaagagacggtgaatcacattcttctcgactgcgtgtttacccgcctacagatctggcaccatgttctttc

SEQ ID NO: 23204 - DNA, 412 bp, Oryza sativa
  unsure (1)..(412): unsure at all n locations
agcttggtaggatccaccatatgccaaatcttatatggtaccataacttgnatataggagntccagaataggaaagacgagtagagttccatatggcaactataaggattacttgggattgtgtctatattggtatccattgttctacttggacaaggaacatttatggagaagagggaacacaacagactaacacacaagccaagacaagccagacattgatatcggagatgagcttagacaaaaccaatctggtgcctagcgccatctctaatctcgacgagctcatattcgaggaggaagaccacgttgtcgacaactacgtgttgattatccatgccgccaagtcgacgacagctagataggttaaattattgtacttatgtgattcagataaatatagagcaacact

SEQ ID NO: 23205 - DNA, 464 bp, Oryza sativa
  unsure (1)..(464): unsure at all n locations
tgttcnacctcagaatggttttcatacaatagaattatttatcatttatatattatactgctctcagaatgaccaatgatggttcaccatgttgacctctgtattaatattcaaatagatggcataacatttctgaatggtctatgcatgtttatggtagcataagcaaatgattatatcttacataagatgcaaattctgcaggctattattaagaggctaatgacagatgtgccatntggtgttctcttgtctggtggactggactcttctttggttgcatctgttgtttcgcggcactaggcagaggcaaaagttgccgcacagtgtggaaacaaactgcatacattttgcattggtttgaaagtaagtttcttaagcattgagtcctattattgcgaagatatgtgttagcctgtanggtatcattacaattnttacctgttctcctggtgttctgagta

SEQ ID NO: 23206 - DNA, 453 bp, Oryza sativa
  unsure (1)..(453): unsure at all n locations
agctntccanatcctatgaaattcctatggaatggttcattgcatgtgtattntggaggaaatttagcaagagctccaacctcttggaaaatttcctttgagtctatctctctcatctaattcctgcgtttttcctgcgctccaatcaaatgaccattcctgtgtttttcctgtgatcctctgttttacacttcaaatcctgtcagaatcctgtgtttttcctattcctccgttttttctaccctgcgattcaaaggggtcctccgttttttctaccctgcgattcaaaggggcccttagcttttactccatccatcccacgaaaaaccaacgtaggtggggatgagacaccaccctatccctagtggcagcgatttgaatatgtngacctangctccgggcaaccatcacatcggagaccaccggagaccaggaggctgattcgtatgaaat

SEQ ID NO: 23207 - DNA, 458 bp, Oryza sativa
  unsure (1)..(458): unsure at all n locations
cttttccatttcaatgtatcgtgtcttcgccccttgcagagctatggagatgaaatacactggtttctggcctgactctgtctcttggacaagagctgcactgactgccaccggcgaagctgctatatagagcagcagttcgcttcccggtgcttggctgatcacggcaggtgggctttgcagatactgctttagctcgtccaacgctacttggcatttgggtgtccaactaaactatcccgcgccccggagggtcttgaagaagggcaaacctgtttcggctgcctttgagagaaattgacttagtcgccgcattcggccagcgagcttntatacttcgcgtacgctcgaggcttcatatgctgaatggcatcgattntctcggggttcgcctcgatacccctttcgaaaacaagagaacccaacaacttgcccgtgcgaagcaccaaaacacactt

SEQ ID NO: 23208 - DNA, 466 bp, Oryza sativa
  unsure (1)..(466): unsure at all n locations
agcttccttcttccagacttcgcggttatttctattggtgtcttaccaccctattgcgtatcaaaagagagatggagaanaatatttcacaatatgtaataagtaatactccgtaatagaagacataggcccttgcgcaccatctagatggcatgttgacaacataacacattacattaaagcagcagcagcagcaagccccccaacagcaagcatacacacactcaaaaaatcaaataaggatcgcaatanaaaagagtttagaactcacgttattagttggaatattggcgtttgcaccagcctccaacaagtactcaacacattcaacaaagtctttgttagttgctatcaccagtggtgtatcaggaatagcgcggttcaaattagcaccagcctgtgtatacagacatcataatatgaagaannaaaatgtggatatcatagttcaaataaagcatatgga

SEQ ID NO: 23209 - DNA, 422 bp, Oryza sativa
  unsure (1)..(422): unsure at all n locations
tccctcccatttcttcaaaggaatccataaataacattaatcgatctggtgggttgagggcaccattggaaatgggaggcatacacgaattcttcgtgccgattgtgccgacgacagctgctgtgaacttccatggtgcgaggcaacgatcgctggcgagaaggccgagcaagttacctagcaccacctgcgaagaagacatatgttccttccattggcagtgctccttctattgtgggcaacgcacaacatagtgggcaataggcaacagacaacatagtggaacaactcagcagatagtgttgtccggttcagaagggctgaacggatgaatgggtgaggattatatgattntctttttataactagttntatgccatgcgttatcacggatcaggtccatataattaggaatagacttg

SEQ ID NO: 23210 - DNA, 446 bp, Oryza sativa
  unsure (1)..(446): unsure at all n locations
atcctctgagtcacctgcggctgcagcttgttactctttcctcatgttggctcttttatgcctccgngatcttctctaggcccacgatcttcttttctccaccaccagattgatgtttttttttttggagaaatagattgatgttctccgtttacctgaggatgaaattaatatgacgaaatagagtccacagtgaaacaaaaaggtgagaataggagatttaaagtgaaaaatatgagctgaatgagatcaagttgaaactttggtgatcttctgctatttcttctcaggaaagaaaattattattctgcgcataatatatagcttatatttgacgatcttttctctacatgactatcttatttaaaaattaatgttgcatcacaatatataatattaacgatgcgtgaaatatggcacaatgcgtgcaaaagcatttttgatgc

SEQ ID NO: 23211 - DNA, 391 bp, Oryza sativa
  unsure (1)..(391): unsure at all n locations
cgcgatcaattgagtagtcttcaatattgatatttttatctngtatagatggaagatcctggatctgccattcgtaatcgatatcggaagtaatagtcagcctctcgagattcggagcctgaattatccaatcctcaaagtcgtcatcagtaacctcaacattgctaagctccaacgagacaagcgacggngacatgcggatcatggcctncaatttccttctcccattctccgggaggccaacgtagacgaggctcaacaaggtgagattcgggaaccctccgaagccctcgggcgcggtggggaggaagcaacgctcgaggtggatgctggtgagctggccgcaggcgaagatggcggggtggagggtgtagtacttcacattgacatc

SEQ ID NO: 23212 - DNA, 481 bp, Oryza sativa
  unsure (1)..(481): unsure at all n locations
gcttatcaaagcggccaggccggagaagtgcagtatctataaggtcaggcctatttgtagctccaataatgaaaagatcctagaaaagaattgggaaaatggttccccttcatgtcaaagcatctcaggaaaaaaaaaacaagtaggagaacaaattggtatgaacaaggataatacctgactgttatcgcttaacccatcaatctccacaagcaactaacaaagagtcaaagagaggaaaggggaaactgagaccacaaagtccaatatttgaacagagataataaaaaaaacattgagacactgcctcagtgatgaanacaaccatacctgtgaaactactctatccatcacacctgcggaatctgaggaggatcctcgtgcaggagcaagggaatcaagctcatcaaagaaaattacacatggccgtgcagatcttgcctgaggttgacagaagagttgcaaccgtaagcatatatgc

SEQ ID NO: 23213 - DNA, 470 bp, Oryza sativa
  unsure (1)..(470): unsure at all n locations
ctaagcttgtgattatcatatatgtatgtcatggtaactatcccattactatttcttggatatttgtatcttcacattgtgccccaggttatattctatattctaacatagtaccaatggattcaaaagctgccattatcgttctagatcaatgctcataatttgtaaatggcaaaacgcagagcttggacagatttcaccaatgtacttactgcactatctttgaccctaaaatcctagtactagcataaatgtctcgacgacggcgaccacaagttagcctagcgctgacatgtgatgatgatgctcctgtccagcttacatagatccaggttgcaagcttgtcatgggaatatgcgagtacactgaactcatcttggaccattgngcttgatggggtctctcttctgcaatcgttcgtgctgatcacatgcgtcttcaatgcagatcctgaactgatttgctaacca

SEQ ID NO: 23214 - DNA, 308 bp, Oryza sativa
  unsure (1)..(308): unsure at all n locations
ttccgacgccacgaaactcccgtggtaatccaccggtccaatttcggatccaaattctgaaccacgaaagcaaaaattcttctaaatcgaggagcacaaaaacaggcgacgtaccatccggtcatgaacttcttggacgcccagctatgcacaaccttgtgaaacgcctganaatcaacaaaaccacaaagaataggcgtcacattttgaaacacgcattacagcttcgccacgcccttcagatcaaatctggctcgatgctacaaaaaannaaacagattctgtggaggaaagggtgccggacctca

SEQ ID NO: 23215 - DNA, 358 bp, Oryza sativa
actgacgcctggatgacaagaatgacccatttgtgaacggtctaacactggtcatgtcgtcatcatacagccatgttcccacgtcgcgcctgcttccggcggaagtggaggtaagtattggcccgtccatcaaaaggtcattccgacgggaaccatacaagtctacgtctgtttatgaaaagataggataagtccccacaatagagagagatggtgcatgtggtatccccttgaggtataaaaggaggaccttgcccacttataagggggatattttccgatccagaacgatcagagagggagagagtaagagctctctggttctccagctcttttgtagcttcttcatacatagatc

SEQ ID NO: 23216 - DNA, 416 bp, Oryza sativa
  unsure (1)..(416): unsure at all n locations
acaacttctaatcttctatgggtgctgggctgacgcaagaacccgcttaactgacactgttgttttgcattgtaaaaaaaataactcctaccataatgagattttctacactattttgtgagaagggaaaacgaattagtgaaataagaacataaaaatagtagcgcactaaatgcattntgctcaaacagggtgttttatagtcaccatgcaccacgtaaccttgtcaatttaggttaacaaaacccaaaaacgataaacattttcagcctgaaagactcaagcaaatgccctaactgaaaggggcaaagataaagcaagaaagggacttttgtttttctaagtgagttgggtgttgccctagtttgcgtgcccccaagtgtnttgccgaagcaagcagcaatatcagttgtcag

SEQ ID NO: 23217 - DNA, 400 bp, Oryza sativa
  unsure (1)..(400): unsure at all n locations
tatataacattctatagaagaaatggtntaaaaaatcatactaacttattntaaagttttttaagttaatacttaattaatcgtgcactaattggttcctaatccttaccccagaacacagcgggttgaggtcgtttcaaaagccaaacgtacgcctgaaaaaaaaagaaagagaaaagcaaatgcacaattttggtagggaagcaaaactaaaaatgaccctacgatcagtgtgcagcanggcatatcngtaccgtaatctgctccaccgacgacgggaacggcgaaccgacgggcctccaccccgccgcgacgagagcttatccatgagacaagcgtctttaacgcaacagcttgccgagccctgatccagttgcaggcaaccaacanactaacacaa

SEQ ID NO: 23218 - DNA, 497 bp, Oryza sativa
  unsure (1)..(497): unsure at all n locations
cccgggatccttgagtcacctgcggcatgcagcttgaggattgcaatgtgattcgattcatttctatcacgacttacgtttatgcaaattataaatataattatttcttttcacataatcgatttgtcttaggataggagaaaacaatgataatgatgtgctttacgtttacctagaagataactnttatattacctagaagaaaacttttacggagtactatttatctaggagagtactagcaatcttgctagcactatnttttttattgagatgacatggattccacatttccacgtgcacactgattagtacactngaaattacacacatggattccatatgcacgctcactagtacacttaaaattacacataacaattgtcgcctatcagtctatcaacccttccttccattagcttttctctncagaagctcaggcggatgaaccacgcanggatgaacgcagcacgcctaaacanactgcgcatatacat

SEQ ID NO: 23219 - DNA, 127 bp, Oryza sativa
  unsure (1)..(127): unsure at all n locations
attcaccgacttcacagcccatcactangatattgtttatgagtgttaattaagcctaattggtggtcagagctgtaactgcgtggagcccaacctcttaccggtggctcatcacgcccatgcctat

SEQ ID NO: 23220 - DNA, 403 bp, Oryza sativa
actgaagaagaccgctggtggtctggatacttaaaaaatgactcgcacgtcatgcctagtaagtgagacagaccagcaccatttggaacaaagaaacattcccttcttcataaaagaattttattgcttcaaaggagaagtctgtactggcgttatcagcttatctaacaatgggtgaagtgatacacaatattatgaaagtaagcttaaccatgtcttgagtctatagcacatgactggagcatcattcgtgaataacatactctagaaaggcatttgctttctagtaaatatgactagttactaactatgataatttctttggagatcactgagtaaagtggaagttaaagtcacccttatttactagttgtatagcaacctgaaagatttagttactaat

SEQ ID NO: 23221 - DNA, 294 bp, Oryza sativa
ttcacagctactataccactattaccatatcagtagataataaaaagagagagcagcggctatacattgacctaaatataaatatatgtgtgttgcatgaggacagatatactaggtgatatgttatggtattattgataaatggctactaatgacttagagattgaagtagtcgtcgattactataacatgcttatccttgcgtcaaacaacgattatacgcagtaattagattatttttaaaaaataatatatattttaagaatttcttagtttttaaaagttatattacat

SEQ ID NO: 23222 - DNA, 398 bp, Oryza sativa
atgcaagcttgtgaatgcccaaacaaaggatatggatattgttggttagttatctatcaagaacttgtattatactatttataatctgagctagttcaactcttttacaacatatgagaagctctagatgtacaaaaggaataagcctcatttctggtattgcaatgctctgctttctgaaataaaacgatagcctaaaaatagactgtacacactactgctagataaatgaagaaaattagataaatctgctccgttgccgccgttggcctcgtgagatcgaggcccgtttcgtccattccgcgcgccccgccgtccgccgctagccgccgctgtccgccgtcgtcttcacccatgccggtcgaatccctggtgaggactcccttccccctctttta

SEQ ID NO: 23223 - DNA, 401 bp, Oryza sativa
  unsure (1)..(401): unsure at all n locations
tcttgatgagaatgcccgagcatcccaccatggtagtgagatggatgaccatgactacctttgtgattctgaggatgatgcggaccancgacgacatcgcttcaatcgccgtggtgtggctcattgtctgccacgccgtgaggtaccaaataatgatgattcatttggtaagagtaaattcactattcctgcctttgatggtaagtatgaacctgatgcctatcnttcatgggagttagtagtagatccaaagtttgcttgccatgatgtttctgaggataagaggagtagggcttgcaccagtgaatttactcgatttgcttctgtatggtggtgtgaataccgtcgtactcatataaatgctttgccactacttggcgatgatttgaaacaattatgcg

SEQ ID NO: 23224 - DNA, 379 bp, Oryza sativa
  unsure (1)..(379): unsure at all n locations
agctntatagcggctcgagaggagcggacatggccgggaaaccctccgatttggccagcgacatggggggagagagagagagatagtgggggggggattcaaatcgaatcccgcccatttgcgggcgcgcttgcgggcgggaatggcggtgagggcggcgacgtggggacgcggagtgggggcgcggcgtggagcggagaaggcggcggcgcggacggtttcggcggcggttgccatcgtggggcgggtggctggaggaaggggacgacctgacaggtgggccccacctgtcagcgtcccggagagaggggaaaggggaacgggccggcccaaaggaaggatgccgagcgcgggagggagtgggcctaccgcccaatat

SEQ ID NO: 23225 - DNA, 514 bp, Oryza sativa
  unsure (1)..(514): unsure at all n locations
tgaccttngtgacatcatcatgtaagattagtgcgaaaacatattctattattgcagtatttatgattaataaaaggatccaagaccacttttctaacatgttggaaaaaagaatcgtaaagtggttgtggtcctcgcacgagggggtagtactaatcgaacaggagtctggggtttccttatatgagcatgaatcatgagggattttgaaagagaaggtttcatgctcatttgtggagtgatttctcttgtccaccagagctgatgtctcaagcttgtccatggcctgaaggttctccttgccaaaggatgtgtcgtgcatgatcgacggtgtttcctgacaactatcaagaacaacatctctagggccagagggacaagggttacgctcgagatgaggttgcgatggtggatctatggataacacttncagggtctcgccggaatcatcattctgaatgaaatgataaacattctgttctacaagggatcaggcgactcatgaagcagaatc

SEQ ID NO: 23226 - DNA, 469 bp, Oryza sativa
  unsure (1)..(469): unsure at all n locations
agctntgtgttagccagggaatcctcttcattgttgtttacacctggccttgtgcaacacatgggtcctaatccatcgtcatcttggtccacccctgctcatccagtctctgatagtcccacgttttctttccccacgccatttttctgtaagcaaccttttctttcatctttctgttctccctttctttntgtgctctttcatacctgccaactttataaaaaattaacaacatgataggtgcaagttcttacctacaaacagctcattttcctgtttatgcgtgtttgtgcttgtgaattcctgttcttctctatagtacaaatttctattatgtgttctaatgcttcaagatatcatcaagtagtttttttggtttggttatagtatctgtgttgcacatcaatctataagtccaattaatgtaggaaagcctcgtaatcactacangtttgagcttcttggacat

SEQ ID NO: 23227 - DNA, 326 bp, Oryza sativa
  unsure (1)..(326): unsure at all n locations
tanggatgttcaatgcgtcaccggttgcatggccgccctaagtctgttcatatcaaggctgggagagaaggcgctacccttatttaagctcctcaaacgctccgggccgtttacttggacggaggaagctgaacgtgccctcactcagttgaaggcgtatctcagctctcccccagttctggtcgccccggagccaaatgaacccttgctactctacttagcggcgactccgcaagtggttagtgcggcgttggttgtggagcgcgatgaggacaatcctcattccgcgcacccccaccctgtgctggcttggcccgggagagagc

SEQ ID NO: 23228 - DNA, 445 bp, Oryza sativa
  unsure (1)..(445): unsure at all n locations
agcttggcgacttctgcctggcgagcgatgctctgttacaatggcgccaagacacggacaaccaaagtcgtgctcgggaccgccgggtacatcgacccggaactcgttaacacgcgcaggccgagcaccgatttcgacgtctcatgctgcgccgaataaaaagggagaggggatcgaggcgcacggtactctggaaaatattgaagtagtaagagggaaaaatgggatggttatgtttatacgcagctctcttaatagggcatgggaaaatcagctcattttacgggaaaaattntcgtgcgggcctcttaaatggaccgtatgggacaatgagccgattatctcgcgcggatcgaagtatcgtctacacgcaatctaaaatgctccatgttcaggaaaatcatttgtgtagcagtggcttcactttagacacctttagctcatc

SEQ ID NO: 23229 - DNA, 469 bp, Oryza sativa
  unsure (1)..(469): unsure at all n locations
ctgatagtttccctcaaattcaaatacttagtcgcatactattttgttgttttggtgaanactaaccggcgggtgaaattcttgctatactaacccccgccgagttagtctgttcttgcttcattatgcagaatgaagcgattgcctcgtctgtgcaagggatccagcccttcatcaagtcatcatgatgagtctagtgctcgttcatcaaccgatgtctcgatggaggatgccgacattctgcaacgtctcttgagcgatgccgacttcgaccttgtcgacgatcaggaaagacaagcctactacatgccaagagaccgggagtatactcacacgcgagaatactctctggagctattggaaaagataggtatggatactaactatcgtgctatctgtgaagtagttggtggcagagattgctgtggaaatgagcctgttattgttcgcttacttgcgatcatgtcac

SEQ ID NO: 23230 - DNA, 447 bp, Oryza sativa
  unsure (1)..(447): unsure at all n locations
agcttgtgcctgtttggagagatcatcatanattatttaagtatgccgntcgcggtacataaaatactcagccagggctgctcccgtataaggagcgaggtattgtaatgtagcaggggaatccgccatttcagctactacaatagtgtattccatggccccctcttcatggaaagtagttactacttgagctacggaggatgctctttgaccgatagctacataaacacatattacatcttgccctttntgattgagaattgtatctgtagctactgctgttntgccggtttgtctgtccccaataattaactctcgctgaccgcgcccaataggaatcatcgaatcgatagcaataagccccgtttgaaggggttcatatacagaacgcctggaaattatacccggagcangagattcaattaagcgagattccgaagctacaat

SEQ ID NO: 23231 - DNA, 212 bp, Oryza sativa
tgctcacagagtacgcacgcgatcaataatgataccacggagacaactaagcactgactcaacggtaggtaaacattatcgacagatacagctccataacaagtcacataactgaaccgacatgacttggtgcaaaatctcttggaaaacgagcgatataagagcgatacagcacatgtatataagccattcaacgtcgaatggtggcacca

SEQ ID NO: 23232 - DNA, 159 bp, Oryza sativa
  unsure (1)..(159): unsure at all n locations
gcttaccnctttaagagaacgtgtcgcgatgcgcttaaaccttcatgttatgttgagcatacaacggctgcgttcgatcgaggcgtaagcgggcgcttactctaccaattctgttgcttattgtagaatatgacgccggaccattggagaaagacgctg

SEQ ID NO: 23233 - DNA, 460 bp, Oryza sativa
  unsure (1)..(460): unsure at all n locations
gctggcaacgataacacgttgcagntgtcgagagaggttggtgttagctgtgtacaagtcgtagtgctcaagtggcttgggctgatgtttaaagtggacagacggtgtcttgcttgttttctacgatgcctttggcaacgatgatgtgataactgtggagtcgaaactgttgtgtcgctaggcgaccagctcggcaacgatagcacttgcctcatgaaggccaagcctttgtgtcgcttacaacaagctctttatcgatggctgttttgggctatgctattttttctttcttcatggtgctggtagcttacgatagagtgttgaggatttcgcccacttatttctagataacagcgtattggaaggattggtctcgttctctccttgaaatgaggcaccttcttctttatataaaacgtctgctacagcatgaccattcgaaanacaagatanatctact

SEQ ID NO: 23234 - DNA, 70 bp, Oryza sativa
catacacaaaaggtaaaaaccaaaagcaaaaactcaccaacaacgacaaaaaactacagaaaaaaaaaaa

SEQ ID NO: 23235 - DNA, 440 bp, Oryza sativa
  unsure (1)..(440): unsure at all n locations
tgcagctgggagatgtaccccattcacatatgtanaacctatcgatatttatacgtttgactggatgtgtctgttaagtacattccaatactcctactttgttgtcggtaagttgggttcaaactatagtgtagtcaaaaagaaaaacagatcacatacaagtaacgtcccttgtatgaaaaagggctggattccttccattggtggcttggtggatgtcttagtttacaattgtatttaagggctcactcgcattattntgtatccattntcatattgcaacctgataatgttggaaatatgaacaaacatggttgcacgcttgtatggctctatgtgcaagtgcagaatattactggtagacagatgagagatagttatcattcttaaataatgctagtaaagagagcacatcaagttactgtctttctttgatgtct

SEQ ID NO: 23236 - DNA, 331 bp, Oryza sativa
cactgagagggtctggatgaaatctgccattgttgaaaaggagttatggaatgtatactaggaaagaaagctgctggaggaaggtctgaaggtattaccctcattcttcacatgtggttaatgcttgggccaatggaagaccggcttggtcatgtagccaaagcaaatgaggcttatgagaacgcactgaaacactgaccgaactaatctagaggagaagataaatggcttgaggaagacacgtgctgttctcaccatggcaagaaagaagaacccagctacacctgaactcttgcttgcagcagttcgagctgtattgaggcatatgaac

SEQ ID NO: 23237 - DNA, 339 bp, Oryza sativa
  unsure (1)..(339): unsure at all n locations
tcaagcatatattcgattcgattcgaacgcccccgccccgcccattaatttcttcattctcatcagcatctcgatcgatccattggcagctggccggcatcaagctcttaacttaattagctagctaggctctccctcccttcaccgcatatncatcccccaccagttgtagcagtagctagctccaagagcttcttgtccatgaattggtgatctcgatcgatcgatctctgctgcctgctagctaatgaataaacaatagctaggctatatatatatatatatatatatatatatatatatatatatcgatcgaccatgtcgtcgtggatgcaacac

SEQ ID NO: 23238 - DNA, 426 bp, Oryza sativa
  unsure (1)..(426): unsure at all n locations
ngaccatgtgtatacagtaagtgtagtatagcatatccactgatcatttatcatatcccatggttgccttgagttttgtattactgtatgctgtccttctgaatcatgcttgtcatctcctacaaatcctttgctcatctgaaatagaacatttccctctatcgctgctatttactattgggttatatttcaggtccgtctctattgtttatacaatgattggggatgtctgcctgtacattgntggcaaggatgaatatgatgagcttgctcgtgagtgtcgtcaagcttatgaattatgatattcctttccttatgtaaaagttactaatctagtttgaacgccttctacttccacatcaatggtactcatggttggtgatattgactgtagtggncaggtgatatttgaatcacatcggcagt

SEQ ID NO: 23239 - DNA, 491 bp, Oryza sativa
acctgcggcatgcaagcttcataaggcagcatggcagcaaatcaagctctacatacagaactttgtgactgaatttcacaaccactctgcccagcttgaaagacttaacagagcatacatagtcctcattcacaaacccggtaaactaaactccccatattgttatagacccatctcactgcaaaactgccatctcaaactactgtcgaaagtccttgctaactgcctacaatccgttcttggcagtctcatagactgggagcaaacaggctttatgaaaaggagaagcatctcagaaacttttctatatgcaacagaaattctccagtgttgtcacaaatgtaagctgcctacggctgtctttgaaatggaatttgcaaaagcttttgactcagtgcaatggtcaagcctccaagctattctgagagctagaaatttccctaattgatggcagaagtggatccaagctctgctaatttcaagcaagtcag

SEQ ID NO: 23240 - DNA, 398 bp, Oryza sativa
  unsure (1)..(398): unsure at all n locations
actcccatcggctgattccaagatgctgcagccgataatgattctaagcagatgacatctttgccgattacgaaatttcactgttaacacatgccctccagttttggagtatgaggactcatgctccaaaattctcttctgtctgatcttgtaatcggctttcatgagctgatactgatgtgcttgccctccgagccgagaatgaatgatcttggcattgacttcttcttcagacatgtggatataaaattcatggtcccactaggcgtgccaatctgtgttgacgaaaaaaaatcaaacacaccggcctgngagatctgcttagcttcagtgcatgtccgaatatgatgagatgcnggcgtgccagtcagtttgattctgcaactgacnagatatgc

SEQ ID NO: 23241 - DNA, 471 bp, Oryza sativa
  unsure (1)..(471): unsure at all n locations
cttggactggagtgaatggntcgagctgccaccgtggttctgtttatggcatgcaatgcacgcaggaggtggtggactccactcgtctccaccttcgttctgcattgccatcttccctgggatcgatctagtaaatcgacagttctaattaattaaaaagtctacagtaaatataatgtctagcaactctgtggtcaacattagtcactaaggcggcggtagacaggtcatcgaaaccctcaccggcttcatcaggcagtgtgactatgtcagtttcatcaatggagaacatctcgcatgatgctaggtatgaaaagaggacngagtcacnggtactntatttatgggttcttagggagaatgttcattatgggtttaacttgantggatttgtgcacatttagctactgctccgttgcgattgctcgcgtagttattggtataagtgaagtaatatatgtgcacttggag

SEQ ID NO: 23242 - DNA, 448 bp, Oryza sativa
  unsure (1)..(448): unsure at all n locations
ctgcatagtgggatcgcctctctgatagatgagctacgtagcatggaggctgctctggaggacttatcacagttggaggaacccagccagcaagtgaaggagtggatgcatcaattgcgggagctttcttacgacattgaggactgcatcgatgtcttcgtgcaacaccttggtcaggatgatgctcatgatgggcttattagcaagattattggttggatcaggacgatgaaagtttgccatcatactgcagggcagattggtaagctgaaggagcatgctgtggaaattagtgaccggcgtaagaggctcaaattggacattgtcccctccagttctgcctatgtgcccattgatcctannngtgtcggcattcttgaggaggcaggcagaatcataggtattgatgtctcaagagatgagctcatagagtgggtcaccagtgaca

SEQ ID NO: 23243 - DNA, 412 bp, Oryza sativa
catcaagagggacaaaggcaaggccctccaattcctcctcgagtcgctaggtaatggaatattttctctctttttatgttcaagcttaatctgtcgccgtccgtttcttcttccctgggcttggcactgaatgttttgtgtgctccttgtgaaacgaataataaaaataatgcatggttcgtcgactgcaccaacatgctgtcggtgtacatcggcgacgaccggaccgacgaagacgcgatcaatgtgctccgcaagagaggccatggcattggcatcctcgtgttcaagtaccccaaggacaccaacgccttctacttcctgcaggagccagtcgaggtaatgaccaccacccttgcatttctttcaattatctatctgaattctcatctcaaaactgtcaacacgtaca

SEQ ID NO: 23244 - DNA, 333 bp, Oryza sativa
actgagcagcaacttgggggttcgtgacggtcgatttttctttctatcttcatatcactaaacaggagagaactagtgcgcttgaatgcataaaatgctaagcaacaatataccactagtattaggtatactaacctattcgtagagaatgacaataaactggacgagacatcgcatcaactccaacgatgaatcaatcggacgatgcctagaatcagacttgcgtatgagtgaggcaaacactcacaattgactcgacagactgggccaaatatcacaagtcagcggagaagagaagccaggaggctaccagcctaattgtgggctatcgga

SEQ ID NO: 23245 - DNA, 128 bp, Oryza sativa
tcatgtggtttggtctcaaaactgagcactgctctgttgattatggatagatcgccttttgaagcggtcgaaggctgaagccccttgactactatcacccctgtcgggccgagcattttgagcatgag

SEQ ID NO: 23246 - DNA, 389 bp, Oryza sativa
  unsure (1)..(389): unsure at all n locations
atcgattccctctctgatacaagaagttctggaccggtaggtattatatcaatcacttggcgtccatccgatgcatcgactatggatatttcatatccccccttttctttacgcagtatttttcttactacacctgttgacgttgcattatagaccgtattgttactcttgctaccatcaggatagatctgtccccttcctcggtttccccccacatatatgggatattttaagagatgaacgtctttcttcatagcagggtcggcggaaagaatgggaaagacgaattcactatatttcttaccgggaacagggcctatcacaagaatattnnttttattgngacgataactcttgaaagagagatntcctatcttntctttcaactc

SEQ ID NO: 23247 - DNA, 390 bp, Oryza sativa
  unsure (1)..(390): unsure at all n locations
atcactaagtgaattatttctttctaagtttgggccgaaaagagacttgcgtctcgattcgactttaagagatgtntttcaacagctcaattggtaatgtaccgacctcccgggtcagatcattacttctcggctcccagagccattccacttgattaatcggctcccagagcccttntcattttctcggactcccagagtccagctgcccagcagcacaacaatccgcttccactcgggaagcctattctatgatgcccgtagacatcccgaatcacacagattcgtttcttgaccactcangtcatccatctgccacatatgctgatttctgtaacgantcccacaccacaacaactttttacaaagcacaggaaaacanatctacgc

SEQ ID NO: 23248 - DNA, 434 bp, Oryza sativa
  unsure (1)..(434): unsure at all n locations
agcttcgaccncgggcgcccagcctgcttgtacggtgtcagcagcgggatagcctgatgatcgtcgttcgccgccgcttgatgatgctgcaccatcttgtctcggttgattggtgattgctctgcttggatgatgtatgtatcaatcggcgatggaaaactaacaaatgcgatgcgatgatctagctaggctagctctttgctctgttcttgctaaacgctntggctgtgtgccgaatggggttggagtttggttgtatttataggtgtcggagtggaccctcgcgcgtggcgacggcggttttctccattgaccggcagagtacgctaatattttcgatctgcaaaatcgcgctgcgctgctggctccatatagatcgttgactcttcctccgtaccaaccatgccatatcgtgatttcgtcagccttgcgtc

SEQ ID NO: 23249 - DNA, 445 bp, Oryza sativa
  unsure (1)..(445): unsure at all n locations
ttctttagttgagttgccagctagtgaatgcctccttgaagaatatgtctttatatacaatgtaacagatttcttgcatgtctcanaatcgctttctgcgtaagatgcttgacttgcaataatacggcaaattttctgtttattacaataattgcatcattggtgattttcagaggtttgttcttggtcatgtgagatatgtacttttaatggtgtatattcttatgccatcaatgcctttatgtttgtgtctttcattgcatatactacttatatttttttgataggttgggtgatgctttagcctcattaagtgcgaagaaggaacctgttctatcctggaattcaagaattacacaaatcttagctgattctcttggtaacgggatttcccctcattatatctattactatctatgcctttttcttgtggatcgatgctact

SEQ ID NO: 23250 - DNA, 430 bp, Oryza sativa
  unsure (1)..(430): unsure at all n locations
agctttgagccatncggnccacatttcttcttatgattagatngagcacagcgaaatatctgcagattctgatccgttcatgtttcagaattcagagagggtaagattcagtcggttagttcttcgcagactgaagaaaaagaagatgttgctgaaattcatattatgatcaatggattgcggtgatcaattaattaatattccctctcgttctaaatatttgacgttaactcttcactacatgattgactgttcgtcttattcaaaaacttttatgaaatatgcaaaactatatatatatataacaataaatcacatgataagaagagaattaataattacttaaatttnttgaataacacgaacggtcaaacatatattataaaaatcaacagcgtcaaatatttagaaacggatggagtataatact

SEQ ID NO: 23251 - DNA, 393 bp, Oryza sativa
  unsure (1)..(393): unsure at all n locations
ctcaattggtgtgcttgggagaacgtaatagtaagcagaaactttcgttaccttcgtgaagagaaattggattcagtatcaatatacaaaactcgaccatttaagcctccatagcattctgggtatgttgctagccaagcaagcttcagacagaacttgcaaagttgtgactctttatataaatttactgaatgtagtaataaatactcaatgtaatactctctccatccaaaagtctaaggcatatttcttttgtcaccaagaccaaggagaaattaactcattctccatgtccanaaccagggaattatntacatgcatgcaaccaatgagtattnaaatggttacttgtgttccgatcaacaattaattagcatatgggactacaatatg

SEQ ID NO: 23252 - DNA, 420 bp, Oryza sativa
  unsure (1)..(420): unsure at all n locations
agctntacggngatatagagtcactaatcacctctataagaaacctcctggtcaatatgtgtttagaagattaaaaccgactagtggagctaatttagacaaaaaggataaacactcgtctcatgagcggaatggaaggttttcatgacatatctacaaagaggacccgcactcttgcggtgaagacggacggcttacagcgtgacgacgaacatagatgaaattaggcaaaaagtagatacgatattgaaagaatgattcaattagccaattgtgttgtagtaaattgtttgtcttaatggaaccaaccatagctcttataaagacaattggtcttaccttccataggactctccaaatcctactaggtatataaaccaattagtactcgaaaaatctcagctcgagagagaataccct

SEQ ID NO: 23253 - DNA, 443 bp, Oryza sativa
  unsure (1)..(443): unsure at all n locations
ntaatatanattcccttcgagcatgtctnttcatccaaagatatgcatgaaacanaatcctttagaactacaaagctctaagaaatagccatgaaaagatggaaaagaacaactcccactagttggagcagacacacacacaaagttgagagagcggaaacgggaaaatgactaaagttaggcacgcaacanatccaacaatttccggaagacgagaaaaaacccaaaagagcatccactttacttgttttgttcctaagctagttgctagttcgagcagtcatcgatcagcattgtgttcttaattntgactagatcactaccactccactgaacacactactcatgcaccgctcctatcacgtatatatgctatctgctgactgatgtgcgcagtgcgcttgcctgcatatatatccagatgatcgtgcagatcagtaagt

SEQ ID NO: 23254 - DNA, 408 bp, Oryza sativa
  unsure (1)..(408): unsure at all n locations
cttgtcacaaaaagtcgccaacacgatttttggcgactccactggggaaatctgctcaacaccatcttaacttcgatgccgccctgacaaagccgncatcaaccaagtcggaggtggaaccatccaatatcatgccaatctcattggagaatcttgatggggaagcacgccaggccatggaggagtagattaaggcgatcacgcatgaggcactgatgagaacatgcactaggacccgtcaaggtgtggttctcaagcctggaccgttgcctataacctattttgatgtggtaagtaccgaagaggtatcaatccctatccaacaacatgtagcangtacaatagattcatccattgctgcttaaatagtaagatagatgcatcttttgaatctcgctttgatgattt

SEQ ID NO: 23255 - DNA, 394 bp, Oryza sativa
  unsure (1)..(394): unsure at all n locations
gcatgcctctcaatgtcaaccatgcctgtctttattattctttttctggcgaagngaagcatttttgtcataacattcatcaacaatcttcatcttgtagaggatcgctacaagattgacctgacaccacgaaagtcagctatcaaaatcatgatccaagaggagctaaccaggctgtcgaaagaagaccactatgacgatgaggacgacgatggaaatgaatacgctgagaagaataaaccacaacattcagccaatgaggtggtggcctgagctgagcattggtgaaacctcgtaggtttagcacccgctgttaattattatccgctgttaattattatttngtacctgcatgtatgccgaaccttgtgcttcattatgggcagcaccatgt

SEQ ID NO: 23256 - DNA, 215 bp, Oryza sativa
actaactggaacagcgggagcgacagctcgcaccaccgtctaattatctctacttaaccctctctcagcgtagacagtgaggaaaaactcccgcacccccgattcgcatggcgagggcagcatgagcgaagatggatctcgtcggtgcaacattggtcgacgaactccgcaccgtagctcagagttggaggctgcagccgacatcaagctcttcc

SEQ ID NO: 23257 - DNA, 368 bp, Oryza sativa
catgcaacttaaattaataaccgggaagacatgcatgcatgttttacttataaattaatgctttatgaccacaatattataattaaaatggtaaatatctctgattattgaaatacagcgcctctgaactggtataaatttggggaccatcattaatgataacacatcaattggaacgaggtggaatcctacactgtttcgctcacgcaatttgcaacgacacgagtgtccaaccatccgttttgatgcgcttcttcccctattattgaacacttacataaagatcgttttcatcctacttttgatgcattctttactcatcctttgttaaatcaatccataaacgtatcagcacttcctctccaaga

SEQ ID NO: 23258 - DNA, 455 bp, Oryza sativa
  unsure (1)..(455): unsure at all n locations
gctctagagcgagggacaagataatgactcctggagtagaatccatataacttgttggctgattaattaattgcttcatcttgacatanngctgtcgaattatgagtcttttatttgtgtagcccccgactctttggttagttgggaaacaactgaacatagagtcaagaactattacttgtcgtcgagtagccatctcttgagtgaagaatatgtgtgaggatgtccgagtagacatattgaagattggaacaccacttgttgtaataaaataatatggcatcatatgtggtgacgcatgccgagatgtcgaagctctcgtagacgtcctgnctggtgaagtagcaaaacttgcgaagtatcagcaatagagtttgccggtgcagaagacaatgaagataaagtcgctccaccatggtgattaagtttcatagctgtgatgaagtgaacatgag

SEQ ID NO: 23259 - DNA, 320 bp, Oryza sativa
  unsure (1)..(320): unsure at all n locations
cgagtcggtcgggtgcttctatgctctgccacagggtggtgccgntcggtgaccggacgaccatgttgccgtcgttcttgagcactgcggtggagccggagcccgctgcatcgtctgtgatgttgctcgtccagcgaacgcggccgtctgcgtctgacaagagaagggtggaggagttggtcagcgacagcgtcggcaaagacgaactactgtttgtgaccggagtttctcggtcggcgacccacaccaccgtgcgcccggtgatgtcattgtaccatatgccgaggtacatcttctccggagttgagttggagggggag

SEQ ID NO: 23260 - DNA, 373 bp, Oryza sativa
  unsure (1)..(373): unsure at all n locations
agtgagtgaaattagcattgtcagagtctccatgatagctcaatactctactaagttgatcttgtttggtatgatgacatgcagtagagttacattatttttcgagcaagattgaagacccccaacttctcacctggacctgaatcgctagaatgtgcaacttttgccttggatgacataccatatgattctctagcattntcttcgatcattgtcaccttgaggatggtaaacccgccttcccatactcanatctttctgttcattcttcatttatatttgtcttcttctgattctggcaccacaagctcatgagatgaatcntggttggtgcagtatcttgaagatgtcagtccggaaatataaattcact

SEQ ID NO: 23261 - DNA, 510 bp, Oryza sativa
  unsure (1)..(510): unsure at all n locations
ctctatttttattgtttcttaatcctggatagttctctatataaatatatttccttgnctctaatattaggccactcactatctatagagttattatattcatctgctatatctcttaagttatcttcataatattttatgtcactttcatgatctaatttttccatcaattcagaaatactatgtcttctgttatctataatatttctgtcagatgattctgcatccaaatcatccgaagctctggttttatacattgtagatctaatactaacattccctgtgctatcttggtaacttatgaagttttcatgctgactcaaggttntattatttataaattcactaattggccattattctcctgctctatcttcagagtctattggtaaagggctcatgaattntattcctttagaatgcattctttctatcaactcatatacactgattctgtatttggaggcacttctattaatcaatcttcctatcaaatctatacttattaat

SEQ ID NO: 23262 - DNA, 446 bp, Oryza sativa
tgcagcatgcagctttgaagactacaaccgacctcatatgcttctatatacctgatacgctaacagaagaagcagagataaaatatcctcagttcaccttctgaaggatccttgctataataacgtacaatattgcgcatatcttagcacgttgtggctcgtatttaaatcgatggtatcacccttgagtaataaaatcctgttacactacacaaattagaacgccaagcataaatttgatgtacagaagttgggtgatatgcaacaatgttaactgattatagacccttcaacacccttgatcaatcttctgctatatctatcattcagttacacagagtgtttctgaatgtatgaactcattaacatcaattttctatcttgacctgagtatgcaatagtataattaactacttcataacaaaaaaagaccgccctgcacatat

SEQ ID NO: 23263 - DNA, 370 bp, Oryza sativa
  unsure (1)..(370): unsure at all n locations
cttcaggcttatagcttgaatactctgaccgatgtccaaagaaatgctattaaggatctggcggagttgggactggtcaaacttcagcaggtaaacacttgatttagtcttttccctagtcaacttgatgaatacaaatgtcaagagttaagccatggcagggtcgaaaggacagctggttcatacctacaaaactggctacaaatctctcagcaagcttgtcagattcatcgtctaacaaagaggtttcagaaacatttatatccttgctattacagntattcatgacgtccanatctttcataacctcaatctactcgtcacctaagccacaacaaatgaagatgaaaatactttctgtaataaatac

SEQ ID NO: 23264 - DNA, 348 bp, Oryza sativa
ctctatataaatatatatagttccttcgcctcgaagtgaagatgaagtgaagtgaagattatggtttcgaccttgattccagccgtcgcctgtggcgatgggtgttagatcagctggaaccgctgctgctggtgacgatggtgtatacttcgccgtgtcgactgttgcattcatcggttgttctgagctgcacactaagttaaggtgaataagtcctctatttattttaaggatttgcaatgatatatatttgtcaccgtgggtaccatcactatgttctgtgactggtaccgatatcgcgtgttcgtatgtagcgagtcgcgccgattttcttacgacacgctccta

SEQ ID NO: 23265 - DNA, 456 bp, Oryza sativa
  unsure (1)..(456): unsure at all n locations
agctnntggcatttctgtagatctgaacatgcttctattataactgactntggggaacagaaattctaatttatggtgacataactcttatttcatgactacatgagcatatgctttctatgtttgagatatgtntttagttctgcattcaaaagtagtgggattgaattgagagtaacctgcattgaactttatgctttgcactagaaatttcggcgcattgctatctgttggccctgccaattttcatgccctcaatagagcagtactcctctgttatcctggaccaccttatcttgagtaggttctgaagcaataaaacaaatntaatggggtcctaggagagaacatggccgaaacaagtgctaccccatcatgttgagaggaggtaattagtattagtgtgatacttacatgacaccaatttatttttggtttttcaatgtagacatcgat

SEQ ID NO: 23266 - DNA, 267 bp, Oryza sativa
cactaatacagatagcatctcaacctttttttctctccactatatatatagctagctagaaatcgtcagctctttcttatgttgctacctgctcatgaagaaaacacacgatcttcttcctatattaatctatatacagatagtgcatacgtacgtaatataaagagccctgttgatggagagggtgttttttttcagtcgcatggcatacgtcgttttatgagcaatgccgtcgaaaaatattttttgagaatatactacaaagat

SEQ ID NO: 23267 - DNA, 431 bp, Oryza sativa
  unsure (1)..(431): unsure at all n locations
agcttatgnngatattatctcatttatatatatttgtatgagaaaacctanagggtaaaactcatacaaaggaaaaagagtataatatgacgaatatatgttattttccagaggaagatactccccctgaatcctgcanatatttaagtcgtctcataccaattcctttgacacatttaaagaatgtggagtatggtagagattttgtgaataaatcagcaagattatcacatgacttagtntgtaagatgtttatctctccatgttgctgaaactcatgaggataaaataatttaggagcaatatgcttagtgatgttactcttaatataaccaatttccatctgaacaacacaagcggcattattttcatagataatagtaggtgatttccatgaaccaataccacaagatggtaatatgtggttacca

SEQ ID NO: 23268 - DNA, 365 bp, Oryza sativa
gatgggcatacataagataagccttctgtaccaactggtgcccgccgatgcaccaacaagatgtagatcttgttggtctggactctctctttgacaccttgaagatctaaatctcttgtatgtctcgacactcttcgtgagaccttgaatatgtagatcgccctcgggggataggcccggaggagcccataacgccccgagcactcctagggtagttcttgtggtctcgacactgttcttaagaccttgaagatgcagatattgtatggcttggtggggcctgtagtgccctaagcacccaagggggagggaaacccctgttcccatttctccaacaactatcaagaactgtaggcgcacgaaac

SEQ ID NO: 23269 - DNA, 372 bp, Oryza sativa
  unsure (1)..(372): unsure at all n locations
gctgtgagaatagtaagtgttctatatcaaactcactcatggaattggctggttattaaaaaacttttgtagatgcttaagaagcagcgctctattttgtattcttaagtcaatgacccctagaccccctttcttcttaggcctacagacctttccccaagcagccaaacatttcttggttgaattaagatcctttcctctccacaaaaagngtcttctagctctgtcaatattttcaataactgcaatagggagctgtaaagaacacatatagtaggttggcattgcagaaaggactgagtttatcaacatgagtctgtccccataggagagagagttttgacaccgggagtgcgtgaagcacatggtcac

SEQ ID NO: 23270 - DNA, 392 bp, Oryza sativa
tgcttccttgcttcctccactcaaatctacagcctatcttgtgagattgagagattagattagagtgtatgagtgtttaggagatggcttgaagattatgttatgttgagcactttggataccttgtgggcagtcacttgggcttattactcttggagatcttctcctagacggataggtgttgcccgtgagcttccaaagatattgtggatgtcccgggaaagattgtgaaggttttcctcatctccgcaatgaaacaacgtaagagagtaaagattcttgtgctgagttttcataggttgtactaggtagagcaacttgcactcgtggtcttttctagaaggaattgtgagatggatcttggtggttactcaattctagagaatgaccta

SEQ ID NO: 23271 - DNA, 462 bp, Oryza sativa
  unsure (1)..(462): unsure at all n locations
agctgcaactgcttgctattatataagactaacttgtgttcatcatataataatagaggcagaatatgcccacccttatcttcattataacttgacatgtgataattttcatgtaaaaaccaagacaaattacgtcaaaatacctaaacagagataaaatcgaaaagctatgagaaaagtattaaggtatcccggattttagtagtgtataaactaaactcacggaaatgcatgaaaattggacaagtntatattgaactctctcttaggtcgacctgctctatattgatgtgcataaccatcaccgaatctggatggataattaacacaactaataagtcctccaatcgctatacatgtatagcacaccgtacgtgtcatgtactggcacagtgcccttagctaggaccattggaattatgtgcatgcaaacatgtgaaaggaactataaaacgccctact

SEQ ID NO: 23272 - DNA, 360 bp, Oryza sativa
  unsure (1)..(360): unsure at all n locations
tacccttagatttacatcccacgaactaccaaaagaaaataaaaaaaattcatatttacttacacattattgttaataaaattacaatgcacttacatgccatatcaactgaaattacaaatataattttagttatataggactggtattttacaattaaagaaaatacaaatacatatttacttacatatcattgttatcaaaactacagtgcacttatatgtcatatcaactagatntacaaatgtaatcttacgtatatatgactggtaatttacattttagagaagatacgaaaacatatttacttacatatcattgttatcaaaattacagtgcatttacatgtcatatcaacta

SEQ ID NO: 23273 - DNA, 356 bp, Oryza sativa
  unsure (1)..(356): unsure at all n locations
ctaagctcggcgaccggccccgtcaaccggggccacctacgtatacttgttcttgggaatatttctgagaattctaaaagtgattttgcacatggatatatgtctaatggatcttctagtcgtgtgtctcagtactggattcctaaattnttattatcatctaaccccagtactgaggcttcgacttctgcttgtgtgtatgctatggtggcaaagaaggagaacgtgtggatcgtggattacggttgttcccgccacatgactggtgataaaaattggttcttctcactcaaaaaggcatttaagactgaatcgattatctttggtgatgcttctacaagtgcccgactcgctac

SEQ ID NO: 23274 - DNA, 410 bp, Oryza sativa
  unsure (1)..(410): unsure at all n locations
ctaagaatgttttcttagtctttttccggtcttggagtttggtgtacaccggatttgctagataggcgtcgtattattaagaggggtctatgaagcgagctcgtagatgatcttgtgccatattagntcatatgcatgtacgtgcattttgtgggcttgtctaaccaagtgtgatgagttttctcaagtcctaaaccaagaaagaagtgggcatgtccaatatgagtgagtgacatcttgtgggtatgttcggtggatatcctttggagtgtgagccctttatccttgacttaagttgtgtttcttggatggaattttcatgggctggatggccctttgaataagctttcatagagtccaagacgcctaattcgagacccgatcaagagaatcgctgtttactaactgtc

SEQ ID NO: 23275 - DNA, 512 bp, Oryza sativa
  unsure (1)..(512): unsure at all n locations
ctaagcttaaatgaattttctttaattacttattcgatcaatgatccgaccacaccattgtattcgntgtaattaaatctttacaacaagatatcgcatgattatattttgataaaagagaaatatatgttntaatccgataatacttgttgttttatatgtgacagcgacatgtttcaacgtgtatcttcaccatgtttcataaaatatttaaatgttacaattgctgattgcttttcaccatatataacttaatgtttcacttattggtcaacgctcgcccacgcactgccgctcgcccacgttgctcccgtgccgcgttgcttgcctgcactgcatgtgtagcttgcgctgatgcttgcatactatctctccctctccctcctaatacacgtgcctaatttttcctcagatattaaatatttttctccaaaattatatatctgatctaaattcaattataccataaagtttgcaccatacttaatatgttgaatattgtaatcggacct

SEQ ID NO: 23276 - DNA, 484 bp, Oryza sativa
  unsure (1)..(484): unsure at all n locations
caggcatgcaagcatattaaatanagggcaaaaggagatagagaatataggtttagctactttacttcaattaatctctccacttttactaatataatagcgaattgcatctcttgacaattctagatgcttagttgcctcccaaagatggtactaaagttggctaaatgttcgcgttatatgccaagggcagatgggcacaactacagagattgtattattggagttaaatatatatagccttttgagaatcaattctccacatacgtgcgtgatctatagacattcacaaaacctattctgatctacatatattctgcaaaatcacacctcttcacaataattcaagaggttccatgttcacttctagtcagccatccgtactgttttggttgaaagaaaagcatctattgtcactgcctgtttagatagtattatgttcatctgccatgccaagtgaaacccagttcaaaataacatgaac

SEQ ID NO: 23277 - DNA, 447 bp, Oryza sativa
  unsure (1)..(447): unsure at all n locations
cgacactcagatactaagcttctggatganatcttctcctgcatcttctctataaatattcattgtctattcaccaatggaattaacttatactgcanattgcaatgattgatattntcagaggacgagcatgatgtcgtgtggttctggttggagaaaggcatgccacatgaatgccctgtctgcactcagtatttctcggtatgatggtactctctgttgaccaaatcgcttgccttgggagaacaatttctgcatgagccactaaatcgcgcatatgttggtatgttgttctgatgttcgctgagctatcaacttgcaactttatgttcacagctcgaggtgataggagaacgaggagatcctgatgggcatgacgatgacgacgatcaccaccatcattaacgtcgcagaagtcacctctagcagtataaacactggatattg

SEQ ID NO: 23278 - DNA, 357 bp, Oryza sativa
catccatggtcacaccgaaacacatgctcttttgatccatttgaaaatagagagccaagggtcattatgattgggaaagtgcactaaacgccaaatcaaaacagctcgatagctatatcattggaagagctattcttgtgctaaaaaatagctcttagaataactctacgctacttctccagacacggccattaatgtatatggaacattgatccatatagaggggacccatataaacagctttctatatagcaatcttctcaatgtatatagatctcatgtgtctctatgacaacagagagagcgagagacatagatcattaatttattccatatgcgtagtccatatgcatatgg

SEQ ID NO: 23279 - DNA, 380 bp, Oryza sativa
gcatgaattacatattctatcattaataccttaaataccattaagatggtagcattaacacggcgaattattcacagaacaacccctatattctagtattcaacagaactgtctcggttaataccaaaaattacacattatgtgtacatcactaatactgttgcgaatttttcaccctgtccaacattacatcgaaaacttctgcacattcacgagaatacaccatgggcacatttatgatgtgaatcttattaagctcagtctcacaatgcactcaacactgggatcttctgcactggagtgatatactgctgacagattgcttctttatggacgacagtgcaccgatgtttatgtcattgcataaccaaaatgaccgc

SEQ ID NO: 23280 - DNA, 335 bp, Oryza sativa
  unsure (1)..(335): unsure at all n locations
cgccgaaattagcatggtaccgaatttgagccaaaatagcttgattgggtaaggatttgagacccgtgttagtctttatagtgcttttcacgttntggttgtcaaaactgcagtctgcatggtatagaatccgcaattgatacatcaatgtcgttgatatctaactgccaaattctaatcgaggtaccgctggaacaaaccacgtaaaatctgcgaatccatttgatgcaaaacatgcttctatcacgaaaacaaatcactgccaacatatgatgaacggcatgcatcgttacaatccatcatatcacacacattcataattctgacttgaaaca

SEQ ID NO: 23281 - DNA, 406 bp, Oryza sativa
  unsure (1)..(406): unsure at all n locations
ttgaaaccatcagatgcaacaaagaaacttgccgaattatatgtgtatttacagctatacttgngcctgagtacagaactctcaaactcgtaatcattctgattaaattcccaaatactattcttatgcacatggagatcacctgatcattgcgaatatgggcgattcacgtgcggttctttgcacccgagacagctaggaccgcccaatttcagtccaactaaccactgacctgacaccgaatctttcacgtaagcctctgaatttctcaaagtacagagatgtctatattcagacattcacttgtcattcatatgggggcttctgacangcgaaactgagagaatcctgaatttcatggggcggcgtttcgacatggacgatgagcctgacgtgcctaagatgt

SEQ ID NO: 23282 - DNA, 435 bp, Oryza sativa
agcttaatgaattacaataaaagaatgccttgttatggcgtggatagttgtacaagaggaccgggtcacctgcgtgatgtgataactcatcgtccttaagccggaatccaccatgtggggtcagcccagcttggtaagtgaggggtgcacctaagacagagaaaaggagcaatcttttgcgcctcttgtggacatataaatcacttggaagaggatttatcacatgtggaccagtttgaacagtgctgtgcacacttgtcttgttcttatcctcatcttcgagagtgatgaacacaatatgaattaccacatagatcaggacagcgccagccaaacgaatgacataaatggatgtgcttacatcctggcagctcccggcagcataggctcccacgagaccgaacacatctagtatgatggctacctctagtatgt

SEQ ID NO: 23283 - DNA, 453 bp, Oryza sativa
tttgtcctatgctccaccaaagtcaagcgcacaggctcttaacatatactctagtatttgattgactcgctcggtctggccatctgtttgtggatggtaagcagtgctgaaattcaatcgggttcccaattcttcttgtaatttctgccagaactttgaagtgaattggctttctcgatcagacacaatcttcttatggacaccatgtaaacacataattcttgccagatagagttctgctaatttcttccatgagtaggtagtgtgcaccggaatgaaatgagccactatggtgagtcggtcaacgactacccaaatagaatcatgctccgatgacgttctgggcaaaccggtgatgaaaccattccgatttcttccacgttcattctgaatctgaacggctgtaaaaacctgctggcctttgtgttctcgcttactcttgacagactcaca

SEQ ID NO: 23284 - DNA, 261 bp, Oryza sativa
tatgaatattatgatatactacaacgagtgctaaagttgaactatctccagtttttgcatactaaatgccctagttgaccttttgctcaattatttagtgagaaaaaaaggggggaaaaatttaaaattgtattgctacagttataaagtgaagaaatctagaagtattaatataaacactaagaataagagaaccttaatattaacttcatgttaaaaatgggaaattagattgtgaaaaattttatatgagcgctatga

SEQ ID NO: 23285 - DNA, 467 bp, Oryza sativa
  unsure (1)..(467): unsure at all n locations
ngtacccttcttacttagagagagagagagagatcgagatcggtggcgtacacgangacgatgaagtatagggcaatgaaagctatgggcacccgaggcagctgccacttccccggagttggagttgtcggagcagcagctccctgtggaagatcgatgatctccacgcgccgcctgtactgtgggggaggcaccaccacgactgggccatgcggcggcggcggcggtggcgacttacgctngtggggcatgtcgccggagctagctagctgtccgtaatccctgtttcttaattatctctctctaatcgatctctatatatcgtcgtcgtagcctcgacctcgagacggacaggtcaaggctagcttccagctcagtgtaattaatcactagttgatcatgggtgtcctgcacggttatatatatatacgggagtagctacgtagtttaattcttgatacgcgtgt

SEQ ID NO: 23286 - DNA, 403 bp, Oryza sativa
  unsure (1)..(403): unsure at all n locations
atcctctgagtcacctgccgcatgcaagcttngagcagctcaaagaatagttgacctctgtgtctattttagttctcgctgacatcaggaaagactttgatatatattgngatgcatacacgcattgactaggaggagtactgacgcangacggaaaggttgtggactatgcattttgacaattgcgaccacatgagaaaaactaccctacccatgacctagaacttgcagctgtggtccatgcgctaaagagttggagacattatctgattggaaatcattgcgatatctacactgaccacaagagtctgaagtatattttcacccagtcagatctcaacttgaggcaaaggcgatggttggaaataattaaggattatgactaggatgtcactatcactcc

SEQ ID NO: 23287 - DNA, 449 bp, Oryza sativa
  unsure (1)..(449): unsure at all n locations
tagagtatctctagtatctcaaagatcattagaccttcatagacggcctgtttacccaagagaaacataatggaaggtgttgttatcttgcacgaaacaattcacgagatgcacgggaagaagaagaatggggtggttattaagcttgactcttgaaaagcttatgataaagtggattggaggttcttacaacaaactttgaggatgagaggcttctctcctttacggtatcgttggattgatcaaatagttagaggaggcagtgtggcaatcaaagtgaatgacgaaatcagaaattctttcnacataaaatgactatgccggggacacgttataccaattctcttaattnggtggctgcatgttgcaattttattaaaggcaaatgacaacgagcttcatggtgagttcacacctatagatatggctatctatctcaatatcggtga

SEQ ID NO: 23288 - DNA, 431 bp, Oryza sativa
  unsure (1)..(431): unsure at all n locations
agcttcaatcttcttagacaacaacaaccctttgcatcgctctctgcttaganaactttgatcttataattgtagtactactagtaaacagtcatctattactgctctatcccatgttgcgtagtgaccacaatgagtcggtcttaaaaaaacctctgcaccaagcaaactcgtcttcccttgatgagttcccgtgagagggatcagagaggatatatgctgatctactccgccacgccgactctcgatcttagggcctgttcactntgatgtcattttcaatcttaatcaaatttggtaaagttacaaaaaaagtgactacatttagtttgctgccaaaatttgacaactatataagaaatcctaccaaaatattggcaataatgtcaaaaattggtaggggtttttggcatcaaagagataagcccctt

SEQ ID NO: 23289 - DNA, 412 bp, Oryza sativa
  unsure (1)..(412): unsure at all n locations
gatatctgctaaaggggatgctgtggaccccgaaacagtgaccgccgtcaccgattggaagcaacccaagacagttactcaagtccgcagtttcttatgtttggcaggatactatcggagattcatcgagaacttctccaaaatctgccgacccatgacacagttgttgaagaaagaagagaaatttgtgtggagcccgcaatgcgagaaggcgtttcaaactctcaaggaaaagactggttcctcgccggtggtaatcttgccggatactcgcaaggacttcatggtgtattgtgacgcttcgcaccaaggattggggtgcgtgctcatgcangacggtcatgtggtagcctattgcctacgccagctacgacctcatgaaggcaactaccctacacatgacttggagtag

SEQ ID NO: 23290 - DNA, 377 bp, Oryza sativa
agcttcgcccagaaaccactatcactatccgcctctgctaactttatactccagtagaggttcgattcgatcactacttgattagtgctacaaggaatagaattgcattccattcccaccccccattttgttatggaactaccaagttttttacctgttctcgcaaaaatcctctgggcttcagaaatagaaccaattacagcatttaatcaaagactcaaaatgcaaaactgtatctcataaaccatgcattcccccctcaaatcatttaccatttccctccaacagcaaaaaattctggttttagtgaaaaaaatttcgttgccactcgatcaacaagaaatccaaccaaaatactctattgtctccaaaatcct

SEQ ID NO: 23291 - DNA, 446 bp, Oryza sativa
  unsure (1)..(446): unsure at all n locations
cttataagccaacttataagtctaatagtctaagcctaaacaaacaagcagcttttccgtttagcttttttgaagccataagccactctaacactattaagccaaaaactaggttggagaagctntattagtttatgtgaggtagatgtatgactcaaccactaaacctaggacattaaatccaccggcttataaatcatataagccaataagctgacttaaaagtctaggccaataagcctaagcctaaacaaagagggccttagtgtgcctcactctgatttgcatactgtggcctagcagcacacatactgtgagccagataagttttaaatgctgtgtttctataagtntatgtgtattatatgtacatccagcatacatggttaatcaagcttagcatggttcactctgatatactgcttgcctagcagaagcacacatct

SEQ ID NO: 23292 - DNA, 416 bp, Oryza sativa
  unsure (1)..(416): unsure at all n locations
agtcaagaaatccaaggatgagcaaaacaagtatgaccacaaactatgcaatataaacactcagtacagtactggccagtaccgggaagaaatcagtcttgtatgctacccagaagaaaatgactgtcatcatggtcaagtaactaccaatgacgaccccagttgctaaaatctcagataacttccagctatcacgttgtggggatggttttactctgtcctttgaaatggtcattatggtacctgttcatatcanaaggtactggtagttaggtgacctaatatagtacttattagatctgagatatttatgcatatacatgagcangacaaaagaatgatcaactgtagcacggttaaatcttgtcatgaaatcagctgaaagatactaaccgtcattgacgatggcaatgatc

SEQ ID NO: 23293 - DNA, 425 bp, Oryza sativa
  unsure (1)..(425): unsure at all n locations
tgggacatgaaaggtggagcttattctcaatcgacactaagaagaaaaggcacattttaacatatgggacatgcaaacaatgtcaagagcaaatttgccgctccgctgtcacatgggtattatgccattatttcttcattccggtttcttttgttatacacaacatattgcgtgaactgaatatttgactggaatagatccgttggttcccttgggtcaatgccatcgtaggtaatataattaaaatctctccctcaggatattttgtccattttattcgtctcatcaccctgaaacttcttttctttcataatttcttcataacagtataccaccagcttgaccaattaccttattgtcatagttatgcttttcacctctgtangtacatagttaaaatatactattacacacatgatcaatgc

SEQ ID NO: 23294 - DNA, 431 bp, Oryza sativa
tcactgacaggtgggccgcggatatgctggtcccagttgtcagtgggagtttataggaacagcgcgaacaaggccgggaatgtgggggaatctttggtagtggtcgggctccgtcgctccgatggtgaaggccgacctccgtctttttgggtcgcgcggtgttctgcaagagtgtctcgttgggctctaggccttctgcgctagattggaaatatgggctctagccctctgcgatttgagaccatttggtggaataagtctatgttgcctactacctcatttgttgctctcggtcgaatcgcatccctcatcacaaaactggttataacacctccctcagcttctagaactagtgccaatcaatttattcagagatttagcaagcagcttatgctgatgtggtaggttgacttggtccatctgtgctaatg

SEQ ID NO: 23295 - DNA, 495 bp, Oryza sativa
  unsure (1)..(495): unsure at all n locations
tatggctggtcggcaagagtttacagaacttcttatgctgttaaaggacctggtgccagaggggaacaatntaccggatacgacatatgaagcaaagcangtattatgtccgttgggtctggaggtcagaagaattcatgcatgtccgaacaactgcattttgtattacaaggaatacgctgacttggatatctgccctgtctgtggggcatcaagatacaaacgagcaaagagtgaaggtgaagaaagtaagtcaaagaggggaggcccagcaaaggtggtgtggtatctcccaattgcggagcgcatgaagagaatgtttgcgaataaggaacaagctaagctagtgcgctggcatgccgaagaatggaaagtcgatggtatgctgaggcacccagcagaatcagtacagtggaggacaatcgataggatttaccagaaattctcanatgacccaaganacatgcgtttcgcaatgtgtaaggacgtcattaa

SEQ ID NO: 23296 - DNA, 396 bp, Oryza sativa
  unsure (1)..(396): unsure at all n locations
tgtgagaggcncacgagtagacgtagatggtgagaagaccaacatttttctttctctcatcaacacgtcggaggggtcataccaagggaggaagatggagaatcttatgaaggcttttctacaagtttgcgccgccttcgagccactaagtgatgtccatggtgaaagtggagatgatgataagggaaagaacatcttcaatgtttgcttcatggcgcgcggngaatctgacacagagtatgaagattatgaggtgagtgcttttgaggaagctaatactagttcgagtgcatacaatcataagtgtgagaagatgtatagaagacaggaatttatcattgaatctcttaactctgagattgctagacttaaagctcttatttctaatgatgatga

SEQ ID NO: 23297 - DNA, 262 bp, Oryza sativa
  unsure (1)..(262): unsure at all n locations
gctngctcggcagcnggaggattttattactatatatatatangggngggactttagtcccgggtggtagcaccaacccgggctaaagatcaccgggaatctttattccggttgtagctaccatctgggacttaagtcctcatctatatataaatatgactggttcacctctagctgctcgaactagcttccattctacacgttaactcacatagatctcccggacccgagctcgaacatactattcttggagcgcaatata

SEQ ID NO: 23298 - DNA, 476 bp, Oryza sativa
  unsure (1)..(476): unsure at all n locations
atctctaaaacgactgcagcatgcaagctgctgaactttgtgaactctcctctttcttgtagcactccttgcgaccttggggagagagagacgacgntctgtaatctggaatggaggtattgctggtttttgctctccaagtagtaggctcacagactgagcaatagctgaaacagatgctggtagctcacattcacgtggcttggatggaggtgcacgcacagcctcctgaaaccagtgcggaagcttgatcggttctgaacttttcaaatcaccagaagtctagctagaggatctgacagctttgtgtgattcaaatacatctcaatgggtaatgtcactaacttcacacgcccgtgcatctcatggaataatatggtctgtccgtccgataaaccatgaagaatgctctcatgagaacttgatccaacttcattctgctgaatggaattactgctgagtctgtttatgggcag

SEQ ID NO: 23299 - DNA, 58 bp, Oryza sativa
actcagcttatttatcaactcaactattctattaaatcttattctaaacctaaacaac

SEQ ID NO: 23300 - DNA, 433 bp, Oryza sativa
catgcttcctgctttgcctttccctgttctaggcacggtcagcatagaacagggaacggtcaagcaggcaagcatcaagaccgtgaggcaactgaacctggtggcacttggcactggttcactggtcttcaactcttcatcctctgcgctggaagctatattctggttccctcctaatgcactgcagagattcttcatgtggcagaaggcggataaaaagagaagctccaagagagagctttccatcttcctctctcttctgatagttagatattctttatttctttcctttttcctgatcttggccttctttctatttctgctattctggtttgctcaagatccacagcagcagcagtaagtagttgtatcggtaaaagctaccaatattaatagactagttgatgactagtctactactggttggcaaagt

SEQ ID NO: 23301 - DNA, 474 bp, Oryza sativa
  unsure (1)..(474): unsure at all n locations
gctgaccatgcacgactaaaccacgattatactagctaattagttnggcgacgacaatgcgtacgtacggcgtgcatggtttgtgagattactcgtgattcaatctgtacttgcatgagaagcccatggtgatctttgtacgtcacgaggttggacagaaatgatgggtcacatccacgagagcctaaatgcacgtgctttattatagatataaaaaacatgtactcccttcgtcccatattataaagggatttaggtggatgtgacatatcctaagactataaatctgaacggagtctatccagattcataggactagatgtgttcaatccacctaaaatcccttataatatgggacggaaggagtatcataatactatctttggtgtaaatataagaagttttagctagatatagatattaaaaagatgtgaaaattaataccgaatataaaaatagttatctatactcctt

SEQ ID NO: 23302 - DNA, 513 bp, Oryza sativa
  unsure (1)..(513): unsure at all n locations
tggttntcttcctcctcttgagcaacaacacacatatctctatgtctntctttcctactgatgataccggaagtatgccagtatcagaacttgatacatcgtagatgtcatcccgtctagacaggatcccatggtatatagcggtctcctatattcttttatgggtttcacaggaatattcatacttcanaagaattggcagagatatactatcatcgtggcataagaatgtgatggaatgatgatgcacgttctcgcatcgagggaacgcggcagtgagccacaatcgtggttagtgacacgaagacattggtcgaacagctatatcggcagcggcgcgcggcggcaattacaagttcacgaccctagcgcgaagagagntttgtatgcatgaatgtatcacgaacaaacaaaaacctacattggccgtgntagttccttttaaaattctttgactatcagaacacattgaatatanacgatactagaacaaataattacagatcgctataa

SEQ ID NO: 23303 - DNA, 475 bp, Oryza sativa
  unsure (1)..(475): unsure at all n locations
agctngatggagcanacgccgattgatacttcatctgtcacttgttaaactatatcgggtacatctatgcctaagaccggaattgttagtgatcttctacctggtagtcctattgatgttgacaaaaagaaagggaaaagtgttattattagggatccttggccaaagaataggatcaacaatgcgaaggccgaagatcataaagttgcaaaggatgagtcatctagttcccaaaagaataaaaagccgaagctcacttttgagatgcttatggctaagtacgagaaaggattagccgatcaacgatcttgataaccaaactagtgattcgaaaagaccaagatcatctcgtaggaagagatntggtcaaacatcatagcaatcgaagccattaatcataccaactccatacaaacctccggttgngatgccacggtatccatatttaatggcactatatgggtatccttatatg

SEQ ID NO: 23304 - DNA, 469 bp, Oryza sativa
  unsure (1)..(469): unsure at all n locations
tcgctggctcgagaactgagaaatctaccgggtctagttatcatatagaagcagagcanaatgacagttttacaagaagggaatatacttgtgctgatcttattgaagcacttcgcttgattgatcaggtacttctttatgaaacaagcataagttgttttttcatgtacttttcttgaactaagataatttactatatttttaagatatatcatcagtacattctatcagatactctattaaaaaaatctcatacgtctttgtgtttcatactacactgcattaattattggcatatcgtccttcagatctactttacatataataagaagaaacatatttcaaccaaaaattcattatgtgattngattagttacatatactcaagnttaactaagctaatgagtagtaagcctcagcattaaacatgcttatacattattggcgaatgcaatacacaaaatattat

SEQ ID NO: 23305 - DNA, 350 bp, Oryza sativa
  unsure (1)..(350): unsure at all n locations
agctngactgtcctggaggctactcntctacttgttcaccacatcttcgtggcgaatccctttggtgaatgcggcgatgataacgtcgacggcgatgtcagagatcttgttacgttgttcagacaatcgccggatgtaatctcgaagggatcctccggacttctgaataacattgtagaggtcggattgtgtgccgggacgctctaaggtgcctcggaagttggcgatgaagtggtctcgttattcatccctaaatccaattgtaccacggcgcaatccattgagccaagatcggccggaatctgctaagccactggtaatatgtcgcatggccttgtgtctcctctgct

SEQ ID NO: 23306 - DNA, 415 bp, Oryza sativa
tcacttgtccgcacattcacattcgcgaaggccctgcattgtcgttatttttgtggggggttgcccgaggaggcaattcgccgctgtaaacccggttcgcccgcccagccgcttgtcgtgttagcaactggctatactcgacgaccgacacgtcgccgatcatcctgcgggcctcgttttcagcctggtcgagggtcaacgctgcataagtaaagtgtgtagctatgttaacagttagacaaggcaagataacaaagcacagcagtgtatggcaagagaacagtcttactgtctgtcccttcatgaagaatcaggttcggcaaaccgtcaacctcttcgacttgatcaacttgaacttgccatgactgggagaggggaaagatgcgaagcatacagaattttctcaccaagtcac

SEQ ID NO: 23307 - DNA, 268 bp, Oryza sativa
ccataatacctagccctgtgtgactattgccaaagagtcaaggcggaacatcagatgccgctggtctgttgcaacccctaccgattcccgagtggaaatgggaagagatctgaatggatttcatcaccggtttgtcaagaacccgtaacgggtaccactccatctgggttaacgtggaccgactcacgaaatcagatcatttggcgccagtgaaaaccacctttgatggaaagaaactatcagaactctacatgacccatgtcgtatg

SEQ ID NO: 23308 - DNA, 315 bp, Oryza sativa
  unsure (1)..(315): unsure at all n locations
ntctgatcgagttcatgttcagatacccaccatgggatgttagaaagatctggacgctgaggcacgtcttcagctataactacttcttgctgttcttcaacctgctcggctttaggagatgaagaagccagccgaagaaagatatctgctgtgaagaagtaagcagagaaagaagctactactatatagtagtatatagtagtagtaatatactacagctaaacacgtggattatatacggttctaccttgtgtgatgtgataatgtatcactatacttcagttgcatattggattgtcacgttctatgctctta

SEQ ID NO: 23309 - DNA, 411 bp, Oryza sativa
  unsure (1)..(411): unsure at all n locations
atctaggtctttaaactctcacaatacatatccatatcccagaatgtgttaaagtgtatcatctagatcccaaatcaacataacccctctaggatatatcctacgtggtgctgatgtatcatgtcacatgggacgtgacatgtccttttcttttntttcttcttttatttttcctttcttctcattctttnttttttttttggcctttcttctactcggttcanagataaagcggaagaaaggaaaganaaagagaaaaggagaagaaaaaaagaaaaaggacaaaaataaataggtcctatttgctagttaaaatgatgtcacgtcttgtccgcgtggcatgccacatcaacgccatataagatcctaaagaagttgtgacgaattggaacttatataatacactatgac

SEQ ID NO: 23310 - DNA, 414 bp, Oryza sativa
gaagtggaagaagatggacgacctagtgccccggcagaagccgccaagaactatgtacgtcacagcggttgggttgtgcgggataacgtgcctgtcagtacggtgtactggcgaagaacaagggcacgcggagatcatgagagctttgtcccagattcggagaaagagatgctgtggaccacaatgctcgagacattcacccttcccgcgggtacagaggacaaagtgaaaaggtggactctgaagaaaatggcagaacagtttcagagcttcaagggagagctgtacaagaaatatatcctgaaagggcagacaccgaacttcgacacattcccaaagctaagggatcactgggacgagtttcgtgcatataagacaggtgaacaagggcaggccgatgatggaagaaacaaa

SEQ ID NO: 23311 - DNA, 304 bp, Oryza sativa
  unsure (1)..(304): unsure at all n locations
gctcttctcgatggcttgtntcgatctggtgcanatctttttagctnttactntactggcttggcatcgggtcgcaccatgagtttgtgctcaatcacctncctgggtacccccagcatgtcggacggctgccaagcgaacacgtcatcattgtcgcggaggaaggtggtgagcgcgagttcctatttctcgcctagtgatgtcccgatcttgacggtcttgtctgggttggcactanagagtggaacaatcttgattgcgacgtctggtttcgggcgtcttttttgcttgctcactttcttgg

SEQ ID NO: 23312 - DNA, 246 bp, Oryza sativa
ctgaaatttcgatgaagttcattcaaattcaaatttgaattgataaaagaaaatcaacaaatcttaatgatgatatcaaaactatggattaatttcaaaaaatgatgatactgattttgaattacgagaagaagatatgataaaagaaaaatcttcttgttatcctaattatattccgattccagcgatgttacactatcgaactaggattgattaatttattataattgtcgattacactttact

SEQ ID NO: 23313 - DNA, 295 bp, Oryza sativa
  unsure (1)..(295): unsure at all n locations
aacgcgacgagcctcctatgcgacaccgctgacaccctacaacagctcaccgcagtcgacgcctgtgcatagggcgcgtcatactcgtcgagcggcgcgcgcgccatctaccgaggctagtgatgcaagccctatcgctcgctcaccgcgttgtactagcgataaccaaagcgtatgcatgagaacaggaggaggaggtggtcattatagcgagaccaatgcgaactccactgacgataagtaaacctccattgctgntattcgctaccagcatctattgtctctgcgatagaca

SEQ ID NO: 23314 - DNA, 433 bp, Oryza sativa
  unsure (1)..(433): unsure at all n locations
ccgcattcagtatattatttacctgttatctgagtttcagaatcactcttacaaatatttctatcaagggatcgtaacttctaagaacagtaaaacctaacaaacagtggtaaataatttggcaaatacttcatatgggttcgaagtagaatgacaaatttctattataaatcccgtaaaacttttatggtgntaaatcaggtatgagaataaaaagaacatctgtgcggtactactaaggccataaatcacaatttaaagttaccaattattcgaagctcatatctacaccctgagtgtttctccaggatatcttcccagttctcatacactgaccagcactattaagtacgagagattcagaacttacctcaacttcttttttctaagaaccaactatacctcaacctttataatagcatgaaaacataat

SEQ ID NO: 23315 - DNA, 355 bp, Oryza sativa
  unsure (1)..(355): unsure at all n locations
tactcagcttattcagctgtcttggtataatagactggactctntgatttctgtgtgtntctggcagatccaagtagctgactgggtgcagcatatgctttttctaacgttgggcgtatgatgcaccccacaatctgtgaactatccctagtcactcagatcaacggcgcattatctctcttccaatctggttgatgggtagcgcctgcgaagctggtacggacgagccttcccgagacgatgtttatgggacagggaatggcatcctggagaatggtcatagtcacaagccataggaggaggaatggaggaatggcttgggagatgacttacccaatgggcatcagtcaccacc

SEQ ID NO: 23316 - DNA, 455 bp, Oryza sativa
  unsure (1)..(455): unsure at all n locations
caagtctaagctctttaccgatgttgtcaacctgcccggcaatcatacgccgttcgatgaataccctcaaataaccaaagcggtgtgggaggaattctgctctctcaagaacacccaagagtttagggaatcaagcgaggcacatcgcctactgcaacagcggaatgagcacccgcattggctgggtaccgtanggtacatncgcanggaggtaatatgggcccatgaagatgcagccgctgcagcagcgaatgtccctgccccgttntcagacatccctgaacaaagagcgcgcaactgggcgcgggcaaagggtaaggtcaacccggacggctctgtcacatttgagaacaaaagtgatgccgtcgtctatcaggaactggtgagttcactacttaacctaactaatntccgttcatataaagtacaagttcatataaacgaactatttcttt

SEQ ID NO: 23317 - DNA, 414 bp, Oryza sativa
  unsure (1)..(414): unsure at all n locations
tactgcagcatgtgtacaattctggagagaactcagaattgtcccagtatgttgtcactcaagtgctntcaggaaatattctagaacaactacatgcagccaaattttcagaaaagaaatggtaagaaaaaatggtaacagaaagcagatacaacaaaacttttatttcctttcagaatattcagatctgaacaaaaaaagtaggttgagttctcagtttgcagtttatagaanaagaactggcatgattntntttttttgttttgtattcagttagttaaagtattaagacatcactgttagctgctcagcaacatcattagaacacatgtatcttgttactatactaccactctgtcaatgttcaaagcctctgttagaatcttgcatgatgcagtaagagcaactgtcatg

SEQ ID NO: 23318 - DNA, 282 bp, Oryza sativa
  unsure (1)..(282): unsure at all n locations
aaatggtaactgctatcccatgcttagcacattggtggtctaaatgtagaaatgccatgttacttcagcatgttgctagaaatatgcattcctttgattggangattttagtggcaaatctactgtgttcaagccacttctattgtcacggtncttttgatgtaccctgtaacactcatattgctataaccatgtaatatattcatctagttgattngatctagcanaatgccttcatcatnttttttctctggtctagagcgtaagctcgtcacttgagtc

SEQ ID NO: 23319 - DNA, 392 bp, Oryza sativa
  unsure (1)..(392): unsure at all n locations
gcatatctggatctggattctgtatatacaacatataggatgagtagtatctgatgtaaatataatacttcgagaaacattcaagtattctaaaatatttataaatatgtatntcttctcttgtcaattntgattcccccgagcagatgactcattacgtttaaacactctgcccgactagtcatagccatcaagcaccgggagtcggcctaagcactctccaaacatgcatatgagtgacatgagttcgtcattaatggaacaaagtttcatgggtcggagtttactactcgggtacgtttgcaattattaagagcagaaaataaattatcttatctctatgctttggatttattccgaataatacttagcaccttgcgttattcggtcca

SEQ ID NO: 23320 - DNA, 335 bp, Oryza sativa
  unsure (1)..(335): unsure at all n locations
atagcactaaaagctggattgcagccctcgcaaaataaagtctatggcctcccagtacgtccatcttttgtcaaacctattcgaccagaggtaaacaatttattcaactatcagcaccttactgccttttggatcttttgtcatctgcacaagttcctgaagtttctacatgttcttatcttctttgataggatgaactgcgaagggagttacgtatggatgaatatatgcctgctgttctactaatgggtgggggggaagggatgggtcctatngaagccactgctagagcacttggtgatgctctatatgacgaagtccttggtgaacccact

SEQ ID NO: 23321 - DNA, 316 bp, Oryza sativa
  unsure (1)..(316): unsure at all n locations
gacacgtcatcttgcgacccgggttgcaaattgcaagccccagtcgacctgtgtgttaactgcatcgagacactgttcaagtgggtcccactacgacgtagccccacatgacagtggggcgatatttatgatgctgaccaaacggcttgtactcatttgtactcttacaccgacgtgcctcgccgagaacaagaaatacacngaaaacaaatactactactcctttttttttccggaataatacgaggagaaatttacccaagggnggggggggtgataaggtggagaaagattaccaagatcggggtggggtgat

SEQ ID NO: 23322 - DNA, 401 bp, Oryza sativa
tggagatggcaatctcttgcatcatgagagacacaatgtccaactgacggccctaaatgatggcatcgatgacgtgccaagccgcccacctaatatgatcattgttaccaaggcgagagaggatggtagctctcacaatcctgttaaccacactggggatagtcgtcaggccagcaaccttcccatgtgtgtactgcactccatcttcataaaactgagagaaatagtctatatagagcggattatgggtgtgctcctcatgcatgtcatctccaaagtccaagcgaatattgaggagtcgccggaattacctcctggagatagaacattgaacggtgttggacatccacttcatctcaccatagtctccagccatccacactgtagcatagaactggcgg

SEQ ID NO: 23323 - DNA, 265 bp, Oryza sativa
  unsure (1)..(265): unsure at all n locations
acctggtacattgtgatcagctggtaccctggtatcgactatcgactgatacctggtacaccctagtatcgactgatacctggtaccctgngtatcgagctgatacctatgtatcaagccttggtacctangtatcangtcttggtacctgngtatcgactgatacctggtaccctgngtatcgagctgatacctangtatcangccttggtatctgggtatcagtgtgatatcccaagagagaggaggaggaggagtcgtgggt

SEQ ID NO: 23324 - DNA, 468 bp, Oryza sativa
  unsure (1)..(468): unsure at all n locations
tactaagcttctgctggggtctttttntattatttatttggcgcacaaagtctttatgcttctacttgtcgacgatgaacatatgtctgtactgcgattcgctgtaagatcggccagtcagtcatctttctgaagtcgtcaattattcttgtcttatcaaccgcaactaggactcatactttataaacttagttaagggctgatattgaggttcttttcttaattttattttttagcagcggtttttaaaacgctaaggacaaatcatttaaatcttcattaataatcattttctattgcttgagtttggtcttctacggctctatcagtagtagatcaaacaatcataacaatcaagttccaagtggagcgtgttttctaatagttgagagaaagcaaggttatcccacgtttccactcctatagcaccgtaccaagatcggctcatttgaactctagatgagcatc

SEQ ID NO: 23325 - DNA, 495 bp, Oryza sativa
  unsure (1)..(495): unsure at all n locations
tcgattntgaatcanactaaaaataggtatttattatatctcttcaaagcaccaagcaatttttagttctgaaccaaactaaaacaaggtaaaacgggttgctcttacctggcaacttgatagtcgtgccgaaagagatccttgcaacctgaaattataatccaagtttgtggcaatcttactagcataataaggcgctctctagcacaaagaatcaaaattgcagcaatgttaaatctagatgagagcataatcaaatcgtacaatgtttagaaaactgctcttgtcttttnnttttcagtcatgaattagggtgtgtgaattggttagaaatctaacagtatatacgggacatatgggagatgtgttcgcaaattcatgtgacgagacagaagcaaattgaagtgtatggcttaatttaacccgtgcaaatcatagcacagttaggaagatgcaactagctacacaggggacaaatcgatctacgatggaaca

SEQ ID NO: 23326 - DNA, 254 bp, Oryza sativa
  unsure (1)..(254): unsure at all n locations
ctatataattcttgtcatgttatattggttctctgcttatacaccattaagtttgcagttaaatntgtacttatgcgattacggttatgggttcatcaacaaaaaatatactctcctccgttaaaaaaaactttaggcttntacgaagccagaaggtctttnttctttgagtaaatntcacanaactacancgtttatggnccaagttgcagaaaaccacacacactttaacacttcgtacttaagtacatata

SEQ ID NO: 23327 - DNA, 454 bp, Oryza sativa
  unsure (1)..(454): unsure at all n locations
tcagcttctattntacgttgctaaagtcccctcctcattctttcgaaagcagctagtcaccttattatctatcaattggggcttgatcgctatgctttttgcaccagctggtgctgcggctatgcagccacacccatctctctcgagcatctcctataacgagtgtactatagaatagaaatttagatttaggaaaaanatacgaattaccccctgaactatcgtggtcggccgaattacccctcttaacctgaaaaccagatatcactcaccctgaatttttaataccagtcgaattacccctcaacacaatccanagcggttntgtcctacgtggtgtacgcgtggcaacccaaatcaacatttcttttttcttaaacatggtaggacccacccngcataccctctcacctcttccttttnctctttctctcttcctctctctctctggcat

SEQ ID NO: 23328 - DNA, 355 bp, Oryza sativa
  unsure (1)..(355): unsure at all n locations
cttttccatcacattaacctgtcatacacacacaacctttcaatcacatcatctctaatttcaaccaaaatctaaactttggatccaactaaacacagccagagtggggcaccgtggcctggaatgctgtgccgngngcctcttctcttttcttttcttttcttttcttttttgcttttcatagtctcaaagaatacagatggntctttatctcaatgatggttagtagaattatattccacggntcataaattccttccttgcttggaaccgtatgtaaaatttttcaccttgtcacatcaaatgtttggacatatatatggagtattaaatatanatgaanaaataattaata

SEQ ID NO: 23329 - DNA, 372 bp, Oryza sativa
  unsure (1)..(372): unsure at all n locations
ccacacaacaatattctgctccttttcttcgtgtgaaggggcgcaatntcaaccaagaaaccgtacatggacttttgttacatataaaagtgtttgtaaattgcacaaatttcagcacaacatatatgaaatccatcgattagagcgccaacattgaagagatctttttttcttggaaatttgaagaagaaattacaagcatatggtagtagtactacatattttcttatggcaatagttctacacgttcgactgcggaacaataaattagctgctctatctatctcaaaataaatntacttttcacttataccagtccacagataccaatacaaaatcaaaatcttaacaccatcaattatcaatcataat

SEQ ID NO: 23330 - DNA, 219 bp, Oryza sativa
  unsure (1)..(219): unsure at all n locations
agagatgactgaattatgaanaaaaaattattatgccaatatacaatctanaattctgacattttgtacctttagattgatgaaatactggaagaaggtgtggngaacaaagatactgagcttccagtactggtggtattaaacaagaaagatctcatanagccaggagaaattgaaagaaacttgaggtaaatatcgtacaaaaattggagatggttt

SEQ ID NO: 23331 - DNA, 358 bp, Oryza sativa
  unsure (1)..(358): unsure at all n locations
cgggagatcgccaccggcaacaagcgtcgatagcctgcacgattcttgtgcacgagatgttgttgcgctcgcgcgtgtaatcatgtactactccagtatttctgctttcctgaataaactgcatctnttggtggctcggtgttgctgaaagatgctagcatacaagcctccgagacttgtctagctgacagtcgagtccataatctagttctgaatgacaaagtgagaggtctaaactatacctcgaaaaattggtcatgggaatgctattgtcagctactagcagtatataggttccaaatgtcgccagggacatggtatctagttctattgactgtagcccatatccctctggcta

SEQ ID NO: 23332 - DNA, 494 bp, Oryza sativa
  unsure (1)..(494): unsure at all n locations
aagtcactgaggctgcagcttattccttttctcgtttgggaggcttgatttatttcatgtgccgctaatgctagaactataattctagcatccttctcttgcttcattgatgccatctgaaaaatcattntggtcccattcagtgtaaacaatgatgaanatatgatgtgtataggcaccaaattcacgcaatagatgtgccacatatatactatcataatgctaagggtaaanattagataaaccatgccagacatatatattaaaattcgctgttatgaaatanaagcttacatatatctgtatgtggactgaaccagagagagctagctaggtgtatctatatatatgcacacagagtgtgtccgtgtgtgtgtgtgtgtgttacgtacacaaagtggacacataaactgtaataaaaatgtgtgtgtgtgtgacacacaaattantaanaacgcacactgtatgctaattaaagacacagtatttcatta

SEQ ID NO: 23333 - DNA, 218 bp, Oryza sativa
ctaagctgcagagagcaggtgttgcaatcttgttgaatttttttatactaggattattttttaagttggacgaaagagactgcgctcatcacttaaagatgtttcaacactcaatggaatgaccgaccccgagtaatcattactttcggtctaagcctttactgataagcgctccaagctttcattttcgactcaatccactgctagagacacaatcg

SEQ ID NO: 23334 - DNA, 169 bp, Oryza sativa
gatattatgactgttgggttaacagatttatataatatttcacacttagagccggggcatactctgttatgcacactatcaagaaggatttggcatacgtactcatcatataatgaatgaaatttctttagatatgattgctgcatatcttatatctctacttgtactt

SEQ ID NO: 23335 - DNA, 335 bp, Oryza sativa
  unsure (1)..(335): unsure at all n locations
ctctgggaatcatcaattttggcttcgcttcagagcagcaggtcaagaataaatttacatgtctgagagttnggagtcatcaaccaatcaactcatatcagattcaatgagttgaacaacagcatatactttcctctaagtgaagcatctgcaacagctatagcaccaagttctactgacatctttataattaaagagcgtngcatcagtctttggtatgcacacgctcgcatcaaggaaactactcgagttttgatatcttctcaacaatttgatggattattgtcactgacatcatcaccagcacctctacttcatcggcccctgacgtctca

SEQ ID NO: 23336 - DNA, 382 bp, Oryza sativa
  unsure (1)..(382): unsure at all n locations
tgcagcggtacggctgcgtcaaccgcatcagcagcaatcatgtattctgatgganaccgcggcaacttgtttcgtttcttctgtagccttggccatgtngagagtagaggcagcaaccgtagcctgcttggacgtgtgcctcaaagtttccgccttatttgctggtagtgcaacagcaacaacaccatcgagggcctttcggatgtaggagcatgtgttacttatgcatgtgtcaacattggcggtgcaatcctccgttggcactcacatggccactntaaaggtatcaatcattgtcgtaaagttgtaagcggatgccgaaatagggatgataccagcaatcttgttggcgcattccacgggtgaggctaacatggttgac

SEQ ID NO: 23337 - DNA, 463 bp, Oryza sativa
  unsure (1)..(463): unsure at all n locations
attcttgggatccggatctgntattcattcaatggaacctcttgttggatattcaccagataaaagtcagaatatggttcttatgggtggtttaagaaaatacattccaattacaagaacttgttttttatggggtaccctttctctttgtggtattccacctcttgcttgcttctggtccaaagatgaaatccttagtaatagttggttatattcaccctttttggaataatagcttcttttactgcaggattaactgcgttctatatgtttcggatatatttacttacttttgatgggtatctgcgtgttcattntcaaaattacagtagtactaaagaggattcgttgtattcaatatcgttatggggaacaaggatatctaaaggagtcaatagagatttcgttntatcaacagcgaagagtggagttctttctttcacaaatctatccaaatcatgta

SEQ ID NO: 23338 - DNA, 403 bp, Oryza sativa
  unsure (1)..(403): unsure at all n locations
tctcaactctcgtctgtgttagttgcagcggaatacagcaagtgttttaatatccttctagtgtttcctctgtttcttactgtataaatgcaattccacaactacttgtgattgactatgacaattatgaatctatgtgcagaagtaataaactcctgataaatgttgtctaattactgaactttaattattcttcagtcgggagttcactcatcgtgtaaaatcaatatcaatggctaaatttacttctcaagaagtttctgctcttcaagaagggggaaacgaggttggcttaataccattatttataatttaaatcctgatatgctcggtgtctgcttttaagtcttacaacnatatattttgatagttcagcgtggtaaggaaatatattngaaacatt

SEQ ID NO: 23339 - DNA, 424 bp, Oryza sativa
  unsure (1)..(424): unsure at all n locations
ctccgcagattatgctttactggcctggcatcnggtcgcaccatgagtttgtgctcaatcaccttcctgggtacnctcggcatgtcggacggctgccaagcgaacacgtcagcattgtcgcgaaggaaggtaatgagcgcgagttcctatttctcgcctagtgaatgcccgatcttgacggtcttgtcngtgttggcactggagagtggaacgatcttgattgcgccgtccggtttcggcgtcttgttgttctgctcactctcttgggtggctcacatgtggcgggtggagtgggcgtgtgctcgaccatgtcgaggctctgcttgtcgcattgcactaccagcttagcatttccttgaatagtgattggtcccttcggtcccggcatcttgagcacttgatacgcgtagtgagatgcgcgcat

SEQ ID NO: 23340 - DNA, 345 bp, Oryza sativa
  unsure (1)..(345): unsure at all n locations
accttagatactaagctggaagactccctcttcctaatgttgacaccgtatcctcntaaacatgttgaccgnncgcttattaaaactttgtaatatgtgaaaactatatgttacataataattattaactataatcaaatgaggaaaaagaattacaattacttatatttttaaaaagagaacggtcaacattataataaagacacggcgtcaacatttgtgatggaggtagtactatgtacgacctccggcgggaggtcaaaccgccacgatgttcacgggcatggcggtgtgacggatatcgtggtatgtattcgatgaataagctttttcataggattgggg

SEQ ID NO: 23341 - DNA, 309 bp, Oryza sativa
gtcgtgctcgtcagtatcccacccgtggaggcgcaacagcgggattgccactcaatctgcaatcagagctgcgcctcgtcgtgcaggcccgcgcccattctcgcgtgcggcaaggcctgcagcctcgcagggccacaggcttgcagtcagtgccagtacagcgtctaccagcagtgcaccggcctctgcttcaactactggttcaactcgtgctcccacatgagatgaagaaattaacccaagaatatatatatatctgtgtttgttgtgcagggtgttgtgcttgtggacggccgatatatatatagt

SEQ ID NO: 23342 - DNA, 519 bp, Oryza sativa
  unsure (1)..(519): unsure at all n locations
tctaagctgctcggcagctggaggaggaagaaacatattataggtgttgtctctagtcccggntggtggtgggctaaagatccccgagatctatagtcctcggtggtattaccaaccgggactgaagttacgatctttagtcccgggtggtgtgtccctggggggcctgacaggccctgacagcatttgaaccgggactaaagatgatctngaccaaccgggagtaaagatcaaatatgcctcgttacccttttaaccggaactaaagatcatctntagccccgcgttttattgcattcgggactattgtggaattcggccgatcgacgaaagatggtttcttcaccagtggcatatgctacttccaattntccaaatacatgcatatttcagganaggacccatgcaacatnttttgtcacggcacagcatgcatgcatgtatcatgcaagcctaaggatatgcctaatacataggtagcatatccttctctattaaaatgatagtatatactaatac

SEQ ID NO: 23343 - DNA, 372 bp, Oryza sativa
  unsure (1)..(372): unsure at all n locations
ttgagtttattttgtatatttgtaagacgtggaactgcatcaaattgtcacctgtgtactctggttgatgcatggacagagggtaaatgcacatatagcccgtgatttgggttgtcgaatctatgggcgtgacaaaatccattttcacaaacataccctataagagacacaccttanaaaatangtatattttcgctgatggtccaattaagaggccttgcctgcagttttcacacccagccggttcatacttcctttatgaattactcccccgtccatcnacctctcctccgaatctcctctctgtactcctncncttccctnnntctctcctacctcattnggctcctctcagctctaccgatgatggga

SEQ ID NO: 23344 - DNA, 433 bp, Oryza sativa
  unsure (1)..(433): unsure at all n locations
cgcgtcagtggttttagctggcgcanaaacatgattcttcaaggaggattggntagagaagttaccgttattggtaccttcttgataatatgggcgtggttggttccaccgctgacctccttgtggacgatacccgttgttggtgttgcccatgtacatcgcctcctcacgggtttccgggcagtcattcctagaatggctcgtgttgctgcagacctcacacgtgatgtgatagtccaaggccttgacggtgccttgtggctgtttctcgtggtcatccagccgctttatgaggaggtccagcttggcagcaagcagttccgtctccttgacgatgtgcatgccttgctgatgggtctggagtcgttcctcgcttcaacccatatttgagaccatcttctctattagatcaacagctcctttgaacagttta

SEQ ID NO: 23345 - DNA, 298 bp, Oryza sativa
tccttatcacttaaccccatcaattcgaacaaatgtaatctacttatctaatactaatccaccacccgatgatcatggtaaacccacgcatacaaccgcgaattagccacacttaatctactaatccaatagacaccgcccgatgatcacagcaagccaggctcaacccgaaacaagcacaggctgaactaatcagcagtaatcaacaagcatcgatctcgacagcggcaagcccgcgatcgagcggggggaggggtcgcctcaccttgctgccacggaagacgtggatgggcatctc

SEQ ID NO: 23346 - DNA, 369 bp, Oryza sativa
  unsure (1)..(369): unsure at all n locations
ataaatgccaatttgaactacatgaattgtactaattggcgaacatcttataaattattttgcttcattcttttgtgttagatattaatgatttttcttgcatcgcatcaantttttacataagcgcctacattacagatttggttctctatagacgccataggattatgaatntctccgcatattattgcanacataagcaacatactaagcttacagtacatagttggtttagaagttatatttcttactattaaatctattntntaacggtcaagttgatanggttctcttttcaaatataaatagacacagatatataggaaacagactagatactgttatatctctgttattatatatctatgt

SEQ ID NO: 23347 - DNA, 367 bp, Oryza sativa
  unsure (1)..(367): unsure at all n locations
acatcgattcttctgttgagatattgctctatcctcaactatttctcgcgatatcttcttacgaagttttgntagggcatctataacagcctctggtttaagtgggcaacccggcaagtagacgtccacaggaattaacttatcaactccccgaacagtactataggaatccgtactgaacattccaccagtaatagtacaagctcccatagcaatgacgtattttggtcacgcatttgctcatataatctcactaaagagggagccactttcattgttactgtaccggctgttaaaagtccgtccggttggctaggactcgatcttggaccaatccataacgatcagagtcgaatcgtgagcctat

SEQ ID NO: 23348 - DNA, 453 bp, Oryza sativa
gcttctattaatctcagacaactacatcatattgataccaccatactaagaatacttctgggcgctgcataactacgatgcacacagccaaaacacatacccgtgcacaaaagaagttgtaacaaagtgaagaaaggctataaagaacgctcccggtctctgcataactaggatgcacatagccaaaacacacacgcgcacacaaaagagtttgaacaaagtgaagaaagctataaaatctagcggatcgattattctgtttcttaaaaaagaattcaagttgaacaaatatagataattctacatcgtaatataatattatttcaatgctagccgtgtaattgcacgggccaccctgcaaaagctgtaaaatctagcgggtcgattattctggttcttaaaaaatatttcaaggtgaacaaatgtagataatctacatcgtatataacttag

SEQ ID NO: 23349 - DNA, 382 bp, Oryza sativa
agcatcagctgtctgggaatcttcgaaattcctaaagctaaatatataggacactcgtgtcctatatatgctagcagctgaaatgcttcacaaacatagtctacaagtatctgttgttgattagcgcagtgaatattgtcgtatccacaaaactgcacaacgactttacttggttttagttttcttattgcttctgcctatataagagtcacgccatattacaaatagtaactgttagcttaaatcttcttgttacctaatgattcaactggaagaaaagatcaagctagctactgcagatattcagtttgctctattacacttgtcagtctgtagtgataacaagtttgctctggtatgttaatgcctcactattaacttg

SEQ ID NO: 23350 - DNA, 328 bp, Oryza sativa
  unsure (1)..(328): unsure at all n locations
ctctaatttcttctccttttatgatgacagacattcctcggagcacaaaatcaccatgttcttctttagggtagttggatccataccactacaaatatgtcaaaatagaaaaatgtcactactattcacgatatcgatttggtgccactgaaattntataaaattgtaaccattgccaccgtccactttctgtcatccctcgtagaatcacattctcttcatctgtggcgtgtgctttgtcaacctcatcggcttcttcaactccggtgtcaacgctggcaagtagcagcagcaccgacacacggnggagaacaaggagagctctgcg

SEQ ID NO: 23351 - DNA, 460 bp, Oryza sativa
  unsure (1)..(460): unsure at all n locations
actcagctttgctcttcaatggcaattgtgcgttgcatngntccaactctgctaanagttctatcttccgagcgttcagctgttctatgttggcttgagtggaacttggaccgacttccaattcatcaagtnttgccctttcttcattgatagaagctctgctagctnggatggttgcttcgagatatcttctttcacgacgatcggcaatncctttgttagctntctcaagcttgagccgatgctgttcaagatatgctgctggagtaatgacatcggctagttcatctgggagttggtcatggatttccaggaatctgtctctaaaggatccatagctaaccaccaaagcttccagagagccttcaagccgttttgagatgtccagtagagttgctctcacatcattggctagaggcaccaaggctntgcatgtggtttcttcttactcatcccataa

SEQ ID NO: 23352 - DNA, 368 bp, Oryza sativa
  unsure (1)..(368): unsure at all n locations
aagatagtcaatggatntctaaagatacaatgtgtctgaaatatgtgtttgctatccncttggagtgtgatcttgatgtcgtgtgctgcatgccacacgttcaaagaaacattccccatgttggattctttgaagggtctcacatcaccaaatgaggcattcagaaagtacagtaaagtcacatctcgaggatgacaaaagacgttcgaacgataattgggtanggagttggcacaaatgttcactatctcatcaacgcagttctgcactagtttgaacaaacacactctcttgtgcgattacaacaccagcgacatgtgcatgagaaagaagagaacggacacgttcaaaaggcactcaacaatatt

SEQ ID NO: 23353 - DNA, 499 bp, Oryza sativa
  unsure (1)..(499): unsure at all n locations
tctcgnttagctcttcatgtctttgtttcaacactatgttcagcttattcagctccaaattcatctcctggtttgctttttcaagaagtacggaacgttcgtcagctgtggtaaaaggttgaaatccactttgcatttcctctttcagtctgttgaacttctnctgtgtatgcaatatttcggacttgagggtctgtaatctagcagtcgattggtggcattgcanaactatggcttctttctctgtatnnttgtgtgcaagtgcctccttgangcaaacaacctccaactcagcctttgtagtctgctctaacaatgatgaaattctactcttcangtcttngntntcctctgatanactttctagttccttctgcagcctctcgttatcctggntgtctgcacaagaaccattngtggaaatactcatatttcactctattctataagctnntctgaagttttatggggcttaccttagctgcttttgatactacat

SEQ ID NO: 23354 - DNA, 454 bp, Oryza sativa
  unsure (1)..(454): unsure at all n locations
ngngtggntcggactnggatggtcgaagctgctgcttgctctctaccttctgtgccttcttgcagctccgctcctgcttcngctcgtgcgggctcttcgcctgccatatccgcttcgccttcgccttctttcctcttaggcacaactctctctttaattgttttcttcggtggcatcagtggcttcgccctgagttccctatggccggcgccagctgttgtcgaaatgacaaaagcttcacgtcgaaggacatggttctctcagtggagtgattgaacattaagtaatgcattagttcataaaattttttgggaatcccncactacatgcccctagggggctatttatgctctcagtacaggctcataccctctatggtttaatatgttcacggtaacttatatggatacccttatgatanggaccataagaanggcatataatgtccattcta

SEQ ID NO: 23355 - DNA, 458 bp, Oryza sativa
  unsure (1)..(458): unsure at all n locations
gcatctttgctgcanactctctatcttgtttcccttgaacaagaagatnttcaagcctattccatctgtatagaagcaatactacggttaaatagcagtagaataatcagtacaagatgcaattactgacaagagtagtcaaaactcctcattaactacttcatgaggacataaacttgcctgaattttccatccttgaatagtagctcaattaaagcatctctgagatatggattgggatcagtgagtagccttttcgcatagtaagggtacgaggcagcgagcaccttaaaattgtgatcagcatagagtgctaaaccttccagtacagtgagcgatcgcagtatcaatgcgtattatgccggtactagttaagaataaatagacaangtgtatcattacatgagcagaattagcatacaagtgagaactagcatctgacaacaggaaaacatacc

SEQ ID NO: 23356 - DNA, 239 bp, Oryza sativa
acctcaatcactggagttgcgtccttatccttctatcgccaacaaattgaatgtggtaactgcactctgccatgaatatccactataatactgattgatctattcggaactatgcaggttatcagcagtaaatgtaatagagaacagtctgttactcttggatacctgtacatacctatcatatggaggagatagattcacacatgagcgagagctgatgataatccacacctatatga

SEQ ID NO: 23357 - DNA, 469 bp, Oryza sativa
  unsure (1)..(469): unsure at all n locations
cctaaattcccgccgcgaaatccctaaaccctagccggcggcggccgcccccgcccggcatcggcgacgactccgacctccagaaggacctggacgagccgcgccgctcctgcatcctctccgggaacgaccccgacgccgcggtcgcgcaggtcttcgncagccttcgccgcgcacatcaggggcggngggcggcgaagaatggctntgtccgatgatgacgaggaggaggaggacgatggctntggcgctcgtccgtagcatccgtgagaatctcctcaacaaggcctcttgccctcctcacccgatctgcgtctggccgcccttcgacttggaggaggacgacgacaacgacctcgagacgctccgtgcgatacagcacccacttctcgcacttaccattccggtgagtaaatctatctcaccctgttggtcgtgcattgctgtagataagcaatcgaattatggg

SEQ ID NO: 23358 - DNA, 325 bp, Oryza sativa
  unsure (1)..(325): unsure at all n locations
tactcagcttctaaccncgagctcgccagcaacttgcaccgtggacgctgtttacatcgcaagctacccctcgcctatataagacagcctctntctctctctctgacggtctgaccccaccacgcgtncacgcccncatttgaaatcacacgcctcgcctcgcctcgccctccatcgagatggccgatcccaacggccgccgccgcctccccaccggtgatccagatcaagccaacgcctccccgtcccggcgagtctccgccgtcgatggcgtcaccggcggcgagggcaggcccacctactcccacttcctccccggcgcgta

SEQ ID NO: 23359 - DNA, 432 bp, Oryza sativa
  unsure (1)..(432): unsure at all n locations
ctgtctatattttatcatgaacaaataggaagtattttatatcacaatgaattcattaataaaccggcctgaatagtatcattaataaaactgagaatgatataatttccagaaacaacattaaataatccgggcatgacaatganggctccgggtgatggtctgtgcgatagggtagttacgcaagaatgaagtctcaacattnttaaccatattatttacatgagtttttccttgtgctatnttttagctntgtatagtatggaaactngtactccctccgtatntaatgtataacgccgtgactttcactaacgtttgaccatagtttattcaaatttcgtgcaatatgaaatattatatatgctaaagacatttatgataattatcacataaataatgacatgctaatctttatacacaatggcaacg

SEQ ID NO: 23360 - DNA, 361 bp, Oryza sativa
  unsure (1)..(361): unsure at all n locations
tngagctacctgccgatttggtgttagccccacgtttaactattgttatttaaagccatatttgggagaagaagatgagttagagtcgatgacgactcacatgcaagaaggggaggatgacgatgacatcccttccaacgatacaaccatgcctattgcacagcaaggaccaatgactagagctcgagctcgtgaacttaattatcangtaaagtcattcctagctaatcatacaagttcttctcagaaatgggtgctactaaatggatgttgtgatctacttgttgttaggaatatgggagaggaatcagatcgcaagcagcactatcagcactgatttgatgaagtcaatgctcttcac

SEQ ID NO: 23361 - DNA, 444 bp, Oryza sativa
  unsure (1)..(444): unsure at all n locations
ctcactggacttggcacagaaatgatgaccaagaaccagtgagaacggatgatgtgtggataacgtcgctggctggttccgggtgcctccaggacggtagtcatgagtacaggaaaattctgatgtccccttaagaacatctgaacagacatacagactacagttagtagcatagtctaagtgcctgccatgtatattgtatatatgtntacgacttgctaaaatacaatctcagaagctctttttttctgtattttgaatcttggctaatctggagataccactgtagcttgtcgacatatctcttgatgtatgcaacaatggttgtagccagccaagtgaatggcattctgaggaatgctaccttgtgtactggacacagcatgatatgaacatatgtatgtacaactgtaacaccaaattggtaaatacatcgattggagt

SEQ ID NO: 23362 - DNA, 375 bp, Oryza sativa
  unsure (1)..(375): unsure at all n locations
ttactattattagaatactcttctatatacatttatggtattgtattactntccgagtatatgaatgcttactttacattatgttcatgttatactaaatatactgctagcttatctgggagatgctntggtgcgggtataatgtttgcttatgcaattactctatgtcatgacgatgatattggagtagtatctgatagtttagacgtggtgtctagattacgggatatcattatttggggttatatgctgcggatgaaaggtgggccgctgatggtgacaactcagtacgggtattcctccgtgcttatatataattctaagttaattccctgcggagggtactcctccgtatttaccccggttgatggcatg

SEQ ID NO: 23363 - DNA, 378 bp, Oryza sativa
  unsure (1)..(378): unsure at all n locations
acatcctgcacaaaagctttgaataccttataangtggcatatcaagcttaaactactcttgccaaacgaccactttgggtcgttgagttttcactaaaggatcagtctggtagctacaattttctaaaaaatgacagagagtctcactattcaacactctggccaaagaagtggccagtctaatattcatgccaacagcctgctagcttcaatcgtactcaagaacctctctacatgatgagggaagtgaagtctcttgacgagcaccccactaacacaccccactagagccatgcatctttgatgctttctttctaagggctgcagagagcanaatgagcatgtagcattctgcattcatttgctaaccatcttat

SEQ ID NO: 23364 - DNA, 413 bp, Oryza sativa
  unsure (1)..(413): unsure at all n locations
cgtggatctaggtttgtttgctgtcgtcgacacaccttgcttgaattgggaacgagcttctgcaatgtatcatcctctgggtgatcctgtcccgtcgtttctgcaatcaacagtagaccacatgattctttagttagtccaaattagcaaacatccgaatagcgatattctagattaatttctttccaaaaaaatcttttgagaaaaaatggagttttagccatggagggcaacaattttaccacggcggngtgtttgtcatcttctagaacagctggtcattttgcctgatgactagtaaaatgctaattttaaccatcggcctgtcggactgcaccggaatgagatttacggcgcattccaagcttgttcataaaacttgttatcatatttgtcttaaaaactctattctt

SEQ ID NO: 23365 - DNA, 372 bp, Oryza sativa
  unsure (1)..(372): unsure at all n locations
gctttgacttgaagtcttctccctctttatcagtgtctggactcgggaagcattccgttcgacatgaaagtgacataatattattatggagtactggggcaatattttcgctgaaatctttcggaaactgaacaggcgatcgatgattgatttgattccgctcggcacaaataacacggcgacagttctggtcctagtagtaccaatatcggagatgagaatcgttaggccattcctaatataagacactacatatagattctatgaactacacatcatcaaaaaactaatactagatactattcttccaatacaaaaatcactattccatacttaaatntaatgctacttatttcacatgatgtcttggat

SEQ ID NO: 23366 - DNA, 470 bp, Oryza sativa
  unsure (1)..(470): unsure at all n locations
cactacacctacatgaatttatcttattgtaacacccccacttaagagtaatgctgtccttccaaaggcatgcctggtctctagaacaaaggcaagtttctcttccaaaagcaaatcatcggtatcagattcacataccattttcagctgtgcagaaacctcatcaatgtaatcttttataagcttacgaacctgcattacaacatatcattntctttatacagaatggaaaggagtatgttaacatttcatgatagggagtgcgaagatcccagttgacagcaagcaattcttttatgtgtgcataccgaaacaaatagtgaaagctgggaaacatttatgaacacatactacagggaaaatatgagctcataatatataatatcgacaaatagatgccaagctatcaagatatactcctgtatactgatatgacatgccattgcgccacttcagacctgacaataaaa

SEQ ID NO: 23367 - DNA, 330 bp, Oryza sativa
  unsure (1)..(330): unsure at all n locations
atttagtgagaaacagaggggttntactgaaaatgtttgcaatgatgtgcgttccatcggatgctactgcgtcgtctcgggatagccgttggacctggacaatagatgatggaaagcgacgtcgtggtggacccggtcacttgagcctncttcttcttctgcttcctgcanatctcacgagtccgtaacattacatgacttcgcccgagagtttcaccacggacagtaaacaaacaacagctcaacggagagaggtgaacaaatcaggaacatgtgtgcagcangcgacaccggcacggaggcgggcacgacgattacgatgccgatcaa

SEQ ID NO: 23368 - DNA, 242 bp, Oryza sativa
  unsure (1)..(242): unsure at all n locations
tcgtgccgccgcagaaagacgatctccatcgatctgttcgatctgtgggatggataactaaaagtcaaggagtcttgtgcaaatgtacatgcaagcggtgggcgtatttttgcaaaattgctccacctgctttataccctttggattgagatccganggatgtccgtgcacgagtgcatgtgtgcacctaatgagctgtgtgcacctgatacattgcccagtaagaaaagcttacggnatac

SEQ ID NO: 23369 - DNA, 423 bp, Oryza sativa
  unsure (1)..(423): unsure at all n locations
gaataaaccacagtgaagactggtgagaataaaagaatacctgcatcattgatttcatatttgccgtggatgtgggatctatcattttctccacctgaaaaccacaaatcaaagtaatccattcacatatttttgcagtgaggtgatgcactntctgtctaatcataacccttcactcttntttttttacaacaatgcatatatataataaacatgtattgcactnntttttgcaagatacaagtgtacaaatccaacgtattggtgcactatgcatatgcatatgcatagttnggagtttcctcaattatagcccaaaacttttntttttttgcaaacactcacctncatcacaaatccataatggtaagcaactctnttcacatcttccanactcagttcaatagaacatatcctgtgtta

SEQ ID NO: 23370 - DNA, 454 bp, Oryza sativa
  unsure (1)..(454): unsure at all n locations
tgtgaagagggtcccagcaagagatgaagctaactagaaatcaatgatattcagtttctttcagaaaataacttgtgcattcaaatcatctaccaaatgaatggctgcagtacaaggaaacaaaagaacttatattaccttgaacattatgacgcttgcaagtattgttagtgttgtgaacattacataatagattggagatacaattgcagtattaaatgtatcaagtgcctggcgagaaaaagtacagttattctgttacactgtaagtatgtgaatgctgctaatacaataaaacctttctaccataatactctgcatgacgaaagaatgatgttgaagatacgaattttacaatnttagacactgacacaagtgtgatcaatgcaacgccacgggagtnttgcctctaactggtatccagataatgcanagcagaagtcatagaattgat

SEQ ID NO: 23371 - DNA, 440 bp, Oryza sativa
  unsure (1)..(440): unsure at all n locations
gcttcgatcatgttacttcagaattcgactgctgtacgcactgtgtatgatatactgctntnttctgaccatggnttcttatcatctatggagtcagcatacttctatgctattattaggtttgaaataaagttaatattgcaggatagagaatctggagcttatgctgaagtatggtgntgagggttggaagctttcaaatagactaatggattcaatttgtctaggtaggctattggacataagttattatctttgaattggactacgtatctgtgtattatgagatcattagagcattcagtactctgttgaaactctggctatatgtgataggtacttacttgtaaactcagtaagactatttgatttgagcactattcacattctgagttaatgtattatatgtacattggtggaatatttatctatgctgatta

SEQ ID NO: 23372 - DNA, 277 bp, Oryza sativa
  unsure (1)..(277): unsure at all n locations
accctcttaataaatctatcttacccaagaatccaccaaagtatccaacgagatcaccccaccgacaacatcttatgagacatcaacaagggagtatccactcgttctcatattgcaaaatttcgtgagcattaactcgttgtgtcttctcttgaacctctaagggtggaagaagctcttaatgatccggatcgngtgatggcgatgcaagaggagttgaacaatttcaccacgaatgaagtgtggactttggtggagcgatctctgcgaaatgtga

SEQ ID NO: 23373 - DNA, 368 bp, Oryza sativa
  unsure (1)..(368): unsure at all n locations
agctngtggacaaggctatccgtcatgaagaacaacttaacanaatggaccgaanaagaaaggcagctcagatcagctntcctcaggggaacaatcagaagcctcgcttcatgacgggacagttaggtgagccttccaccctgatcgtccgtcagcaccgtccttaccactcgagtaacttcaacaacgactacaatagtggctgtcaccgcagcagtaagcagcacaaccacaactcgactccacccncattaatggcaccaactcagtcagatccgccagctatgtcagctcagtcagaacaactcaagaaggagtctgcaggaaagccaagaccctgcttcaactgtggcaagcacggccacttt

SEQ ID NO: 23374 - DNA, 153 bp, Oryza sativa
  unsure (1)..(153): unsure at all n locations
gcagatccgccctctggttatcgagtaatggaatattcgctcttgtgtactgttctggcttcacgttgtggntactatccagcttttataacagaagagaagtacatatatatgaatagtaatactccctccgtctcgttatgtgtgatgttt

SEQ ID NO: 23375 - DNA, 139 bp, Oryza sativa
aatgaaagtacacaggtctatgcattttacataacatatggatggaagcccatagatctaattgtttttcatatgaattaaatcttacttcctccgttcccaatataagtaatctagtattcccacattcatataatgt

SEQ ID NO: 23376 - DNA, 460 bp, Oryza sativa
  unsure (1)..(460): unsure at all n locations
acacaaaaactaagcttccttatctaaacaaataggctctctgagaggatattctttatggtcttaccaaccaatgtggaagtccctggctctntgagccgctgcttggtcttcagttgagttggaaagagcttcataccaattgaagtccagaactattccaactttgccttgctgagctgcctacacttttgaaattatatttcccaaacttagactggccagtaagagatatccgttaaaaaaaaacagttggcccttaattgtctgttttttttctttcttttcaaactactatgtgggtgggtgttctggttgtgtgcatctttgntgtgcagaggtcacaagtgttcttagtatgattggatcactttgatgtaattgactgagttcaataaagcttatattatctaanaaacaagtcgagagaaatacctgatcttagtccggatcttgcaca

SEQ ID NO: 23377 - DNA, 452 bp, Oryza sativa
  unsure (1)..(452): unsure at all n locations
acattggtatgatgcattagctacctgctttatctgcatggatccaatgtcgccctggccgtcctcgaactcgaccagcagtgacagccagaagttcgtcgagccctcgtttacacggaaggctatgttcttcccgccgtacttgcacgcagtcctggtatatttgaacactgcactggtcagtttcgtcgaaaagaaacacaaaatttcggggttcgtactaactgttagttgaatggacggtacacgtggcatgcgacagctnttctatgatcaggtagactgatgaacggagaagcagcattggcaaaggaattatagacaagagggtaaatggccattggatatcntgtgctctgactgagttatatcaagcagagctgcagaggcatgtgtaactcagcagcaggcagatctaaataaggagctgagctagcacattcaactctgga

SEQ ID NO: 23378 - DNA, 301 bp, Oryza sativa
  unsure (1)..(301): unsure at all n locations
agaaatatatgctggacagcacaactntaccgtacgctacccatcattactgtacactactcccatcccagtttaaagacagctngaggtcggtcaagatcttattcctatgtnttgttcttctaactgctgatcctatcctttagtggccgcattacattgctgccttacaaaggaaacgctttntctttcaattaaaattcagaacttcataactcagtaaacataactcgtcttacttttttnttcctagggaatatttatgctggtctctggatactttagacttccttacgacatt

SEQ ID NO: 23379 - DNA, 372 bp, Oryza sativa
  unsure (1)..(372): unsure at all n locations
tctaataagagtcctagtctgaaatttcgaattanaagatatatctcataatntaacaacagtgtanaagctgttcgatatcttctcttanagtttccaactgttcttgatttgatatttntaaatatgttaaccaaagataagagacaaactctaaacagtacaatacagaagcaactggaaaattcaccaatcatgcaatggaagaaccaataaattccaggaatgattatggaagtgtgcttttattttaacttcacaagcacttctatccactactaatcctaatgggagtggaagggaagttcaagaaaatgttggggcaggagaaaatgggaaaaacctctatagctttgatacatattacataac

SEQ ID NO: 23380 - DNA, 479 bp, Oryza sativa
  unsure (1)..(479): unsure at all n locations
acttcaatcagtacacaaaaagaattgtgtcttgaattgaaaccatttgaataacatgcacaaaatgagttctctatctgaatttgcaaaatatgtagataagttgatcgccggtttattaaccgcgcaaatttaacaaacatagacacttgagcaagggccaggaaagggtatttactaagtcgaaaccaggagtgtctcagatacatcactctgaacaacatacaacatacatgctcatgttttccttacaagtgatgcataaaagaggaatgcaactatgcagtcacctggatcctttttagacagaagatattacaacccagctttggattgaaagcttaagcagtatccaggctgggattagcccctggatctttatntaagatgaaagctanacaatatnangcatggcctcatttgtctgaacattgcactgctgcttgcagtgaaccagtgaatcccatcttgagacagca

SEQ ID NO: 23381 - DNA, 394 bp, Oryza sativa
  unsure (1)..(394): unsure at all n locations
gggagctaaagganagcgaagagaaggggataaatatactacttatggtgtcgccctatgatcgattattccaagcttttgcctctccctccccttgcatatgattgcatcatctgactgactcactgagacactgacctaacccaagcttgcttatgccctgtagctctctcacctctccttcagttgcaagcatgtgcatgcaatcgaggggaataaaaatgaacagtagtagtatcagcaatagcaaaggatcctggtagtgtagtgtagtgactntcacagttcgatcatgaccacattgatcatgatcatgctagtgatcaagctaagaaaggtggctntctcatatggacaaagcttcagttggttggggtgtgtaacgacatgagag

SEQ ID NO: 23382 - DNA, 349 bp, Oryza sativa
  unsure (1)..(349): unsure at all n locations
tgcagcttgccaccgctactggttcaccttctttcttattacgagatgaccaggcatcagctccgtggggtcgaactttttggtgtaagttgccgaagtgcttgtggcgtacttgtgtatgtgctcgagcgcttcgactcttactccttccaagagttcgagcgatacttcgcgtccctcttcacccccagagaacatcacccttggtgaaagtagcccctagcttgctgggtcattgctcatcgcatnagaacataaacgggctaacttggtggtcttgtggggtcgtcgaagggccagaaaccgatagcaattctctggcattgcctttcgtgcccctcgagctttt

SEQ ID NO: 23383 - DNA, 431 bp, Oryza sativa
  unsure (1)..(431): unsure at all n locations
gacactatgaatactaagcctgacatgagcaatattcagtataacagggtttgtgcagtatctctctgaatcttcctatgtntgttttatccacattgccatgctagttactgatgcacctgtcattattatgtcttgaaccatttctaggatgtgggtaaatcaatactggagagttattcaagggtgctggagagtctggcgtccaacattgtcgctcgcatcgacgacctactgaacatcgatgaactgaacaggcatgcagagcattttccacatggtgatgcagattgcaggattgcttgcaacaaggctgctgttccaccgtaccaagtgcctgcctcangcacaccgtttgtgaccgcatatgcgacgcccagcttctcgccggcgcagcttgcaagcccatcaaagaaagagaggagcccact

SEQ ID NO: 23384 - DNA, 481 bp, Oryza sativa
  unsure (1)..(481): unsure at all n locations
gaactttgaataaacatttcaataaatntagtgctggaattaactatccactcgtttgaatggaaataattgtaccatcttcttggttggaagttgaaaaagggcacgggatgacaagatcattatttgtctgtaattaaaacagaaaatctataatctanagtacagggttgcggcagtcatgccatttgcaaccgaataaaaaactaattgctcattggaacaatgcatggcccagccataggcgtcgttccttttattccanagcccacccaattntacacacatccaagaccggaaattctaagcagcaagcatatcctcatctacattgcattctccaaggtaaaccttgatgcttcgaggagaaccgcagctgccttctgctatgagcgctctatcattngctgccatgtgctgggatatnnntgatatcatctcaatctgatgcaacanatggaatagcacgacgtattaatat

SEQ ID NO: 23385 - DNA, 306 bp, Oryza sativa
acactatgatactcagctaacaagttgaagtgctcgcacgataaataggctatattattcatgacgctaaaagttatgacatttgttgtgagacacaaaaaacatgtatcttctcatgaacaacgcacaaatatggcaattagctgctagacacctaacgtattattttattattttcgatgataatagagataaaatgttgaaagtaccataatacccctggacactgggtcaactctcttttctcttctcttctctttcttctcttctctttacttctcttctcttcttcaacaagtgagtgcg

SEQ ID NO: 23386 - DNA, 531 bp, Oryza sativa
  unsure (1)..(531): unsure at all n locations
tactcagcttcttatagctggtnntgctatgtgaatttcaataatgtagccttctttaggttacactcatcatattttacaaagcagtcggtatatcacttggatcatgttatttggaggattcacaccgcatatgctatatattgatatcaagtcacttggttgattacaattatcaaaaccactcggntggttggattatttattccttgactatatgcttggtttgttcaattaaccacattgtcggnggctacacctattangtgcatctagtcggtgcacctgactntattttccagccctccacagtcttcagaattggtaaaagtactcgggagaccatgacaaagatgattgaagcactcggctttggagtaatctggttcgagagaagattatcttttcgactgcgaaggtctcangggctactgtggatattatgggtaccccatacccacantgcatgggtatccgactatgtatagaggataaactatatatatgaaatatgtaacagatcatgacttg

SEQ ID NO: 23387 - DNA, 362 bp, Oryza sativa
  unsure (1)..(362): unsure at all n locations
caaattggagcacatcaccccgtccagaatgtgatgaccactaccagaccattggagcttcttcatatagacctcttcgggccaattgcttatctaagcattggagggaacaaatatgggctttgtatttgtgatgacttttcacgcttcacgtgggtattctttttgcatgacaagagtgagacacaagctatcttcaagaagttngcangaagagcacaaaacgaagttgacctcaagatcaagaacattcgaagtgacaatggcaaggagttcaagaacacgtgcatcgagaagttccttgatgaagaaggcatcaagcacaagttctcggctccatattcacctcaacanaatggagt

SEQ ID NO: 23388 - DNA, 387 bp, Oryza sativa
  unsure (1)..(387): unsure at all n locations
cgacttctnctgtgtctntccccaatggtagaccacccctttcttcgtcaactcattcaatggtgcagcanaggtactgaaatctttgacgaaacggcgatagaatcctgcaagaccaaganaactcctcacctgtgtgatggtttgnggaaccggccaactctttatggcttcaattttcgtctcatccacctcaattccctgtggagtcacaacatatccaagaaatgaaactcgttccgtgcaaaagatgcactcttcaaggttagcaaacaaacgtgcatcgcgtagagcattaaaaacagcatgtaaatgatccatgtgttcatccaaagacttgctgtanatcaatatgtcatcaaagtaaactaccacacatcgtccaat

SEQ ID NO: 23389 - DNA, 413 bp, Oryza sativa
  unsure (1)..(413): unsure at all n locations
tgtttacctttaataaatcttgttaattaaatcataggaaccctctctagcctaagactaccattagttgttgtccttggttgaatcttatttatagatatacacacattccctgtgaatcaatacccttggaatactctaacgtgaagtgctacagcggtattcgtgcgcttgcagaattatctgtgaccgtaacanataccaacaacggtctattcttgaaataaattctatagaagggtcaatttgtcgaaattccaagagctacagatgagcaaataaaatataatttatatctaaaacttttatatatgtgntttcaatgatttaaaagccagcgttaanaatatcctacatcaaanatattctaaaaccaaatataaaattaaatatcacaattcannacactataa

SEQ ID NO: 23390 - DNA, 412 bp, Oryza sativa
  unsure (1)..(412): unsure at all n locations
tggcgccgattgtgcttntgtctttgntgtgttcacggtgaaggattgattcatactacaagaaagaatttgtcttaacgtggagattgttgagttgtgatccaaatatatttgcacttaataaatgccagtttggtatggatcgntattccttttatggttccaccatatatatatctcttgtaagccgccgtgcggcgatttaacctcacctcaagctggcgcccgtggttntattctctcctgttttaagagggttttccacgttaaatctcgtggcgtntcataacagagcacacttctgcgaagcccgacgggcctgttaattgctcctgatcgtggattcgcttctggcctcctagagaagagaagcacaagaagatcgctgctcgcctgcttgtggtcgtggagt

SEQ ID NO: 23391 - DNA, 407 bp, Oryza sativa
  unsure (1)..(407): unsure at all n locations
aaacaaaacataaaatagaagaataaatgccaatttgaactacatgaatngaacctaatggtgaaaatcttataaattattttgcttcattcttttgtggtagatattaatgatttttcttgcatcgcatcaattntttaattaagtgcctagattannatgatttttctctatagtacgccatagtattatgaatttctccgcatattattgcaaacataagcaacatactaagcttacagtacatagtttggttagaagttatatttcttactatttaaattattttttagggtcaagntgattanngttttcttttcaaatatatatagatccagatatcatanggaacgagactangatcatgttatatctctgcttattctatatcatatgtagaaatatta

SEQ ID NO: 23392 - DNA, 449 bp, Oryza sativa
  unsure (1)..(449): unsure at all n locations
ctctgataccaattgaacgtgcagagatgtatcctagatggggggtgaatangctttcctgaaattttctcaacaatcgcagcggttaaattgatagggaccggaacctcctggtgatgaacaccggaacttccgggcaggatgagtagcccaaaacttccggagttcttgagccaggaacttccgggcagcagagataatttgaaaactgagaagaataacaggtcctagctaggaagatcaggcagacatatgcacaagatgaagatcacatgatatcagcagattcaaacatagaacatgcgcaagagagacatagacgaatttttcccgaagttcggatcacacggatcctactctntcgtgaggtgatccacagagacaggtctcgattaaccccttgcctcacttatgcacagatgccagaagaggtccacagactttcactc

SEQ ID NO: 23393 - DNA, 343 bp, Oryza sativa
ggcatgttccctttatgcatgaagcaagacagagaacaaatctgtctatatactagctgatgcggacccaacgccaattaattctcttaatggaatgaatgacaccgtctcacgtaatgctcacaagttgagcccaagctcagaatgatgaatcatttcatttatacttatcaaatcaaagtaacctaaagcttaattctacatacaaaagaataaacacctcttctgcaccctgaaataacaggaactgaacgtacggatctctaattcatcaagcaagaagactaccgatccaatccagcacaagatagatatatacctggtgtgatgccgccgcaacagc

SEQ ID NO: 23394 - DNA, 481 bp, Oryza sativa
  unsure (1)..(481): unsure at all n locations
accggatcttaagtgactgggctgcagcttgttcgaccgcgttacagttgggtntgtatggttgtaatgcctgtgcttgaaagtgcatgcggtgatgactgtgtccatgcttcgtcttgcattttccagttgctatatgcagacgaaattaaccggttgctatatgcagacgaaattaaccggaacgctgattacgctagaacagggacgatcatgtatggggctgatgagctatacnnattctgctccgcctctgaaatccttcagaatttgacggtcacttcgtgttaattttccctcaatccagactttatataaggcagctactactgacgcanagacttttcatttgaatcacctcaataaatacaatatacaatgtacacatttaagattagagaccctcatttagatcattcttantaacaatgtacacaccagaattagagatcttcaggatgacggatttataaaacgagcg

SEQ ID NO: 23395 - DNA, 334 bp, Oryza sativa
  unsure (1)..(334): unsure at all n locations
atggcatgtacaatgaanatataaccaaagcttttgtctcaaaacagaaatgcagaggtccctgctattgtagganaaggaagctatcaattngaaataactggaaatggatttcttatgaaaataaggattcaaaaagtaccgtctagatgcagctgcagagacaaacacaggttctacagggctacacttcaaatctaacacactgcaagagatcaagaagctccattagcataaacttaagtgataagcaagaaagtaacagttgtaacctgtgaaagtcttttgatgtactgaggtcgcaaacaactctctttgcatcagcattccaagc

SEQ ID NO: 23396 - DNA, 526 bp, Oryza sativa
  unsure (1)..(526): unsure at all n locations
gcaagcttcacaaatntcaatctaatcgtgcatacttgtactaagtttcaatttctgaactttaagagagaaactgcacaaaattcgatgaaacacagttgatttcgatctgatatttatcttgcatactgctaatatacatcacgagaaccacttngtggttggtatagttgcaggagtacgcccncgtcctatatattntgatttttttttttaacgtttcgaatgaatggtgtacatatccctttcggaaactcatgtcctatagttagtactaaatattctaccacgtgcttaggctcaatacaagtcaaacacatatataaccggttntaattaccccatttccaaaataactagtacctccatcccaaaatataagcaattttagctataaatctaggtaactgtgtatccagattcatagccaaaagttatttacattttagacggaggtagtactattctaaaattcattgacannatagtagaaaanaatgacctatatatcacttattaaatgagt

SEQ ID NO: 23397 - DNA, 495 bp, Oryza sativa
  unsure (1)..(495): unsure at all n locations
taagatcatgtgattagaactccaacaatgtactcatgttctttatttgttttagaatccanaatggtgcatattcatgaatatgaatttgtataaatntcttttccagcagttaacgtgaaaagcagtgtgcgaataaaaatggnggcaacagggtcatgacaaataaagcgcattacatcgcatattaatcactgcttgccagttgtatgggttgatgaataacacgtagcaataacaagtggtcatttagaaattattgctgccaacagacatgacgatagattgttgcgcccgcacaggcaatgcagaagttcatgacagaagaagcanaacggaaatcattctttagatttatcatttatganagagtaaatnttagaagactgcaacgtagtgacaaaactatcatgttgctgaacattagtgacctatttcagttngctgcaataacagagtgtctctatagttgcaattttctgaaattacaataca

SEQ ID NO: 23398 - DNA, 372 bp, Oryza sativa
  unsure (1)..(372): unsure at all n locations
gaagtgatccttgggacacgccttgttgaggtcggtgaagtcgacacacatcctccacttcccgttagccttgtgcaccatgactggattggctagctactctggatggataacctctctgatgaagctagctntgagaagcttgtcgagttcttctcgtatggctggtttccgggttggtgcanatctgcgcagtttttggtttactggcttggcatcgggtcgcaccatgagtttgtgctcaatcacctccctagggaccccgggtatgtcggacggctgccaagcgaacatgtctacattgtcgcggaggaaggtgataagcgcgagttcctatntctcgtctagtgacgccccgatcttgacggtctt

SEQ ID NO: 23399 - DNA, 430 bp, Oryza sativa
  unsure (1)..(430): unsure at all n locations
tatctcatagtattattttctactagaattntcacaactaagctcatagtatgcangggtggaaattgaattgcacgttaatttctataacaatnttgtttgttactatgccctaagatggagaacccctgaccctgcagtgttctcgttctagtctaatgttttcgtcctactgaagagatttagacctattattacgagtaagagatctagactgagntttttctagcaactctaaatggtagattcatcgtgttcatgtaataccctgagtttcgaattagtgtatttcgggaaatattagaacaaacacgtaaaantttatttaacccattgttcgaattggtgatcaggagccctggatgcatagagcttgtcgagtagtgcgagtagactattaagttatggcaatcggagtccanattatctc

SEQ ID NO: 23400 - DNA, 386 bp, Oryza sativa
  unsure (1)..(386): unsure at all n locations
agcgtcgcagccggtgagaagcctgttctccatccgttgncgctgctcggcgccggaaaatcgtcgctgccgtggacccgaacctcgccgccctttggagtccgtcgccggccatctccttcactgttcgtcgtcgcataagtgttggtaagaatcgccgtcgccttctctttcatccggtgccctcgtttgcattattgtgccgtgtgtcgcctgcaaccacacgctccatgccgtntcaccgattaagtttttttcctaaggtattaatccaatctaatctaatccgctgtatgtctagcgtcatcgtcgtctccgtgtgttgccgccgggtagtcatcgccgtctctccctctccgatcgctntggtatggcgagggttctat

SEQ ID NO: 23401 - DNA, 362 bp, Oryza sativa
  unsure (1)..(362): unsure at all n locations
tatntaggccgngcgctagctacaatggtgagctttaatttgtttgtctcttgctgcatatatgctctttttagagaaagatatnttctatccggcctctatattcaatcggatatatctatgcagactttttaaattataaacttagcctataaaacagagaatttactcatcaaataatccaatctgaaattcgtttctatagatatttgaactcacgacttagagtgttactcgagttactgtaactaatatgctacatgaggaactangcactgcgatcgcgatcacacgtttatgcgatcgatcgaccgggcacgaactgacagctncagcatgttgaatgcatgtatctaccttta

SEQ ID NO: 23402 - DNA, 376 bp, Oryza sativa
  unsure (1)..(376): unsure at all n locations
tccaccgcaaggagccgcggcccacttatagcccacggataaatccttcgcaactcgcgcacagcccgcccggcctgtctagcgcctcgactccattcaactcgcgcanaaccgcggcccgccttggccttgtgcggcggcgaccatgtgtcgcgtcgcctccttcttctctacgccggggaccgcctccccggtgctcagcgtgcggatcgtcatcctcgactactacatggcgccgcccctccccggattcgacctctcctacagccactcccacggtgcattatcctttccccattcttcgcacccgcgttctcgacttcggtgcgccccttgtcctgcttgtccgtcgcagttagtggtgatgatttggtgt

SEQ ID NO: 23403 - DNA, 421 bp, Oryza sativa
  unsure (1)..(421): unsure at all n locations
ctgtactgttcaaatacataccatgcgattcaatttacttcactccatgcttactgatagagaaatgttattgctcttgaaaaagtatctcaagatacctaaattttacactacaattnttggtaccttgagatatctattatctgaaggtaccaaaatctacaataaacaatgtgatacttaccagtactttctcagagatgataaaattatccttactataagaacattgtataccattcttgatagatcctgcaagtaagtatgctcttgattggccaacaagggttaagataatcaaaggagtagctagaggacttctttatctccaccaagactcaaggttgacaataattcatagagatctcaaatcaagcaacatcttgtcggatgtggatatgagccctaagatatctgattt

SEQ ID NO: 23404 - DNA, 513 bp, Oryza sativa
  unsure (1)..(513): unsure at all n locations
gacactatgaaactcagcttctgataaaaacgggtggttctagcgagattngtaatatgatttcctttacgctntgccgagatgtaagggggccatttatgattccatttcttaataccatgaccaatatgaactcccgcttctatcatctctttcaaattgatgttccaatatcttcttgtcattttttccacacttccttttgattttttcttttttttcatcctacctttccattacgaaatttctttcttttcgaagattaagaaagagccgaaatagcttgaaataaataataattgttccgatggaaccttctacatggtataagcataaccttaatgaattaactaaacttctttttaaattaaaataaaaatagaanatctaacctcttagcgttctaaggtcacaaatctagtttaaagtaaaanatctgctttatgtatccctanatcatactaaatggggtaaatggtgattctgatgtctcatagaaatggggttgtacgc

SEQ ID NO: 23405 - DNA, 342 bp, Oryza sativa
  unsure (1)..(342): unsure at all n locations
gatctggttatatttgcaaaaaagagaaggaaaaggggacaaaacagccattactatttgagacaaaatatatatataaattggccagtagcctatactataatattgggcgcattaggataccagactattacatagatgacaagacatggaacacagctaggacacaattcattctataatattataagagtaagactactgatatgatatactctaggaatactcgatactgaagacactaatgaacatactgngagtgctgagaccaatatggtgacgatagacaaatcaagatggcgtgggaacctcacctctttgttttgcgttacatgtcttgat

SEQ ID NO: 23406 - DNA, 348 bp, Oryza sativa
  unsure (1)..(348): unsure at all n locations
tactcaagctgttgttggtatatttgtctgttntaatatcttagtatagatggtatcagagtattagccgatatatcttagatttacctcattggctaagctataaatatatataatctttgtcttaaagtactcttaaacataagtgatttatactgtctcggctcactgtccgatctatcccaatcgcttagtttagacatatttctagaaaaagattatatatcattgatatctgcagccaatcaagtagaattaattctatcttgtttagtatcttattgccgatctggttcacatcacatcggcctgatatcaaatgaaacatcatcggcaacacagccgatc

SEQ ID NO: 23407 - DNA, 520 bp, Oryza sativa
  unsure (1)..(520): unsure at all n locations
ttaagtcacctgggctgcagctcacaattcttcacaaagaggggaggtcatgcctatatntctatcgaatctaatttggtgattacatacaaatcggaggtgcctaaaaggtttgcaacttcatcctccaatgttntntttgtcatactacatttgcacctatggtttgcacactttnttctgtctccaaaattagttgtaagttgatgagagagaaaatgtgtgtggggaagaaagactatatagaaatttagttcatttgctaaacaaggttttataaaatagttgagaaggaaaactctagtgaaagttaatattatataatagaaaacaaactaaaataaaaattataagaagtaaaacacattanaattagtttacaactctacaaatagctgttaagaattatttggtgtatattctatgaattttgatgaataaaatatcttataattattgtatgactggcattattgaagaatattattnggtgcggctttttgactcatgtagatggatc

SEQ ID NO: 23408 - DNA, 383 bp, Oryza sativa
  unsure (1)..(383): unsure at all n locations
tgangcatgcaagcttatcggntgggtttcatgatagaggctagntgattgtgctttgatgacgagatccatctagattataatatatgatcacttggcgatttgcgtagacaggattagagtgtcatgaagatgtaagcactaatcccgagagcgcangccgccatgacaaaatttacctcttcggcggagatcgaactcgatgcagcccaactcgaaagccaaaactcgttgaaacaatganaatagataagagtggcgatgcgccgaagtgtattgaaccgtccgcctcttattataagggtgtcgggtcatatttatacccgaagtacatgatatgtccttactggacatgactcttatntctaacacaatttataata

SEQ ID NO: 23409 - DNA, 377 bp, Oryza sativa
atgaaacttgttctcttatgtcttagatacagccgttgcctatgtcaatggcgtgccactgccttaattccgctgccttacctacttctgttcttggaatgtatcccggaccgctcggtccgatgatataagactgcgcctgtgggcttatgatgtaataattcgtactagactctcgtgtatgtgcacttggtatatcagctataaatccgtgtgtaccagactactcgatccagtgaaatggtactgtttacacgatagattcttgctataaaaacggaggtccacatccacccgtggtgcgggcacctaatgccggaaagccgtatctcgtatatattgcctcctaagacacagtcattggtgctcgtttgaca

SEQ ID NO: 23410 - DNA, 385 bp, Oryza sativa
  unsure (1)..(385): unsure at all n locations
gctggcatctgctaagactctggaattaccgtgctgacgtgttgatgatagacttgcactatctaatcatggtgtcttttgtgaacatcattcacttaattacccttgctttttcttttcccacttctacatcggcctttcaaagcagtaatctacataacaccggaaaaaagagagcacttttttatactttgatgaaaacacttacatcatgaataaccaagcactataaagtactccaagaagcaacaaataatttcaaaagtccggaggaaagaagcgagaaaaatattggttggcgcagntgcgtcgctttcattcaccgtggtggccctcgcgcgcacgaaacagatgggggccttatcgccgtcgtaatcacgggagc

SEQ ID NO: 23411 - DNA, 341 bp, Oryza sativa
  unsure (1)..(341): unsure at all n locations
atactaagctaccctctctgcngagtggggtccgttttattgtatgcatggtctatgtacaatccccttgatgtatgaaaggaggatccatgccattgagaattttttttctaattccggctcaatcagtttgattcattctgattaagttagattctagccacattatagtgaagaagggttgatactctcccacttaaaacaacaccaataactcattgtaaactccatcatatagtcctagaaccatatgagtagagtattatgcttcccagcgatccgaacctgtataaatcatgtgtccatgtactctcgcacgaactaagcatgagcacggatgc

SEQ ID NO: 23412 - DNA, 471 bp, Oryza sativa
  unsure (1)..(471): unsure at all n locations
tgaatagaagcaccaggctctgataccaattgaacgtgcagagatgttttctatatggggggtgaataggctttcctgaaatattctcaacaatcgcagcgggtaaattgatagggaccggaacctcctggtgatgaacaccggaacttccgggcaggatgagtagcccaaaacttccggagttcttgagccaggaacttccgggcagcagagataatttgaaaactgagaagataaacatgtcctagctaggaagatcaggcagacatatgcacaagatgaagatcacatgatatcagcagaatcaaacaaagaacatgcacaagagagacacagacgaatttttcccgaagttcggatcacacagatcctactctttcgtgaggtgatccanagagacaggtctcgattaaccccttggctcacttatgcaaagatcccagaggagggtcacagactttaactcaacac

SEQ ID NO: 23413 - DNA, 186 bp, Oryza sativa
tcaaaacgcgacggcgaacttcgggttgactgcgacgatggagcttcggtggatctcagcttccgggaagtggaggacgatcttcttctcctcctcccgaacacaacggtggcagcgacgaccgtaggcgaccatagacgacgacgaacggcgcggctgtagatcggaacatgacggcacccactg

SEQ ID NO: 23414 - DNA, 458 bp, Oryza sativa
  unsure (1)..(458): unsure at all n locations
gatcctnttccggtgaatataattaatttcaatgtctatattgtgntgattcggccggagcaagccgaatctactaaggataaaggaataatcattggtgaatcaaggccaaagatgattgtgccaaagaagccggaggttggtgttttgaaagagaataaaagcgaagcttcgacttctaaagctcctaggaagaccaaagtgacccttgatatgctcttggagaaatatgaaaagcaaggtggtgagagagcttgctacaatgggaaaagaccaagatcacctcctacggagcgattnggtcactcgccaagatggttgcattcacctccatatcatcattcacaagacataccatggngtccctatccaatgccgccgctgggttatccttatccttattactatgccatggngggcaacgccgccaatgttcaatcatatgcctccaatacaat

SEQ ID NO: 23415 - DNA, 486 bp, Oryza sativa
  unsure (1)..(486): unsure at all n locations
ttaattaatatcaaatgattagataatagntaacctaaatagtgtgccaataaataaaaatggatattgtacagtagaataattatctttaatatgttntgtcactgtagcaaccacataaattaattataatcaatgtttgaaattaatggatatatangaaaatattagtgccatntattaatctatgtccaaatataattaaaacccatgacttattagttatttaaatagagttagccttataattattaggtaagtaaaatatagatacacatagatcggtcctaagctttgttatggcanataataacagagctagtgtgattaaatcacctatatgannataatcaacgacatatcccatataatagcatatagtangagaggtgagcaacccttagttaaccaagcagtanatagaaactattaaaataaatgattcaatatattaagatattatgcacacatatattgtacatccca

SEQ ID NO: 23416 - DNA, 462 bp, Oryza sativa
  unsure (1)..(462): unsure at all n locations
gctcttctttatacattatgtaggcttcaaacttttatctgtcacactggtgagccttgacacatggtgctgactccccacattgtgatcacgaatctgctcattgttatgagggcatgcctgtactacccttcttttctcctacacatctgcccctatctctctctctctctctcctttcattaaattttntgttgcaagaattgcgggatcaattgtgcatgtattaatagttaagtacttaagtccattgcattggtgtaatagtgctgtgatctangatcctggcatgggattaggattggctcacaagtcccaatggccaatattatgtctgccctacatatcagctcatagatctgaagatccatcagcatattntctgcangntagctggcctgcattgcatctcctaccgaccaaacgcaagggattcacatnccctgtcattactccaaacat

SEQ ID NO: 23417 - DNA, 331 bp, Oryza sativa
  unsure (1)..(331): unsure at all n locations
gcttgatctgtaatgtacaaagcactaaacatcttgtatggtcactggggtgcttgatgnttctggtggggaacctgtaaatgaacaatcggtcacagcaaacacatttattcccccatgcccatgcaaaccagccagaaccttgaagcgaagggccgctggggatggcagaagtggagcaccacaccgttcctagcagtcgaggtgcagtgtcgggtggcgctcggcagcaaaggcagtggcacaggcagagtagccagtgaaatggaacaccacgtgtcacctggcggcgtatgtacaaaaggcagagcgctcgggaatggtcagcagt

SEQ ID NO: 23418 - DNA, 407 bp, Oryza sativa
tatgatagtatgaagtaacagttctggtatcttgttttattcattgcagcttgttgaacaaaatgtcagcataatacatgggaacataaacatctctgaaatatcgtttcatgtctttccaagattgtggtattttgttatgcctacaaagatgtttccaatcattagaagcatgtttaattaaaacactagaggcacacataaccttcttgttctccgacaagacatgcttttgaaattcactatcaaccgctagctcccaattaatgtaagcacgaggatcatagtctccctcgaaataaggcagtgcagatttgatcttacctagaacatcatcacttacctcataatggtcatgttgatccctcctcatgtctcgacgaagatgtcgatgttgagcacagcta

SEQ ID NO: 23419 - DNA, 430 bp, Oryza sativa
  unsure (1)..(430): unsure at all n locations
gcacgtgcagaacatagaaatgacatataatggatcagcagagcgcctcatatctcccctttccattgatctcatatccttgccatgtcgggatggacccagatggtcccctcgcgaaaaaggctagctgttggttaatcgtcgcggtacacatgagatngtgtcatagccaagcggggaaagtatcaatgtgacatcgtgttatccagccatcggacttaccgatngtttcgctccttacaatcgccatgtgctcctcgatgtaaggagcaaccaaaagagattgttgaaaaccgcanatgtgcttactgttaaatcgatgctacagtctaattgtntccttccaaagtccctttcccgagcatccttatgccgtgatcgccccccgatggcgaaggcttcataattctaacaaatctatacctctctg

SEQ ID NO: 23420 - DNA, 385 bp, Oryza sativa
  unsure (1)..(385): unsure at all n locations
ctaagcttgcgcaagccatactagggcgtaagcgagctngtccatttctatgtacctngacntcactccttgcagtgcttgagagacgaagtaaaccgcattttgcctgaactctgtgtcttggacgatggcaacactgactgccaccggccaagctgctaagtataataacagatcgctttctgtgggtgggcttatcagagctggcgggctttgcaagtattgctttatctcgttcaatgctgattgcactctggtggcaattaaactttcctgcgcgcccgaaggtcttgaagaatggcaaacctctttcagctgcctgtgagaagaatcgactgagtgccgcaatctagcctgcaagctattgtacttcatgtacgcttga

SEQ ID NO: 23421 - DNA, 444 bp, Oryza sativa
  unsure (1)..(444): unsure at all n locations
aatgagtagcccanatcaaggataaattacatactgcagtacttaattaaaggaagaaatggtaataatatgccacaatcaaggtttacagtttagaaatatgccattcgcatgcctcatccttccctactgctgcaccttactcccatgatctccacagatccaacagatgctatcttgatggtgcactgctgctaccaatgggttccaacattgctgcggaaagcaatgaanagacaaatgatggggtggtgcattgtggattgcaacgttcagatgtgagaaggcagtgccaatgctcatcaatgtttacaatgctgacactagcactggtgaaccttgcggaggctatgtcaatgtcaagtgtgctgttgggttgcgctagtgcctacgaggcctgcggtggagaaactaagaaaagtangtcagtggaaggacaatgat

SEQ ID NO: 23422 - DNA, 441 bp, Oryza sativa
  unsure (1)..(441): unsure at all n locations
cattctgnctctgatatcgcaagaatctcgcaggggcatgtgggtatcacacagatggttagcaaggtgtttaaatttggtgagacaaaaggggctcataacagaaccgtgctaattaattagtggtacatgagatcggctagaattgctcgagatgcttcaggtaggtataattgatatatatactactaataattctctttatacagtcttaaataatgatcttcataaatatntatgtgtatgcattcaagctttcaacatgattntaataagatcaaagatgagctattggttttngtctctttgagtatatgtattagaaagcgcattcgcggtgtgtaagtgtggtgttgntatatagtgatatgcatgcgtgcgtgtatatactatgtgtaaggaaagaaaatctcttaccaaattanagggtgtgtgttatgt

SEQ ID NO: 23423 - DNA, 365 bp, Oryza sativa
  unsure (1)..(365): unsure at all n locations
ntatctgccagatgaaacaagtntattaatgaatnntttcattatacctagctctnngaaaagtaatggaacatgcagatgggcagcaactcttcttttacgctaggtatgccggtgatctgctgaatgaacgcaacccactccggatcctgctcgtaaaggctcagatagaagtttagccctattttttaaaataaaattgaatagaaatttcatgagatgggaatttgtatcatagagagaaaganatggcttctctgcttgagaatttttggctatgaggctctttgaagatccaggtagacaaaggattcctcatggtggcaaggggaaaagggatgtttgctttggtacctgtcaatcat

SEQ ID NO: 23424 - DNA, 97 bp, Oryza sativa
  unsure (1)..(97): unsure at all n locations
tatctgagttccttaacttgtcatgaatccgatantcatccttcataccgaaaaccagatacaatgggtccctcaactattaaaaccggtgcagatg

SEQ ID NO: 23425 - DNA, 473 bp, Oryza sativa
  unsure (1)..(473): unsure at all n locations
ctacttcttgcattgattntacacttggattntcttccttggtagttttccgaaaatccctccttcagcagaccataacaagttttcagtaaaacttgactgagttgattcagtacaagatatganaataagaggcaaaaacaacagagtaacttttgtgttttgttacacctaaatggctaaatttatgtgaaacacctcaaggaagtaagcactatgtttaatggtgatgactggatgcggtataaagcatctagacaattatggtagcatgtaaatgtngccattactctctatcagtagctaaaacacttcgtaaccatcaaaagcatgaccaagtcaaaaacatatgcattcattttatatcagtaaccacacatctttcgatgcaattgtggacaaggagcatcagatactgcctgtcaattangtaaaggctgtgcccttcgcatatgttgcaggggaagcacaca

SEQ ID NO: 23426 - DNA, 476 bp, Oryza sativa
  unsure (1)..(476): unsure at all n locations
tcatgttatgcatggaaccaatcttccncattgcaaaaccagattgtctgcagaagaaacgctnggaaagctataattacattgtaattggtaaacaccttcggagtggtgaatcatctaaatnttctttagagacacactacatgatttgacggttgacgccatactatttcggctagatgagtcttctctaacgtactattctctaacgtgagttactcacatgtgaacctgttagttgtggaacccatatatcatcaacttatagtgagagggtagtatggcggcggatctgttatcgntcctatttcgattgtatgcaaattcatcttctaaaactcttcatgttataatggcagcgtacagtgcaatctcaaatatatatgatcattgtggaaaaagggagtcataaatcataataattaaagcctattcactgcttagcatcattggtaccatggctgatagctgactac

SEQ ID NO: 23427 - DNA, 400 bp, Oryza sativa
  unsure (1)..(400): unsure at all n locations
ctaagcttgtanaagganatcttcagccttaagggcatccttgagtcttttgcagtttctactggcctgagtataaactttcacaaatcttgcatgatcccaataaatatagcagaggagaaatctgaaatccctgctaaaactttcggatgcaccataggaaccctcccattcacttatcgaggtttgcctataggaaccacaaagccaaaaattgtagattntgcccctctaattgacagagtggaaagaagattgcctgcaatcactatgtttctaaaccaaggacagagactcactntggtaaactcagtactttcttctctgccaaccttctacatgtgcactctcaagctaccaaaaaaggtgatagaacacatagacaggacaagaagacact

SEQ ID NO: 23428 - DNA, 442 bp, Oryza sativa
  unsure (1)..(442): unsure at all n locations
tgtcttcacacaagtgcccgagtgtcttctattttgtttgcaactttgctgatgagatctgtctcacaaacatgttcatccaatcccagcgtatccttgttaaaggtgaggtttggataacataaccaggaatttagaaaggcacgagacacacatgcaacacgagccgcatctcgcattggcatcaggcaatgtatacggcgccagatgtcctgcacacaccatcatgggataaagttcggatattgtgattgtgataaactctgattgggtgacaaagcagaacanaaccatatggngtatcattctatctctaccccaggtattcactcatgattgcacaagtacactgcatgacatatgcatattgagcattacaatgtaattgtggtgcctanattaagcattcgatataatggtttcgctctaacagtgtaattcg

SEQ ID NO: 23429 - DNA, 454 bp, Oryza sativa
  unsure (1)..(454): unsure at all n locations
tagtacgaatatgttgaacaatcaggtcaatggccacatgattatcttcttctcgtggtatgatcacgtcggcatattttttcgaagggagaacaaaatcatcaaatgctggcttcacaaacctgccatactacagatgccaacagaatttcaaattatatatgtagaacaattgaaatcagaaaggtaaaaagacaaaaatctgtttacaaagcacaagaacaatattaatataaaaacgcacaataaaacaagttgaagtacctgctcaagcaccgagctaacatctctacctctntcaactgtatcacgccttattcgtcgagctagcctaatatcagcatctgattggatgcatcatgggcacccaaaaaagaagtgaacaaatattccagctaataacaggaagcagctcaaggcagacccaacataataatgaatatgagaaacctgt

SEQ ID NO: 23430 - DNA, 389 bp, Oryza sativa
  unsure (1)..(389): unsure at all n locations
tcaagctggaataagccggcgtgcgtgcgtgcgtgcgtgcgtacgtgctcatcattcgctggaacctggaataatccgggtgcccctctgtgtccccaccccgcttgccgcgagccacaagaacgctggaaatgtggccacttcttttcccgaaagctttcacgacgatgtggaatccggcaaagccggcatgattggtcggcgcgacaaaattaanagcgagggcgcaacgaaagcgagacgcactcaccgtgtcctctctcgccggcagcggcatggcgatcgacctcatcgcgtttcaacggaggtcatcacgatcatgatcacagcttctcgatccttcggcgacgcgaggataattgacctagctaggctggggagcaacattc

SEQ ID NO: 23431 - DNA, 383 bp, Oryza sativa
  unsure (1)..(383): unsure at all n locations
caagccaaatctgctaagggaaaggaagtgatcattggtgaaccaatgtccaagatgatagtgccaaagaagccggaggttggcgtttggaaggagaatangagtggagcttcaacttctaaggcccctangaagaccaaggtgacttttgatattgctttggagaaatatgagaagcaaggtggtgagaaaattcgcaacatagggaagagaccaagatcacctcctagggagcgatttggtcattcaccaagatggtcgcattcaccttcgtatcattatccacaagacatgtcatggggttcttatncaatgccgccgccgggttatccttatccttgctttatgccatggngggcaacaccgccaatattcaatcatat

SEQ ID NO: 23432 - DNA, 412 bp, Oryza sativa
  unsure (1)..(412): unsure at all n locations
tctgacggcatatgttggcagctgatggaactactgcatcttatttgtttcaaccagaggagaatcacgtattgtttgtctctgtaatctatcttatgtatgagtcgttcagctattcagtgatgctgatagctttgagacgacgctgtattatgcgatcaaacttcaaggtcatctcttagtgcatagtataatatcaaggctctatacttgtacattttaatagcatgacagctatctccatatagttgtttcattttgataagtacatggttctggggaaagatggtcctatgtagctcgattgaattccttcttttccttatttaagcagcatccatgacagaacatgaggaanagaagagttgatgaatcctacattaaaaatatttgctataacatatgttaaaaa

SEQ ID NO: 23433 - DNA, 184 bp, Oryza sativa
tctcgataatgatctctgtgagaatgggaacttatataatagtttaaataccctaaatataacacaagtaaaactatcaatggatcaaatgtgcatcataacaaattaaaaacacattttttttattattaatttcaaagttgttctttcacatatgtatatactccctccgtcccataatata

SEQ ID NO: 23434 - DNA, 420 bp, Oryza sativa
  unsure (1)..(420): unsure at all n locations
tggattatccttcatcatgaatccttgcattttgtaaagaataggccaattagaccccaagttaagacacacatgcatgatattaaaatgtctactgacatgataaaaatgactattcatcatgtattcatgttaaagataggatattccttgaaaatatgttaacgctacacacaacatctgttaggtaactnntcttttttttgcatattaattaactattaaaaaggaacatagtgttgccatgttcatgtctggaaatttaagcatagggttccaaaaaggaaacaatctggaaatgggctaaacgtacatatnctcttaacagngatgcttagcaatggaatcagcggatcagcagtagtagttgccgcatagagattaaatgaatcaccaaaacaataatatatgactcgaaat

SEQ ID NO: 23435 - DNA, 98 bp, Oryza sativa
  unsure (1)..(98): unsure at all n locations
aagcaactcggttccggccaacgtgacgccatctaataacgtcctaaaaancctttttggccaacaaaacacggtactctcacccaccgccaatactc

SEQ ID NO: 23436 - DNA, 448 bp, Oryza sativa
  unsure (1)..(448): unsure at all n locations
tgcctatctgccctgagctatggctggtactgccgtcatctcctcatatctgttcattcncaagcttcggctggtgcctgctctacccttcgccctaatgctgtcagccgccgcctctccgctgccaacaaacaatgggacgccagatctggtatccaacaagttggagaccaccggatctaaattccctagagctttggccgccacctcctccaccctctcctgcatggtagccattggctgcctcttcaccgcctccgagctacgagacaccacaattggtctccacgaggtatgagaccactggatctgaacgcccctaagctctagccgcctcctcctccatccttcgctccaagatcatcggtggccacctgatgaaggcatcactcctttggatacacatgctactcctcatgttgtgttgcaggtccatcactacagctcg

SEQ ID NO: 23437 - DNA, 517 bp, Oryza sativa
  unsure (1)..(517): unsure at all n locations
gcttatgctctaatcataagtggaggaagggacggaactaattctttcatccgcctatcatcgctaaacattggtcttacgttgcccgaaccatggcatcatagcgtcaacgtcatagagcactgtctctggtgagctgccgtagcttatatcgccaaaagtcatcgctgctacattttcatcgctacaaagcacaacggccggccatctntctgcaacgcaaaccaagctgctggtggcccaccgtcgttgttgccgcanatgcccacctncgtcgagctgccaaaggttatctccccgaaagaccattgccaccaagttgtcattgcgcanatcgtgacctncaccaagccgttatagcttatctcactcaagaagccaccgcaccatgtcgacctccacaactggtcgtggcgtggctgctgacccggcgtcgctctagtgaccatcgagctgaccagcaatgccataccgagctgggcactgacaccacgtacaccacatactgcagcgctct

SEQ ID NO: 23438 - DNA, 475 bp, Oryza sativa
  unsure (1)..(475): unsure at all n locations
taactntaatcctaatgcaatacttcaggcacttgctatccgctgttcccggatgtcgctctactacgtacccggatagggaggacttaagtgatcttgagggctttcaccagctctgcacctacctcaaacgtactgtgggatacacagcaattactggataacaattacctaaacaccacatctaagcaattaatatatactttagtgtttataactcaccacagaaatcaatatnatttagttgattatagtgaacaataatcccgtatgctatttatgaactaaccaagagataattctcacaagataaatctaaattactcaggaggaatattatattgaattcggagtactaaacagaataaaagaaacagaagaagattatcgacaactccggaattcttctgacttcttctactctactggctttctaatgtagtatacaatatagtacaataaagcctcttataat

SEQ ID NO: 23439 - DNA, 398 bp, Oryza sativa
  unsure (1)..(398): unsure at all n locations
ctatattttcttctcctctctatctcatctatacaantaacttatccatcttaaagtatgtgaatgggtagctcttacatgagactgagacccaaccctcttcattnttcaaactctctcttccacataagcttacatttggctacttggcttatagcccactattaaacttgagcttattattactttattattaaactcctggtcgtcagtgcgaagttatcctcgttaactataggactatacgagcagatgatcacctncaattaaccaaataaaaccctggctagctcaataaaccacacgagctacacctaaacagtagctgccgcacaagcataattaaccaacccgacacagtgggaaaccaaagcagagagatctaccaacacaccgat

SEQ ID NO: 23440 - DNA, 383 bp, Oryza sativa
  unsure (1)..(383): unsure at all n locations
cactcagcttctctgcagaatctgctgcccatcggatgngagtttttatttgagtctgacctgatgttggtcctccctcccctgaacggtctgatgacgaggggatcagcgttgagcgattgtggggtcagactttatcaaagcaaattcctgaatgaaatgcctccatggtcagttaattcaacaagaagacaaaattatgttttgatcacggtttgaagtgttctgatacataccagcggaggaggatngaatgcattatatggcacgactggcagcagatgcgaataactgacgacaatggcatttgagaatatcttgtacatcctctccttcatgatcttaaagtccagagaatcttngtcttcacggtttggatcatg

SEQ ID NO: 23441 - DNA, 409 bp, Oryza sativa
  unsure (1)..(409): unsure at all n locations
ttttaagaaaatacatagtttagcgttntgtaaaacgtgcacgtgaaagacgatgtttcttctctttgtgcaactctaaaacagagaaggggatgttcccagtgcgaattgccgattcagctgcaaaactggcattggtcataacttatnttttggaaagtgaaatatanagtataattcatttttctgtaatgctagattaagtattgcatttattggaaataaaaagatttaagtattgcactgtttggatccctctatgcttgcttgtatgacatatcaatcctggtatttattgctctctggtagtcgcatcggtaggtgctactccctccngtttataatgtaagtcattctagtattntccacattcatattgatgttaatgaatctactccctccgtcccat

SEQ ID NO: 23442 - DNA, 448 bp, Oryza sativa
  unsure (1)..(448): unsure at all n locations
ngatggtagatggtttggtcaactctctgtggtgtgaggaatattagtgtagatagtgtcactatttatagggatcatcagtttgtagtactatatgggtacataattaagggcaacatatcagaattagctcaattggcgatttgcatgtatctcttcctgattacgaagatggacatcctcccattcctcctacgcgttntttttctctcaaaaatgtactgcaaatggtatatcagaaatcacgtgatttgatcgatcttttcccctccatgtatgactgtatgatgagtggaggaatggaggatgttatacgaagatggattctaatccctatagagaggngataattgtactatgtgaatagtactacaaatactggtaataatatgttgaatntgatattntncacaatctaaaatatcattttataatccgtacatatata

SEQ ID NO: 23443 - DNA, 494 bp, Oryza sativa
  unsure (1)..(494): unsure at all n locations
atggtggtttcaatgatggcctcaagccttgaattgattgcttttattttcctagacagcgttgtgtcgaaatggtgtgcctgtgttggaaagggtcgtgacaagttttgcggtgggacgaattcacaatgggtacctgaatacatgtacataaaactattagagcaatttttttttaaaactagaccattcagagcagatatctcanaacaagaccatatattcaacttttgtgaagcatagaagcattattcattattagatcatctattaatcaagtgggtgaatcctttnttagaccattagaccagtactgacaattgatctctactttcgacgcanatccccactaagtaantagtgctanaataaaaaaattataatctagatagaccagnagcatatgtatangtatcatatanatacatcccanagctaactaaactattagggtactaaaacttaanggacaatatttctatggaactattggt

SEQ ID NO: 23444 - DNA, 268 bp, Oryza sativa
aagcctatgctctctcctctcttgtatgttttatacccggggggtcactgagctccgaacttcacagctgaagtcgtcaatctattcagaacataaatgtggagttggagcagctgggtggcataccaatccttatcaggtgattggtgcctgtggttgcaacgacagcaaaactgtctgactataggagccaaaagctgctgacagatgtgtgatgtttgaagatcaaatgcacttgggctggctgtagctgcataaaactgtctga

SEQ ID NO: 23445 - DNA, 126 bp, Oryza sativa
  unsure (1)..(126): unsure at all n locations
actatatatgcatcaactntatagtgagataggatatggacatgctccgttagtgaaataatgacaaattggaccaccatatatatatatatatatatatatatatatatatgtatatatatatat

SEQ ID NO: 23446 - DNA, 441 bp, Oryza sativa
  unsure (1)..(441): unsure at all n locations
tactaagcttcgtgaaaggtcataagctggtcacgacgtacagatggacgtagtttttagtgaattctgtgcaggataaggttaatttactggcaataacatatggnngttgatgggagcttctgcaagaaaacaagttttaaaaaaaggcagacgattcgatcgctcaaccggccggtggtggattcttgtcgatcgccgagtgacgcggaaaggaccctctttttcatgtatttttacccatcggttacatccatccatatccatgatcccatcagtagctgtacgtcggcacgtatcatcaacgacgtagtaatagtgtactaatagtcctgtacctaccctctcattcttcatcaattatgtataagtataacatcagcctgtgcctcttaaggagcagaagaatagattaatgcgatactcttatagtgcgatact

SEQ ID NO: 23447 - DNA, 401 bp, Oryza sativa
  unsure (1)..(401): unsure at all n locations
tctagattacaccgaccggtttcagtccgtatcggtaaccaacagtggggaaatggaaccgtatactttggaatggacggaatgaatggagttttcgaccgtttgtcggaacccgattgatgatatttcctcaaattccgaaaatatctggaagttctctagccgcttnacctgcctaacccatcagaagtccatgaatgaaggaagtctagtacgcttgcggcccataccaaagggaaagtgaccagacgaaaatgctgctaataaccctatgatgtggcatgtggatantgctgaactntagtcttctcaacttatncgatgtaagtattggtaaactcntgttatactggtcatcacacttattatcatattattaatcatcatataacggtcgtatg

SEQ ID NO: 23448 - DNA, 366 bp, Oryza sativa
  unsure (1)..(366): unsure at all n locations
tccggcgctcccggatcatcgccgccgcgagcccgtcgatgagcttgatggccttctnngagctcctctccgacccgacgttgagaaaccgcttcatcttccacagcaacggtgacgccgccgcgccacgcatggcggacagccgcgacgcggcgtcgaacgcgtcggcgagctccgacacgggcatctcccggtcgaggcagcccgggtcgaggccgaaggagatcttgcagatggtgtcgaaggcgaagcggcggaacacgtcctgcatgtcgaccacagcgccgctgtcggcgggcgtggcgagcaccggcatgaggcgggcctccnacctctgggcgacgatcttgtacgcgtatgatctca

SEQ ID NO: 23449 - DNA, 511 bp, Oryza sativa
  unsure (1)..(511): unsure at all n locations
gctatcaattggttctaccatatgttattggggtacatctttttcagaaatacctaanattactttatagatataaaaggttgacaattaattaatttattccattacaagtttaaaacaaatatgatttttttatgaagcttccttagtccttacacaacgtataagcttctacatatatatgtttcactatttctttcatgaattttttttctgaaaaacttnttatacatatatatgagagaggaatcactcacacaaaagataatagcacanaaataatttatgcagcatgtgaaaaatgatcataaaaagaacaacacaagaagtttcatattntttttgaattntctagtggggtcaatccattggcaacatttacatgtatctaagggtattntaggtattctcaaagtattgggtaaatggtatatatattgagaaacactgataactcattggctactcagaaaggccaanggctatgtaatatttagatctctctaaatat

SEQ ID NO: 23450 - DNA, 509 bp, Oryza sativa
  unsure (1)..(509): unsure at all n locations
tggcttgcctggagggcgttcggntggcgacgaactggatacatattcttataatacttgaatctgacaatgccgatgtcgttgctggactgaatataacacaagcgtcaagagcagaatggggaggcataattgccgagataagagtggcaatgcaatgctttgtgcatgtgcaagtgcacaaagtgaagagagattcatatagaggatagctcttatgttagctcagatggttatgacctcacgagttgaagcggagtggaggttatgcgctccgactgaaattctagagctggtaaatcaggaatgtaatcctatgttttatcattaataaaatctctctctacggtcaaagattttttttaacttatacaagttttttaaaaaaataaactatagctagttaacgtatattcacacgtaatatgtggttcttcatcgcaacacgtagaatntatatcatacctttgaattttatgggttgatatatcacatattaatcaatctta

SEQ ID NO: 23451 - DNA, 215 bp, Oryza sativa
  unsure (1)..(215): unsure at all n locations
tcgagcgggggcgacgagatgccgccgacgaggtgtgtagagttggaggctntntgcagatccgccctctggttatcgagtaatggaatattcgctcttgtgtactgttctggcttcacgttgtgagtactagccagcttttataacagaagagaagtacatatatatgaatagtaatactcccttcgcttcgttatgtttgatgtttccgataa

SEQ ID NO: 23452 - DNA, 423 bp, Oryza sativa
  unsure (1)..(423): unsure at all n locations
actagacatgaagctccaaccatatttattactcgtttcaaactgattcactgcaaaagttacggaatataagctcttttggttgattcctatgcattgggggatggttcctgaccaaagaattgttacttgttggatccatctaagcgtagaaatattgcacagggagggtggaatngagccatgaaactggttttcagatattangaataactggagctttgcaggcggttcctaagcaagggaatggcccattangttgtggttgtagttgagtcttcaaaaggaagatgatatgaaaagtaagaactttactcatattttactgaactgttatgaatatagttcatatatangactggcccctaatatactgataacaagaatgaacacttagttccaggataggatgtcattattatg

SEQ ID NO: 23453 - DNA, 455 bp, Oryza sativa
  unsure (1)..(455): unsure at all n locations
tatgaaatagcagtttccatgtgaaacgtttctaggttnttttctcttgacgcttctcttttcgtccttttgttaaaactatatggtttcaactggatttctttattttcgaatgttctcttgtattcatgcttttgacaagctatntggaccttaaaatttttgtttggtttctagcgtgatggttttttttccttgagattcaatttgttactttcaattntattttttcagttacaaagtatatattnttcggtcttctctttggactntaaagctntaattaagttctgaaatgacaatttcctaaattntgtttgaatgtatgctaactagtttgtgaaaaggaaatatttgcttgttttaaaccttgtgtctntgtgctttgacgtctttatcataaacttatatctagtttctatatctnagttctagagnntgcatttccttgttat

SEQ ID NO: 23454 - DNA, 321 bp, Oryza sativa
  unsure (1)..(321): unsure at all n locations
ccttcgcactttctacccctttactttctcattgaatgcctgcngcacggaanagaagaaaaacaagagcaaaagtatataattaacctccctgtgatcgaaatgtccgttntaccccanttcgccncgnccccacccnccccccccctcgggctcgttcttgtgaaaagataaatgcgcgctcggntcgtggtacctaaatactgangggcaagaccgtcgccccgagggagccgcccagcnggactggccagaccgaggctacgacgaccggnggtcgaggacggccgtgtgtangcccttccgagcccctggggttcg

SEQ ID NO: 23455 - DNA, 383 bp, Oryza sativa
  unsure (1)..(383): unsure at all n locations
agcgaaagacatgataaaaacccaccacatcagggtttaacttggatcaagattcaaccgccctcttcatccattggtggtgtgagccaagtgctaagtgttgacttcgcttcatcgcgagatcaatcagttggagcatagtctgtactatgtacacatccactagtgacaacccaccaaaggtaatgcttccttcttaattggactctatgatccatgaaggagattgtntttagagaggaatgtactctttaaagataacaggggagatgtttgcacatacatattaaaataacatntttcatttattccaatgaggaatctcatggtgagattcaactccaatatgtggttgaattggcattgttctactcttggtaatc

SEQ ID NO: 23456 - DNA, 451 bp, Oryza sativa
  unsure (1)..(451): unsure at all n locations
atgacttctgagacactccaccagtagcaacaatctgattggggactagagagtgtttaacagcaagttcctgtttgactcgaacattaaatactcaagtatagaaaactgaagaacaaatctagtacaattacaagctagaatcatcacggtgaaaatatggaagaagcgctcagntatatcatctcccatcaacacgccaatctgttgcagatgcataacaaaacggccatatgccacatcagcagaacttggatgatcacatgtatggcaccagtcattaaataggcgcataacctatcaaccaacgtaacacatcaaaattntgcaatatacataattaagagaaaaatatgtcatctaaagtatanactggatacanatcatntacagaanatctgaatgcaccagatntcgtattatatagcagcaacagtatcatctactccct

SEQ ID NO: 23457 - DNA, 438 bp, Oryza sativa
  unsure (1)..(438): unsure at all n locations
ctaagcttcaggagaatngctcaactgccacatggataaaggaggatgtattggtcatgcacacttcttttagatcatactgtagatntgatacgatgatcgaacagggctcggatttgacattgtattattgacaatatagttgtatttgatatataattattgtttctgtatctataataaattgtggtattcttatagaattatactagaaaaaatgctcgtgccgtgtaacgggtgaaggttattttaatattattattgttatacagtttagttaaggtgaaattcaatataagaattcacttggatatatatttttctagaaaatcatgaactgcaattangagttcgatcatctcaagttagcattgcaaattttttaaagaaatttcttatacgactccttctgtatttcttaaagaaaattctaaaagt

SEQ ID NO: 23458 - DNA, 497 bp, Oryza sativa
  unsure (1)..(497): unsure at all n locations
tcgctgcacctcgttgcccgcgtgtcctcttctgtccaacggagggntgactaccactagcctcctccttctggttcccctccacatccctntccacgtgcccctgctggttccccttcgcatccctctccacgtatccttcctcgttcaagtactgagttggatcctcgttcccctcttcttcattccagtactggctgcttccctccgcgattgtatcgacaatatctgttcctcatcgcggtcagtcatctggtgatacaagaaacatctgctaagtcacgagacatttatgttntaacaatctaagtctcgtatgctaagtgtaaatgtcgtacattagaaccctacacaaccttacgtgctaagtctcaatacaaatcgtgatataagctaagtctaggtgacgtatattatacaaccctagctagacataantatatactaagtctaatgacaaataagataatcttatattataactcagatatattaca

SEQ ID NO: 23459 - DNA, 393 bp, Oryza sativa
  unsure (1)..(393): unsure at all n locations
taagcgtagaaacgacgaagatgttcaatgttccaagagttgtttactagagtaccgtcttcgcgctggagtcgataggaacctggccgggtgacttcagagatgataaatggcccctcccatagaggagataacttgtgccgatcccgtgtagtttgaattttcctcanaaccaggtcgccgactaataaggcacgggatcgaacattgcgattatgataacgccgcaacccttgaagtatcgagccgaccgaatcaaagctgcttcgcggacttcttccaatcggtgcaagtcatccactcggtccttttcgtagcgttcttcgcggaaattacgaaagcgcanagactcgaattcgacttcactcggcaacattgcttcggccccataga

SEQ ID NO: 23460 - DNA, 422 bp, Oryza sativa
  unsure (1)..(422): unsure at all n locations
ctcttgatgttatgatgagcacaaacatttcttttttttatataagaacgcgagctataatcggctatgggaaatacatataccacataaaagctggtagaagaaaataaaataatgatttttcagttgaacgtggccaatcattccaaaccgggggccaaaacggtgcttagcatgacaagtcaatggatcatggtagctggcttcnaattaatcattgccaacttgactacttgagttatattagttagcgctcctgacagtgatcgatcgatcgctgtctgttaattactaccatgtagccttcatctaatacgctcatttgcattagntaacttgttctcctaatctaattatgtaaccgcggtcctggattaacacataaattaatatagttcagcatttattaactactactcccc

SEQ ID NO: 23461 - DNA, 389 bp, Oryza sativa
  unsure (1)..(389): unsure at all n locations
tgttactcttgganggtgacctcctagatggntagtgtgttctctctttagnttccaacaatgttgagaatagacccgggcaaatttgtgagggcgttattccacctccaaaaggaaacggaaaactctgtgagtggaatccgacgtgaggcttaagatgtcatcttggtagagcaagcctcacttgtggcgttcttttggtgctcaagttggggatcttagtggtcactcgaaaccaaagagaactacctatgggtgttggctcgaagaccggagacctcttcctaggccttttcttggtgaggcaaggcgttaatcaagacccggctctttggagctcctcaacggagacgtangattctcggtggagaaatctaacttcggaaaca

SEQ ID NO: 23462 - DNA, 261 bp, Oryza sativa
  unsure (1)..(261): unsure at all n locations
gacaaccccattcatgctagtgacatgagtgcttccccattctttgggcaactgccgcaggtgcaaccacagattggagcaacagctgctcttggaggcacacagccaccaacccaagcaaaccaagcagctgggtcatttccaccaccttcacctncattaccacttatgccacaatttgttaaaatactggaggaatgtttgaatgggaccttttggatgtgagtggcttgcgcacctcaccccattgccaacatatgt

SEQ ID NO: 23463 - DNA, 426 bp, Oryza sativa
  unsure (1)..(426): unsure at all n locations
ctaagcttanaccttcacctgagtttcgagaatacgcatacgcataacccggtactaaaatgtgttacaaaccgggactgatgaggcattcttcaacagtgtaagcattgggatatttacaacaggtttacattaaaaaaacaaaaccgaaaaggtaaaacttgggcactcttgggaaatggattttaatccctcgtgaggatatgtcccctagttattgcataccatccaatagttatgaatttttttataaaaatagtaagatagatcgatatattatatatcacgaatatacaagtttaaaatcaatcttcctaagtatacgtgtgggtcacaattatattttttcagctcctagaagtcatttccaaacttgcatattgtgtagggatcgatatatcatatattaatctattctattcaatt

SEQ ID NO: 23464 - DNA, 444 bp, Oryza sativa
  unsure (1)..(444): unsure at all n locations
tgatgactgcgtntggttcacatccgcttcttagagacgcattcgagtaacatagcaagaggaaattgagaaaacatatgtaaaggcgccaactaaaatgggtctttgaggcgagatgatgttccaatttatataaactaaccgaatttcatatgtaactatgcaagtatttcgtttgaatgtagagttgtgcctactataaagcttagacgcactgtatatccttatactcaagtacatgcttataatggctagggatgtaattatcttcctttntctttntaaaaaaagtgtagctagttgtttcattggaatgaaccttaatttgtcgccattntcgacacttctcaagttgtttgaaagtcatcgagttggcactattcaccctggcctgccacacttaagtacatgtcacacaatcaaatcgagtaatttggcacttat

SEQ ID NO: 23465 - DNA, 348 bp, Oryza sativa
  unsure (1)..(348): unsure at all n locations
tccacgcgagcagagaggctcgtggagagagagagagagcagtgttgttctgactcgtcgtagcgggagcggatgccgcggaagatagtctcaactgtcccggagtctgcgaggaggcgatcgactagggcggtgcggtcgcctggggagaggcccgcgacgttcacctcgcagagcgcgtcgttgctctggacccggtccttcccctgcgcgggcgaactgagcangccccttctctcgcgcgccatcgtcggcagtcgatgtagcgccgcccatcgcaaagcctcctgctcgtcctcctcctccctacacgacctcgacctcgcgaacgccgtctctgctgccaca

SEQ ID NO: 23466 - DNA, 420 bp, Oryza sativa
  unsure (1)..(420): unsure at all n locations
agaatgctgngaataaagaaatntccaaagtattgagcatacgctatgcgtacactgctttaacagatgtgcttaagtccctagaagacacatggtttcaccacacctggaaatatatggcacatgtggtataacatccgagtcagtaaactcataaaggatttaccaaccgacttgaaaatgaccataatatataatcagcctaagccataatattggtctataaaaatgcacacttacgtggcaaaaagcaatgatactgtatctaatcaattgcttgataaacccaaacagcaccttgactatataaaaaagtcagcggggcagctatataaagctntattgtttgacacctcttaagatgcattgtaccaactcctancaagtcgagtaactgctgtatatacggatattaaggta

SEQ ID NO: 23467 - DNA, 468 bp, Oryza sativa
  unsure (1)..(468): unsure at all n locations
tatttgaaagagtaagagtaaactacaaattggaccactggttattggcaaagttntgctttgggcctccctttaaccaatgttttcactntggactagataattatacttgtgtcactttggatcacccctaactcttatgttaagtacatcaataatctcgattataccggcttttgcatgccgatgaactcgtgaaattgtatgtagaccacacctttggcacagaatgagttggatgtaaatggataagagttgagagttgtccaagtgacacanataaaaaaatatctagtccaaagtgaaaatattggttaaaaggcaagcccaaaccgaaactctgattataaaaggtggcccanagcatgaacttcgggtgaaactcttgatatatatcttgattatatggatacaatctctcatgcatgaactgatgcgtgcacatgcataatggttatgtgatcacat

SEQ ID NO: 23468 - DNA, 331 bp, Oryza sativa
aagcttatcttcggcacaaatgctcggctagagcacggataatagcataaccaactataactccaattatctataggcaatcaatgcatacaatagttgttactatactattagcatatggtcacactgtcatacacacattgcattttggagactgtgctagacctggctacagaatctgacactgctgcccttctctatcatctaataactcataaacaaatttgagctagctaaatctacattgaactgctctaaggctcacctcagagatgcatgttggctcgaatctaacttacgtccactattacgagttgactaagttaatatc

SEQ ID NO: 23469 - DNA, 377 bp, Oryza sativa
  unsure (1)..(377): unsure at all n locations
cagaaatcaatgggtgtcgatggtgtgcatggtggaacacttcatccctgatggccgcaagatgcgcgtttacaacggctcccttatctccttcaaagcatttgtatgtctcactaatctcttcatcccaacatgcttttgaattcagaaatcagaagcactactctgtgttctctgatctgaacattntcttttgtttgctccaggagtacaatgcgacgatagatttctactggtcaccactgctattggaatcaaacagcgacaaccccataattcacagagtggagtatcggatcataagggcagacaggattgagaaacacgccaatgtctggaaagacgctgatttcatcgtcttcaactcctacctttgg

SEQ ID NO: 23470 - DNA, 332 bp, Oryza sativa
  unsure (1)..(332): unsure at all n locations
gaccataaaactcaagctgctgccgattcattctgtggcttcgggtgtaccgccgttatgaggaccaagcgtagatggcatatggggatctcatggnctncangctcgtncactccttcttcttctactacgacgcgccatacggcgncctgcccaatcaccataccaaccacctcgtcgatgaccacctccccgtggagaatggaccggaccccangagggacgtgcccgacgaggagccgccgccctcgccgccgccgcaggtcggcttgctgccccaggtggatgtgctgtgcgagcagcggcacgaggggttcgacgaggccgccgcg

SEQ ID NO: 23471 - DNA, 397 bp, Oryza sativa
  unsure (1)..(397): unsure at all n locations
gcttgaagccgatgagaagctcgtaagtggtcttttatattgttgataaagctcnagcttaagaaatttaaataattaatctattaagaattaacaaatatcgataactcggtgaacgtatggataaaacagagcaaagaaagcctataagacaactttgattggcatgacagacacgttcgataattgtgtaacaactagatcaagacaaaacgatgcgtttaagccctaaatctagtatatacgataacttttatgagaaactagatcnaactacagcgatacacccggaaagttaaatctagatgcaccagataaaagcggaacttacaggcaagccggagatcaagatgatgcagccctgcttaacttganagaactcgttgatgaactacta

SEQ ID NO: 23472 - DNA, 504 bp, Oryza sativa
  unsure (1)..(504): unsure at all n locations
tctccaggnttcatctcanatataatgtactccttttttgaaagatctcgacgaagttctttaatggtatatgttccttgatgaaaattactcaaagcaatccaaatctcatgggcagcttgaagatgagcaacacgatcataatccgaacgagaaattccactcacaagaatattgcgagctnntgcaatttgttcaaactcaagttttannagcggtagtattaattcttcgggaatcacataaggatgagaaacttttctccaaatatcataatctttagccataatgtatgattgcatcctactacaccaatgagaannaatccgtccatcanaaacatgaggcttagttgaaaatctatcagccatggcananactctagatcggtaanatcccagaagaaaacagctctgatccactgtagatcgaacacaatacctagccaccgaggaggggaatggtggatacccaaaccaaaactttagtggaataaagtacctc

SEQ ID NO: 23473 - DNA, 414 bp, Oryza sativa
  unsure (1)..(414): unsure at all n locations
agcttctcggttcttggtctctgcccgatgtatctatgtctaccccgagaagatacgagctatagagcggatgcgcccccccagcaagcttatggatgtgcaatgcgtcactggctgcatggccgccctaagtcggttcatatcgaggctgggagagaaggcgctacccctatttaagctcctcaaacgctccgggccgtttacctggacggaggaggctgagcgggccttcattcaattgaaggcgtacctcagntctcccccagtcctggtcgccccggagccagatgagccgttgctactctacctggcggcaaccccgcaggtggtcagctcggcgttggtcgtggagcgcgatgaggacaaccctcactccgcgcattcccaccctgtgtcgactcgacccgggagaga

SEQ ID NO: 23474 - DNA, 334 bp, Oryza sativa
  unsure (1)..(334): unsure at all n locations
gagcgctagcggtgacgacggggagcagaacccgcgtcgtcgagctcgtactccatcgtccccctctcgccgatgtcttgngcgggaggaggtgctcgagggggtcgaaagatccgcgactttgccgcccacgggcgatggagaaggacagcgagacggngagcgtcgtctcctcgtctatggcgatggcagcacgccccagggcgcgctccaggctgcgggcgcgctcctgcgtcacccgcctgtcatnctcgatccagagactccagcccgacgttggctggatgacgtggccgacttggtcatgacggcgcagcagcgcctaggcgccggt

SEQ ID NO: 23475 - DNA, 440 bp, Oryza sativa
  unsure (1)..(440): unsure at all n locations
gcggaacaaataaagcactatgtagtgcattggcagttggtacaagtgaagaggaagctagattgattctccagcattgtcgattgggccatatgtgttttgaaactatgaggaagatatattctgatgagatgagtaaggtggacagaagcaaactaatatgtgatgcatgtgaatatggaaagcatacaacagctacatatataagcagaggacttcggagcatatcaccctttatgttaatccactctgatgtgtggacttcccctattgtctcggtgagtggaatgaagtactntgtgactcttattgattgttacttccgaatgacctggatatatcttatgaaaccataaaatgaagtactataatgcttctaggacttctacgcatttgttagaaaccaacttcacacatgtgtcaaaaatatcagaactgat

SEQ ID NO: 23476 - DNA, 471 bp, Oryza sativa
  unsure (1)..(471): unsure at all n locations
ntcctcatcaagttccaacatcgccgccattgcgaggaagccattgcaaagggctacgtcaagcgtcgcgggattgaaatccacttcatcaagtggcgcagcctgcanagcgctcttggcgtcgcgttgatgttccgtgtgcggctctgcctcgatggcgtccctatgcacgcctgngcagcggacatcgccgagcgcctcattgggcgcacctgtgccctggaatagatcgagaccgacctcgtccacccagtggagtctggcaacactcgctccatcgatctgtgggcatggacggcgaacaccagtaccatcccgaagcggatgtggcttggcttcaccaaccgcgcgaaggacccgtagctggcctctctgctcgtggcggaagatccgccggagcactagcagcggngagtgcgtcatcggtgcttttccatttggaggaaatccatgactacacggcggcgatca

SEQ ID NO: 23477 - DNA, 407 bp, Oryza sativa
  unsure (1)..(407): unsure at all n locations
agcttncttctgattgctggttgaagcggatgactgtcttctgcttggtatcgccctccggaggttgattgcccttggctcggcctggagtaggtcggggagagacacaacttcttccatctacgacaattctttgctgaggctgtcgatgcacaagaatggtgctatgatttattgccgagtcaggtgcagcangaggagcattggngcattngttctgctatgggttctgattaacacgaggccttacgggtacggcgcttgctccagtgaccacaacacgaatggaatgtctgcttcgtgtanattggcggtaatgtggaggccgatcttgccttggttggggacagcttatggagtaatgcccttcttcactgcagttgtaacaaacaataactttcttacac

SEQ ID NO: 23478 - DNA, 432 bp, Oryza sativa
  unsure (1)..(432): unsure at all n locations
atgcggccttgagagacatgggcttctcatagcatttgacaatacttacgatgaacagcataattgcagctgccaatagccttctgtcagccgacgacgaccacgactggcaaaagacgtagatggctactgtgacctgatcacgaattcacgattatgtgaaattaacgaataaatagatgtcaaaaatataaatatataattcgaaattccgaaatatgtcaaaaatttcccttgtaattttgaaatcacattntataattacagtctggcctgatattgaaacttaatattcaaaatttagatgctcctgcgctntattatacataattcgaatctcaacagtaaacgtaaggaagcataattctattcccaacttgaacacaacanactgacatataaagaatttcagataaacatatctgacaactt

SEQ ID NO: 23479 - DNA, 460 bp, Oryza sativa
  unsure (1)..(460): unsure at all n locations
agcttgtgggagaagcaagcagactggtggtggcttatacctgtatccaagctttggatattgaattcacagaaggacaaatatacgagatcaactcggtgaaggtatttatgcctggtgtttgatatttcctcgtgcgtgtgtgtgtgtgtgttctttttgaaaaatggcctttggttacgttgaaaactaaatatacaaaagctgtctagttacgttcaaactaaattatttatcttttgactgaagtgtcaattatcacttcagggcgaaggacctgngagcgacccacagaaatggaaggagctgttcagagctgttcaatgaaattaatggcattagctcaccctcatcgngatgtattttgttcatgtatagtgtactctagtggaatctcattgaggtacgttagtccattgtagctaactagtagtgacaattcatatcatatgtaatgaga

SEQ ID NO: 23480 - DNA, 409 bp, Oryza sativa
tgcgagtttatatggctagagtggtatgtatgcatggtgtttctaagaagatagtggcggatagaggtagtcagtttacttcgaagttttggcagaaattacaatcagaattgtgtacccgtttgaatttcagtaccgcttaccaccctcaaacagatggtcagacggaaagagtaaaccaaatattagaagatatgttgagagcttgtgttctagattttggtggaagttgggataagaatttgccgtatgcggaattctcatataacaatagttatcaagctatgttgcaaatgtctccgaatgaagcattatatggtcgaaagtgccgtacgccgcttctttgggatcaaaccggagaagcgtcaagttttgggacagacatattgcgagaggcggaagaaaaagt

SEQ ID NO: 23481 - DNA, 405 bp, Oryza sativa
  unsure (1)..(405): unsure at all n locations
gtacgactcacctagttcatccatgatccatncaagtgataatctctctcgtctttcggccattggttgacacatttattctaaagaagtcaacaacaataatgaatgtcatgtgagtattgtttattgacaagatagaaacaatagtaacaaaatagcattgccttccgtcgagtgccatgtgcattatctaatgacattggacaaaataaagatactacctttgctactccacctgttcgtcaactaaatatctcagttcttcctggatgaattctagtagtcatgatagcacaaataacaatggctacattctcgaaatcgaaacaaatttaaaagtctcttaaaaatgctataacaaaatgtttctcaagacccacaaaatatgtatcaacaaatgtactg

SEQ ID NO: 23482 - DNA, 472 bp, Oryza sativa
  unsure (1)..(472): unsure at all n locations
ctcaagctcctcgntccatcatgaaagagtaaagccccataatgggtacacagctaaacatgagagcaagcagactattatacgtgtaactaagccttcaaaatgggggtgtgcatgtaacttagccgtcatagagcgggttcgctttgtaataggcccagaccagcgccctcttgttctacatggcatctcgaatcttcaaggctgcatatggaccagaaaaagctctatgactttcggaggagaatggcttgtagcacgatggttngaaggacttgttaagaaacatggaatggattcnggatgaacctaagctaatngccttgatacttatcanatcanatcacattcttaatcacttctctcccgactgatcctcttgccttcttcttgtcaganggatgaacactactcaccacagcgtctccctgtcttcaccctctcgcagaggacatacagggtgaatcaatca

SEQ ID NO: 23483 - DNA, 391 bp, Oryza sativa
  unsure (1)..(391): unsure at all n locations
aagatacacccgccttgaccttgtcggcgaagaacttcggggcaatgagctttctctggtgagcccaggcgttggcgttggacttgaggatgccctcgccgaagagaggctggtgcgtggccttcatgtacgagctcttgccgagggtcagcgaacgcacggctcagctctcggactatgtgcggccggctcacgtgcaggaacaccatgtnccctactggatacgtgaataccgggcctaacaccaagagcataattaagatgcaccagtcggttacaaagctatcaaactatccgtatatctaaacatgtgcttggaaatgaaagtacacctatattcttcgttccgttactgaagaactaagagaaatagactacacaaattaagcga

SEQ ID NO: 23484 - DNA, 162 bp, Oryza sativa
  unsure (1)..(162): unsure at all n locations
cgacaagaagaaagccaccgctaaagagactggtttgcagggcacgatcataaacgtgtcttctatttcgcatcgaagaagcgatggttcatgctttgatctatataagctgaacgacaaagcnaaattagtaatttgcatttgtgttcttcaggctgactc

SEQ ID NO: 23485 - DNA, 477 bp, Oryza sativa
  unsure (1)..(477): unsure at all n locations
gcctaaaatcaaagtcctcaaattcaaatcagcttctgattataatccaaaggagtgccaagcagagctatgcaaatataacttcagtaagaaaatgtcactgtcnaatagaattaaagaagtggagataaacacaaattctatgagctaacataaaaaatagtactcccttgcgtttcagatttataagtcgtcttgactntggtcaaagtcaaactgcttcaagtttgaccaagtttatagaanaanatagtgatattntcaacccaacacanatatattatgaaaatatattcaattataaatttaataaaactaatttggtggtgtaatgtatactatatcaatctacaacttagtcaaacttaaagtagttgctttgataaagtcaaacacttatatatanacggaggagtccatcattcttgtcatcaatctaatgaccaactactgtgaaaccgaaaatgtcatcatctt

SEQ ID NO: 23486 - DNA, 420 bp, Oryza sativa
  unsure (1)..(420): unsure at all n locations
tctcttgcgtatcaacctccctaatattgctcatttgcacaatttatggcccacacatgtatctcatgagaggaatgggttctactcgaatttataagtacctgctaccaatggtcaacttggcacatggtctcactaaattttcacccaaaacatgttagtttgtctacactatttatttnttcaaacaatggtacgtctacactcctaatttattccgatgagctacaacttatactccttctgttccttattcgaaaaaaaatatactccttctgttccaaaatataaatatttctatattgnttagtactcccttccgtgtatanttttaaagtgtttgacttttaagtcaacttttaaagtacagtttactangtatagaaaactactaagacccgtgcgtgcaaaaaaattgag

SEQ ID NO: 23487 - DNA, 411 bp, Oryza sativa
  unsure (1)..(411): unsure at all n locations
gacccggcaaaaatgcactatcttatacaggaatgttcaacccacataaataatgaaataaataaataaatcaaactctcattatgtgccagtgtattttgatcacttgaacctttatattgcattatttcttttatctgttggcattgtcctcgtgaattcccagaatggtttgtttaatttcatcgttcttttcagttttcaccgtagtgtttcaattatttatctccaaatgttagaagctggtggcagtaacaaagctacggttgcaaacttttctgttgctttntttgcttcaggtttcgatgaatacgaaaatgatgtccaatgcgtnntgcagttatggtgctntaagtgcctatggtgtaggttcacagcagtttcttgagcangtagtagcatgcaaagtca

SEQ ID NO: 23488 - DNA, 409 bp, Oryza sativa
  unsure (1)..(409): unsure at all n locations
ctcgcntttatctttcccgctgtatttgtaatcttttatatttttgaagggcggggtctgtatgtcaacaattgttgtttgtgtaccctggctggtcctggacagggatttaatgcacattcagcttataaattccggttcgagaatttctgggtgtgacaccatgtcacactgagatataaagtgagtgaggagtcataacattatctatcttgccaaccatcaagtatctgtgatgggcaataaagttactttgacgatggtatacaaggacatctgtggaggcacatcacgtaacttccaaatgacatgactcactctgatcccaatagaatatccaacaaaaacaaacactctagagcaaccgataaggaattcaaagaanacccatccatcgcatctataaata

SEQ ID NO: 23489 - DNA, 328 bp, Oryza sativa
  unsure (1)..(328): unsure at all n locations
atgggccgaccaaggagtggaggaacaacatgctcgagctagcttatgatattgaggattgcatcgacctcttcatccacaagttgagttgtggcgatgcgaatgccaactntgttcagaagataggaagcaagataaagaagttatggngcaaacaccagatcacagagtgtatccaagaactgaagaatcgggttatggaggaggatcaacgtcgcaagaggaatcagatcgatgatttcatctccgagccaagtgtggtggaaatngatccccgtctaccggcattgtatgaagaggtggagaggctcgtggggattgatggtcc

SEQ ID NO: 23490 - DNA, 493 bp, Oryza sativa
  unsure (1)..(493): unsure at all n locations
gcaagcttgtatganaatcgcagnntccttgtatcatatgtttctaggnttctctcttgacgcttcatattccatcctttgataactctatgctttcagttggatttctttatattcgattctaaaacattaatttgctaagttttacacggtgttggtgtttgaaactcatttaaaaaaacttcaaaaaaatttaagtaaattgcacatggcgccaccccttttcaccaatgttgcagcttgcgctatgggtaacccttgcttttcactttggacctaggttctttgaaaaatgtttcacattggacctgttcttcctctagctctcccccatcctctctctcccttctcaatatcgagccctccatgttggtgagcaggacccctccactacccccacgcttgtccatggtaggctccaccaacaccgacgcagcgacactatgctctctgtgactcctgngtgtattctctccttgatcttgatggtctc

SEQ ID NO: 23491 - DNA, 426 bp, Oryza sativa
tctgtaccgcaccggctcgtcgtcactgtcggccgttctctgttattcctgcacctcggcagagtgcgttgaggatgagccgagtgtaagcgtgctaagcaaggttggtgagaacctcgccgggcttgccggaggcgttccccgctggtctgccacttctggctccttgccggctcgccttccttgcggcggcgcccggtaccacggtaccgagcctgcctgctctgctggcgccggctgctctgcgccaacgggttcttctacctcgaactcagtggaagtcacctctcctgcagcagcactccactgccaaggtgtgttatcatcaaaaacaactgtacgacttactaatgattgtcgacgacgcggatcagacagccgatgggccttgctcccttcttcaaccccaggtacacgaccggattg

SEQ ID NO: 23492 - DNA, 493 bp, Oryza sativa
  unsure (1)..(493): unsure at all n locations
gaccttaagcaccgcggctgcaagctgggctntaaacaatgtacagaagaatattattgatgcttatgtcttttcgataaaacaacatacgaatattatttatacttcagtaatcagtatcattgaacttctctagctcatatttttagcttgcctaaaaaacctgatgactcgaagctcactgactggaaaacacctgatccggatgtattcacgacaaacaagagtaagccaggatggtgcaacgtgaatcctgaggatgcttattcttccaaggtgaagtttaaagaagaatgtgattgcaaatatgacggactctggcggcgattctgtgagacacgtgttgaatgcagctgtattaaccagtgctcacggcatggacattgccgtggtggcttctgtcaagtatctctcagacaagttgatcggataagagtcatgacaatgtgtngacagactgatttgtgtatctaccttcttaagctataatcta

SEQ ID NO: 23493 - DNA, 516 bp, Oryza sativa
  unsure (1)..(516): unsure at all n locations
cgtagatcagatggcccgtggtggtcgacttgccggagtcgacgttgccaatgaccacaatgttgatgtgcgtcttctccttacccatggttgaataacgagggagctaacaactgcagcacagaacgaaacacatattagaaacaaagataagtgtataatttacaactctaaataaatatagcaggcaagctcacagatcaaacttgggcagctataaaagtgctaacgcagctaatcggcggatgatttgcacagaggcgcagtaatcgacccaaccaaaccgggtacagacgataacatctactcagcagtagtagaataaaangaattacagaaacacggatagagatctatgcgaacggattgtagataaaaatccttctagtgattccaccgataatantcaacttatgtaaatgaatctgcaccagatcaagttcatcgtccgaatctgccgataatntcaacctatgcagatgaatcactgacagaatcaagttatcgtcgcgtcac

SEQ ID NO: 23494 - DNA, 473 bp, Oryza sativa
  unsure (1)..(473): unsure at all n locations
agcttcatttcctcaagatccaatatgagacattctctatgttgcctcatgagagtgtgaatgacatgtatgggaggctcaatgtcattgtgaatgatctcaaggggcttggggtaaactacaccgatcttgagattgcccaaaagatgcttatggctctaccggagaagtatgagacacttgtcaccatgctcatcaactccgacatgtcaaggatgaaacccgcaagcctcttggggaagatcaacaccaatgacatgtacaagttgaagaagaaggagatggatgaagcctcaccttccaagaagtgcattgctctccaagccgaagttgaagataagggcaagggcaaagtgaatgaagtcaatgaggacttggangaagagattgctcttcttgctataaggttcaatgatctctttggaaggagaaaggagagatgaatgggctctaactcacataggagaagaaat

SEQ ID NO: 23495 - DNA, 496 bp, Oryza sativa
  unsure (1)..(496): unsure at all n locations
ttggcataccattcaccatgatttgcaattttggggcctgtagaatcatccacgggtgaagatgtcgccctcgccccggccccacatagagtcggggccccgtccgcatcacccacgggtgaacattgagccctagccccacccacgcctcaacggngaaattgccacccctattcgagcctaaccaaattctcgggagtttttttagagccaagctcatgctccaaatgaacctaatagttatatatggttattgtgtatttaacaaactaatagatcaaatatgccatttatatgtgtatctataccgtacaataacatgtgttgatatcatgtatgtcgacaggngatacccgtagactggatgaatagggtattggggtatattggtacgaggatctatacaatacaacatcaagcaaacaaaaagacaaggattatactggttcaggcccctcgtanggaatagccctaatcctgttatatgagattatat

SEQ ID NO: 23496 - DNA, 401 bp, Oryza sativa
  unsure (1)..(401): unsure at all n locations
actttattcaaattaatccaaaaacttgtgctattaattggataaaggtcttaactcactcctttcacttgtctttagatgccgcgctacaagcctgagtacctgtttggtgttgagggttttgtccacgagttgcgtacgatgtcctttgtcattggatttgggactgcccctttttatgcccagattcctcatgatcgtcatgaagagaagtgtcgagtcaaagtcactttgaacagtaatagtgaagaggtcccctcagtaatgttcgaagctggaggaagaaactacatccatgcatgtcangaggtggcaaggatcgccatacgagagctccgcgatcgctacagtgatccagttggcgacactgagtatcgctaccattctcgtcaaccacaggg

SEQ ID NO: 23497 - DNA, 507 bp, Oryza sativa
  unsure (1)..(507): unsure at all n locations
tctcgttgacaataagtcggcaatcaccctcagcananatccagtgtttcatgaccggagtaaacacatcgccacatgctaccacttcatccatgagtgcgtggaggacgggagagctcangttgagttcattggcaccgatgggaaggttgctgacattctgaccaaggcactcgggcgggtttgttttcaagaattgcgacctcgtatcggcgtcgtcgaggtcagtccaaggcgccaagcttatggggagaatgttagacttgatgatataagctggcgctatggagctctgtttcttcctcaccacaccgtgcactgttcgttgcatgcaaggtgtttgttagagtctaatttatttccgttttttgaggctttggtgttaaggatcgagctgcgcttgtaaagccggaatcgtgcttgtcacgatgaggcgtagtgtagcgagtcgtacgctcacgttcttcgccgtgtgggatggcacatgcgccaatggagttcgtggga

SEQ ID NO: 23498 - DNA, 489 bp, Oryza sativa
  unsure (1)..(489): unsure at all n locations
gctttcttggctcctttgctacctttggttttcttctactctctactctgccgnggggtggagatgagtgggggagaaggcgntgcatgcattcccctttntaaaccccctaaccgctttctccctcctctgcctttccaccccgagaatggtatggcaaaatcccgggtttggttccctcgttttgagatatgtgccgcgagggatgggcgggtggaacgattggtgagggggaaatgaccggaatgggcttgtggtgcgtaacctcgtcgntggcctaggtgacggcaacttctagggtcctaggagaattgctatgcgtaccctanggtagggtagtttttttcctttcttacaagtttctttggggttggtcttcctagctgaatgcactacataggctttagcccatttgatcatctccattctataacctttcttcagaacatctncatattactatgaaagttccatgctattatatatatg

SEQ ID NO: 23499 - DNA, 516 bp, Oryza sativa
  unsure (1)..(516): unsure at all n locations
cgtcagatgcgccttccgtcccacagctagccttggtttcttgagtagtctgacaaagctgcatttatgtgaagtgcgtattaaggatgacgagttaacttgtcttatttccaagtctttggctctgaagcagttggaactcctaaactgcagacaaataatctgtctgaagataccgtgtttgctggagcaactcagctgcctgaatgtatccttgtgcgagaatctgcaaatgatagagagcaaagctccaaacctctccacttttagctatataagtaacctagtagtagaactctcacttaaacaatcatcgcaggtgaagaccctagatatcgactgttatgacgagtccaactntctctgtcatgttattaccaagtttccaaatattggcccaaatcttgaaactcttaccttacattcaatngatgaggtatanctcggcactntatattngtagttatatgtgtgatggcataatctgtaggcatgcattcattccctaggatatat

SEQ ID NO: 23500 - DNA, 478 bp, Oryza sativa
  unsure (1)..(478): unsure at all n locations
agctngccaagcgtgtctgagggtagcgggccaaatagccctactgctggtaggcgtagtgtttgcacgccgctattgtctggtgtgcaagtcaccccaacccatgaagtgcagactgtggctgcagagctccagttgagcttcctgccatgtggcagtgaggcagcaaatgcaagaagagcctgcttgtcggagttcagatcagcactcttggcaggaggaatgcatgcaaagaggagagaaacaaccagaaaagctgtaagtatatgatcttgcatggttgatgcttgttggaaacaaactggtccaacactagaaaccaatctttcccatcagctcttcactcctctagcatgagaaaaagaaaaagacagtanatcaatgtggtgcgtaacagcaagaatatagtatagtgcaagtagaaagaaggaatacaaggttaggaaacatgaagcataaactctgcccttagatatac

SEQ ID NO: 23501 - DNA, 501 bp, Oryza sativa
  unsure (1)..(501): unsure at all n locations
tcctttataananagagatcgattcgtccatatatgcaaatatacttgctggtgagtactcaacgccatcacanattatataagagcatgtacaacggtttttattagtggtctctctctattaccatgcaagtaagtttggtaacatggaagaaagagaaaagaggaaagagaaatatagttgttatgcatgataataactgttcagcaaattttgttgcatggtggtgaaaaaaagaaaagaagagtaagaaaaagtattttgatacattaatagtagagaccatattatcttcaactgttgtaggacgttagtctctagatagtatagagcttatacctgtctatacctttgtacatgcttatgttcatatgcaaatagtgataacatagaataagcaataatgcanatagtcaaaataattgcaggacactgttcatactcagaccaaaattcaacttaacgtgacttctactcanggaaggaaagaaagacaaacg

SEQ ID NO: 23502 - DNA, 394 bp, Oryza sativa
  unsure (1)..(394): unsure at all n locations
cttagaagaggatgtcaccttcttacaataaatatggagtatgtgccacangtaccgtggagaaaaacaattaanaaaatgagaaaaaccggatccctagacctgttatttattgatgatgaccagtacgactctacaaggatattccaaaaaaaaaaaagtctatagaaaccatcatgatcccccgattcacatagctgcggtacgtccaaaaaaccctagccgcattgtacatgaaatccgaaatccaactaatttaccttccgtttgtattggaaagtggtggacgtaaacatgttcagaatagaaatcgagtcgctgaactatggcagggtangcctaaaatgggacatgcacatatgtttttnttacaactaactgtatagtactggat

SEQ ID NO: 23503 - DNA, 449 bp, Oryza sativa
  unsure (1)..(449): unsure at all n locations
acacagattctcaaatcaaattgttccccaaaactaggcaaataatattattgctacaagcttggaatttgaaaacctgtgggtagtggcgattaccacatcaaacacagattctcaaatcaaattgttccccaaaactaggcaaataatattattgctacaagcttggaatctgaaaacctgtgggtagtggcgattcccacatcaaacacagtttctcaaatcaaattgttcctatgtgtgtgaatttcacataaatacaaatacatgattacaactatcaagtgatatactttcaagaacccaatttacagaactataaacactattattatattcttatatacacataaacaaactaccagcccagtcataaccaacatctccatttccattgattatgaaagcatttcgagtcttngacaagcttctccctgaanaggacatat

SEQ ID NO: 23504 - DNA, 416 bp, Oryza sativa
  unsure (1)..(416): unsure at all n locations
tctgagcactagaattntcatttaaacanatcttcattagtactttctgcgtattctctctgcggattntaatattntaatatatgacactatggcttttttaaccaacgtttgatcatttattttattcaaaatttattttcacatataaaaatatttatggtatgcttaaaagaacatttaatgatgaatcaagtcacaataaaataaataataatctcaaaaattttttgaataagacaaatagtcaaacgttgaacaaaagtcaacggtgtcatacattaaaatatggggtaggatttcttagagaaactattgttgaataataagcacataatganttaatttatccatanataaatcatgacattgcagatgtaactagaatgaacgctcattagatctatcatgtaact

SEQ ID NO: 23505 - DNA, 418 bp, Oryza sativa
  unsure (1)..(418): unsure at all n locations
ctatagacaactcaagcttgccggcgaacgacgacacgacggcgctaacgaaggacaccanatcgatgcgggcgacgctgcgaactcaccggtgaccaaaacagtggcggaagatcaacggacggcgacggcgacgaggaagaagcggcgacgaccttcgggttgacgacgacggcggtcttncggcgatcctcagcgacgacngaggggcggacgatgatggcgacgacttggcgaacccgacgatggccttcccgagcgacgacgacgaccggagcggcggcggcgcatggctggacaagcggtggcacacgggctcacgaggctagggctctaccggcgacgagagacgaaagcgagggtggcgacgggtagcggatgcaccgcgggtccttttataggggctaggagcggcgat

SEQ ID NO: 23506 - DNA, 347 bp, Oryza sativa
  unsure (1)..(347): unsure at all n locations
cagaactgatgagttcatattgtgatccgaagttctgaacttgtgcatgttgagacctatgtttcaattccatagtcgacagatctttttagtgggttacagcttcatagcctttacattccatattggtttcttgctaactggagctattgaaacttagtgctcatatgcttcactgagatgtagatttggaatacacaacattcattttcttattnttcataaaaatcgagaaataagtcatggcatttggtggtgtgtgccttggatctattctctcttctttttgaaacagtggtttcaactgtaagatacagcacacacacacacaccacacaccacacaat

SEQ ID NO: 23507 - DNA, 467 bp, Oryza sativa
  unsure (1)..(467): unsure at all n locations
tctcatgaganatggcgagtctctcatgagaggtctntagctccttatacaagacctccaaagaagcatgagccttctttagagtcttgaacttgacaatctccttctcactataagcatggagctcctcaaacatactcacaagctcatcataggaaacatcatcacaatcattattactctcactatcactaagagatgttagcttagaggagccctttgtcatgagacaaagtggagcgaagagtgatggagcctccttgatggcaacaacggtcatcttcttcttcttggagctagcatcatcaccaccttcttcctcggacccggatgaggcggagctctcctcatttgagtcccattccccgatgaaggcctcaatcttcttcccttccttcttgagcttcttcaagagcttgtagcctncactcttcttcttggatgacttgtctncatcatcatccttc

SEQ ID NO: 23508 - DNA, 494 bp, Oryza sativa
  unsure (1)..(494): unsure at all n locations
agcgactgagctgcaactctatctgctctccgccaaaacaccatcaatcgatatcttccttttcgggcgaagatcatttgctccaatattaacgcatttctgagaatgtattttgctagctccacctggcctgtgttgccacaaaatccaaatatgcacaccatcttgagatgatagtgatgttgatccacgatgtcatccaaatccaaagggcacctgttcaagctacaatacatctgncagaaatttatgtcatcattaacaaggagcaaagctaacacgtaataattagggaaaagaagatcaaagattcatgatcgacgaagagaaggagaaggatagcctgtatatcttgtctaaacaaatgcggcggatggaattctgagagtttgttagaaaaaagaaagctttgctcttgttggatacgaatatattcaatcaacgaaacacatggctaatcggtttccaaacatattatcaccttgattcatact

SEQ ID NO: 23509 - DNA, 305 bp, Oryza sativa
tctatagtacttgaaacaatcatcaatcactttcggtcaatagaaccccgctcttctacagaaataatccatcttacgggccgaatgatgaattccacaaatcccttcatgcacttcttccctagcaactttagattgatcatattgtctaaccacttcaatagcactccatctatatttccgtgatgtaactctctatcaagcagacgatatttgaatacttaccgccgaattgtctgatcaaccctaaaactacgatacttcagatattctatcacagggattctcatattttcttctaactt

SEQ ID NO: 23510 - DNA, 456 bp, Oryza sativa
  unsure (1)..(456): unsure at all n locations
agcttgttgttatgtgctgcaagcaaatattatgtttttatgtctgnctctcattccaccatttatttggcatgaacaggacaaatggatggaagtgggtattctacaaacttgataaatgagggtggtcgtacttttgctgcttaaatagctgctgttgctgctcgtactggagtacaagcagaattaaaaattttaacagaagcacacacttttatattttgggaatcgaacttaggccttcttttggaggggggagtttcttcactctctatttcagtttaagaaaccaaaaattaaagtttagggataacatattggtaagntgctgggtatgctacccctctgatttggaggaaanacataataagttttagagaatttccatctatagaagaattcatgtcaggccttgaaaacaaattgatcatatatatcctttgaatactataaatg

SEQ ID NO: 23511 - DNA, 460 bp, Oryza sativa
  unsure (1)..(460): unsure at all n locations
aatcgccttcatctatgtctgattgaacctgncgncgaaacacattgcaatcattaggagaatgatagtgagaatcatgccatttacaataagctcgacgtttcaattcttcttgagatggtatgatatggcctttaggtaatttaatttgtttttcttgtaaaagataatcaaagatcttatcacacttggccacatcaaaactatatntaacctcactttgccgatctttgcgaggagtcggcattagattagagcatacaaaaggcttggttttgttagtccatgaccattcagcaacatacatatcatgatcaccctcatcttcactatcactagccttagagtaatcaatcacattaacattaggctttttctcatagggtctaacacatttctattatccttcacctggctttctgagccagagcccttgcatagtnactaacatcaagaaatg

SEQ ID NO: 23512 - DNA, 497 bp, Oryza sativa
  unsure (1)..(497): unsure at all n locations
tgcaagcttgaaagagtattccttttctctacacagacttgcaaagaaatgatgcttcaaccacaagtacaacaaattgcatttctgcagtccagtagtttatcatatactagcagagaggagtttatgaaaatgtatcanaagggaaggcatcgaacaatgttacagacagacatatgcataacaacaatgaccagaaattcagttgcctggaagaacttttgcttaaatctgcaccagctggaccataagttgttgttcctgtgaagctgccattctttggagatgtgctgcaatggtatgaagacaggattaatgatttggcagagattcaaaaagttgaaggcattctattgtatgtgctaagagaaattntctgtctgtggtgacattacaaagagtactggtgtaactatggtctctaagaaatacaagcgagcacagcagcggcggattataaagagtatttccacaacccacatttcttcctcatggac

SEQ ID NO: 23513 - DNA, 403 bp, Oryza sativa
  unsure (1)..(403): unsure at all n locations
tagaaacatctgtagtgtgttgtgtanggtngctgccattttactcctaagataagagtgttacttgagaggtgaatccattcttgggtttgctagttatcaaaatntccggcttatattcaaatgaacttaatcctaataatggagatcaggaatcagtgctaataatatatttgttagtggtgaaatcacaaagtatttgatgggctagtcatggatacacactctacgccactgaccttccacgatcacatggaagtatggaactctgggcatcacgcgcctctnggaaactgcttgttgagccggntactctctgctgtaactccctggcttctttaacctgaccgatttaacctctctcatcacttattccctgttctgaaatcactgtgctctgcac

SEQ ID NO: 23514 - DNA, 467 bp, Oryza sativa
  unsure (1)..(467): unsure at all n locations
tccctacagtgcagnggagcatagttctgtgctttcttctgtcaatggagcacataataataatattaaccacggtggactttcagctgccagtgaagcacgcagtgtaagctatggcggactttcaccacctgtcagtgaagtaaggagtagaaggtatatggggtattcgccttcaccagccagcaaaccctggagctgcaggttcaggggactctagcctgtcagggagtcgagctagcagaattaagaatgctcaccgcgaacatggattaattaacacccggctatttgcttcctaggctcctagctacgtgcattttttttgctatgtaaagctgataatgaggatttacatattctttctttntttttgacgngatattctntcattttggttatgtcaaacttcttacagaaaataaatgggcatagncatcccctggttcttctcttttctctctctt

SEQ ID NO: 23515 - DNA, 513 bp, Oryza sativa
  unsure (1)..(513): unsure at all n locations
tcttcgctgcacctcatngcccgcgtgccctcttctgtccaacgtatggttgactaccactagcctcctcctcctgggtcccctccacatacctttccacgtgcccctgctggttcccctccgcatccctctccacgtattcttcctcgttcaagtactgcgttggatcctcattcccctcttcttcattccagtactggctgcttccctccgcgaatgtatcgtacaatatctggtcctcatcgcngtcagccatctgttgatacaagaaacatctgctaagtcacgagacatttatgttttaacaatctaagtcatgtatgctaagtgtaaatgtcgtacattagaacactacacaaccttacgtgctaagtctaattacaaatcgtgatataagctaagtctaggtgacgtatattgtacactttagctagtagataattatatactaagtctaantacaaataaactaatcttatattacaactcagataatatacatgctaagactaa

SEQ ID NO: 23516 - DNA, 285 bp, Oryza sativa
agacatatcgagcgcgaatcctgtctggcgcgcacataaataaaagttacaaccccgttctattccacgctagaaactcgagggggagtgttggaatataaagcgaacgctacagatttgagggagtctcgtttgagggaaagtggtggaatataagtgaaatggccaccttttctcttcagcctaagattttgggttgaaccacgcaacagtaaatacgctgagctggtgaaaacttgcgtaaatacatgttatactcagtcaacgccagaaaaaccaaataat

SEQ ID NO: 23517 - DNA, 423 bp, Oryza sativa
  unsure (1)..(423): unsure at all n locations
aanatacaaatatgccacatcatcatccactaactagttgactctttattatccactaacaatctatgcatttagtatcatacaaacatgctatattatctataatttaaaatttattacattgtagagcttctaanatgaaagcatgttaaatcatcattccacataatttacataatatttcggaaaaagtacgaattacctcccccccccgaactatcgcggactgtcgcattaccctcctaaaccacaataccggacattcttcacccccaactatgcaaaccggacgaattacccctctcgatccaatccgaggtggttttgatctacttggcgtacgcgtggcattcctatcagcattctattataaaacaatgtcgactcacctgttatatactttcctctcttccctctgtagat

SEQ ID NO: 23518 - DNA, 495 bp, Oryza sativa
  unsure (1)..(495): unsure at all n locations
agctngaatcaacaatcaaaattcatgatttcatattatttataatgcaacattnttacaagcacataggttgaagaataaacactaaacacatatacctattgcatttatcactctttctcaaataacctttagcacaaaacaaccaagagaatttttaactttttctttttcttgagcatttttgctcatatttttctctttntattccgggtacgtccctgtcatcaagactgtttctagggattcggcacccattattntgctcacatcgaatacgtccttgtcgtcaagactgtttccaaggattcggtatttatttttttctcatatttttattctggttttcacaatgagcaattaaagctatttgaggaataacaagtcaataaagcatatatataaagcatttataaatcanaccatatgctagcatcaacattgcatatntgcttaattcaagtatagaatntaagtgtcatgcattatctccct

SEQ ID NO: 23519 - DNA, 436 bp, Oryza sativa
  unsure (1)..(436): unsure at all n locations
ctcagctgatttattggtgatttagggcgcttttggttacccctacaagtatgatttaccctcttaaaattntaaaccccgaactattaaatctggatgaatcatggcaacaaaaatatcagctcattatgcctacctaccagcctatctcgttattctttttcttccatgacgcaccaacccctccttggtgatgtcctagttctcgacgccccaacctactttcctaggcaatgccctagttctcaacgctccagcctccctccttggtagcgtgaagccatggagggaccttgataatagcatgtgaagttgtggtgtgaggaacggtcaatgtttggcctctagactataccacccgtcaagtttacctcattggtccccgacaatgatgagggatgtgtttatgatggatgggacgtggcatgagacttga

SEQ ID NO: 23520 - DNA, 469 bp, Oryza sativa
  unsure (1)..(469): unsure at all n locations
agcttagcatgcttgctgccatggcttccagcggtggtcggcgagcgagcangcggcggcggcggcagaagaagaaagaaggcaagtcttatcggcaagggaaggctaagcctttcttccaggtctccctctctccatctaaatccgtttttggaggaggaggagggggctatctcgttttagctaatctgttgtgtgtgttggtgatggtttcagttcagtttcagtttcatgtttgtgatcagcgagagtgatggtgtgtcagtggtggtttagatcatgtgttaattagttctgtgggcgtgtctttgtgttggatcttgnggttgggttttcagaacatactatagctgtggtgtgtgtgtgtgtgtgagtgagtgagtgaattaatgagtctctgaacattctggaataataagaatgtaagcagatgatgtatgtgccttggtgctacttatatatgtgctct

SEQ ID NO: 23521 - DNA, 475 bp, Oryza sativa
  unsure (1)..(475): unsure at all n locations
tcagtgacagtagatgcttcctgaaatcaaaattagaggaagcattctaatcttgnatgntatagcaataaaaacaatatagtgggagtgtatgacataccgattctgattcatcgtcaagtaccgtgttcaatgcattggtcttgttagcaatttcagctatcaacatataatgtgatttgcaattagatgaaatggaagaaacatgaaaggacaaattaaacttgaacgatacaaaagcaaaaatgaaattacctaacatatcagcacgaccccatgcttgcacacacataagtgcctccacaagatcaggtttaagctgattacgaattggagttatcaccctcccaccagtactaaatgctgattcagatgctactgttgtaatatggattgcanaatgtcccggcaatctgtctanaagtggngacctaatgcccncaaacttcaccaattgaaatatcaaatcttgtgt

SEQ ID NO: 23522 - DNA, 396 bp, Oryza sativa
  unsure (1)..(396): unsure at all n locations
agcttgagggatgaacaagatattcctcaagtgaatgtacgcatcttaaagncttgaattgctctacagctgagggaatgctcatgcacagtatatatagcagaaagccaacagacaccaagccatattatctgaaagatcaccttgccatccatggcagtaacggcagccgcagcttcctcgcttgatgtgtaagttataaatccatacccttttgactttcctgtgtgcctatcaatgatgatcctagctgaatccaatccaaagaaaacagaaagcattaactactcacccgacatgctttcaagtaaatacaagccataaaaatcagtgtgtgagtcgtatagtaatcagacaagcaaaccttcaagaacatcgccgtagtgagaaaacaca

SEQ ID NO: 23523 - DNA, 337 bp, Oryza sativa
  unsure (1)..(337): unsure at all n locations
tataaaactcagcctacacccaccctgcaaccgcattatgtcatcatcttattttcttagaaatcnggcagcctgatacagcgtttaaaaccaccaagtacgcgtcggcatctggtgagcattcacactcacccaatcgccggaacagattcattgaacctcagtcttgcgaattcttgcaagataagcgatcagaaccacgagaggacctgcataacggggaaagccattggcctccatgttacatagaacttatctgctcgcaggcatactctacggatcttcttgaacataatcgcacatacaatcaaaaccgtgctgacgcgtccaccctgct

SEQ ID NO: 23524 - DNA, 481 bp, Oryza sativa
  unsure (1)..(481): unsure at all n locations
aaagagaagagaaagggtctagagccatcttcaactcttccgaaggctnttggactccgatttctactctattcctattccactagcttgagaacactaaactaaattggagagaatatgagaaatctttgcttgaggtgtgtgagtgaagtgagaagaggagctccttttataggaaggtaatgacggttgtgacagttggaatggtcggtaataccctccagccatcattggggatcaatcccagccgtccatcaaaaccctgcatccatcggcgccacgggaggttcggccgaaccatgggttgggcccacctagcccaaactcagcaggtggcctcctctgttgctcctttgtacagacttgtgaatnttggcccaattcattgtgtcaatcctgagttcttggcccattctcgatatcgtccgattgatttattgtctgattngatgtcaattccccttcactttatactttgtct

SEQ ID NO: 23525 - DNA, 500 bp, Oryza sativa
  unsure (1)..(500): unsure at all n locations
ccttgctcgtnccgagtgaaggacgaaaggaaacaaagacttgattggtgatcaggtagtgctactatgctgcatatctcaaggatacaggtgcaaggtatatgtactctctctcagattaaataatctttggcacggtagcttacccttacccttgattcccacgagacactgcttctccttgccttgggcagttgaaagacagaacatcaatttagagtaccaataacccaatctttcttcaattcttattccggaagttttcaaacgattntgcaaaagaaagccaagttcctcaattgattcactcaatctctgtaagtgtatcaatatgaattcctcaccanatatttgcctttttgaatcctactctaagggtngatatgtggagctcggtagggatcaaacatggcatactngcattcacatttattactgagtcanaaacttcgattagagcagataactaaacatactcaagatcaagttcatgcaaaatt

SEQ ID NO: 23526 - DNA, 459 bp, Oryza sativa
  unsure (1)..(459): unsure at all n locations
agcttctccaaatctatcacagtaataataccagctattttttttggctacataactgccgaccacaaagtacataggaatggctttggtgtttattagttaaatgatgaaaaactacaaaagacatttatgaaacatgcagtttatgacaacagagtagtattgtctggtctcattactcatatgaaggaaaggcttcccatacactgtactttcactctactagtttattgcgttgtagtttttcttatttttcattntattgcctgccaaggtagttggatgcaaccatagttgggcatatttttagcactttagtattntaattntagcgccttttctgttccttggtttcaagttcaaagatatcagctagtcttgccttctgtgcattatgaatgtctatgtactgcactcaacaggagaaccaatgaactgaagtctgatctagacatacct

SEQ ID NO: 23527 - DNA, 429 bp, Oryza sativa
  unsure (1)..(429): unsure at all n locations
ctcagctgcatcatatatgaagcgcgcacttctacaagtntgtggacattgttgttgtgctctaaactcatgaaanatttaatggtgcagagatcatgcttttgagttaatatggggaacctataaaatactcanaaatgaaactagcacacatatatatatatatatatataatgtaaaaaaaaccacatgctactgatccaatcgtttataagttggtacaactaaggctgcaatccgttacaactgtagatcgagtaataacctagcatgattttttttcttaatctaaccattttctttaaaaaaaatccctgtttgtgacgacaanaaataagtgagaagatntctgcacccttcactactgtcctagttaattaaattaagaatatnntcattatatgagtgnngtaaagtatacctttacat

SEQ ID NO: 23528 - DNA, 341 bp, Oryza sativa
  unsure (1)..(341): unsure at all n locations
taaaaatgttatcaatgaccagattagtaatatgccaccaagacaaataaaattaccttaatcaatttgatctcttacaacaanttttacaaacgccattcagtactcagaagtaactctgcagaataatgaatggaagtgtggattaactaagtgcacagcttctaaagtttacctaccaaataactaacatggaggaatcatttagttaatatgcgtaaattatagaaaggattttgtgtagcacagccacacaggaagtgatgctttcaagttgcttttctagaaactattatagctttatcttttctttctagtcattatcagatctcaaagcagca

SEQ ID NO: 23529 - DNA, 522 bp, Oryza sativa
  unsure (1)..(522): unsure at all n locations
gggtggtccaatagaaggatgctaacagtnagcctaaattcatcttattttcccttggaagagatttcaaggtataataacgattactgagtggcacaattgccaactagtatattatgatgcttctcaactgaagattgcaagcatcatcggacacgacgtaagtactgttaccacaatacacgatataagtaagcactgttaccacaatacaatgtatagacaggaaaatagtaagcgcctcatctttagctgctatcgttcatgttgctaatagtttcaagggcttttggaggcaccatagaaaagggatatngaaatgaagcaatgaaactatgaaaagagttaagagtaaaactcagcaattgtacaaatgcactatgaatacatagatgaatcaccatgcttgtttcagacagattttcactcttaaaaaaataacagcctattagtcaagttcttatggctcacaactaagaaatacagtatcttacagcactacaagcttaatctctatagctt

SEQ ID NO: 23530 - DNA, 332 bp, Oryza sativa
  unsure (1)..(332): unsure at all n locations
cccttacccctgatttccacgagacactgccttgggcagntgaaagacagaacaacaattagagcacaaatcacccaatattctgtcaactcttattccggaaagtttcaaataattttgcaaaagaaagccaagtcctcaaatgattcactcagtctcttcaagtgtatcaaatgaattcctcttcaattatttgctttttgattcctactctaagggtttgatatgtggaggtccgtanggatcanacatgacatacttgcattcacatttattactaagtcaaaaacttagactanagcagataactaaacatactcaagatcaagatc

SEQ ID NO: 23531 - DNA, 513 bp, Oryza sativa
  unsure (1)..(513): unsure at all n locations
tctaatcggcatcttgcaattcatatttcagaatgctccaactactgtggttaatgcgatctttgatacatgttttacatctattattcaaatcgttcttgaaagtgatgaccatggagagatgcaggtaaatgcttacatgtggttcaatcattgaagtcataattgatggtacttttgtggacatatacctttaatatggcaattttttgtcaatttagaatgcgacagaatgtttggcagcatttatatcgggtgggcggcaagagttgcttctctggggtggtggacaaggacgtacactgaagatgctactcgatgcagcttcaaggtaacgtcaagactatagatatttgattcatttctgtcatcaaatttagcattatagagtacataagaatcaaatggcttcaatctgtacatcctgacanacttcaccatctgtcaaaaggaatggcataaaaagtaacaacatggcatcaatcnttgtccagagctatgagctcatatatg

SEQ ID NO: 23532 - DNA, 390 bp, Oryza sativa
  unsure (1)..(390): unsure at all n locations
gcagcttctttgcaccctgcagttattagctggcgtattagtagttgatatttggagactgagataaacanaaaaaattaaggtacttatgacaaaccagtgccgtatagcgatgatcttgcacttctgctacgtattgctgtgtatagcaagcccattgaaaagataatttcaagcagaccattaacataagcccattggaattggtatatcggtagactgtggtctttacccttgggcacactgaattcacccaacatcccctgcagaacaaagaccatgtagtaacagtaaactaaattagagcacactttatatgttattaacggtaagaaaacaaatgacgaataccttgactgcttcctgcatgaacaaaatcgtaatcaacat

SEQ ID NO: 23533 - DNA, 332 bp, Oryza sativa
  unsure (1)..(332): unsure at all n locations
tttcatttactcttcnctanacaattaaaccttccacatctcgatgctgcacagttccctcaattctagctagctgaacaaaaaaattagataacctcgttgatagcctaccaccaaccatccaaatttcaccagaaattccgctggtacctacatgattcgattccacccctaaaggatctatcactaatttcaagcacctaaacgggacacaaaaactagcaacagggtggtacataaatctacagcctagacagatggagattgagaggattagataagagagactcacacgcgagacgctcgcgaaccctagagcgggatggatcgat

SEQ ID NO: 23534 - DNA, 453 bp, Oryza sativa
  unsure (1)..(453): unsure at all n locations
ntatatagcgttaccaccataatccgatctcataacttcattatgatttagcattagtgtcttaaatttcttaaaggagatcggaggtcgcttatatgtaaacatagccataanaatcatttgttggctaatatcttaacttcataaaattttcacttaaagctaaacaacgccattaacatctaagagaaagaatatctctatctcatgagacgttccaaactcccctaggtatgtgacataagcgacaatgacacaatttcaatgatgtcttacttccatcattatagaataaatattctcctcattgttatataagcttagttcactaatgacacagcgganattaaaacatcatcaatgtctgattaagtccacaaatggatttcttaagtctgcaccctatatgtgacttggctttccataacaaaacctccaagtcatgttatgtat

SEQ ID NO: 23535 - DNA, 517 bp, Oryza sativa
  unsure (1)..(517): unsure at all n locations
agtcacctgcggcatgcaagcttgtgcacagtgcacagncatatatcagtctattcataacttacagggtaccactaccatctccaaacgtgatggcacatgtagtgtatatcacacgggcacaccaccggccggccctacgtacataacacgtacgcatctctttgtgcaagcgtaccttcgctgatgaaccctccggtgcggacgcgcagcggcggcagctcgcacttctccggcgacggtgacgacgacaggcacgtcacaaaggaagcgacgacctccacgacgacgacgacgcagctgctgcccaggcgtccagtcatttaccggcgcgagatcagagtggtgtgtgggctggtggcgaacaccgcaagccttacctagctaaatctnctcaaacaacaacgcggtagctcgatcgcgcgcaacgacgcgatcggtgaaacgccgtgctgccgcgcgcgcgcgcgcgtcggctgctgtgatcacccgcgcctcctgatggaacgatctcttg

SEQ ID NO: 23536 - DNA, 438 bp, Oryza sativa
  unsure (1)..(438): unsure at all n locations
tactcagcttcgataagggattanggatgggtggtgggtgacccatgggtattctttggctccattctagcctactaaatgaactaaatntcactttagactctctaaaagtgaaacttagttcattctagttgaactaaagtgggtcaagaaatacccgcggcggccacccctaggaggattcttctgcatattggtgtgctggacagcagccccgatggctagcagtagaagggacaacaccggtcaccaggaatactggaatgtggctgtagaagcacgcgcatgctctcctctggcacgggcacacagtgttgcagtcggtctgcccctgctaccacccctccagcatgctgcagaggcgaacgcaagtacggtggatgccangccagtgggctgcttcactatgtagtggcaatccagcacaggatagacata

SEQ ID NO: 23537 - DNA, 363 bp, Oryza sativa
  unsure (1)..(363): unsure at all n locations
cctgccgcatgcaagcttcatttttaaaccacgtacatgttcacataatattcatcgatcgctacaataaacactcaccgtcgttggtacacatatatggctacaacacacacgctnttattgttccttacggtagtatagatactgtagcagtagctctcctctcggttgttagtaccaatatacagaggatctatgcccggaaactggagccgacctatcaatcagtggacttgtggtctcgatcatcatggtcgtttcgtccagaattgaatccccatatatcaatatcgatctctgtcctatccatctctatgtctgtggatatatatatgagtccaatataatctagcctgctcgtgt

SEQ ID NO: 23538 - DNA, 431 bp, Oryza sativa
  unsure (1)..(431): unsure at all n locations
tattggaactcanactgtataatagatcataatgtctagaatttctgagatatatcttttaatttaccgtaacttttacgaaaaaaattactaaagtactttaggacagtgggtgagattcgtgctctcataagggtgttaacagtgcgtcgctcatatttgccgttcctcgcatgccacacagaccaagaacgtgttaagctacatgtttcacnagtgcaagtgtttgtagtgggtctcaccggtaccatctttttcactattgaactctccctctctcctctccttatttgttccccaccaaatgaagccccccnctctcctctctcttttcttncnctagcggaggaaccgaagctgacggcgggagagaagagcgacgacgccgacgctgagcggccctagcggtgctggtgccggcagcggagtga

SEQ ID NO: 23539 - DNA, 429 bp, Oryza sativa
cgccttgtgaacgaccaccggattctcctatcactccggatgggtgacttcacggatgaatccggcctccacaagtctcgccacctcctcgcggatgaaggcttgacgttccggggcctgccgccgcactttctgccggaccggccttgcattcggccgcacggggagacggtgctcaatcacctccctggggaccccgggcatatccgccggtctccatgcgaagacgtcagcgtttgcccgcaggaaggagacgagcgcgtcttcctatttgccatccagaagaccaccgatccgtgtggtcttggatgggccgtcgcccagggcaaccttctttgaccggacctcgtcgcatgtaacaatccgccgcctcggggcggtgggggcggagatgccaagcctctcgtcaccaccctctggcttggacgc

SEQ ID NO: 23540 - DNA, 329 bp, Oryza sativa
cttgtgtaaacactaatcacctatctaatcccatctctcctatcttattatagctagctagctgaccatcgtccgattggtcgagagcccgagaactactcttcgactgcgcgccatggccaccactaccaccagcttcgacccagtcgacgagccggagccggcgccgtacgtactgctcatgccgcacccagcgcgaggccacatgcagccgctgctccacctcgcctcccgtctcgccgtcgatggtctccgcctcaccgtcggcgacacgacctccaccctccacctcctctagccgctcctcgccgagcacccgcgtcggtgag

SEQ ID NO: 23541 - DNA, 510 bp, Oryza sativa
  unsure (1)..(510): unsure at all n locations
atctctaagtcacctgcggctgcagcttgggtaattagcagcagctacctcggttctattatattctaccgacaggggacaggtgaacggcggaaataatagaggtgaagctacagtggaattgaagtgtgtgtggatggatgggacggatgagtgacatgacatgggcacgtcgtcgtacccaacggaaatgtccatccaactcaacgttgcttctaaccgattggtttaggccatgtttagatcctcttgaattttttttcaccgtatcatatcgaatatttcgacacatatataaaatattaaatataaataaaaaaataactaattatataaattgcgtgtaaattgcgagacgaatcgtttaagcctaattgatctatgatctgacaatgtgatgctacagtaaacatttactagtaatggtttaatntgatttaataaattcgtctcacagcttataggcggattctgtaatttggtttggtattagcttatatctaataattc

SEQ ID NO: 23542 - DNA, 398 bp, Oryza sativa
  unsure (1)..(398): unsure at all n locations
tcaagtcctctgaccgccactattacanaatagggttttccatatgatcataatgcattntcgcatgcggatgggcgggccgcttggaagaaaaggccagcacaaggcgcttaagccgaccgcacgcganaaggaaaaatcgcgaagaanaataaaaattccaaaaatcggaaaataccccgctatcggcccgccgccgtactcgtcctccagtcaccgccgtcgntggcctcatcctccagttgtcatcgtcctccagctgccaccgccattgtcctcatcctcctatcgctgccgccgtcgatgtcgtcctcctctcatcgtcgccaccctcgttggaatcctcctctcttcttgccggcggatcacgggtggggagggtggtggccgatagatcg

SEQ ID NO: 23543 - DNA, 452 bp, Oryza sativa
  unsure (1)..(452): unsure at all n locations
gcttctgacagcaccaagtgattacagtttgatttgcttctgaaccaattctgaactttgcagtgcagcatcgacggtgcccttattactagcttataaaaaggaggcacatgatgcattgcaacctagagtccagtccatgaacgatcatatctacctgcactgcattcctctgtgctcgactctcctgtatcttcctttctctgaatctctgattcatctgatgttcattcattcattcgtctgctgctgcactgcactctgatgcagtaactgctgcttattctgatcctgcaatgcttctgctgaattctgcatgtatcagctcaatctgaagagataattacgttggttctggcgtttcatttcctgaagggaatagcaaacaatttctctgaacttcatagtaacatgccactaagtatctttttttntcttttttttttggtctc

SEQ ID NO: 23544 - DNA, 427 bp, Oryza sativa
  unsure (1)..(427): unsure at all n locations
tggttttcanattccctgtagctacgctactcacatcgatcgatcgccggcaggagttaggcgcgtgtacatgagccctgccgtttgcagttttgaccaatattgcgaccgatccatccattcatcgcgcgcgccatgaatgcgtgcgatcgatcgatcgatcggtgcagcgaaagccgtgttccgctcgtcgcgtcctcgcgagcgatcgagcgcgtggtggcgtgcgcgcgcgcgtggacttttgctgcgtcgaggcgagcggtgaacagtacgcgcgccgcgcccgcgcggtcggaggaggtgaggtgatcgacgagctcgcgagctcgccgtgcgcgtgcggcacgcgcgcgcgcactcgtncacgtgacgggcggtcagggcgtggagccagacaacgcatgcgcgcaccacagatctgatc

SEQ ID NO: 23545 - DNA, 350 bp, Oryza sativa
  unsure (1)..(350): unsure at all n locations
acaagcacagcccgctgacctacagaattgtctgactggtggaccgggcgtctgtaattgataataaccgtacctgtgtgcgggcgcctctatctaggagctcggccaagagcttccttcctaaccgccctggatattatacgtgatggtgccttagaaaaacttattccgtctaccctcccctaaaagaacgtgtgcacccgaggggcccttgttgggtgattatttgctagttaaaatataatatgcaatattatccaccatatgtgtgcagcaatagtacacaatantatcatgtaattaaagtactatantcgcaccatgcatgtgatgtaatgagaatatattac

SEQ ID NO: 23546 - DNA, 483 bp, Oryza sativa
  unsure (1)..(483): unsure at all n locations
agacaatgtaagagctctaaacttcatgaactgaatgagattgagtaaggcacgatcaatgtcctcgatcaagtcacataaacaacagaagatgcttacagtacagacaccacggcacggctagcttgatcgtcaccgaagaanagatccacccaatgatttgtcacagcataagaatccttcaatctttccatcagcatcgtcgtaatagttagctttntcaaaccattccttttgactagggtatctacccgtattctctctttnttctacataaatgattaatgatgtatgcatatgtaagcactgcacgtgatttttcctgaaacaatcaacggatagaaaagaaaaacatgtgatacaaatctcctcattccattgcatttcatggcattctatcttcagaataatctgaacactgagcaacaaggngacgtttcagtacttgattcttactctcttgcagatatatatgtcatactg

SEQ ID NO: 23547 - DNA, 269 bp, Oryza sativa
  unsure (1)..(269): unsure at all n locations
tgtgtccagatctgaanatccaagcctgagaactactggacctgggtatgacctcaagacatttgtatttctcctcttggctttatatgtgcacatccttcattatcagcccggcctttntgcttctctctacatgggtacaactgttatcanactttactatattggttctgcttttcccacagntantaatggtatttatacacggattagattctgaaaaccatnggcatatagatagaaatgaagagccacaagtattcctttgc

SEQ ID NO: 23548 - DNA, 242 bp, Oryza sativa
  unsure (1)..(242): unsure at all n locations
gctggntacttactctacttacctcttactctgaggtnctaactttattcatatttatcgcataaactcgggctattaattggataaaggtcttaactccctcctttcacttggtcttagatgccgcgttacaagcctgagtacctgtttggtgttgagggttttggccaagaagtgcgtatgatgtcctttgtcattggattccggactgcccctttntatacccagattcctcatgatcg

SEQ ID NO: 23549 - DNA, 398 bp, Oryza sativa
  unsure (1)..(398): unsure at all n locations
gcttaagtagcttctattggcagcacttagattattttgttctcacctaaacaatgtatatcaatgaccagttagtcatatgcggcaaagacaaataaaattacctaaatcaatttgatcttttacacacaattttactaacgcaattcagtactcagaagtaactttgcagatttatgaatggaagtgtggatcaattaatgtgcacgaggttctaanaggttacctcaccaaatagctaacatggaggaatcatttagtaatatgcgccaattatataaaggattttgtgtagcacagccacacacgaagtgatgctttcaagctgctcttctagaaactattatagctttatcttttctttctagtcattatcagatctganagcagcagactat

SEQ ID NO: 23550 - DNA, 468 bp, Oryza sativa
actcagctggtggccaatgaagatgctaacagtagcctaatcatttatttctcttgtagagagtcaaggataaaacgatactgatggccaattgccactagtatattatgatgctttaactgaagattgcagcatcatccgacacgacgtaagtactgctaccacaatacacgatataagtaagcactgttaccacaatacaatgtatagacaggaaaatagtcagcgcctcatctttagctgctatcgatcatgttggtaatagtttcaagggcttctggaggcaccatacataagggatatgaaattgaagcaatgaaactatgaaaagagttaagagtaagactcagctattgtacaaatgcactaggaatacacagatgaatcaccatgcttgttcagaacagtatttcactctataaagataacagcctatagtcaagtcttatgctccaaactaagaaatac

SEQ ID NO: 23551 - DNA, 414 bp, Oryza sativa
  unsure (1)..(414): unsure at all n locations
ccacaccggctaaaaaaatgcatatgccgctacctactggatatatttatattggcttatagggtgcatgatatttttgggaggttctagacttatattattcttaaatatctttgaagagggttctaaagagcatgtctagcacactgaggagtatatcttagctgtgttatggattaatagagtacactaacagatatgggtaaaagtacatataggtctctaatgagttttggattgttgacgacaagaccaattaatggattgataggtttattgaggataagtgaatgtattactccctattgtgattctgataatgtataacgacatctacaaatgaaagcaacattaanaattaatatcgtattgttcgtcatgctcggattagccgtcgagttacatttataggtg

SEQ ID NO: 23552 - DNA, 325 bp, Oryza sativa
  unsure (1)..(325): unsure at all n locations
ttgagatgtggatattgttctcgtgctgatacaaagtgattggttatgaccaagaaacaacacatgaccatccaggttattgatctctacatgtgttttccccatagtatcaacactatatattttaatttccctagtataccgcacaaatgttgcatggtcagcaggcaagtcagcctcgtaatcctcctcaatgtcctcaactgacctccaaactagcagaagaccaccccatggagcttgcacaatgtacctactgtaagacaaacttncaattatcatcttcatcgtgatcgtggggccactgagatcaagtgtatggatt

SEQ ID NO: 23553 - DNA, 445 bp, Oryza sativa
  unsure (1)..(445): unsure at all n locations
gcaagcttgttcagcaaccaagcccaactagaaatataagatgncttttatacgaacttgnactttatacgaacggaaattagttagggtaagtagtgaactcaccagttcctgatagacgacggcatcacttttgttctcaaatgtgacagagccgtccgggttgaccttaccccttgcccgcgcccagttgcgagctctttgttcacggatggctgaaaacggtgcagggacattcgctgctgcagcggctgcatcttcttgtgcccatattgcctccttgccgatgtaccctgcggtgcccagccgatgcgggtgctcattccgctgttgcagtaagcgatgtgcctcgcttgattccctacactcttgggtggtcttgagagagcagaattcctcccacaccgcttctgctatttgagggtattcatcgaacggcgtatga

SEQ ID NO: 23554 - DNA, 472 bp, Oryza sativa
  unsure (1)..(472): unsure at all n locations
ctcagctcgcagcctagtgtgctaaganagagcccaanggtatattaatctattgtatttcgggaaaggcctttctcctagccgttcgtaccacgtggggtcacgtacttagcaagccaaaagcatgaagagtaagaatcagaagagaatagcgccgatgcgaactgaagaagaagtacgtaagatggctattagcagcaccgaatggcctaccgcatggataactattcctagacgtcaaagaggagataccttccgaggtgcacgacaggtgacccagcaccttctaagccatggtggcagagtatctgattatgaacggtcagatcaagtctcctcggatgatgaagatgagtctccccgacatctccgtgacgaagagatggaatcaaaggcatgcactcgttgtggagaaatggacacatcgctagcaggtgtctcacactctgccctcatgtgaagaagacattca

SEQ ID NO: 23555 - DNA, 430 bp, Oryza sativa
  unsure (1)..(430): unsure at all n locations
acagttgacaatggttatctattattgtattgccattgtaatgtccacatggtacgcgctccgtcgcanaatataataacttatagggttcaaagtttatctcaagtagttgtaaaatacatattntatcactaaactatccatactattcttattgtcactcgtctttattatagtcctagcttatacctcatctatcacttttcttaatagccatgtcttaatagccatgtcaagaagtaaaacttggttatttagggtggaggaagtaatgcaaaagagtcaaaaacaaaaacaagaactaagatacaaatggctcctgtgggtggatgtctatccggactgttaaatagaatntcccacttcccagctagtaccgcgttttgtgtttgtggtggggccctttttggtgntacttttggggtttcat

SEQ ID NO: 23556 - DNA, 379 bp, Oryza sativa
  unsure (1)..(379): unsure at all n locations
gcggcaccgcgcgaagnggcaacgcgtgtccagctgtctactgcgcgagccgcgncngtcatgattttcgttggagctgagccaatgcctatcacaacgagtccaagccgcaggcccgcaccaagtcaaccgtcgctctcagctgctatggcgacaacggtggcggctgctgctgctgctgcttctaaaacggcgacggtgctactgaagagccctgctgctctcctcggaattgagtccctctacagcgggcgacggcgcgttggtgcaaggccgcgaggcggcagccgacaggcatggcagatagcggagcgccatagcggccgcgcgagccgcgagcagcangccaacggcagcgaggcgctgcgggagcacgtga

SEQ ID NO: 23557 - DNA, 446 bp, Oryza sativa
  unsure (1)..(446): unsure at all n locations
agctntaacaaattaatgcatcanatcgatgccctatttttaatcaaaaatgagggcaactgcaaactatctatgctaaaaagggtacantttgagcactaaagatgacaaatgcataccctgcntanaaatatctgctatttgtgaatattatactttacattaggaatattatactttacattactgaaatcactttttcctggtttagatggaattttctgcttattctctgctgaagaattttgcttttttgggtgtcaatatcactcacatattctcaatattgacgtacacttgattggcgaanaagatatattctgcatcgttgaaattgtgaagtgatgtgctcatttcacaatatcaatatatgaattctgagaattattcaaagaaaaccatgagacagtaatacccacacatttttgcaatccaacaggaacact

SEQ ID NO: 23558 - DNA, 463 bp, Oryza sativa
  unsure (1)..(463): unsure at all n locations
tcanatggtgccatctgtagactggcctgggagctgttgttgtattataattccgcatatggcaagctnttgtcccaagctccaccaaaatcaagagcgcaggctctcaacatatcctccaagatttgattgactcgctcggtctgaccatcagtttgcgggtgataggccgtgctgaagtttaaacgggtccccaattcttcctgaagtttctgccaaaactttgaggtgaactgactacctcggtcggatactatcttcctgggtaccccatgcaaacacatgatccttgcgaggtacaattctgccaatctctntcccgtataggtggtatgtactggtataaagtgagccaccttggtgagtcgatccacgactacccagattgaatcatgtcccgatgatgtccggngcagtcctggtataaagtccattccaatctccttccatttccattccggga

SEQ ID NO: 23559 - DNA, 467 bp, Oryza sativa
  unsure (1)..(467): unsure at all n locations
tgttnggtgagcattggccaacctaacanactaaccatgagaccatatatatagagagacatatgtgttatgtttgtatatcgtaaagttgtattttgtatggtctgcttagtatcacattnttgctggttttatggctttatacctttagataaagtgggatttggttttttttggctaccatgtactctcctaactgaattccatggattctcatgatnttgggcaaaattttgttcacatntattttgaattccgaatccggtgaaaagcctgaatattcaagaaggggataattaataggaaaaagtccaaattacctcatgaactatngcggtcgatcaaattaccccccgacaaatagcagacatttttcactgtgaactattcanatcggacagataaccacttcagcactgttctatgcgattttggcccaagctggtacacatggcgccgacgtggca

SEQ ID NO: 23560 - DNA, 487 bp, Oryza sativa
  unsure (1)..(487): unsure at all n locations
agcttncagttcaagttccgctnntgtnggatatccttatatccatatcaggcgagggatttactttgttagtttccgctgctagagtaagttcaaccccgcggagtggagatctttttttcaagactgaagtgaaagttgggaatgaatagtatcttcaatagtgaagtccagttgttatagttcctaaaagtaaaccattggctggctcacgtactggcctggctgcttagctttcttaaacacagaattcctggtagatcgattggctttcttatccttactcagctgctcttcaagtgcttttaccacagcaggtatttatgccagtaaagacaaatccaaatcttacttatgaattgaaaagggcagatactagccaagttctccttctgtaacagctcagtcttacaatctatgatatcaattggcattgcagctctttgttatgctaagtattcttcaatgcaagttggtgatatcactc

SEQ ID NO: 23561 - DNA, 482 bp, Oryza sativa
  unsure (1)..(482): unsure at all n locations
tatagccagagggaggatagcgtaagcagactagtgaagagaaagctgagcagaattcctcctcacgagatcgacttgtctacttacgagaatatgcatttcgaaatgaanagctatccccagaaaacaaagaaaacgaataagggcgtagcgaaggcgcgtagcgatgataatgttaacaatcttctggatgagctcattgctcggactcgcatatacttgntctatgctctacaggctaatctgagtaaagaggaggcgcgaagcgtgagatggacgagagaacacacacgatcggcacatagccttcanagtcgtttttttattggtagacaccgagaagggagcccttgatcctagatcagtaagagaaagacgtaatgaaccggacagagactcccttgctttattcagtcatgacatggagcttcggccaatcaagcctaggtgcggaaatanagtanatgaattctattcaagca

SEQ ID NO: 23562 - DNA, 459 bp, Oryza sativa
  unsure (1)..(459): unsure at all n locations
agcttatanactaagaatagattagttaactaaaatactcattntatatatcactacctagatgaggtaagttctggacttaaacctctaaagccatgaacctatataacactatacacctataacaccttataacttgtaaaatatataaagaattcatattaactccaaaaattgtgaaaccaaatgtgttagtcttagaaaacacatatcttcaccccagcaaacataaacttaataagaatcaacttacaacagcatttcacaatagtacctaagtaaattctatactataccgaacaaacttctaaaattcataactcccaaataaaaagagataaaatagaaattctttcatctaaattcatcttagaccagtacctatccactttgcacaaatcattcattttagagtattttggagttttccatatttcggttttaattgataacatgcct

SEQ ID NO: 23563 - DNA, 432 bp, Oryza sativa
  unsure (1)..(432): unsure at all n locations
taagcctagtatntcttatgaccatagtataatccgcttacgcacggaatacatttgtagcacttcaccttcgggtgaccccaaaaggaaatcaaactcaggaatgtgtctaatctgcctaaggctaagacgatctaaggacaacaattataggtaggctggctaggctagagaagaactttctatgtgttttattatctaaactaagtaaaggtaatttcctatcagtagctntggacaccgacccctgctggtctgccaacgtggttccggctataactctatgatgtatctgaacgtggaggattactangacgggattcagggctgtcaccacctgtcgtctaccttcgacanatcggtgggatgcacaacanacaaaggtaatctctaacctagacactancgttaaagtattaattactccctccg

SEQ ID NO: 23564 - DNA, 482 bp, Oryza sativa
  unsure (1)..(482): unsure at all n locations
agctngccacgcnctaaggtgccaccanaggagttgtttcttgaccagcttactgccggtcacgagagcccatcaagttgccgctcatcaggtccaaccctgtattttcctttccagcaaccattaggctacagtaatgaatgtggcactggggatggtgcgagtatgaattcactctggttcaaccagaatgatttcaactgcagcacaatctccaccgtgatgccaccagtttcaccatcagccctctcaacatcaatggggctgaatcttcccccagaaaatcctcgtcacggaggcactggcattggcaacaccccgttctactgggatggttccaatcctagcagcagcggcagtactgggagcagcggaagcaacagtatgggattcgagccacagagcacaacctcaattttggagaacagtgtattcccatggacagatatctgacaagagaaagataccagagttcacttagt

SEQ ID NO: 23565 - DNA, 423 bp, Oryza sativa
  unsure (1)..(423): unsure at all n locations
atcctctgagtcacctgaggctgcagcttccatgacgccggagaagtcccggccacgggtattttcgtntccaaatacaccaaactaacccagcagaagaacacgaaccgaatcaggcatctgcgtcgagcggagggagggattacctgtacatgtagatatcgcggttgctggcgagcggcttccggcagaggaagcaggcctccaggaagtgcccgtacggcagcagcccacccgctccatctcctcctccttcttcacgccagccacccgcgccccccaccaccagcacgtnctccacgccggagctgaccagccgagtncacgccgnncgcgacgcgccgncaccgncgatggccagcgtgatctcccctcggctcccgctcccgctgccgctctcgctcccggactccatcggagggg

SEQ ID NO: 23566 - DNA, 507 bp, Oryza sativa
  unsure (1)..(507): unsure at all n locations
actcagctnatatagctgtcccgctgactntntaatatagtcatggtgctgtttgggttntaaagcaattgattggttacaatatcgntgctttttgccacgtaagtgtgcatatttattgaccaatattatggcttaagctgattatatattgtggtcattnttcaggcggttggtaaatcctttatgagtttatntactcggatnttataccacatatgccgtatatttccaggtgtggtggaaccatgtgtcttctanggacttaagcacatctgttaaagcagtgtgcgcatggcgtatgcccaatactttgganaattctttattcacaacatacaagcttttttatagcttgttngctatngtgaatttcaataatgtagccaactntanggtacactcatcatantttacanagcagtcggtatatcactcggatcatgtattcanggattacaccgcatatgctacatataatatcaagtccttggntaactatatatc

SEQ ID NO: 23567 - DNA, 386 bp, Oryza sativa
  unsure (1)..(386): unsure at all n locations
taatgataccgaccactatagcgaataggcaaataaaaagatagtaataataatgccaaacaattccagctccggaagaaggaagaacgcggcggtgctcttgctcacaaatcactctcaaggccccggcttaaacgccgtcaaaccatgccgtgacgatctttcccaccggagcgtgggccccgccgcctcctggccccacacccaatcctcgngccaaccagccccacaaaggcccagtccgcagcgacccagcaaaggacgcggccacgtggacggaggcgatctccgctgcggnggtggatcctcggccaactgcgggagcgcgcggctatagatttcgtcggatctctggcggagcgggccccacccncacacccttccca

SEQ ID NO: 23568 - DNA, 391 bp, Oryza sativa
atatatttcctgccgaaaggatccctgatcccactgataacgagtaggcccaaacaattcaattggggtggttgctgacccataccacatagttcccgcgactacgaaagctgcaaaaaaaacagcagcgatactactggaaaggacaggttcaatattgcccatacgtaatcctttgtatagacgttgaggtggaccgacactaagatggaatatgcccgctaatatgcccaatgtacccgcagcaatatgatgagaagctattcctcccggaacaaaaggatcaaaaccttctgcaccccacgccggatttacagcttgtacttttccagttagtccataaggatcagacacccatattccaagaccatacacaacccgtacatgaaat

SEQ ID NO: 23569 - DNA, 466 bp, Oryza sativa
gatgatgtagtcgtcaagaccaagcttaagtatgtatctgttgcggatttagaagaaacttttacaagcattcgtgctttcaagatgaaactaaacccggagaagtgcatcttctgagtaccgtcagggaagttgctcggatttatggtatctcaaagaggcatacaggccaacccggagaaaatcaacgccatcctcaacatgaaaccgccaagctcccaaaaagacgtccaaaagctgactggttgcatggcggcactcagccggttcgtctcacgactcggcgagtgggggatgcccttcttcaagctgatgaagaagagtgacaatttccagtggggacccgaagcacaaaaagcctttgaagacttcaagaaacttctcaccactccaccagttttggcctcgccacgtacacaagagccgctacttgtatatgtgtcggcaacctcccaggttgtgagta

SEQ ID NO: 23570 - DNA, 489 bp, Oryza sativa
  unsure (1)..(489): unsure at all n locations
gcagaatcacatttactgaanagaactgttagctctgatgataaccgnacagaaggccgcttaccatcacaggcctcagagcctggtgctccagctgcagtttctagcagacagattgtttgctcaattagtgaaacgatgggattcccctcagaattgtaactgcatcctgccgttggtgaaatgctacagtccacataatttccatctttatcagcacagaagattcttattatttcctgcacttcagacttttcgttgtctgtcaggtganatctatctggagaaagctcagactggagagcacggaacaacgaattctgcaattntgaatcagttccagatagagagtaattggcatgagtaatgcaccaggatgcataagaatgccatgctttacccatactgngacaaagttgccagcttgtctttcgagcaattcctatgatttcttgngaaaccacatgagaattcgatgcagaaactgat

SEQ ID NO: 23571 - DNA, 408 bp, Oryza sativa
  unsure (1)..(408): unsure at all n locations
gtgtcatgctctgcctttgttgtggtaacgtatctatgcactcagtacttttnttttccttccatatacggagagagcataattcccggtttgctacctaaagtcggcatggaatttacaaatcctggatgaagcttgggcattttggctctgctacagtgggcaaaaaggctgaggtcagaataaggtattcaaacaaaaggccatccgatggcaacgttacatcatgtatatttgtgtgtgcaaacgagactcatagattaccggacaaaagggatcatttaacaaaatttcctctagctgaaactataattggttgtcaagttcacatgactattaaaatggacagaaatgagggcaattatagtctctgatttggactggaacacaatcacaaacaggagtctg

SEQ ID NO: 23572 - DNA, 359 bp, Oryza sativa
  unsure (1)..(359): unsure at all n locations
acacaagacaccagctaccanactattcactgcagccaccactgaatgttttgtgaaagaagcactcgagaagagaagtagttgtggctataataacaggaaatattaaggagtaggtcacgataggcctatgcaggaaatgctgttgctggatcatgatgaatcatcgaatctcgagattgggggaaaatgggaggagaaactgaggggaggaattgaattgcggagaaaaaaaatgagaaagttgatgagccgacgaagtgagtaaaagaaaatcatataaactatactccaataaaatcacatacactgcgagagagagaacaaaacggtgaacaactgagagagggaaaatacat

SEQ ID NO: 23573 - DNA, 451 bp, Oryza sativa
  unsure (1)..(451): unsure at all n locations
agcttgttattacgttgtgggttagatgaatgcgtataatgctaaagaatgagggttttatgtgggcttaacaaagaaattcaggacatgcttgattgtcaaagatatacatctctttctcatttgttacaacttgcttgcaatgctgaaagtaaaatagaggaggatatgaaaaagaaacacgctatgtctttgcctccaattactaactatttgcaggaagtgcgtaatcacgaaaaggaggagagagacatgaaagagccaccaattccattgttcacactcaagttcgagacacctccatcatctaaagaggacatccaaggtaaagtaaatggtactgaaattaatcaaggtgagtgcattgttaacgaagtaaatntgtccacttttcatgcaaaagtagagcaaccgttagtggaaccaaatgctggaattcctttgtcacaag

SEQ ID NO: 23574 - DNA, 497 bp, Oryza sativa
  unsure (1)..(497): unsure at all n locations
ntagaatggactacctctgctgnnttgctatagacttaaactatctatctaatctataattgagaattaagttagaatgaaactaacttatatgattgaactcccagcatcgataagaaggactctgaanaaaaggggttgaagcaagggtgagtacaacgtactcagcaagctattatatcaaatatgaatgtatgaaatattatctgagtggagctaggtttaattgcagaaagctgagaaagtggaaggagaaagcttgtaatggtttaaatgcaacagtatttaataaaatttcgaattaagtttctatccaagatgccatagtgagtccatatgcccgataactgtaacagccctaggttcataaccaggtatttagaagtgtattngtgtcctttagatttatattactatgttgcaattgacatangcatacaaaataacttaatcgtaaaatgaaccactttattgaacataactgacagagtgacatg

SEQ ID NO: 23575 - DNA, 329 bp, Oryza sativa
  unsure (1)..(329): unsure at all n locations
ctccggatggatgacctcgcggatgaatccggcctccagaagtcgcgccacctcctcgcggatgaaggcttgacgttccggggcctgccgccgtactttctgccggaccggcattgcgcccgaccgcacggcgagacggtgctcaatcacctccctggggaccccgggcatatccgncggtctccatgcgaagacgtcagcgtttgcccgcaggaaagagacgagcgcgtcttcctatttgccgtccagaagaccaccgatccgtgtggtcttggacgggccgtcgcccagggcaacctccttaaccgggacctcgtcgcatgtgacta

SEQ ID NO: 23576 - DNA, 471 bp, Oryza sativa
  unsure (1)..(471): unsure at all n locations
tatgttgatgatgtagtcgtcaagaccaagcagaatgatgacctgattgcggatttagaagaaactnttagaagcattcgtgctttcaagatgaaactaaacccggaaaagtgcatcttcggagtaccgtcagggaagttgctcggatttatggtatctcaaagaggcatacaggccaacccagagaaaatcaacgccatcctcaatatgaaaccgccaagctccgaanaagacgtccaaaagctgactggttccatggctgcgctcagccggttcgtctcacgactcggcgaacggnggatgcccttcttcaagctgctgaagaagactgacaatttccagtggggacccgaagcacagaaagcctttgaagacttcaagagacttctcaccactccaccagttntggcctcgccacatccgcaagagccgctactattatatgtgtcgggcgacctccaggtgtgagta

SEQ ID NO: 23577 - DNA, 476 bp, Oryza sativa
  unsure (1)..(476): unsure at all n locations
agcttgcgcagggcgcnctaaccctagctactctcttctcataaataccgacggcccccgccccctttaccccttttttttcaaagccgccgccatctccaccgtgagcagccgccgccgggagccgcgccgttatcgtcacccgtcttctaccgcaccgcagccgctggtaaagccctgaggccgagcctctttttcttccgcgccgtttttctctctcctcaactccggtgtccgccgctcgtcattgatgggtcatctccaattcgtcccggagctcggtgctgcgccaccggattcgcctccgcctcctcttgccgacgccgctgctcgtcactgcagctgcgcgccgtcgccggagaacgccgccgacgtcgctgtgccggagtcgccatgccgtcatggccgggcacgcncaggcctgtggtggagcagctgcttcttggtcctcttcttgtgacactgacgtgtgggac

SEQ ID NO: 23578 - DNA, 358 bp, Oryza sativa
  unsure (1)..(358): unsure at all n locations
agctcttagggtanganatatactatagtattctacttatatgttcacgatatacggagatatcatacatctaacagtatacgagaaggtatcatttgagatactaatgtttttctatgacatgttacgttgttgtaatatactcctcatgggtatagctggctaaacatgattcaatatcttgtgtgtactccctccctccgtttcataaacatgattcaatttttcggatggagggtgcacttcccgtggacaagaataaaccctcacaggggacgtacattcacttttatgtacaggctggatgcgcttgctgtgcacacgcatgcatgccagtcacttcagcttgctggcacat

SEQ ID NO: 23579 - DNA, 484 bp, Oryza sativa
  unsure (1)..(484): unsure at all n locations
gtaagtgcacatcttcatcgtatatctttatgtctggaagatattcggaggtatcttcttcctcagccattttgtttccaggaggggtgatatatatccttggagcatccccaagtagatgaggcccaagcatgagacgttgcacctcattatttcttacgcagtattgttcaaacgaagtatatgcaagctgaaatgcatcccatgcatggctgcatgagctacaaacaggaatacacaattattggataaatacacaaaacttaatggcttgaaatatattcaacaaatgcaagatggacatgagatacctcggaacaactgacatcaaggaatggcgaanatgagatgctgcanacgatgataatgaatatctccaatacattatatatgaaatcccctagcaatgaaagagtgtgaannatacaaatatganattagaaataagattccaaagtaataacagagcacgaattgggtgttt

SEQ ID NO: 23580 - DNA, 469 bp, Oryza sativa
  unsure (1)..(469): unsure at all n locations
agctgcaaaccttaacataggctatcttttttgtgcacttacttgagactagttgatttaggttttgaatagtgcaaaaccattntgatttacgcttccgcatacaaaattcggttttagccaaaagttttaaaaccgcctattcaccccccccccctctagtcggcctccttgatcctacagccaccccttttagttttgccgaaatattgtttcaacaagaactacgaggaagccgagataatgtttcgacaagaactacgaggaagttaagtttccaacaggtccacatctgataataaagagactctcaaggtttgctacctcaacttcttatctcttgaaggttattgatactgaagtgctagctgatagaatgttctatatccaaacacttgctaataccattgtggcttcggttcttttggaggctatcctagctaagctcagctcatttgcaatggacatg

SEQ ID NO: 23581 - DNA, 317 bp, Oryza sativa
  unsure (1)..(317): unsure at all n locations
acctcatcaagcgcaagtccatgactggatctnttcgcctagcgacactcgaaggcgaggagttcgaccattcctggaacgccgcctncctcaagcgcttctatgtctagaatgggtggcacccaaatcgccaacttgtaaaaatgtacatactatcatgtaagcccttcggcactatgtaagcctttcggcaaagaanaataaagaataagatgaatgagagaaaaagaaaacaaactggatgtacggctaatattcaccatggaggcccgacacagtataaaatctctggtgtctccgccttcttcttacttttc

SEQ ID NO: 23582 - DNA, 374 bp, Oryza sativa
  unsure (1)..(374): unsure at all n locations
aagtgccgggctgctgtccaactcctattgattcaagtatgcactattccttcacagaaccgttgtttgataaactagttcttaattgatctttttctggaagcatatttcttcatcaccctatgatctcctgattcttttgtatcaaatctccctcctggcgatatggatgatttctctagtcactgtacgaacgaatttcttcttcagaaacaacagaactttgatggagaactatttatcaatcctatgaatatctatcaacttattttgtttcaagagtgacatactggaactctcaagtgttattctaanttcacttggttatacgaattattactacacctccactataggggcttagtttcctagca

SEQ ID NO: 23583 - DNA, 458 bp, Oryza sativa
gacctataaaactcagcttcagagagccttcgtcgccatggcctttatgtgagccttggttgtcgggtcctcagcctcgcgcgatccacgaccgctcgagccgatgggggtcagctggtgcctgcagccgggtggaaccgtggcttcgttcgccgtggtcttggcagccatggcagattgcaccaccgattgcatctcggtctttcctgcttgctgctggctacccggatattccgacgagctcggcggttcattggcaggagaaccagagccaccttgatgcacgctgagcgtcttggcaagcacaacggagtgataggatgtcatgttcatgtttctcgagccggtccaggcaacatagtatctactgtgctcctgaatggttccagcggcgaggaggtcgacgaggtgacgcacggcgttggtctgctcgagcatgtcctggcatatcttgatgt

SEQ ID NO: 23584 - DNA, 342 bp, Oryza sativa
  unsure (1)..(342): unsure at all n locations
agcttgctgtggaaaggaagggtgcgggtggacctctgtgtaaatggaatgggccaccgcacgggcagacgcggcctatntattctcggcctgtctactttgcctgaggcccacgaaaacgtggcctgcttggtttgcttgcggcccacgagaagatggcccgttgtctttcccgcgctgcggcggcctccgcgaattcatcacactactccacgccctaattcgccgccgccgcttactcacctcctcgcctgtcgcctctcggtgcgagttctactcaccggcgccggcgacggcgacgaccctggttggcggttgaatcgtcgtcctcggcgtgtgatg

SEQ ID NO: 23585 - DNA, 236 bp, Oryza sativa
  unsure (1)..(236): unsure at all n locations
actcactggcaccagagtctacatacattgagaaagatcatagtcccgttctgcttctgaccacatgtgtactactaatttttttatgagaacatatatcttttttgggatanggcttcagttcatgattttctttcttatggatgctacacacagtggtgggaattgcatcagtaatttgactgtgtggtatgctggctaacttctgtggtgcacatggaggacattagcattct

SEQ ID NO: 23586 - DNA, 359 bp, Oryza sativa
  unsure (1)..(359): unsure at all n locations
tagacaatctctgggtgattccttgntcaatttcccgttctcttattgcagtcagcatacgagcaatctgatgcgaagatgacaacccaagtcaatgctaaatttagatagtataaagctgctattgaagccagatgagcagggtgagaaaaacaacatgagaaaaaaatctgattatcttctcctataaggccagaagcattgatcgaggcagatataagtatgcattactctgctgtaactattttgcctgtgctgtccctgagcagaggtggagacctgaactccaaagcacgtgataattcataacaattgacttatcagaagccctcaagaagaacacggtatcacataactga

SEQ ID NO: 23587 - DNA, 433 bp, Oryza sativa
  unsure (1)..(433): unsure at all n locations
attaacgtggaaatcccataattttactacacaccactcgtctctagggataagtcaatttcatctaactatctctctctncttcctagatatcttacgaatataagataaagcgactatncctatctactattaacgtcgagagttatgtggggtaattgcgtggatcaagattgaattaaantntgagttgattaaatgtggccaacctataatagctgtaaatccgcacagcctagccctgcagacccacttattacacatagcaatctacttatactnttgtgctcgttcatgtaaaagggtaactcacaagttgatggttagagcgacaaggtttataagttggtttactcttgctaactataagatagaccaataagtgtacatgcactataggcccatctaattggccagaggtacacaatagaca

SEQ ID NO: 23588 - DNA, 483 bp, Oryza sativa
  unsure (1)..(483): unsure at all n locations
tactcagcttgtgcatgtttagcttagattcgcacctgcgctcctccacttgggtttcctatgctcngccacctctagcagtaccatcatgttgcctcttagaaatcggaatagtctgatgaggatatgaccatggctactttatgtattcattaattaaaggtgcatattttctctgtgagatttatgtngtatatatttgaacaagcgttactacactatgagntttgtgtcttctcatttacagaggttcttggttgggtgaagggaaagagaccaaacacaagcaatgcatggattatcaaataagttgattaggtactgttgacgcgaaaaatacacactggcctgggagatctgcttagctccagtgaaggaccanaggttgatgagatgcggacatgccacgcagtttaatcctactactgacaagatatacaaatagcagatcaatgagtcgatcggctgacanactgattgagt

SEQ ID NO: 23589 - DNA, 424 bp, Oryza sativa
  unsure (1)..(424): unsure at all n locations
tattggcatgcgagggttccctgaaccgactagttaattagccacggtgttccattccaccttgtgggtgcactttgattatggtcgatgagtttcccacaggaatcggtccttatatacaaataccggacagggccacataggcacaacctcccgcatcgcgaggtttcacaactttattgttatgttcgaacacaccgacaccacatgctcggttntgaaggcttcacaaacncatttcccaagttttcgacaatcaacggtgtatgtgggatattaggtatacgcgctcagagagcacggataccgaagtaccacaagggtggagcgactaggaatcagggtagtacagcctacacgaatattgcgactactgggtaggcccgctgtttggcaccaaaccgacgctagcaagttagtatgt

SEQ ID NO: 23590 - DNA, 493 bp, Oryza sativa
  unsure (1)..(493): unsure at all n locations
cttcaacaccatgttnagcccgttgagtaactttggagagattagattgatatataaatatagcatacgccttgctattgatgggtatatcgtctacagttgaaagagatagaaccccttgaaacaaaggaaaaaagattctaagggatttgtgtactacggaaaataatcctatgaaaccctttaaaataaatgaatgactcctaccaatttcattataactcctatataatgagctatcttagaataattttgaagtaaacaggtatgggtctcacctcatattttcttcttcctatatctgggcacccttaatggattactccttggattctaaagtgcgcccaggcattacataagttagtcgatgcacgttgggtttcactagtccccactcaattagtagccatgtgagagagggatgagaacattttgtacttttacttaagataggtcttatcatatgatatggatagtcattaagatactatat

SEQ ID NO: 23591 - DNA, 243 bp, Oryza sativa
tgacgcgtggagcttactctagtaaaacaaagaatggtgtctttatttatatgcccattttacagcgcttggtgagaaccacctgagacttacctatgactctattttgtgtgggtagaacctttagcaccaaattaccctcagaagctgaagagttattatagaatagacctggagacgaacttgctctttttgctataaaagtctcaaccctgtcatcaagactgtgtctagggattcggg

SEQ ID NO: 23592 - DNA, 414 bp, Oryza sativa
  unsure (1)..(414): unsure at all n locations
gacagctgcagactgcaggagtgcatggagatggtgaagattattgacatgatccgtgatggcttcttggacatggatgacttcaaggtcatgatgactcgctcaaggaagaagccatgagcctcctggaggctggagctacctgacgtagatgagagccctagatattcatgcgcatgcatatgtgaattgtgatagtagggaataagttgagcacgggctagaacttaacccttcacctagcttatgagaggttgcgagctaatgtgaaataacgagatgacagctactgtggtgtatcatggcgtgtaataaacatgtaaggcgaatcgtgggagactttccatgcatgtncttgcgggagtactagtttccagaactcaattagattactccatacatcggataacacta

SEQ ID NO: 23593 - DNA, 321 bp, Oryza sativa
actcagcttgtgaaccggacactaccggcgaagagttttcgcttggtatgtcaaggcgagtccacgggaacctgggatgacacgaatctgctgcagcacggctgcctatcaactgagcgcctatagggaatcagtggataaagggacacaaggcggcctggctgtgaccatgacatacacaacagtcgtgtaggaacggcaggagcatgctatccggcgacgattgtggcacctactgtccctggctaaccagcgggaaataccttgcttcttgattgactgagaacgacggtgagataaggagatactaggacaacgtct

SEQ ID NO: 23594 - DNA, 472 bp, Oryza sativa
  unsure (1)..(472): unsure at all n locations
gcttgacannaaatgtgatcaccactacgatgaatatcttgtaatctccataggtgcaatgaccacatctcaacacggtgactatgagccgcatganaaccgtatggcggaggaaaaggaacaatgagtttagctaggtcttactattgatgttttagatcatgaccatggtatttacatgatatggggatcgttggtaccacggtatatgcgagattgaagtaaaagagacagagataagggattttatatatgtccgggccccttcatggaagataacaaccctactcctgttggccgaagccagtgttgctcttattcatcagaatcacacaagtataataattgggatggcttatctaatcgttgttgatttggcgacatgagcaccaacacgtagtcgacgacggcgtagtcttcctccttgaagtactcgcggagattaaaaaatagtgctagatccctcttgaca

SEQ ID NO: 23595 - DNA, 412 bp, Oryza sativa
  unsure (1)..(412): unsure at all n locations
ngttggctattccgattcngattatgccggctgcatagtggatataaagaacacatccggtagttgccaaatgcttggtagatcccttgtgtcatggtcatccaagaaacaaacctccgtagccctctctaccgccgaggcggaatatgtttcggcgggtagttgttgtgcccaattgctntggatgaaacaaaccttgttggactatagcatatccttcaccaaaaccccactcctatgtgacaatgatagtgccataaagatagccaataactcggtccaacattctagaaccaagcatattgacattcgccaccacttcctaagagaccatgttgccaagagtgacatagtcattagccacataagaaccaaggaccaactagccgacatctntaaccatgcctttgat

SEQ ID NO: 23596 - DNA, 424 bp, Oryza sativa
  unsure (1)..(424): unsure at all n locations
agcttcataaaatttctacaagactaaactgtctttatatttctttactacgacttcttatattgcaggtgtaactatcgccataatttattagagctggcaaggttctactcttcgctcttagctaattctccatcaattcattaaggcaacatccaagntactgattaaatcttactttggatccttctgaagcatttcaaatgtcactgattgtgaaattatgcttagtgtaatgctgccgtagacccgtcacaaaaaagttcacaattattactccctccgcattttaatatataacatcattgattntttataagtttgaatattcatcttatttaaaaaaaatatgtaattattatttatttcattatgccttgatttatcgcctaatgttcattacgtatgacttacttcttttata

SEQ ID NO: 23597 - DNA, 471 bp, Oryza sativa
  unsure (1)..(471): unsure at all n locations
tatntcttcatgtatctgatttccttcaatctgtgtgtagtttttacagatatggggcttacttntatagtcaaatatcagtgcttcaccctgtctttgtgaacgcgtactatacactgtctcttgtttctttctaaacataaccaattctttatctgtgtgaaatatgttgcaccggtacaaaaaactactccaagcaaaaggaaatgttttatagtatatcacaattgtatcctctaaaataggtgagatatattgagatatgaacacagatgttncaactntagccgaatctcagtggtactgatatattgagacatgaacacagatgttttttgaaacccataacataaggtatgaacacgtgaagtgactggcaaccagtacagctgcatccaaccggccactgctactactgatttggcataataacattactactcaatatacaaatcttcctggacttatttg

SEQ ID NO: 23598 - DNA, 329 bp, Oryza sativa
  unsure (1)..(329): unsure at all n locations
cccaangacgcagctgcactctcccgcaatgctaaagcttttctcttgtccataaggcgagctctntcgtccaacaccggccaagctcctaattacctcacgctggcggcagcaacatgacacaatggacggcaccgtaccgatgggcgacgggcgtaacttccgacagaccgagggtcatggaatgaaacaaatcgcgcgcccggtggcttggcttgaaagtggtaccaatcaagtggcaattctgaaagcggtgcacaattgagtggcataccttgaaaattctccaacaggcataatgcatggatttaaacatggaactttcccct

SEQ ID NO: 23599 - DNA, 278 bp, Oryza sativa
catagactatatgatgatacgagtgaccatctataaagagtgatcatacaaaaaattatgtaattatcatttattttattgcgatttgattcatcatcaaacggtctttaagcatgacataaatatttcataatttggtaaagcccaaaattggtcaaggtttttttttcattcaagtgaacaggtccgcaagtgcaacatcttgtttgacgggatctatatatctgaaccagtggtctacatccaacatctgtagaatgtgaatgttttgctgaaac

SEQ ID NO: 23600 - DNA, 429 bp, Oryza sativa
  unsure (1)..(429): unsure at all n locations
tcaatctatcttttctccatgcacgcacacgtactactctcgactctattgccatcgatcgggagatctatcggaactcaatagaaatacaaagagatggatcgacgtatcttcggaattaagaatcttgacgactattctgaacttccaaaagatcgattctcttagcttcagtagtaatattattgatgctattgcgtccaagattttaccttccataataaacagttaataatagtattatatttctcccagattgctgcatggaattgcgagcgaatnggaacagctagtgcagcctgcaaactgcaaaggatgggcgaacagctcaatcaatgcacacgagaggcaacaagcgaagaacagccagatgctgcatgctgcagagctactagtagctttatttgctttgcacctgcactcacgttc

SEQ ID NO: 23601 - DNA, 370 bp, Oryza sativa
  unsure (1)..(370): unsure at all n locations
agctnnttaccaattgttgccagcaatgtataatattgtcctcgtttgtgaaaagatgccaaatagaggtgacgaatttgatgctctaagagttggggcactaaatatcatagataaaagagaagtgattgtgagagcaaaggacgagtgacctatattatctagtgatcaagagagaatgggaaggacgtgggaaaaggaagaaacaagaaaatgacatgtactttataggggtagcattcttttttgtcaaaatcatgataagaattagacttatcgtagtgcataatngagctgatgacaatagcctaacataattaactttcaacttgatagcacataagggattcaatttcttttttagttacat

SEQ ID NO: 23602 - DNA, 499 bp, Oryza sativa
  unsure (1)..(499): unsure at all n locations
gtgcatggtcgctatggccactctcgctctcgcgtaggcgctcatggtcatgggagctcatcgccgcggcggcgagaagggagcaaccaccggagccaagaaccttccttcggggccatggaacctccccgtcatcggcagcctacaccacctactcggcgcgtcgacgncacaccgcgcgctgctccgtctgtcgcggcggcacggaccgctgatgctggtgaggctcggcgaggtgcccaccgcgatcgactctgggtcggacgccgccatggaggtgctcaaggcgcgcgacccggcgttcgccgaccgcgcccggagcacgacggtcgacgccgtcagcttcggcgggaagggcgtcatcttcgcgctctacggcgagcactggcgccatgcgcgcagggtctggctcgcggagctcctcagcgcgcgccaagtgcgccgcctcgagtccatatgtcaggaggatgtgtcgcgcctcgtcgactccatcatcggc

SEQ ID NO: 23603 - DNA, 376 bp, Oryza sativa
  unsure (1)..(376): unsure at all n locations
tgcagcttaacagcagaagggagccagccttttctcattacttttagccgattggctgatctagtagcttggagctcactctatacatgaaacgatactttacaatagtttaaaaaatattttacaaaatttattaatttttttaagtatcatattaataaaagggaggagatttaacattaggatattgcaatatccactacattcacacttaattgaatagcattaaaacatgaattgtaattgccctgaattgatcacggctttacggcattgcatctaactgggcataagagcaanaaatactaaatagatgagagactaatattttcctctcttgaaaaatctttcactactaaggcatatattatctttt

SEQ ID NO: 23604 - DNA, 470 bp, Oryza sativa
  unsure (1)..(470): unsure at all n locations
tagcctacacannagtgttataaaagattatgtggcaactcacatctcgggctgtacacttggatgctacttgacacctaatacatctacccatatatgataggattttcgctgtcaacaaatcaagctgcttcggctagttcccttttgcacgtccttgtttattcactaattgcgtggtgcttgctgcatgctgtgttgctgtagcctgtactgtgtgccagcagattttagagcaagtntaatagtactagaaaattagcgcgcctctgctcattatagcctgtgtatattatccaattggttttcaaaattcaggtttataaaaggttggcaaatgaaatattcgatggtgttattaacttgatgcaacaagttagctaaaatagctcctatggcactcctgctaaaaatagtaactattgcccctgtagacanaccatcgaaaccggatataccataactaatat

SEQ ID NO: 23605 - DNA, 258 bp, Oryza sativa
  unsure (1)..(258): unsure at all n locations
tgtatgccgatgacgcgactgtcttcataaacccgaataaagaagatgtgtgagctttcactgatctccttggtcgcttttgacatcaagtatcataatattgcctactaaatacgtgcaacatccaccgcggctaggatagccctggtccccccatatatagaagataaatgatccctcacagcgatgcattacccctgaagaacagacataacaaagacncgaaccgaagagatattatgagacgaatcatgggga

SEQ ID NO: 23606 - DNA, 339 bp, Oryza sativa
tgatataggcataggatgataatgatcgttacaagtatgaacatatatataaagatctttacagtgctacttacacagaaccaacctctattatttagtgtgtgaaacaattttatacataagtaattgtgtcaatacaacacgaatagaagatgggccatgctctctaatgtgggacacatcatagtcttttcctatcaatctaaatcgttacaaacaaatattcatttatctgaacggagatcgatataccatatatttgcttatgacagatgattgcgcatcttctggaagatataggtgtattgattattattctgcgacgaacaattgggcatt

SEQ ID NO: 23607 - DNA, 354 bp, Oryza sativa
  unsure (1)..(354): unsure at all n locations
taatacttactatgacctacatacatctacatcggctgatgatccaacaagagtgtgctgcaagagccttttctcattgtgtgcttgcatcaatgcttttgtgcattgtcgacctgttctatgcatagatagaacctttatgacaggtaaataccgacgtcaaatattgcagcanttggtgtgatgggaacaaccaggttctatctatgtgttttgcatttgtagagagtgagaacactgacagctgggactggttcctacagagagtgcacattgcagtgatgcgtatgacgcccaacgttngccttatacatgatcgtcatgcgggtatgttgcnggctatcgactacttgc

SEQ ID NO: 23608 - DNA, 484 bp, Oryza sativa
  unsure (1)..(484): unsure at all n locations
ctcagcttcacgtagcgggcgatctgagatcaaaaagcgttggtacgatgctcctgcattcttcaatccacgaggcatagtgatatagcagtacgccccaaatggcgtgatgaatgaagtcttctagcagtcggaatccttcagtcagatctgatgatatcccgagtagcaatccaaaaaactaagtcgctcgcagtctgcggtcgagtcaactacctagtcaatgcgaggcaacccaaaagggtctttgggacaagacttgttgagggtcgcgtaatcgacacacatgcgccattgcccggtcttcttccgaaccaggactgggttagctagccagtctggatgaacgacttctttgatgaagcccgctgctaacagcttggtcaatatcttcttgatcgcgtcctttctgtcttgtgcanaacgggtggagtcgtgcttgatgcgtttagtgctttcttaacgtgtaaagagtgctcaatca

SEQ ID NO: 23609 - DNA, 490 bp, Oryza sativa
  unsure (1)..(490): unsure at all n locations
agcttctaatattcaccaccccaatatgtctcatagacagaatctttctattaaactggcgttctacaagaagtgggagatttgtgaagactgagaaaacatcacacttattcttgagaagattgatccaagttaatttactaaaatcatcaataaagcttacataatacttgaatctccctactgattgaggtgcaggaccccanacatctgagaacactagatctaaaggagcagatgaccgactagtcgatttatgaaaagggaattgatgactcttagcttggtgacaagcatcacacaccacatctctatgacgctcactaacagtaacattgttttctctaagaatcttgctgacaatattaaaagaaggatgacctanacgactatgccatctagactctgaagaatttgtagttgcaagaacttgacgtgtttgacgagcatctattttctcacgaagaggatagagacgtcctcgagctct

SEQ ID NO: 23610 - DNA, 450 bp, Oryza sativa
  unsure (1)..(450): unsure at all n locations
ctaagctgggtggcagcgcgatggtggtggtagtggcgatgaggggaagtcggaagattatatagtaacggaggggtctgaaggttggntgtcttgtactccctctgtcccatagaacacctaataggctagtacatatatctagattcattgtattagaatatgtcaaatctagttntagaatttttttttgacgaagggagtagtacacaacataaagtaatcgggcggtctaaaatattaaaggatttttttgtcaatgatgatagaaggtccctaatttgcatagcagcacaggtgaccgtggaatgatgatctgttgagatttctgacagtgtgatggctttctctcagggtttgcagtactggaagaggcagacttgcctgacgggttcccgtgtgaggggccccatatgtaggccccgagctcacaataaacatggacagcat

SEQ ID NO: 23611 - DNA, 488 bp, Oryza sativa
  unsure (1)..(488): unsure at all n locations
tccgntcataanaagnnattttctcttaagctctgtgcaagttatcttccgcgcgtgaggtcaaaatatacacttcgccgactcaaggtttgtgatcgaggcgtagtagtggtaacaatcgattttacctcctataaacaaaaaaaggaagaatccgtgccaacctgattggcagcagaggaatcttttgtactactcctatatttaagagtaaaatgatacttcctccgtccctaatatagcaatctagtactggacgagatacttaatagtacaacgagttcatacatacttcctatccagagagttaagacatacttcgattcgtttcgttgtactataaagtgttccatctaattntagaatgctatattataagatggagggagtagccaaaatgatagggatcaatccagccatgggcagttatgcatagccgcattcaacgccagtaaaataattccattttgagttctattcaactagtc

SEQ ID NO: 23612 - DNA, 415 bp, Oryza sativa
  unsure (1)..(415): unsure at all n locations
ttatagctagctctcacacgtgttangctagccggcctaagtttgaagcttcaccccttatatttatttgatattacgtcctttcctaatatacgcgtttcttattatctcaaaaacaatagagtcaaaattactgcaatggccatcaatattatggacttctctctcttgtttttcctctaaaaaatgcatcacttaagttctccatagtttctcatgctagcattctgaggttggattccttanatgcagaggctatgtcatttgacgaggatggcaatgacgtatggtactctatttcgcttttgactttcgagtgggatgcttatatatcactatcctatatgctttactatttcttgcacccttgatgatcagcgaacttagtattntgtgtattcagtcaattgatgtg

SEQ ID NO: 23613 - DNA, 508 bp, Oryza sativa
  unsure (1)..(508): unsure at all n locations
tttctggttganatcaatatccacttgacacaggttctatcagtcactctagatgagtggactgatgatgagattaactccatgctagaagtcggtggaaactcttacgccaatgcaatctatgaggcatttcttccaggaggctatcacaagccacatcccgattctagccaggaagagagagcagatttcatcaggtgcatttatgaaatacacatcagccatttttgttgattgtacccatgagttgctaggtttagttttcaacaacatatatctagctagtcattcaatttgaaatgtgcgaagctntnttttttcctaatcactttgaagtaatttatcactcatactnntttttgatggtttantaaaattaattactggggcaagccagtagtgtttccctttannaataagtaatttatctgtataaggctgtctcatacaattaaatntaaatagcttaagttgatgacttccatagcggagtaaacattgaacaaag

SEQ ID NO: 23614 - DNA, 404 bp, Oryza sativa
  unsure (1)..(404): unsure at all n locations
tgagcaccgttnatttctatatatcaaacacacacatgcttaagttgttatatctgaatgaaactatantcttacagaacttatatgtgatactacgcacttaaacattgacntatatgggttaagatcttccatatactgtgaatataagtgcacactgactagccaatatcaccaaaaatgactataaataattggacatttacatctaatagtaatacacatatttacaaagtcttatatttaaattcattatatgttaaccgtaacaaaataagttaaaaaatctgatagtgttaacgataaaactctgccagactcttatctctatcttacagctaanacataatgacattgaagataagagttcgcacgtacgtgtaatattattagaagtatgcgtc

SEQ ID NO: 23615 - DNA, 389 bp, Oryza sativa
  unsure (1)..(389): unsure at all n locations
acaatctttttagcgtagatcccattcctatgataccactcaatgtatacatattccgcattaaagcacgatatatcaattgtactgaataagggagtaaactatacgtctccggctccttttttggttttaactttttatttggcgggtgttgaatctgtttggcgggtggaggcttcttaaattgtgaagcgattgcctcttttatgcggatcattctttttttcctggatgcaggatggtaagatagaaccacaagttaagcttactggaattcttagtgtangagctctaatgcccggcgagcagaggaaatatggtactactatttgccctagnttgatgcaccggtgcaccaacattcttttgcacncgtatggacatggcag

SEQ ID NO: 23616 - DNA, 473 bp, Oryza sativa
  unsure (1)..(473): unsure at all n locations
cggattcacgtcggcgaggtactntcggaggtcttctgcttcgcggaaggggaggccgggcttgctntcttcgctgcggtgccgaaggaagtggcagcgctggacgaaggcaaccagngaagacggcaacagcggctgaaacggcggctggtggcggagagagaaggtggctgcggngagaaggtttgcagtgacggcggagcgagggagaggttgcagccganagaggagagggaaggggccctatatataggaacaggagatcaggatcgagcccacatcgacagganaaactctgggaaactntatggttttcgccgganaaatgaaagattgatccgcgaaattggaaagaatttccacatacattnttagggatttcttggggaaacgaagaggagattgagaggattccatcctcgcaactaattntgaaagaggaggaacggtgaggccggatccganggaggagt

SEQ ID NO: 23617 - DNA, 392 bp, Oryza sativa
  unsure (1)..(392): unsure at all n locations
agcttggcttgcatgtgttntntcatggtagaagattcttaagactccacaatgtgggtaataaacaatcattatattctgatcatagatgtggaagcctggaataaatacatctgatggattaataaacgcccttccagcaactacaacttttggaagggcatagtacataataatctgatgaagtttccctactgatagaatccaccaatatgttcatagcacctggtgtaaaattaactacaaatgatgctctgatatacatctgccacataatgtcttgtacgccatgtaacaatgttaaccatcttcccaccaaattctggatcagacaagtgacctccaaagggtcttggcgcanaaaaaatactgaccagtcagctccagcatat

SEQ ID NO: 23618 - DNA, 434 bp, Oryza sativa
  unsure (1)..(434): unsure at all n locations
tncagtgaattctcgaattccaaagatcgtattgctaaactgatgtctgaatttctcagtggtaaaaacaagcacagattcaacaccattggcaagcgttntgtgggatctctaaggtagtgtttggttggtgggatgggatgggatgggatgggacaaacccacttttagaggtgtttggttgaggggcgagtgggatgggttggtccctagagaggaatattcctcccagatccgggacatatccatccggcaaaatcggccggacgagctcgttccacttggatggagcacacggcgtctcctcggtgaccgncggcgctcgtacgcgcccgtgcccgccgacttctccgtgaccgccggcgctcctgcacgactgccttgcaccacctttgcgaccgtcgggctcctccacgacccctgccttacaccgg

SEQ ID NO: 23619 - DNA, 448 bp, Oryza sativa
  unsure (1)..(448): unsure at all n locations
tcggatgtgcatcgactacaccgaccttaacaaggcatgtcctattgacccttacccncttcctcgcatagatcagattgtcgactccacagcggggtgcgaccttttgtgttttctagatgcatactctggttaccatcagattcgcatggctagggaggatgaggaaaaaactgcgttcattacccccataggaacttattgttatacgacaatgccattctggttaaagaatgcaggtcctacttttcaacgtactactcgaatttctttgggtagccaaataggacgtaatgttgaggcttatgtcgatgacttggttgtgaagacccgcgaccgagaaactntactttcagatctggcggaaactntcgagagtctccgctccacctgcataaagctgaaccccgataagtccgtgttcggtgtacctgcgggcaagcttctc

SEQ ID NO: 23620 - DNA, 416 bp, Oryza sativa
  unsure (1)..(416): unsure at all n locations
tcctcctcccacccacccctcgctcctcgccgcgaggggcgagttatgtcgccgccgctcgnctacctcagcctcaccgaagacggcaccggtacgtccagatcccgcacctccgctaacctcttgggtggctctcttcaattcttctaacggcgatctctctcgctctcgctctcgctatgtacgcgcgcaggtgcgagcactctcatgaaggcggccttctgcgggaacctgggaagcctcaaagggtgcttcctcttctcctctcttctccgccgcgtcgatcccactcgatcgatgtctgtatacatgccccccttttgcatgctcctgtgtgttacttttcctccgatagggttaatatgtgtgtcgacgctcgtgtactcgttgatgcgcttgcgatggtccgatgatgg

SEQ ID NO: 23621 - DNA, 490 bp, Oryza sativa
  unsure (1)..(490): unsure at all n locations
ctctgagaacctaaagataccgtttttcacttcttcattgatctttntgctntgtgccatccacagtcgaagaatgcactgctatcaactttcctctttctggaccaaattgtatgggctggaaggacaggaatatacaaggtttgattntctcttcacatcattactgatatacataagcaccatacagcatatggttntatcatacctagatgttgacagtagaaattaatggtaggtaatctaattgtttgtacagaacaaggagcgagcagaattcctcagcaagatagcattntattgcttcctgngttctaacacatgtactagtattattgaggtatgagacttcagactgtagaatctatntaatcctgcccctgatattattacaatcaagagaataccatctgactagtatttcattataggtagccgagcttcagcggctatccaagtcgatgaagaaactagagaaggagcttaaaca

SEQ ID NO: 23622 - DNA, 520 bp, Oryza sativa
agctctacatcgaactgatcgattcgcataactcaatataggctggttgtgttatctgatcaacacatacaactcaatatacgcaatagtctctaaatccatatgtctctcttattcatatgcttatccgaatagcttattagctaataaaaaatatttgtgagcgaagcttctcattagcgactataaatataaactacgatcatacaaagaataagaataaaattgctaattacgttgtaaagttaagctatgtcttataagcataatagcgtgcggatcttaaagatataacaatgaagccttcagtactcgtccaatgtttgccaaacatacaaagggacttcacacagtatgggcttcttgggacttcttgtgcttccagagaataacgctatgatttgtccgtttgacacaagcacccagccgcccggcgcccaattactgcattattaccttctttggagatccgcgccaactaccaacgccaaccattcttcattcatccatccattacaat

SEQ ID NO: 23623 - DNA, 523 bp, Oryza sativa
  unsure (1)..(523): unsure at all n locations
tcatatggacagccgcaacgttagcctgccatagcaatatgtactgacaggatcgtattggcacgggacanagaanatcggactaagaaaatgtgtcgacacaattctagcgattccgtaaataaatcccttcgaaagcccacaagttcttccagtggagcgatgcccagtctaaatcgtgcatgtgttttattaatatttccacttgattcccgaatttgcattagtttttctacaggagattcccaaccccgtggactacaactaattcaggatatgaccatatcactcatgctagcaaaataaacaaattaactagatgacattatcccattgttacagggtagaatgatccacatataaatttgattctaaataatgggttagtcttcctaactctntagttaatcgagtntgctaccccatccctacaaaagagaaaaaaatattgaagatagcttctacgcatctttntctccgtaacaacatcgggagattntgaaagcaggaatcggagtgtagt

SEQ ID NO: 23624 - DNA, 466 bp, Oryza sativa
  unsure (1)..(466): unsure at all n locations
tgtatgtgccaaattctcctcatttatttagtgtgaaaacttattgttgaacgattcagttaccatggcggtatttcttgtatattttgtcttttctagttaaaatacaatgtgactgaactattatatggtctaacttgcctatgccatgtcttatataacctcacagccaaagctcattgcacactcaaagagagtaaccttcacgaacccaaaggcccctgtgtacccacgcctagcgcaaggaaaatcctggaatgaagtaagtatcatcttgttaagtattccataagtaatgaagtgagtctcaattgagcatcctagcctgtgatctgcanaggaaaatatcattgcngacagaaataaaatttcgcttatggtcctttagcacttttcaatgcaagtaacctattttnttaatggaatatgtttatgagctctaatgtcacagcaacaaaaacacgaa

SEQ ID NO: 23625 - DNA, 505 bp, Oryza sativa
  unsure (1)..(505): unsure at all n locations
ttaactgaacccatcaagaatctttcttatggcgactgataatgcccatcggccgattccaggactctgaaaccaatactaactctaagccgatgatgacttcggggcttatcanatttcactgttaacagaatgaaaaagttcaaaaagcataacaacatgagtttttgacatattagaatggattgggcgcattctttttgaataatatctctgtgacccgctcagcgacattttgtcatataatgtcaatattggcacacgtgggtgcgatgttntcgtcggaacgaaaaagttcaaatagcactanaacatgagttntcaacatattaaagtggattgtgtgcgttcgttccgcagaatcatgagttntccgggacttgtctntacctgattatgtgttgttgcaacattgattatgtgttgttgcanaattatctgtatgggttagacaacgagtctgccgaaaatctcgatattttcactagaggatcgttcgcacaca

SEQ ID NO: 23626 - DNA, 463 bp, Oryza sativa
  unsure (1)..(463): unsure at all n locations
ctctgcacagtctaacttattaggggtccgttgtcttcatcactgtcccattcaccatcactgaagatgntgtacctgagaaacaattcattccatggacagatcgatctcaattgctcggcaatgtcacaattgagctcacttgatcttggcacaaataagttcatcggcacaatagatgctttgtcagattgccatcatctgagaagcctgaatcttgccacanacaacctcactggtgaaatccctaatggtttcaggaatcttcagtttctaacctatatctcactntcaaacaatagcttcacaaatgtgtcctcagcattatctgtccttcaaggctgcccaagcctaacaagcctcgtgctgacaaagaatttcaatgatgggaaggccttgccgatgactggaatagatgggtttcataacatccaagtgtttgtcattgtaatagccatctttc

SEQ ID NO: 23627 - DNA, 483 bp, Oryza sativa
  unsure (1)..(483): unsure at all n locations
tctactcttactntattggtgttntntttcgaacaagagttatgttttatttntacctatacaaattcgatgtcttagtttacatccaaacacggatgaacgatgaacggatccacagtttgccttagtctctctaaaaaaccaccaccttcacaaaacccgctaaactcatatcttcgtagttgtcggagatgaacattagagttggagaaagcattgcgaataatttaaccggatggttcataacatgtcaatattctnttgtaagagaaaagtgtatctttcccattatttcccgtcaaatgacatttatcaaattngaattcaaatctattatattattaaaggaatagaagaaaaagccttcaagtttgctataatggtctagaaatctccacattaataggagagaaagaaaaaacagagtctatataagaatacaatttaataatagctgacatttggactataagtaacggatat

SEQ ID NO: 23628 - DNA, 534 bp, Oryza sativa
  unsure (1)..(534): unsure at all n locations
actcagcttctgcttcaggtatatatagctaagtttctgctgctgatatctatgtgtgctactccattgattatacatcctttagctaactagctgcttacatatgtgtgctgctatgctaattatgtatcttttagctatgagtaattntactattcttgataaggtattgggagataccacattttctagtgtaaaagttggtacctccaagtatatgcggttatttcctcaagtaccataaaatttctctttggctatataatatgatttgttactgtctactagactgtaagaaatagtatgccagttagttgcttttggattagtataagttgtaaaattaccattgtctcatgtaattagcagattaagtgttgatcgatcaccctgctgatgtgattatcgtgtattgttcctactaatacngcttaagtgcaaagtgttgatcgatcaccctgctgatgtgactctctctctctgcatttctgcagcaactgatgcaatttcttttcttntccctgtattttgaag

SEQ ID NO: 23629 - DNA, 462 bp, Oryza sativa
  unsure (1)..(462): unsure at all n locations
ctaccaactttaaagggcttgatgttntcaccaagaacacatcttctctttctgaagcaggactctgagaatcacctctntcagaaagtttatgagtcttttcattgtctgtgttttttcaatgccacagttgtgtcatgccacactttcctacccttaggtcccacatgtcatactcagataactagagctaacattgccacacttgtggctaactatttcttaggccatactttgccacatgatacaacttgcctaagcttagttatggtaagcttaggcatcaaccaaataaccccttaatgaaatctcgtctaggctttcagaanatgaanaaaaaaaacttagactaacataacatccataagcgatgggggatattcatcgatcccgtggcgattgttgtttatcgatccggtagcgaggatgccggtaattgcagcgatgcgactgagcaatccg

SEQ ID NO: 23630 - DNA, 109 bp, Oryza sativa
  unsure (1)..(109): unsure at all n locations
ctcagcttaagattagtggatgtactttttataaactatgttatttctacgctntgctacggatttcatgtatgagtatatgttaaatacttcctccgtttcacaatgt

SEQ ID NO: 23631 - DNA, 66 bp, Oryza sativa
ttcacgctctgctacggatttcatgtatgagtatatgtcaaatacttcctccgtttcacaatgtaa

SEQ ID NO: 23632 - DNA, 497 bp, Oryza sativa
  unsure (1)..(497): unsure at all n locations
ctcagcttctgacgcatcctgaccgtcgtgtatggataggagttcggagaatataacttcgaccnnccttgatctccgatcaaagttgtacggtcaagattagatggatgaacacattggtgtagacgcaatttcacgttactgttttagttggaacttgcagtcaatcgatcgatcagtcagcagcaagcatgcatccatgcatgatcttgaggtacataggggtgtttgggaactagggactaaatttagtccctctcacaaaagtataagtctctatggtagagatttatatttttgtgagagggactaaagtttagtcccactttagcccctccaaccaaacaccatcgtatactgaacatagcanagtcaattaaagttgcagagtatatctggttgtgtgctctaaaggaaaatggagattccatgcctctcgagtgtgaagcagatcattgcaacttgctattgtgttangacacagcagaatatctatt

SEQ ID NO: 23633 - DNA, 515 bp, Oryza sativa
  unsure (1)..(515): unsure at all n locations
tcttggttcatggttatactntaagacatgcttgttatgttctagatgggttcatcttctttttattgcaacacatgacatgatatgctataagtatgctaagctcttgaatattaataaacataattcgtatgcttgatgaaatcattgtcaaaagggggagaagtaatgtgaaaaattttggattnttggagaagcaaagtgaatctttggagagttgttgagaagagcatgttgttggttcaattggggatttctttcttttaaaaaggggaaaaagttttcttttggatttttgagcacgatgtgtacttttgtaagaagtgtgctttntaccaccaaatatcanaacattnttatgcgttngccaatgtgttcatcaagggggattgaaaatcaaaggcatttttattattattctgtgatgaacaactgngcattggagaatattggttntgttatttggaatttattcacgaagtgcgtttggagatgattggattcacaggtgaata

SEQ ID NO: 23634 - DNA, 497 bp, Oryza sativa
  unsure (1)..(497): unsure at all n locations
tctttggttcatggttatactttacaacatgcttgttatgttctagatgggctcatcttctttttatagcaacacatgacatgatatgctataagtatgctaagctcttgaatattaataaacataattcgtatgcttgatgaaatcattgtcaaaagggggagaagtaatgtgaaaaattttggatttttggagaagcaaagtgaatctttggagagttgttgagaagagcatgttgttggttcaattgtggatttctttcttttaaaaaggggaaaaagttttcttttggagttttgagcacgatgtgtacttttgtaagaagtgtgctttntaccaccaaatatcaaaacatttntatgcgtttgccaatgtgttcatcaagggggatngtaaaatcaaaggcatttttgattattattctgtgatgaacaactgggcattggagattattgcgtctgttatttggaatttattcacgaagtggtgttggagat

SEQ ID NO: 23635 - DNA, 446 bp, Oryza sativa
  unsure (1)..(446): unsure at all n locations
tcacatgaatcatctgccttctgcatgatgatgggtaatggttctacttcacacttctagttaatcgtctttatttatttttcgtgctaatagaactccaatcttttatagtgtgtttaatgtggattttgctttagaatttactaatacagtactttcgtcgattcaattccatagagttgagggaataatngagctaggtaaatatgttagttcagacaacagaaagttcagatcgaaagtttggaaggattntaaagtgtcagtagtggatggttatactaaggcaatatgtttacaatggtctgcccatctagtcactggcaacaagaatggaacaagtcatttgtggtatcacatacgtgtttgcctagagcttcaaaagtcaaagaaaaagaanactacttcaaaggcagaacttcctggttttgatcagcanagaagtc

SEQ ID NO: 23636 - DNA, 512 bp, Oryza sativa
ctaagctaattagctctttttttccaaatttagctcaattttcacttcttcttcttgatgagacacccactgggctaccacatgctggttttccttctttctttctctccttatattttatgcgattactaactgcatgctgttacttttcctctccagatcagtagcagtctagcataggcagtgaacgcatctcggggagcctgggaaggcaccggtacataccctcgtgccgggggtcggggcccgggattctcaaccgcgtgcagaacagccactccgcgtcggcgttgtctcgtcgccgcggcaggctccctctctccatgcccgcgtactagtccgcgcctccgctagcgaaaggcccacggccactgcgtgacgtacgatcttctcacagctttaagccgaaacagatgaggcactacgtcttgagtgggtgggcagttgataagtaaagtgcatgtggatgcatcatatcccattcttgtgccatggagagaatatatgggaga

SEQ ID NO: 23637 - DNA, 528 bp, Oryza sativa
  unsure (1)..(528): unsure at all n locations
ggtcaacggatcggcaatgttcatttggcgcatgtcgctatattgttttctatcatcaaaccgtggccgttccgacgttgggctttggatttcattggtcaaatttattcttcgtcatcaaaagggtattggttcgtgctagttgcaacggattacttcaccaagtgggctgaagccgtgccgctcgagaatattacttgtatggaggctaatggataagccgagtcgagtaataaaacattggtgaaattgtcgttttgccagttgaggtaaatcttggctctcttcggtatttcaagcaagacgacttgttagttgaagattacaagaccttgatgggaagcaattttgaagacgtcatcgacaagctgttgcagactttgaaggagatgaaggcacttcaagatggtgtntcatagagcaattaatgggaaatgtttgaagaaatacttcccgagcattnggtaagatgcttaggaagtcctatggccggtaattngaatatcgccctgagataacatgttctat

SEQ ID NO: 23638 - DNA, 493 bp, Oryza sativa
  unsure (1)..(493): unsure at all n locations
tgcaccgtgcgcnctaacnctagctactcnctcccctataaatactatcggccaccgcccctttntccncctttntccaaagccgccgccatctccaccgtgagcagccgccgccaccgttgcttcgtgccgccgtcgggagccgcgccgtcgtcgtcaccatctccttcccgtgccgccgccgctggtaaagccccgaggctgagccctctctccctttcgagccgccgtttctctctccacctcaactccggcgtccgcctctcatcgccgtgcgccatctccacgccgtcccggagctcggtgctacgccaccgcgttggcctccacctcctctgcctccaccactatttgctgcagccgccatgcgccatcgccgacgaaagccgccgatgccgccgcgctggagccgccggtcctgccatggtcagagcacgcccaggccgtgtgatggagcagctgctgcttggccttctccctgtgacaccgacgt

SEQ ID NO: 23639 - DNA, 526 bp, Oryza sativa
  unsure (1)..(526): unsure at all n locations
tggtatataattcactattngataaaatacatntattatataattaatactaagataatgcataatagttaaaaatgtgctaataaataaaattgatattgtactataaagtagatgtcaaataattgtctttaacacgctntttcactgtaaaacctatgtaaactaattaggagcattgtttcaaattaattaaagcataggaaatactagtgccatttattaatatatgtcaatatataattatactcctgacgtccaaattgtataaataatgtttagccttgtactttgtgactaanagttgaacacacgtagatgagtctttaacttgtttatgagagataataacagagctagtgtgactaanatcacccgcacgaaattaattaacggtattccctatacagtagtatatgtttaggttggaaatcgacccttaagttgtatagacggtaactcactcataaatccacttaaaatcacatgtactgcgtagctcgtagtaaatagcaactattcaaat

SEQ ID NO: 23640 - DNA, 485 bp, Oryza sativa
  unsure (1)..(485): unsure at all n locations
actcaagctggtaacatttccacattgccctcgctcagagtaatcatgtgctcatctcctaagtaacaatacaaagaacattagagtttaacagcctttcatgagaaaaaataactcttaaacttgacctaatactaaccaggtctgcatggctctagcaaaaatgcgctnttccaagttggacatcggctgcacaacatgaataatattcagaacaatggtaggtgaatggccgaaggttttctatttgctgattgctaccattcaacaatgttttatgttagttntgacatatatctganaacagcagcctgtatccacacattagatgtcatggtcgggattacgtatcgtcgcagagggcgtgtggttccgcaagcgtcgccgggcggaacggcggagtagcgcgcggaagctgcgtgccggatgactacagtgcggcgaatggatgaagtcagaatnngtagtctgttatcaaagttgta

SEQ ID NO: 23641 - DNA, 481 bp, Oryza sativa
  unsure (1)..(481): unsure at all n locations
tcagcagcgccgatggagtccttcgatcatgcaagcgtttagctgattgccgcactagcatgaaattgtcctggatgcaacgtttcttcacaaacgcactctggtttttagcgaccaatgcatccaacttcggcgcaaggcggcgagagagaacttttgtgaaaagcttcacaaagctatgtaccagacttatgggccgaaagtccttgagcttcctggcatccgacctcttaggcagtaaggtgatgaaagccttgttaaccttaccaaggctggacccatccattcgatgaagttgattcanagccgccataatgtcctccttaatgatgtcccaacagcagtaatagaactgaccagaanaaccatccggccccggggcgttgtcacgagggctgtcagcgatggccttccacacctcatccacagtgaacggttccttcaagtcagagagctgctgcccccttggctcacagtagtc

SEQ ID NO: 23642 - DNA, 486 bp, Oryza sativa
  unsure (1)..(486): unsure at all n locations
tgaccncaagatggatggcgcaaggcanaggcatcatgtagctattaatgttttcttagtcttttcccggtcttggtgtttggtatagaccggatttgctagataggcgccgtactatcaagaggggtctatgaagcgagcttgtggatgatcttgtgccatattagttcatatgcatctacgtgcattntgtgggcttgtctaaccaagtgtggatgaatttctcaagtcctaaaccaagagagaagtgggcatgtccaataggagtgagtgacatcttgtgggtatgtccggtggatatcctttggagtgtgagccctttatccttgacttaagttgtgtttcttggatggagttttcatgggttggatggccctttgaataagctttccatagagtccaagaacgccaaattccgagacccgaggcaagagatatcgccgttntactaacggtcggttgaggtgaaaagtgacctgcggtctg

SEQ ID NO: 23643 - DNA, 531 bp, Oryza sativa
  unsure (1)..(531): unsure at all n locations
actagctttttgtccctacggcggacatttggtacagaaatgctctctatgatggatgaagcatttcanaggacaaaaggctacctgcttaagctcgttcttcagctcatgccgtacacgctcaaccaaggatctttcaccctcggtcagcattaagggaccaaagcccatgccgtctgacccatcatttccatcaaacatgttggcttcactggccacttggttatcttcatcatcagacatagtcgctccagtcccttcaccaggagatgcccctgcagaaccaatcatacaagcataactcagttgtccgaacatcatctaggccccttcagtaagaagtatcagactntaagatacaaatccgagcacaaaagagggcatgttctccatataaagtggtgaacagctagcttatcaaactcaactccaattgtagntacccagcgttatctacaagcctggatcaactcagaaaatgtaccaaggcctcacacatgcctntgagaatctgatcaatatcagcatgtg

SEQ ID NO: 23644 - DNA, 509 bp, Oryza sativa
  unsure (1)..(509): unsure at all n locations
agcttagctgaatcaaccttgtatgtgttttaccgctntaccacgaaagttatctgaaatttgccccttaatctatctcattatctgcatagtaagtgtgtagtaacccggttttcttaaccgaggaacagaacagtgtgctgttttttatgggggtaatacaacttacaatgcctgcctgccccaaatggaagccctaattccaatgtaaatactctgtaagttctactcattggaagtatcttctacgggattagaggtgctgtgtcctggttaattaggactgctcatttaccaatgggagattggagtggggggtagatctagatctgtgagcctgcaaaattttcagtacatagctgagtaattttaactgctgctaatggcggcttcctcgcaattaacacaaagtacaagaaaggcagggtaataaactagtttattactgctacttggcaatgaaaaggatgagctatgtagcagtagatctcatctaacctagaacatgt

SEQ ID NO: 23645 - DNA, 463 bp, Oryza sativa
  unsure (1)..(463): unsure at all n locations
ctaagcttcagagtggtaatccctcgtctgctgaaagctggatattcttccactattagcatnggncttgcccatccggaagaatattgaatggaatagccgtgagcgcttattccgggttttcaccgttgcacgggtgatgtagaaccactgttctgctctcctgaggagggagaacggcaacagttggagtctgactcttctgacggtatacgtgctatagctntncaggaattgctgcaaatgagcacttgcatcctccttatgctttccacagaacaggcaagcctgcgccatcgttaatttagttggtcttcaaatcaaagtcaccatctcccctgctgacttgggttccaattggcatgttactagcagagggagtagtgaacatganaagtgtcttctcagccatatcgtgcaattctggtggcgcggaattggctggtctaattgccgatagagt

SEQ ID NO: 23646 - DNA, 297 bp, Oryza sativa
  unsure (1)..(297): unsure at all n locations
atactacagtggtagcaataactgcgctggcgagtaatgagcccctggggcagcagctgcaacaacaaccccctcgctcctctcctcttctcctcctgctcccaattgaagcagacgacgagctgctgctgtctatgtcaattaatgtngttgtgtagaggtgaggagctagcacagaggttgaggtagaatgagggagaggagaacgatggatggagaagaaatggctgtctcttgtaaggtttggtaggccacgtaacgaggatgaagatttgagcaagtgagagtgaattattg

SEQ ID NO: 23647 - DNA, 516 bp, Oryza sativa
  unsure (1)..(516): unsure at all n locations
tatatgtgaagagtgcactggtggacatgtatgcctaatgtggntgtattgctgacgcacaagaagggtttgatcacttgtacgaggttgacattgttctttggacagcgatggtttctgggcatgtgcagaatggggagcacgaggaagccctgacattgtatgccaggatggacaaggaaggtatcatccccagtaaatcgactatagctagtggtctgagagcatgtgctggcattgcagcactggaaccagngaaacaattgcacacgcaaatcgtgaaatatgggttacgtttgggggcccctgttggaagtgccttgtctacgatgtattcaaagtgtgggaaccttgaagatggcatgtctgtcttcagaacgattcctgatagggatgttattgcatggaactcaatcatttctggttnttcacaaaatgggtgtggcaatggtgcactggatctcttngaagaaatgaagatggacgggactatacctgataatataacattcatta

SEQ ID NO: 23648 - DNA, 517 bp, Oryza sativa
  unsure (1)..(517): unsure at all n locations
ggcataaatgcatacactagcaacgcttggtcatcttttatgcagnaaccaaccaatttcactaggtgtggatgttgaacggttccaagacaatcaacttctgcctgaaaatgaaataacgctaggttaattgatgatgcattagaagacaggtgaataatattttgtggtctgtatgctgaagcaattcaaaacataccacccactctttatgtgcctgcagcccatcatgggtaagtgtcttgacagcaactcgtaatcctgtgccaggttttacgggagcagttccgttctcctcaatccaacctttatagacacagccaaaacctccttcaccaatgagactctcatgccggaagtttcttgtggcacacttaagttcattaaatgtaaacctacggagttggagagctagattaagttcctctccgactatggacgaatgtgagatcttttcagtgtactggatgttgtggaacagaggcattgtttaactgaatggctctaaaccatcatc

SEQ ID NO: 23649 - DNA, 497 bp, Oryza sativa
  unsure (1)..(497): unsure at all n locations
tagcttctagtcgaatgaatagtggggttctctcaaaatcttgtttgttatgtgccggctcaataaaatatgcctccagtacacctaaatcatngaaaatgtcatccagagagaaaaaaaaagtaaaatgtgaatgatgacagcattaattaaacataaaactcaccgacaacacttcttcctctactagatccctcttgaaggaccttccagaagggctgtaaaggaacaaaaaatagaaaatcagttccaacctatctgcatcggtaattggaccactagaactacacatctttaaatggcaagaccaagctaagcacctcaattntgagctaagaagagaatccactcaactatattagaatgatgatgagcatttagatctctcatcgagttggtttgttcataaattaacagcagaaagcaagcatactatcatagaaacaatatggtaccagaaagcttaatattccttgcatagcagttcaagatacaac

SEQ ID NO: 23650 - DNA, 526 bp, Oryza sativa
  unsure (1)..(526): unsure at all n locations
tgtgttaagaagcggtagtcggnggtggtggttatgagcatttgtatatggngaaaatgtcngatcatgggcatctgctggcttgagaaggaatagaggggggagggctccgtcaatattaatgacacttccatccaagtgatagcacaagaggcgtcaaggtcgagcatgtcgtgcatcggtgaggagggaagaagaaaaggaagagggttaacgtggggggatttgaacgaatctcanagtaatccaacgaggggtttatgtcaaatgtaaggcttatttcctttgtcgagttaagttgacatatgcacacactaactttatgcatctaagtcctaacatacactcaaattcgaacagtagcctcgtttaacatgggtataaacttatccaccacatattatgtgcattcagtgcctccggagaataagtctccgagaaagtgcangcaccagcatactacctcatcagattaaatcctagagaagaaatgcacaagcacctatactaagactacaacttgaac

SEQ ID NO: 23651 - DNA, 397 bp, Oryza sativa
  unsure (1)..(397): unsure at all n locations
ctctnggttggcagcttcaaagtcacctgaactgtggttgntcgtggacatgacacgccacaaggtgattttctcaaagagaactggcatactgtgcgcgatggcaaaagcagcgatagatcgctccgatggacagattgagtcattctgggcccagaagtttgtcactggtgaactcttggattatattgtgagaaggtaattgttcccaaatactatattcggatctgggtttgaggggttgagcttttagcgaattacatggaccatgttgagatatcagaattaagtctcgtagcttaatatataaactgcttgcatatgtacagtatgatgttcaattaggctttatttatcactgtcaagttagatttgcatgttcatttcttgcaaaaag

SEQ ID NO: 23652 - DNA, 477 bp, Oryza sativa
  unsure (1)..(477): unsure at all n locations
ttcggattatgccggttgtgatgaggacacaactagctcggatataaccatgactaccatatgtattaatcaaccaaaggtgcatatgtnttacattggatttacttgttatatatttgaacaaacgttgctacacaatgagtttcgtgtgtttttgtttgcagagttacttgcttgggcgaaagaaaagagaccgagcataagaaatgcatggatgattgaagaagttgattggggaccaaacaaggacattctctaagtcttctttcatctcaccacgtcacttttagaccatagaagataagagataaagttccacacgttntggattcggtttcgggccttctgacagcatcaacttcaaacggacctagccactgatctagaaggaatntangggcccatgagtacttgttgaaaacttatggagtctatattcagatggttttggtcccacgtcaaaattcctaccgagct

SEQ ID NO: 23653 - DNA, 543 bp, Oryza sativa
  unsure (1)..(543): unsure at all n locations
tatagatactaagctacatgtcttcanattagtcattgtgcccaaataagtatgtattttccctntgaatacattatctgatgcactcctgcaagcagaccaaaatatcatttagcatgaaaacatgacgaatataataattgaggctatgtttntgactatacaagaacttcacgttctgaagttttgagaacgatgaagggaacggaccactgaatccagaactatcaaagtacctgttattgaaagtttgaaatattatcatgtttgacaatagatatgaccattccaaatatagttcttttacaagtagaaataagaagttagaaatcaatggggtatcttacaattgctgaagtttggtcaagttacccagttcttctggaagacttcctgtaaaattgtctgagctaatgcccctaaatgaaaaatgaaatatttcatgacttgacaaaaaattttgtcatcaactaatagcanaaggggcatagttttcctgatgtgccattggacccacaatattcatcattacaatatgttcaa

SEQ ID NO: 23654 - DNA, 532 bp, Oryza sativa
  unsure (1)..(532): unsure at all n locations
tattagcgacactatgatactcagcttggctngcagttttgtattacagaaagttgcttatgataacttttattgttntaataatctgacatggcaaatttgcttttgttttatgtctctcttgagttccaaaggaattttattttgggtctcagtggaggccagatgtatttggaatgacagcctcccccgttgctactaaaggcaagaattctacacacgacaatcatgtgcttttttgtaacgaanatagtcacgtgcttttaaccctgtgtatatttcattgatcaatagtttcagaaaatgtgttttagctttgttattaaaataagcatgtcgtgtgactgttattatcttcctttntgaagaatgccccaactgccatgtactgtcaaaaactcatgtgatgtatttgagtggctttgccttcttcataacaagacaatacatttctggaagtatgattctttctcttgcttcataattctacatggaatacctctctgcctgcaactgtagatggcatctattc

SEQ ID NO: 23655 - DNA, 512 bp, Oryza sativa
  unsure (1)..(512): unsure at all n locations
tactcaagctgtatcctgcctttgaatgttggtccttgaggtcctggntcttatagctcctcaataatttcccgcaaccaggatttcttcagtgaaacaaccgtagttattaccctgactagatgataagaagaatagcccaacccgagatcgacaaactgatcacttgttgcaaaccatccaatgggtctgggccatattacaaactcctcatctgaagttggtagctgtaacatgtcaactggaatcacttcattcagattaattaacttggagttcagtgatccccatgaatatgtgcaactctttgtataccagtcactagtcttcatagtaggctgtagacattgcagtactgcactagagagaaactcacactgtaatgtccaatttgtagcatctccaaacaatgccatagtcttcaccaataagaaatgtcggttgtcatgggaagccatccattnttcaagggatctgctacacanacacaccattggcacaactactgaact

SEQ ID NO: 23656 - DNA, 530 bp, Oryza sativa
  unsure (1)..(530): unsure at all n locations
gcgacctatgatactaagctggacttagcagcgggcgactccactccacaggcaaaccttgactgtatctactaaaccaacctctctgagacggctccaactgagaagaacttcaactctggtgcgagggaaaagagagcaagactgagtactactgtcacgcccganaattcactagtaatttccgaacttatttgtgcataaaatcctcgtccaggaatcagccgaggtacacaaactgacaatttaatatacaaattcatcaaattaactaaaacgataaatacttacttaagatgcacttagtcctcaccatgaagaaaactgcagcggaaaataaaatctagcgaagctccggctccactcccacaggcagctcaactggggtataagccaaacgtcttctcctcctagaatctttttcttcaactgaggttgattgattattgcaagaatgagcatatgacatactcaacaagccacacagcanatatgcangtgcacaaggataccaaaggatggcataatat

SEQ ID NO: 23657 - DNA, 480 bp, Oryza sativa
  unsure (1)..(480): unsure at all n locations
tatccattccatattctntaattccctccacaccctggagacattatatgtcaatttaagtaaaacatctaaaactgatgttatcagcattggttagagcatggaaccattgatatacaaactacataaaagccaattaagaaaaaaaaattccagataccgtcacactactaataatggccaggcaatttagggtagatgaagttcctcgaagtaaaaggccacaggtaaaaatcatttgtcagctaattattctcggcatatagaatctctaccaaacacactagcccatagttttggaaaagctacaggtctgtcttataatacagaaacctcatcccgcatctgcatatctaaatagactaaaaaaggtcgagaaaactgcgtgttaactctaagccaaccaacaagaccacgaattaagatattcattgagtacttgtaatgtgagaaaagagagctaaatcctatgttgagttt

SEQ ID NO: 23658 - DNA, 506 bp, Oryza sativa
  unsure (1)..(506): unsure at all n locations
gagtgataacaacgcatcagccatctggctatctcttctttctcagacgacccccgaccaaaaccctagcccccaaacccgcccatcggtcgcctccgccgccggagacgatggcgaagccgcgccgcgggcgctccgcctcgcgctccttctcgggatcctcctctcgctcgccgtcccgctccgcctcctcgggctccggctnnctccggtcgcgctcccgctcccgctccttctcgtcgtcgtcgtccccttcacggagccgctccccacccgctgccaaggccaggtgagaccccccgcctctcccccgcgatgccatctgcttacgtctttagatttgtattcttggcgtgctttgttcagagctgcgaatgcacgctgccgctctcggtctgggggtgttttaggtttggattattggtctgcgcaatcgatggtgccgtcaagtccgatagtgttttttttagttttagcatcgtgtagattagtaattctgatatctt

SEQ ID NO: 23659 - DNA, 520 bp, Oryza sativa
  unsure (1)..(520): unsure at all n locations
taaactagatcatggactaatggagctaggatacgttggccatcaagttgctaaatcaagcggcacacccctatcttcagaatccagtgaagatgagcatggtgctttatccatatcaatgaccgcaacaatgaatacaaagggaaatttaatcctaggtaatttatgaactagcaaacttcatcctttgtaacacgttntgttcgtgtggatgaaccaaactccttttcatttaaccaacttaagatacaacacaaaatgacagatgcaaccatgcaagatcaccacatttctatgttacaggaagcagtcgagagtttaaaggattttcaagagaagttgacatgtccatccttaaatgtatatgggaccgtgcagcagagttctttcctacgctgaagaatgttcatcttgatattgatgaaaacactgaaatcaggatcgggcaccgtccctttagtaagcccttcttcatttagaacaactcangaagagaatgccacatagtctttcaaagata

SEQ ID NO: 23660 - DNA, 513 bp, Oryza sativa
  unsure (1)..(513): unsure at all n locations
tatctttctcatctagaatgcaacaagagagctgcatgcatcttgttctcataaggcaaacacaacaactcatcttccagcgatcaagatactatgaccaccattctacaacaatgtacttgacgtcatgagtggggatgctatgatcataccatatagggcattgctgatatgagtggcgattaagacttcttgtctattggtattcatataagcgatctgtggtttgcgcgcacgagaatgggtgagcaacgacaattatgggatctcataccaaggtaaattatgacggggttttttgtaacaaatcattntataggtggaatctcaaactctgggtggtatatgtaatttttccttttattcaatgaggaggtggcgccgaggtggattctcgcaagagaagatgtcgggtcgatttgttccgttggttgttgccctttggatctaaattgaggtgtggaaaggacctcacccgctggattgcggaattctggangttcgaataacaag

SEQ ID NO: 23661 - DNA, 509 bp, Oryza sativa
  unsure (1)..(509): unsure at all n locations
ngatgcttgacttgacttccgaacagacacgaagctgactgtttgttctccangttttacaactaaaagaatnggagggacatcgaggagaattttaaaaaccgtttcgcaaagaaatgccgaaggacgagaggagacattntgcaaatagggttttcagaaaacttgtccttagggtttgaccatttggctcaacctacagtcgagttggctctgagtaccacttgtcacgcccagaaatttagcccaaatttccagactatattgtgtattaaatctctgtctaggaccagccagggtacacaaaacaacaagtaataaacagttccaaacgtaaataaagcgtanaatacttacagaagaggcacttagtcctcacaacgaaagagaatgacagcagcggaaaaaggcgatcctagcggtgcttcagctccactccacaagcaaaacatcaactgggtctgagccttggtcttctaacttcgtcttcagctcagaagcactacact

SEQ ID NO: 23662 - DNA, 417 bp, Oryza sativa
ctcagcttcattggagcacatgcttgctgtcgacgggcacttttcttttgttcttactgcgagaatattacctccatgaagttaactcctgacctgggcaggaatgtacttactgtgaacttttgtaccagatgggttgactatgccaggtgggtacgcgttccaaaggttcacgatgaggcctaatgttggcataccgtaagtactacgatatgtatctacaacgctacgacattcttctctatatagggaacatctctactgcgaaaggcagaagataggcatctccatatgtcgtattcatatcaacagtgtcaccgcatttatctttatagcctgcaagcttgtagacttgtctctgtaatatacgagtttctgacccagcgagcactctgagggacctgtttattgtttgtc

SEQ ID NO: 23663 - DNA, 376 bp, Oryza sativa
  unsure (1)..(376): unsure at all n locations
tgccaaaattcttcaatggattaatcctctagtcctgggatcacatggaccctgctgctggaaagacattcttctcaaatatgggtagaggtgccactaacctgattgagaagatgatcttcaacataggttggagcaaggaacgactcttaacccatcaacgcggcatgcacaccatcatggagacngaaatgctcgctgctaagttggatctccttaaaaagagactagacaacagtgagaaatactgccagcagggtacttgtaagggcctgggctctcacatgacatgtaaggtctgtggaaatgacggtcactcttggacagatcgttcggaacccataaggatgtcatggtcatgaanntacaacacggt

SEQ ID NO: 23664 - DNA, 438 bp, Oryza sativa
  unsure (1)..(438): unsure at all n locations
ntcttcacgggtcatatntaattgcagcaacaccttattataattataagtgagantcggctctcttataaaaactcagacatgtttcagtgatgacaaggatcatacttcattggaaaatgaaggcatgaaaggctccagcaaacaggcaaggagatagaccacaccaactgaagttttcattacaacagcacaggctgctggatcttccttataaagtttccaaaactggctctcctgcactcagttagcgaattgaagatataaaagtgttacttaaaatagactaaacgaaaaccatgacaataaaacaaattacttacttgcagatatgcatttccatcactagaaatgcccatagcgctcttcagtccttggttcaatntaacctgtcaagaaaaaactattaaacatatgttccaaaacctactagcttgc

SEQ ID NO: 23665 - DNA, 444 bp, Oryza sativa
  unsure (1)..(444): unsure at all n locations
tactnttggcttctcttcctaacaggtcagagcccatcttgattatgtaaaggatgtccgctttggagattgtgaaagtgctgacattgagatcttgaataccttccagctacttacagctaagccaggtgtctatatggtacgtatttttgtcatctgtatgccagtttatttgagatgttataaagtagttntcatgatgaggtgttcagttgttctttgtgagatttcagttatgctattttcgtgcttctgcatttagagactcagttataatgtcagtacgttgattcatggctatacatgcttttgaatttatacaatagtgcccatgaatagcgcatattggtttctattagcaagataaacttggaatagtgcaaaacttatcctgtggactttctgttgtgccctgttagtctcgttcagtcttccttctattat

SEQ ID NO: 23666 - DNA, 451 bp, Oryza sativa
  unsure (1)..(451): unsure at all n locations
gcgcgagctttgcctttatctttagctgctccatcggtcgccaggtgctgcgtatgctacgctggactaaggtctctcgactgagctccgtgccttgtttgatctagagcggacaatgaatctgcagagattgccctgtgggcacctgtcataatcatagcggaatggcnaaggcttcacttgttacattacgctgatcatgacgagcttaccagacacagatcaactgaattcagctgcagatctttcagtgtactatacattgcgagtgggacatcttcacgtgcgatgatgctgcacctgcagagtatgggacgtcgttccgacgtacggatagaacttggtgcgatgtagcggactcaacttgcactactggtagcggtcggaagtagacgtctgtctctataacgaactagagagcagttgtcagcatcatatcttgtatgtgatg

SEQ ID NO: 23667 - DNA, 373 bp, Oryza sativa
ctcttcatgggacaaatcttctgttggttctgccctacagtagtagggcatttggtaatttgcggttgtagagtagtaattaaggtatgtcgcagtagagccctccatgacctccataggcgacgttgtaccctggcttgtccgcgccgaagaccagcggctgggcaccgtagcagccaggcgtggtgacgacggtccgatccaccgagtcctggaagagctgcccgacggcgctgatcccgaggtacttcatgatggtggcggcgaagcgagcgccgccgcacgctcgcaatgcctgtagccatcggcgcgcgtcgtcgtgtgggtcctcccggacctcgtgtgcaacacccttccccacatgttcacatac

SEQ ID NO: 23668 - DNA, 421 bp, Oryza sativa
  unsure (1)..(421): unsure at all n locations
agagagagagagaaaggaactattctactcactttactactactttacccagatcaaattcagaaggggggaaaataacagtacaaatcaaccatatgaaactagtactgaactgcttccaacagccattgctcaagagacgagaagagcttaactacctgcacgaatcgagctgacanaacagtgagagaagaaaaaaaaaaattcaaacttgttgggcaaatcagcatctaatcaagtaaagagacactcattcgaccaccaatcttgagagttgagacagaacagccccacaatctaatcagcaatgccgtaacagcagaagaagactgtaacgatccgtcagaaaaagtaaatgtgaagaacacaagtactcccttggtcttggctcttgcagcagcagcaccggactgaccgagtg

SEQ ID NO: 23669 - DNA, 509 bp, Oryza sativa
  unsure (1)..(509): unsure at all n locations
tcttnctgctatgatacctgacctgtacaaacgagagatgcacaatattcttttatacagattcacaagaatgatcgaagatctaaaggatagtaggcatatttgtgcagagtatatgataaatgctcagccttatatgcaaaaaactaaatataggtttgtcaaacaaagtacctttttctcgaaacatctatcttttcttttcatccggaatttcaacaaggcagctttacggcgagaccggtcaccatccaatacattattactgcagttctggacaccgctctcattgccactatctagtgcaattaccgtatntgtatttgcatcagnttcaccgctcccagtgcatccacttcctttgcgaatatcctggctacagctagcactctggttaatacgctccatatgagccttcgccaagtcaactggttctcctgattctctgagaatangtcttgaatgatgcaactcgatggtttctttctgctgcttgtgctcatcaatct

SEQ ID NO: 23670 - DNA, 194 bp, Oryza sativa
  unsure (1)..(194): unsure at all n locations
gagtaacgantcttggatgcacctctctacaactccagcaacgacataatcctcaacattacgtcctagtggcctacccaaagaaatgcgagtagtacgtacaaaggttggacctgcaatcttaacccagacggcattgccgcatacaataggctcctatgggggaatgaacgcactattttctcatcctccta

SEQ ID NO: 23671 - DNA, 430 bp, Oryza sativa
  unsure (1)..(430): unsure at all n locations
gatntcactaaatatattgtttaatatattcattatatgccgaaatgctgctacattntcataaaaacttggacaaacgtggataaattaaacttatgatagataaattaaagagaatcttataatataacatggagggagaggtaattcttccacttcttacttagggcccctatgaatcgcgggatngaaaaaaacataggattttgataggaatgtaagtgtaaaacaaagaattgcaaaacgcatgataaacacagaaatgactgtttgattgaaccgcacgataaacacatgaattggatgagagagatagactcataggaaangtaccaagaggttgaagctcttgctaaatgtcctctaanacctctataggagggtccattccataagaatcttagagaattagatatgacttaattctttg

SEQ ID NO: 23672 - DNA, 397 bp, Oryza sativa
  unsure (1)..(397): unsure at all n locations
ngaatcctanttttcttccttggttgggtgttgtgttagtgacttgtgtcgaattannttgagagacattggagggttcttggttttggttctgattttgattntgattctgatttagtttttgagttacatgaacaggttcagaaatgtgttgctacgaaagtgcaagagcctgtcacgctctctctcgaggtcgagctcctacaggaacctccgatccatgttcacccgggagcacgtcgtcgccggcggcgatggcggcattgtcggcggcggcgacagcaaggcggtgtctgccggcggcgacagggcggtggtgttcgtcgggagctcgcggcggcgctacgtgatcagcaacaagcacctcagccacccgctgatcgccgcgctcatcgac

SEQ ID NO: 23673 - DNA, 506 bp, Oryza sativa
  unsure (1)..(506): unsure at all n locations
ctcagctagatctctgcatttccgacactccttgattgaacaccttctttatttgccacctgtgtaatcattcctcattgatccaaagcaaatcttgtgtttagattggactgttgcatggtgacctgaattttccagttgtactgcagcaaagatggtacacctttaatgcttatcatcaatattatttctttcttttagaatgaatcattgctcttatttctcggcgaaagtgtattgttaatttgaacttgaattcacgtcaacctatacacaacatttttgatatgatagtttgaactatttcatttctatgagagagaggtgaactgtcaattacctgatagcatcgtagtagcatgcagaagcttttcanaaatgaaacataaacgaatatgctgactcccagtctactttcaataagaactttaagaatctagccagggtacgtatttgttgctgatcttcatctctttaagagctcatatgctatacaccacattcac

SEQ ID NO: 23674 - DNA, 513 bp, Oryza sativa
  unsure (1)..(513): unsure at all n locations
taactgtgaagaaagaagtggaaactaactgccataaganactgatatattctatcagatcaattaattcagcgtggctttatacggagtattgacttcaatctgcaagaaagtgatgttctttagcagtatctgaacctgttcaagctaccaatacatgatctatcttcactgaagagaaaaagacgaggacaaagcaacaaaaatgtgcgagtagtcgagtagatcatcacggattcacgcatggngcctctcattcgggatggtggccacaaggcttattattatcctgaattccttgatgctatgcattcaattattagcctgaggtgatgttgcaacctcctgcagttaacatctctaatttcgtacaaattgtgcggaatactaatggtgattagagatgttaattaacatctcaattcggtgcgatgcacgcaagtctggccatcttaatggcttacattaatccaggatttttctttcatctttgaagcattcaagctacaaaat

SEQ ID NO: 23675 - DNA, 499 bp, Oryza sativa
  unsure (1)..(499): unsure at all n locations
nntgagcctcaaaactgtcgacagattactagctagttccttgtgttattatttaatangagtataggacgtaaatctcttctgctacttacagaaggagtttcgtcaatcccctccgcaacgcttccggtatgtgaaaaccctttcctttctcttaaaaataacatctgctttagaaaatgatttcctctaaaagaatccaatcatatgtctagaaaagataaacgagccactcagcccaattctttcaatgaaattgaataaaaaaattgtatcgaagaacatcatgttacaacacacaagtcaataacctttttctttaaaaaataatagtaatcccggttttgcttcaataaaagatagccaatgagcccataaccatagaagatctgagggcaaaaaatatataatcaaacaatgcggnggtattctatatcttactaattaagtacaatccatctattaagtgatcctattaatactttgtgaaatatcatac

SEQ ID NO: 23676 - DNA, 424 bp, Oryza sativa
ggtgaggatcattgctctgaaggacgagatagcgcgtctgaagagggagaatgctcaattgaagggtcttcccgcgccaggaggagttcggatccgcactacgccccgcaagtcgacaacggcacccgtgcgcgtccagcttgcgcctaggaacccacctccgtcagcagctcccgcagctccagcagttcccgcagcacctccagttccgcccgcagctccagcagttcctgcagctccagcgccagctccagctcctgttcccatgtcagctcctgcatctgctctctccttcgctcctgcatcagccgtcaggggccccgccagtggaaatggaggttgtgtgccagctactcccagtggcaaccgcgaccacagcagcagcagctccagtggctcagagccgggcagcggcgagacttat

SEQ ID NO: 23677 - DNA, 506 bp, Oryza sativa
  unsure (1)..(506): unsure at all n locations
tcataatcagttcatcaatcagagaactctatgtattgtangtttgcttgctagatcatggcgacagagaanaacattccatagtgaaattctaaaattttgggtgttttttttctaataatacgtgctaagtgttacgtaaaaagagattggtcatctggcaaacctatggctgcggctgctgcagtccactccttgcctcactgttggtgctggctgcactgccgtagtctcaagcaactaaacaactctaaacatttcacaaaacctttgcatctatagaaattcttattatttcgggttgtcttcaccaacaccgccttgaacttatgtgtgtttaataatataaaattaaccgtaaangtttttcttttattgtctaatttctagacaatattcaaccaaatgttagaagacatgcaatttgatgaanaaggatgnggttctgtgtgatattatggctaanatatgaggccccgggtattccgcaatcgattntgtataca

SEQ ID NO: 23678 - DNA, 309 bp, Oryza sativa
  unsure (1)..(309): unsure at all n locations
actctcatagattcatacacgatcgatctctctatgaacggtacaaatatgctcttggttcactcctaccatactgagtaatctggctatctgcgattgtagagtgagaaataaggtatgtcatattacagccctccatgaccttcataagcgacgatgatccctggctagtctgcgcgcgaggacancagatgggcaccgcancactcaggcctgatgacgacagtccgatccaccgagtcctgaactagatgcccgaccgcgctgatcccgaggtacttcatgactgtggttgtgaagcgagcgccg

SEQ ID NO: 23679 - DNA, 455 bp, Oryza sativa
  unsure (1)..(455): unsure at all n locations
tatgcgaaagacgactcctgtttattaactttactatctgcgaactactgcaacccaatgntgagttaaactattntgcgggtataaatagtttgttgtcataaagttttaatttactcatcccgagcattatatccatataacaggttagaaatttctattacgagctaaatatctgacgaaatcttagaaatattatacaagttaatttagtctatgactaagcgactaaatataatacacggctaagattcctagtaattgaatccgagattctaccatgatccgatgacttatagagattatcagtaagaatctatcataatctataagaagtcatctaattggttgggtattaattatatctaaattactaccaaattttatctaatctgatcaagaaacagatatgtataattaacttcggaagttcgatcgatataccattacgctcg

SEQ ID NO: 23680 - DNA, 469 bp, Oryza sativa
  unsure (1)..(469): unsure at all n locations
tctncggttcttggtctctgcccgaggcatngaggccaaccccgagaatatactagctatagagcggatgcgccctcccaacaagcttagggatgtgcaatgcgtcactggctgtatggccgccctaagtcggttcatatcgaggctgggagagaaggcgctacccctatttaagctcctcaaacgctccgggccgtttatctggacggaggaggctgaacgggccctcactcagttgaaggcgtacctcagttctcccccagtcctggtcgccccggagccagatgagccgttgctactctacctggcggcaaccccgcaggtggtcagcgcggcgttggtcgtcgagcacgacgaggacgaccctcgctccgcgcatcctcaccctgtgtcgactcgacccgggagagagcanggaggagaggactccgagccgaacggtggcccaaggtccctgacggccggagtt

SEQ ID NO: 23681 - DNA, 521 bp, Oryza sativa
  unsure (1)..(521): unsure at all n locations
tatatccaagactntggcaatgagactggcagcacggctgggtgatttgttctcgcatgcccaaagggctntcatcaagaagagatgcatacaagataacttcctctatgtgcgcaacatggcccggtccttgcacatgcaacggaaaccatccctcttcttcaagttggacataacaaaggcatttgattcggtatcttgggaataccttgtcgaaatgctgcagtgcagaggctttagtcagcactggagaaattggattgtgcttctcctatcgactgcatcatccagaattatactcaatgggatagcgggagaaccaactacacacaggcgaggcctccggcagggtgatcccctctcgccctacctcttcatcctagcaattgacccgattcaacgactactcaataagggcacgcaagaggggcttctatctactgtatcaaaccgagcagcgcggttcaaaatattcttatatgctgatgatgcagcgatctttataaactcgatcacgaatg

SEQ ID NO: 23682 - DNA, 517 bp, Oryza sativa
  unsure (1)..(517): unsure at all n locations
ctcagcttcgaggggttgcacttgattnttggctgggtttcgtgcgtctcgtttggtaataatcccaacatggggagtgctgcggatntatctcgttgagggtaaccgttttcggcttgggggacccccgggatttgctgtggcctccctctcctgtggcagctggagagttctgtctgtggtggctgtcatgccgtctntaggggctgaaccgtgtaagagttgaaaccggctggctggaacctggtggcgtctaaaatggtgctctcgtggtaatatagtaaatagtgtttgtcacttatctggataagcctaaaccagttgtgccacctcttatcttgngttntatccagcattaacacatgaaaaaaatatgcattctcttaactntcgtttgtatatatcctgatattgctatagtcagtattctatcataagcaaaggacaggatacctaatatgaaatgagtcattagtatagtgagcattaactantttaaacttgaaaaatagattaa

SEQ ID NO: 23683 - DNA, 500 bp, Oryza sativa
  unsure (1)..(500): unsure at all n locations
ctcagcttgtttaaccaaatcgggtctactctacaacccactcactcgtttctatctgttccagaatgtacaacgtaagagatttagcacgccatccgcagaacaatttaatatgtcgcgtcttcatttntttttttaaaaaaaaaggagttcatagattattttgaggaaacaatcctcctctccatctatcccntgtgtgtgtgtgtgtgtgtgtgtgtgaacacattactcacgagataacagctggtgaaagcagtatgtgctaatcaaaagaacattgttcaacttcaaagcatcagatgatacaacattgcaaggccttaagtgctacctatcatctcaggaatgatcttttagaacaaaggctgcagagtacctttactattagaaggcaccccatgggaccagttacagctcgaatagcctacaatgaacacatgcagctgaaacatgtaagctatggtaatctcagcagtaaaagcagcttacacttttac

SEQ ID NO: 23684 - DNA, 456 bp, Oryza sativa
  unsure (1)..(456): unsure at all n locations
tgtatggtatgcataaatgcaggcagagtatgtggatgctaatttttagaatgctctcctaaaatgctatntgtgatgtttgcgtttcactctgcatcttatattcacggaaccaaataagtaaattttgagattctttagaagattcatcctcctgcactgtcccacatagataaaggtttatttcccaactgagcaccacttcaccgctctgttttctatgaaccagtggttggagatgctgagaagttgacaaaggcccttttctcctttgctagccgattagctcccgttatcatatttgtggatgaggtatgtttacttaaatgaaacaaacaagtgcttatattcccctcctatgtgctttctcctggtatgaatataattagttntgacataacaggttgacagcttattatgtgcaagaggtggtgcatttgagcatgaagcaacaag

SEQ ID NO: 23685 - DNA, 456 bp, Oryza sativa
  unsure (1)..(456): unsure at all n locations
tctccgaggagagcgcgggaggcgaagccacagagtgacgatgcatctacctccacaacgctgtacctcgcctttctccctgcgccgcacgcctcgatggatgcgaagtccgcgtgaccagtttaggcttcgcgcgcctcgcttggctccgcagatggctgacatggaggcaaatattccatgttcggagctgaagccgaacgccacgtgggcgcactgtgaacgcccttacatgggctagcatgtttttgacgtgccatgtaggagtacggagtactacgcacatcaccgccctcatgacgtagagcaggatgttaccactagattgaacagtcaaacgaagtgcaaacttgatctacgtagacacaaattacgcaaactntattcgaaagatgttttgcaattttgcacaataggagtactgtacagtactgtgtgtggctcattntccggaat

SEQ ID NO: 23686 - DNA, 516 bp, Oryza sativa
  unsure (1)..(516): unsure at all n locations
cgaaagacatatgatggtagggatgaanacggagcggatacttttttgttctctctcggataanaacggatacggatacctttcggatcggataattctcggatattctggatacggatacgaatacggatattttctcccggatacgaatacgaatatggcatcaggggtttcgtcggatacggataataattcggatatccggtgaacagtgctattccgatatccgcaggacccatgagacataccccatatctttctaactctataaccattaatatacctctatagagtttaataagagnttatctcttaacactaatccatactattaatattatttacatattacaaaatatttataaattataccttcttctatataaaatgagctaattatatatgctgatattatttatattacaagtcgagttggtgtggcgtttccagacaaattgactcgtattctgtatgatatattcgatcttatgtgatcgaataatacgtataggttca

SEQ ID NO: 23687 - DNA, 475 bp, Oryza sativa
ttattgtacttattatgggcggcgaatagtgattgcttgccccttcccttgcttcagaattagtgaagctcaggttggagcaacctaaccttaattgtgtgcataaccattccctaagtcaaactagattgcctgcaaattcattcagaccattattttaccaatcttggtgctaattacccttgacataagaactttccatccatagaagataaagtaatctattgctatgacgcacgtgctctgatacggatatatggaagaatctatatctacatgcatctatctatacctaattaaaaaatacgtacgacttccggaattattttgtccatcgtcatcgtcatctgcacactaattgatgttattaagcaaaagagttgcttgttaacggatggcttattccgagctgatacgaacggaattctttattttatgaaatggaaaaaatgaatatgatcgaattcctatcgga

SEQ ID NO: 23688 - DNA, 404 bp, Oryza sativa
taacatcattatgcaacgcgctcctagtatgtggattttcatattatctgattgatcaactacacatgatagtttgtatttctgttccaacctaaatatctactactcttctgaacaactactacttatctagacgtatagccagaaatggctatgccgatttatcatttacacattctgatcccattttgtcatcatctattgtatgcccaacatctatatctttttctatatacatacaagagtaattgtgtcggctaccatattatctgatgaatctttctcaacacagggcttaaaaatacagaaggtttaactatacattaattaatgagatgagctcatatctcgagaggcatgatgattctcacaaaccaatacagttctctcgggtgtgtcacaag

SEQ ID NO: 23689 - DNA, 495 bp, Oryza sativa
  unsure (1)..(495): unsure at all n locations
tatgaataggacattgtttgtccctccctcctttggctcctctggcggcggattgtggtgcggttccaggtccggaagggggatgtctatgggcagaccttcttcatcagcattggtgagagagaagctcgaagatcgcgggatgaattctggagcgtcagtccaaatccataagtcaaaagtgcggttgtagttcctgcggtgggaatactcttcaacataatgaacggagcactttcttccaatgatcttggctactgcttcatctgtacgggcatgcattgggagcccctcaatgcatactcgagctctgaatctgaaacacgccgggacaccatgctagccttcttcccacgggcggaagagatagactcgcccagacttggtggaagccgtggctgctcangatggcattcctgtactctggctgcacatgtgatgaaaaatcttanggtgaacttcgaatctggtatccgaccgctaatccggaatgtg

SEQ ID NO: 23690 - DNA, 487 bp, Oryza sativa
  unsure (1)..(487): unsure at all n locations
taattgtaaaaatcttggttcatggttatactatcatgcatgcttgctatattatagatgggttcatcttctttttattgcaacacatgacatgatatgctatatgtaggctaagctcatctacattaatgaacataattcctatgcttgatgaaatcattgtcaaaagggggagacgcaaggtgaaattttttggagaagtaaatgagttgaaaagtgagcatgttgttcttggttcgattgggaacttctttcttttcataagtgagagaagttttcttttggacttttgagcatgatgtgtacgtttgtacgaagtgtgttttttaccacttttgtttttttccaaacaccaaaaaatattttatgggttngccaaagtgttcatcaaggtggagactgtaaaattaaaggtgttttttattattattctgtgataaacaataggcatcggagattatcagttntgatgtttggaatatattca

SEQ ID NO: 23691 - DNA, 465 bp, Oryza sativa
  unsure (1)..(465): unsure at all n locations
tatgtatatataatataaaatgactttctgtcattaaaactaaaatgcagttggccaagtacaaataaaatgtcaataacaataacatgctgagaaattcctgacctacacatttgtctgttgaatgtgttgttcttgaacccaccagtgtttggccaatgatgcatctatgcctctatctgagttccttatttggttgagactttttctgaaaggaaactaactatagctgaggccttatatctttgatcttttaacttcgtcaccacttttctttcttgaaaattacttagttggatgatgttgacaaatcatccctgtgtattcttgtgtatgcctgtgaaagtatttatcctcactctgatattgtgtcttctttggtggacgccgaattaatactnttagctgtagaaattangagacaatatatcttatgtactagtttactcaaaactcattttactc

SEQ ID NO: 23692 - DNA, 514 bp, Oryza sativa
  unsure (1)..(514): unsure at all n locations
caacaaatttacttttgtgtgacatcctcatctttataatgtgttcacattcgaaaagtcgactcctcaaattagtgtgtgttaacctggcccaatatagccatataggtctgtgacaccatcaacttgcatcttgcaaaggaaaaacagaaaaaagcaagatgctgatacaaagagtggtcacaggtcactggttcacagtacgtccaccgaaaccattgtccacaagcacataataacacagtaaccaaggtactcattagcctcaagttcattgcagctagcaaaaaactgactntaaaaagtagtccactaaagaagcactaggatgacgaatagcatgcaaagttaggaccatcaatcacatctcagctaagcataaaagagtcaactaatgaagatcatgaaattagctacacaaatttctggtgagcaataccatatctttagatgatatgcaaaactaatntcttttattttcaatagctggaacgcaaatcacannacgtacatg

SEQ ID NO: 23693 - DNA, 415 bp, Oryza sativa
  unsure (1)..(415): unsure at all n locations
accatttgagcacttaacttgtgcaactataaaaggggtaggcctcacagccccctatgcaacaacaacttcaagccatctnctcttcattctctcctagctttctcccaacttccagccattgctctcatagctgatccaccaaggagctagaagtaattccagggttcttaattgcggcaatggcgatcccggtcatcgacttctccaagctcgacggcgatgagagcgaggccaccctggcggagctcgctgcggngtttgaggagtgggggttcttccaggtaatcaaacacatgannaaccatgctgaacaatgcataaatttcttccaccatcagagcactgataggaagagatatatgatgtggatcaattatgatgcagctggtgaacactggcatccctgatgatc

SEQ ID NO: 23694 - DNA, 462 bp, Oryza sativa
  unsure (1)..(462): unsure at all n locations
acggacgtcgtcgtatcaacgacttcttacgaacaacttcatgctggactgctggagtagcgatgaagtttgagtggttgatgtgaagcagtaaatagcggatcgttgttcgagtcggtgagccgatggaatggatgacagcgtcggctcatttattggcagcatacctccgctgctgcccagatttatgaaccctaacttttccagcaaagacacactgttcgtggatcggggcaagctgccgtagatcctggattaaggcccctttgaatgaaaggaaaaaccataaaaataggagtttatcctataaaanataatcctatagtgtcctttgaaataaaggattatttcctatcaattcctttgaaattactatggaatgaaccttactagagtaactttgaaggagaataagcatgaggtctcacctcatgttttcctcttcatgtgtctaagaatcct

SEQ ID NO: 23695 - DNA, 476 bp, Oryza sativa
tgtaatgacatattccgtagctaaatccaagtcattatcagccaatgctatataaccaacagaaaggaaaggaagtcttaactgtgatttgtttatttttgtacgagacaccttgatagcacactctggactagatgctttcttcctcttgagtactcctaaatgtgtcaaaacaaataaatgagataaaacaacagatgcactgctgatagaaaacttatcaaacataccaaatactttaggttcttaccacgacttgaagaagggactgaatctttttcctgtacaagtttgaatcttttctgattaaatagttggtgacttgaaaaggtacatgtaaacaaagagcaagatctttttaaccttcaacattttgatctcatatatgccattggtaaggagacggtgagcatgccaaccctgcatagcacgcgctgcataatcccttctaactcttgcagacgatgattgattca

SEQ ID NO: 23696 - DNA, 464 bp, Oryza sativa
tcttcgctgcacctcgttgcccgcgtgcactcttgtgtccaactgttgttttactaccactagcctcctactcctggttcccctccacatacctttccacgtgcccctgctggatccccttcgcatacctttccacgttccctttctcgttcaagaactgagtaggatccttcatcccctctacttcattccagaactcggctgcatccctacgcgaatgtatcgtacaaaatctgttcctcatcgcggacaagcatcttgtgatacaagaaacatctgctaagtcacgagacatttatgttttaacaatctaagtcatgtatgctaagtgtaaatgtcgtacattaaaaccctacacaaccttacgtgctaagtctaattacaaatcgagatatcagctaagtctatgtgacgcattatataccacccttactagtagataatatatactcaatctaattaca

SEQ ID NO: 23697 - DNA, 413 bp, Oryza sativa
  unsure (1)..(413): unsure at all n locations
ggcttcctctctccctctntcttcacaactggtgagttgttatctctattaatttgcacttaataaaggccagcttctgctggagcgaagtggaggccctgccggaggctgggtgggagcaaagcggaggctgaagctggcccattgggttgtgcacctggggcgccccgcggtacggatcgtcatcccttatagggttccaccatatatatacctcttgtaagccacagtgcggcgttgtaacctcaccccgatatagcgaagatattttgctggctggcgcccgtggttatttctctcctgctttgagagggttttccacgttaaatctcgtgtcttatatgattgatttattgttctttatcgcttggttgcctatncgttcctaacaagaggtatcagagcttgttcta

SEQ ID NO: 23698 - DNA, 310 bp, Oryza sativa
  unsure (1)..(310): unsure at all n locations
gctgagctgagctgctctcatggtcatggngatggtggccaatcgaagccagcatatctctcgctgaagccgccgccgtagaacctgacctccacgttctcgaggccctggccgtcgtcccaaatggcctcgtcgtcgatcccgacggcgtaatagatgacgtcgtcgtcctccatgagctcccacgagtagatggaggagtcgtcggagtagtcggagcactcctacacgtagcatgttctcgaagcaagtcgtctacgccggggtcgagcaccctcagtccctggtgcctcttctgcangaacttgtc

SEQ ID NO: 23699 - DNA, 509 bp, Oryza sativa
  unsure (1)..(509): unsure at all n locations
cgtattaattcttccggnttatctgacagacagaaattaacaattcatatgactngcaggtaaaatttaaacaatgataacggcgatgtggcaaatgacttctatcaccgatacaaggtgaccttccattntgactgactgacgatgattaacatcgagtgtctgaattctctgaaacgggtcatgttttgacaaatccgatcaaatttcaggaggatgtgagcctcctgaaggacatgaacatggatgctttccggttctccattgcgtggaccaggatcctgccaagtgagtctcaaaattttctcccctttcttttnttgttttgcgaaacacaatataaacgcagacatgtgagttccaaagcttgatgttaatcacatagccactgcgtgcaaattgtaattactgcagatggatccttgagtggaggaataaacaaagaaggggttgctttctacaacagcttgatcaatgatgtcatagcanaaggtgatcactnaacttta

SEQ ID NO: 23700 - DNA, 369 bp, Oryza sativa
  unsure (1)..(369): unsure at all n locations
tactagcttggctggctcgatcatcataaagtgtcatgtgtctaattttgtatttataactagttnttttaaagaaacagtttaccacgttggctctagaaccttgagtatagatttgctttcatttaatatattctcgatggatgacatactactatacgcgaaatttgctacaggacacataaaatttgttaattatctgatggaacaccgacaaacgcgacattgctctatgatactaatagactgtgagatataccgaccgggcgcattatttcattatttgccacttaaagtgatgagatctttctcgaaatgcctagattgccctctcatgtcattacacactattaatataatttcatcatc

SEQ ID NO: 23701 - DNA, 392 bp, Oryza sativa
  unsure (1)..(392): unsure at all n locations
ctgctcaaccctaaattgcttccgccgatcggtgagagctccgatgccttcttcttcttcttcttcctcccnctctacctgttccttctccgagataactgcaacattttcagcactttttctggccattctcaagtcctcaggtgtgatttggttntgctatgagcttgtttcaactgcctctccacgaattgtgttgtgcaccttggttgatctaaatgccagcctgttcctgttccatatggtttgctgtatcatagtgngcgattagattaccttgcctgttnttagctgcccgtgctctactattaatcaagtcattgtgtgcttctgtgggggctgtacaacctgaatctctttccatttcagcgccatttctcatatgaacttac

SEQ ID NO: 23702 - DNA, 452 bp, Oryza sativa
  unsure (1)..(452): unsure at all n locations
atgcgtctcatgtgttgngacgacgctcatgtgttgtgctttcttatagtgcgggtaaagtgtacatccactgcagtgtgagtaaaccaaatctattcgaatagccgtgctcgcggttattgagcaccgggacatgtattacacttggctagactctaaattcttaacttgtgtgggatgggatattgcatgatgattattatngctgtggagccacttcctgagaggcgggaaggtggacgtcctcagaaaaccatgacgactcaatggcgggaagctatccttgggatcacaatggatggtggacagaaccgtcgttgtttaatgtggacactggtactaaaatttgatcagtctatgctaggtcttaggcttgtgaaaagaattacaaaacttgctttgtgcaaaagaaccatagccattccttgaataccctctatcatatgcattgg

SEQ ID NO: 23703 - DNA, 504 bp, Oryza sativa
  unsure (1)..(504): unsure at all n locations
cttgccaccctcaaacggatggttttactgaagttgtgaatagaacactctctatgctgctgcgagccttgataaagaagaacctgaaggaatgggaagagtgcttgccacacgtggaattcgcttacaacagggcagtacactctacaactaacatgtgtccatttgaagttgtatatggtttcaaaccacttgctcccatcgatttggtgcctctaccattgcaggaaaggagtgacatggaagcgtccaagcatgcaacttacgttaagaagattcatgagaagaccaaagaagcaattgagaagaggtccaagtactatgctgcatgggcaaacaaggatcgcaagaaggtgacatttgagcctggagattnggtttgggtacatcttcgcanagaccgcttcccacagaagcgcanatccaagttgatgccacgaggagatggaccattcagagtgctgtccaagatcaatgacaatgcttacaagaatgagctacctg

SEQ ID NO: 23704 - DNA, 499 bp, Oryza sativa
  unsure (1)..(499): unsure at all n locations
tatgagagtttgtaaccttgttctaatgtanaattatggtcaaatctgaacgggtaagaaggcgaagaanatgtcaaatgtcttctttttttcccaaagggagtacatatgctgataagtacaatatttttaaaagtgagctcttatcagagttacaattgctgccgctctgctcaacggcccagatgtttcgctcggttcagttacaagatccgacggataagaagcttcagtgagatgtaacgtaaatcgagttatccttagtttagctatttgttacactgtttagtttatttaagacgcactgagcaagctggtgcagttaggaaggatagctaataaatgtgcatccagcagtagtattgatttgttaaatgtgaatgacggttaataaaaacagtaacttaacgtgcatgacagatgataaatcatggtanataaatatgtgagtctagcattgctcacatatatgtatagattcattaatatctatataaat

SEQ ID NO: 23705 - DNA, 499 bp, Oryza sativa
  unsure (1)..(499): unsure at all n locations
ggctgtttgactggctgataagtatattgtatatataccacatatcactagaattacttaattacgtactctcccggcttaattccatatcatagttttccgtatcagtatttattaacgagtactcatattctttccttcataattaactgaggtcatgtccttcactaaaacacttatactagtattttgataaatctcaagaaagctaaaacaaatctcaagtgtgttatattttttacaaacctcaaaagagagcatggagaattcgctntatattaaaaagaaaagagttgaccctttagagaaaaaacagatccaaaaacttcacaactccattgttagtttagagaaaccgaaaaaaatccatatggagaggcaagacaaanaaacttgcaatagcacaactgctgcgatccaatacaagtcatatttcccgggcttatcacaagacaagcagctccgatatgctattgcgattgacggactctaccactac

SEQ ID NO: 23706 - DNA, 491 bp, Oryza sativa
  unsure (1)..(491): unsure at all n locations
tcanacctactnntcaattgctntaccgcttcaacagatcacactattgtgatcttcggaagcatatcanactcttgctatccctcatcatagatctatccatctttgaccggttactccgccaacctatacttaccaacgactagatccatttattggacctagctcanagttcctggcctctagtgccttcgctcatcgacgccatccatgaaagatagtgaagaaaaggccctccaaatgccacatacctttgttctcctggtacgaacacctctggtccaacaacacttaggccctaaattcagcatcgctccctaaccattgctggcacctccaacaagcctttcattngctcctccccttgctcactagaagaacgttggatctgagtattaggccagattgtaccttcctggtagccgtgagcactgcangcaaagctcgtcgtgccttgctattgcatcacctctgaccatgcgtcgaattac

SEQ ID NO: 23707 - DNA, 525 bp, Oryza sativa
  unsure (1)..(525): unsure at all n locations
ttaatacttatgattattagccacacgtttccatcagtgatcgatatatcttgtggatcttaccgtacatccattggttttcaactaaccctggatatacaacaaacattnntttaaattntgttgttgcccttntgacaagctagctagctaagccaggccataaatacaatggaaaattgaattaaatttgcatgtgtggatgcatacactctccaactagctagatcgtanggtgagtttgaggacagggggattgaaaagattgagaagatacgcaaagcgaggtgagccattagcacatgattaattgagtatntaactatttaaattttaaaaatagattaatatgattntttaaagcaactttcttatagaaaatttttacaaaaaatacaccatntagtagtttgggaagcgtgcgcgcgaaatatgatgtccttatctcacccaatcccncagaactcatcacaacgaacgcagcctaactatagaactcgttgattggtaacaagtgaaatgact

SEQ ID NO: 23708 - DNA, 502 bp, Oryza sativa
  unsure (1)..(502): unsure at all n locations
tgctccttgctcatggtccacagtaagcattgaatccttgattgttgattttgcttgcagatcagcttgttgttgttgcatcatattgctgatatttgagaactgtgcatcaacactatgctgctactcctgcgcctggatcacgtgtccttcgagggactgttgtcccagcgagaggaactcgagcaccaccagctggaggttggaggcacgccacttgagcctgctgagttggtgtgcccccagcgcacctcatgaggcatctgccactangaactgccggcactctgctaggcagatcctccagtgctatgacgtanggcttgagcccagccggaggcatctctagctgatttccagccactctcataagcatgaccgggtggtgagtacgttgaatcctcctgttcatctgctgacattctgcggctactcctatgtgtcgcacctgcacgggattcctctatcgtctgcaagggagatggtagtgcataacagttat

SEQ ID NO: 23709 - DNA, 516 bp, Oryza sativa
  unsure (1)..(516): unsure at all n locations
gcttcagagattctgcaagctatcaagtctttgatgctgaataattttgtgtnnggagnactgacattgctgaactgaataatctggtttagaatgtagtctgaaaatctaaaccatattatgcgtgtggtacagtcaaaatttcagtaaataataatatgtttatgcctttntacataactcaggaaaaggagagggcatgacctagccttattcttgtgatgatttgtgacaccaaatcagggaaggagagggctagaaatggtaatgtttgttggcaatcataattggacttcagaaattcaatgtatttgttaggaattcacctagatatattcacgggtattatgaattcaagggatttgttntgtagcgatttcagggatccctgtttatggttatactntntntagataatggaagctttattaatctcaataaaactctatcaagtgatacaattattctgagagcacctncggcttctgcacntcaagagtgcacacaaccaacaag

SEQ ID NO: 23710 - DNA, 509 bp, Oryza sativa
  unsure (1)..(509): unsure at all n locations
tctaaactaggaaccctgttgctgcgttcaagactatgttntaaaataccagtctcctaggccagactggttaccgaaatgtatagcacttttttaaaatgcaactgcaaaaatctaaatatgaatttgaagtgatttatctgacgatcacctggtatttntggtgatccatagttgaagcaactgcaagttctgaggctaaacacatgcccagcacgtgatgtgcaggagaatccaatgtcctgttcatctctcttgttaatgaggcagcagatcttgtcccaaccaaaacacagtggggggtggtgcactggtggccttcagtcctacatccccttcttcatttctcttgttaatggcctggcagatcttgtcttcccctacctgaagaaactcacatttattatgcaaccaatagtagcattggccatggtgtctgttcaatctcatncgtttgccacatctgattataaaccgtaacatttattatacgatacaatatatattat

SEQ ID NO: 23711 - DNA, 519 bp, Oryza sativa
  unsure (1)..(519): unsure at all n locations
tctagattcttgcaactccctaaggagctaggaatcggtccacttatattattttcctggtagtagagctcacttagatgacttagattaccaaatgaagttggaatntgtcctgaaattttgttttgggataagcttaggataaacaagtttagcagatttccaagtgaatctggaagatttccagtaagtagatttttttccatataaagaagcgtaaggcttgtgagtttctctatctctcgaggtatggtaccggatatttcatttcctgttagcagcaacacctgtaagcttgttgaaagttttgcgatggaacttggtagggttcctttgaggatgtttttgtccaggcataattgaaccaactgtctactagttatcaatgaggataagaaagaccagtctccagcttctagtcgattcatcccgagattcaattccatcaagtcaggcagggttccaaaagaatgaataataccatggaatgcattgtcacgaagaataatcacttggaga

SEQ ID NO: 23712 - DNA, 298 bp, Oryza sativa
  unsure (1)..(298): unsure at all n locations
ctgagtacccacgtactcacccttgctctatataaatatccacccccagttgctgaagaagatgaagcagatcctgctgatgaggagttcttccaggagcaagccggctacgatgatgtttatggtttcggcctatttcccaagtcgcgcctgtgattgtttggtccaagtcctggcttccgctttccttttgtaatgcagttgtgagctcgggatctgtccgcagcccaacatgactgtacttctactctataatanagagacttctgttgctgtgatattctgtctacctgtgata

SEQ ID NO: 23713 - DNA, 306 bp, Oryza sativa
  unsure (1)..(306): unsure at all n locations
ctgaaccaagtcgataaaaccttcatgttcaatccaaaaattctcaaatctgaacacattagctctatgaatattatttccaatttggaccacacaaagtgtatgatcagaaatggatctaaccaaaggtttcaccaaagtgtggggaaaagacagtgtccacctgggggaagtgaaaaaccagtctgattgctctagtaaaggctgttgctgcatattgctcanaagtaaaacttngnccttaatatggagttcaaccaaacccagatcactaataacctcggtgaaaaggaaatatcatttata

SEQ ID NO: 23714 - DNA, 361 bp, Oryza sativa
  unsure (1)..(361): unsure at all n locations
gcttggctaancatagtaccggtctacactacgatggaaatatgtctttaccacaaagctcttagagagttgaaagcacactgcctggcgctgactagctttgcttcttattctgtaactctttcaaggggaatgtgatgtctaactatctggaataaacacatctgaatttcatggttccaagcatatcgagtaacatcgcctgtttgttgtaaagatcgtatccagtatatggacaatgacaacctctccactgacaacggcatgaatcataggactttctgtggtgaagaaaaccccagtctactcatcaaccaatagaagagtatggtccatcccagcatgcacctgtgaaacctct

SEQ ID NO: 23715 - DNA, 306 bp, Oryza sativa
  unsure (1)..(306): unsure at all n locations
ccataacggatgatgcggcgaatcttttgtctaccctcgaagatgcggcgtggattcttctcatcaagtgtgaacaggtgcctcgcattgttacagatactgctcatagcatactgaacacgccacagctcacgcttgcacctcagtacatactcacccactatcttcaactctgcatcaagacgctccttctcanaatggcgacgtggattcttgaatgtcttaccatctgcaatgaaataataaatttgttcataacacttgacagataaagaaaccactgtagatagtatagttggtcataag

SEQ ID NO: 23716 - DNA, 383 bp, Oryza sativa
  unsure (1)..(383): unsure at all n locations
tcagcttggtcttgtatgacaacgaatggggatacaggtaatcatttcttgttcattaaaaagctatacttggtttttagttcatggttgtttggatcatatcgcgtaagctagctctccattagaaagctatactggctgtgttgttcatatacttggaattttaacatgttctatggtagttctctgaactacattaccttggtcaggttgaaccctngtgtctaatgtattactggttagttgcagttcgtaacacaaactggatcacactccattgtgccctctttcttttgctagttggattcaatattagagaattctgcactagtatctgttgccatactgttcaattatcatacccactccattgtatactgtca

SEQ ID NO: 23717 - DNA, 519 bp, Oryza sativa
  unsure (1)..(519): unsure at all n locations
tgtgctgtgncacacccatgctgcagctagatgccatgccgtatggagataggtggtctccgggaaggcgtcgtcngcgatgaacagcgcgcctcccagtatggaggacatcttgtgtatgttatgggccatcctgagctctggttccatggatgctcgcttcgcgaatgaaacctgatgtagaacagagaaagttacaattgttcgagaattggatgggataggtaatggatgtgtgcagcatgaatgagacaatctccatattcttaatacaacttggttggccatctctttggccaactcagcataagaaaaaagaatgagaaaatcaaaatcccaagactctgtgttgcagtcagaatatagcgtattattagctgtgaagtactcgcctgcattatcccagtgtggacggctgataccaccaatggctggaaaggtangagcaatgtggatgactgcatcangtaatttggatgctcatttcggagtgctctgcttaaacactacatgaaacat

SEQ ID NO: 23718 - DNA, 416 bp, Oryza sativa
  unsure (1)..(416): unsure at all n locations
tctggatcttacccaccatgacatcaaactgagcttgagatttgatttacggtctacaaaacacatntataataagaatctgctgcataaaagagaggaaagttcaaactgtcagttggcagtaccttcaacctccttcaaggctgagtccctttgcgcagctagttctactttatctcttttcaaggcttcaatctgtttctccatttgagccatcctggtagcttgcgactgttgaaatccagatgtttgaggatacaattatgacagcataaatcaatggaacagatctgggtgattacctttngatgaaccactcagctcgaagttggagtcctggagctgtgcaattcgctcccttaattccttctccgttttcttggcatgctcactggcctcgtgtagctggctcctaa

SEQ ID NO: 23719 - DNA, 303 bp, Oryza sativa
  unsure (1)..(303): unsure at all n locations
caacgttctcaactcagagcacaatgttttgtttgcggtatancaccacacagctgtggtggtcccagcatcaatattgctcatactcatgagcaatctgcagtcaatgtgtatctcaccggacaacgaatttgttctcaagctgaccactctaagcatcaggcagctcgacagggattgaagcaacgtgccattcaatttggtggaagccaagtttatggactccaagctcctcaatttcccaaacacatcatggatattgccatagaacatgttatatgacaagtcaatctgcgtaatctc

SEQ ID NO: 23720 - DNA, 421 bp, Oryza sativa
tactaagcttatcaccttccttgctcacacgttcttgctgctgccggtgattgtggcatatctcccaatgtgtacgtctcatattatttcatgaaagaagcaatctttcatacatggagtgaggagatatatgggttcgggatctcaggatcttacacaacgctgagtgcccaagttttttatattccagatccatctaagttaagggtgaaaaagggtcgacgccaaactagacgcatcagatatgatatggatgagtcagaagcaggtgggaggactttacgctgcagcatgtgtgatctgcgcggccatacttacaagatatgcccgaagaatgcataagttccaagcggcgcagatgctagtccatctggacaggcaagtgatggtaggcgaccacctggtgaatgaacaacaatca

SEQ ID NO: 23721 - DNA, 473 bp, Oryza sativa
  unsure (1)..(473): unsure at all n locations
ctaagcttaacattgatgtggcaattatacctcatgagcaagcctggattgtattgtaccacccacctatggtccaacaccgcacctctaatntttacacgccacccgtcatctctcctcctgtatgaaggatacgagtccttcccttgttgtgttgcttgacagaacggtcgaggaaagttgaagcgactctccatccaccatgcangcacactttntgtttagctcaccgcacggcccgtgcaacatgatgtttatgaccagtcgatgtagcacggngtattattccttatctggtatctctgcacatataaacttatcataaccatctggatntgttatactactggctggcttcatgattaatangatatgttcatgtgggaggccccgcttctgatactcagtaacatgagcatatgcctgaacctcaccgaaatactcttttttggtgaacaagtctaacatgtctc

SEQ ID NO: 23722 - DNA, 259 bp, Oryza sativa
  unsure (1)..(259): unsure at all n locations
aacacgcttatacatacatagaaatatctggtatatatttcttcacaaatataaattttcgacatagaaacttatacctagaaacatttggtatagaatctttatacatatanttgacatagaaattctatacatataaacattccatatagaaactgtacacacataaatgtttaaatcaaatatagaagaaaagaatacacaaacacttaattatgccacatgtttagcctaaattatgattagacccaacacatgc

SEQ ID NO: 23723 - DNA, 407 bp, Oryza sativa
  unsure (1)..(407): unsure at all n locations
tattgtatctgtgaagtatttatntcatattgattattactcttgacacatcacacggttgtgaacaccatacagttggcaacacacaattacagctgagttcgaaaattattttctaatatattcaaagctttagctcacaagatagagtcaaatctatcaaggcttctgtaataatcaaggaatgtgtgtgtgtgaatactctccttttagaagcaaagcaagggtgtgcttaactgtgttttataagcttccatttgctaattgacttgcatactaattaagctagtatgctctgtcatgctatcagctgatgatgatgttatctccatgccgaccataatatccgtgttgtctcgatgtggcaacgtgcatattatatatctttgataccgcgtgtatctctt

SEQ ID NO: 23724 - DNA, 454 bp, Oryza sativa
  unsure (1)..(454): unsure at all n locations
cttcgtggagacacgatcaatgtcagattcaagatacggagatattttatcgtattctcgcatttgatcccacaacctattaaacgagtgttatgtcgtttgtggccgatgtaatgtgttctgttaccaatgatcttttgtacgatggatactggtagctatcttgtatgatcaagacatgttgttagatatccatcaggttaaacttgcaaaaatttgggcatcaatttcttgtatgacatttgaattgaacagatgaatgtttcaatctataatttcagcaaagagggtgactactccaattgttttcttcagtctatatgagactctgcatctttcattgatgataccaatgganaacagagtcctctgctttcattgctctgtctactatactgcaagtctagatgtggcctacattatttcataaattattctagcttatctataaacg

SEQ ID NO: 23725 - DNA, 343 bp, Oryza sativa
  unsure (1)..(343): unsure at all n locations
ccttgatcatgatagacgagacgattcatgttaagttgacgggcagcttacanagaagagaattcctgctaaggtgatgtggtatttccctataataccacggctaatgcgtttgttcaggaacaaggggaatgctagaatgatgcgatggcacgctgtatatcgtctacaggacgggatgctgatacaccccgccgatggttcgcagtggcgaaacattgacagaataattaaaagactttggaaaggacgtacgaaacatacggtttggtttaagtacagatggcatgaatccttttggagagatgagcagcggccatatcacttgtgccgttacgatgtg

SEQ ID NO: 23726 - DNA, 477 bp, Oryza sativa
  unsure (1)..(477): unsure at all n locations
ctgacactcagaatatgaaactgattgttcaatactaatgtacaaaggttaagtaatgaatgcgcttcaaactttgaatgtcatatgcaaaataaggtgagtataaatggataaaaattctactatcactactttaaagtgctacattccaaagttcccttaagttcattaaattatggccccatcattgtgctttgtttctaataagccaaaatgacttattaggaaataaaaataaatgtgtaggtaaaacttttatatatgtgttcttggtaacttanaagccaatgctgaaaaagaaactacgttgaaaatatctcanaatcaatctcaaaattaagtttgaaaaattaaaattggcgtgtctttggctaatgggcatccgatgggagcctatactcctctgttcngttaaagacgtttgacttgtatagcaaactactaaattgcaagttataacaattagtatattatata

SEQ ID NO: 23727 - DNA, 379 bp, Oryza sativa
  unsure (1)..(379): unsure at all n locations
ctggatccgacattagaggaagtntagaagctgtgtaattctttccgtannattgcttgaacagagagagtcctttttaattacaatggtcatggtgtaccatagcctacagctaaaggggagatttgggtatgtaacaaggtgaatgttgcatagacactgcataaactgctgcattgtttatccttgtgtgtttntgacgatatgcccttnttactttttggtccagagtgatagtactatatagttgaagttgaaagtgataatgatgatttcctatctgtttctattgttagactgtttataatatacttcactatgactactcatgttcactgtatcgcctatactggagttctagctcgtctgcatcttcatc

SEQ ID NO: 23728 - DNA, 302 bp, Oryza sativa
tctgctgccacacttgagtcttggtccacatgaaggctcgtgctcattgttgttcgctgcgctggggccgggcggtggcgcatgtgggtggcatcatctggtgctggtggcgtgcgatggcgttgggccgatcgatgacgcatgtgggtggtggcattgggcgttgggggtgagcagtggtgcctatctctatggacgagcatctgtagctggagacgcatggcgacggcaccatacgctccttttggtgatgacgacaggttgagcgacgggcctataactgttggtgaagagcgacggac

SEQ ID NO: 23729 - DNA, 470 bp, Oryza sativa
  unsure (1)..(470): unsure at all n locations
tataatgataataataaagtgtatgatgattacatgggattaatatattatntagttacagatgatgcaatattaaagacttgtgcaagataatntgtacttcaaaatgcctttagcataaaaatattcaacttgtatcaatcactggtgaattatgattgngcattctctataagacttgctacagttataagtagcttctacagttctattgttgttagattcacttaatgcagatatctgctagattttggaatttggattacttgtttaaaacaaaatttatcctgtgtttcttttatctgggccggctgaagataatccaaccatagcctgtgttgtagtactaattctatgtgggatcaacttcagatattctctctatgggcagaaagtgacaggaagtacggtgggctgagtntgtcatctgaagatgtgggtcaagtgctcgcaatcacaagtagcatttt

SEQ ID NO: 23730 - DNA, 414 bp, Oryza sativa
gcgggctctgcatgcatggcatcggatatcgttccttgctccatgttttcctcgacatgataagcccatcatcgatcactttcatgagttggcaatttgtaagttgatcctacatttctacttactccctccgttccatatcgtaattcataagttgttcttacctttttttttctagtcaaatattgtaaagtttaactaaatgtattagaagctatactaatatgtgtaatataaaacaaacatattatcgaaatatatcaatgttatgtttcatgaggctaactcagtgtttgtagatataagctaaatttcattcaaacttaatcagatctaaagaaaattaacaatattgtgtatagttaatgagatcgacatacaacctttatatatacgtggttacataagaataaa

SEQ ID NO: 23731 - DNA, 359 bp, Oryza sativa
accgagtgacgtacagctcacgggaaggcctgattcctgtcatggtcagcctcgacttccacttgccaagcagctcatgcctctccaccctgtccttcccctcgcaggcgatgatgttgacgatgtccttggcgaggcagtgctgctccacgctgatcctctccttgttgtcccgcggcaggttggcgtcgatcgactcgaacatggcggagtagtactccatggtctccccaaacctcatcaagaaaggcgttgtgttggtgtgtgactcctgctctaccaaagtagtcaccttctgtgacagccctttcaccatccggagcagaccatcgcgtgggttgttgacatccacgctctcg

SEQ ID NO: 23732 - DNA, 360 bp, Oryza sativa
  unsure (1)..(360): unsure at all n locations
tactaagctgggactgatcgaattcgggctgaacgattgtgcaagactctattctatgcccacttccaatccgcacgttgcttccggttatgaagatatccccgagtggaaacgatgtgtccaccgtgaccgagtgactntgaaagtagtgagataatatcctgacggtgattaagacaccatataataacttttgaacctgaggatatcttgtcttggagtcagctaatacctcgctaacgaaataaattggtcgttggactttgtgaatatggccttactcttcacgctcgacaaccatgaccgtgctcacgacctggaatgtcgccgacatatataacagtagcggctcttgtggat

SEQ ID NO: 23733 - DNA, 318 bp, Oryza sativa
  unsure (1)..(318): unsure at all n locations
gaagtactngcacgcccaaatcggagttcgcatgaagtcgttgttgccgtcaaaanttggcgctgccctgcagtccgaatccaccccgcgcgaatcctcttccctttggatcctctccatcgatcctgagtaaaacacgagtgcacgcgtctccgatgtataaagacgatgaatatgaactcatgatagaactcacctgataatttagttgacgtgcacgagcgcgggtaatatgaccatcatgctgtatatggagggacgcggatgtatcgatggtggtgatgtgctcatcagtgcattcgtgtcaaaatatcactt

SEQ ID NO: 23734 - DNA, 412 bp, Oryza sativa
  unsure (1)..(412): unsure at all n locations
atgatgatgatgttgcctttcatgagaagatgaaagaacatcgtgcaggcatagaaacattagatgtgtctggcaaaaagaagacagtgaaggaatgggaggataaccggctcagttcaatggaccacacaagcaaatggggcgataatgagaatttgaacgagagattatcaaagataaagaagtccgaagctatgcctgaataagttcaggatgcaaatgcattattttcttctgctggaaggcgtcaagataatgagctatttgctgacaacaaatttgttacttgtaaagaatgtccatcagaactatgggataatcaacctcccatacatgtcttgaacttggcggaacccactangagggatgttgcctgtcttcagtcttctacggatgcaacttcatgctcttc

SEQ ID NO: 23735 - DNA, 379 bp, Oryza sativa
ttgattagttcaatatactgattgaactcgtcatctgtgcatgcatatatggccttcttaagatgctcaaccatgacatctcttgcttcttctgtccatgcatcatccaattgtgtcttaaattcttcaataagatagtccacacagtatccgtggtgactgtcatggaaaaccaaatgcacttcatcccatagtccattttctccattcgatatgaatgttatggcacgggaagctgacacataagatttaagttgctcaagaaaccaatgccagtgttcactgctctcatcatccactacagcaaatgcaactgggaacacatcaccttcactatcaacagaagtggcagtaagtatcttccactgcttatttggtt

SEQ ID NO: 23736 - DNA, 309 bp, Oryza sativa
  unsure (1)..(309): unsure at all n locations
cactgacaaagatgacagtggaaggatcaccanatntctgttgtcttcggaatttcccatctctgacacatgtgaatgttactgaaagtggtgagtggatttggggatcatggagcgggctttcttctccaatatccatcatattgagcaatatgccaacagtgcacttaccctcatggccgagatggttccattcatctttacaacgcactgatatcagtcactgcaagaacctggagtgtatgcctgatgattggccgccatgtaatctgagccacttctctgttatgcactgccctcagcttcata

SEQ ID NO: 23737 - DNA, 322 bp, Oryza sativa
tgtactgtatttagaatactattctgtatgcatttctagtatttgtatactttccgagtatatgaatgacaaccttactatatgttcatgttatactgattatactgctagcttatctgggagatgcatatgtacgagtataatgtttgctattgcaattactctatgtcatgacgatgatattagagtagtatctggtagtttaagtatggtgtctagattattgggtatcattatttgtggttatatgctgcggatgaaaggtgggccgctgatggtgacagctcggtacgagtattcctccacgcgtgtatatagtcct

SEQ ID NO: 23738 - DNA, 502 bp, Oryza sativa
  unsure (1)..(502): unsure at all n locations
ctattctttatgcatgtctagtattgttatactttccgagtatatgaatgacaactntactatatgttcatgttatactgattatactgctagcttatctgggagatgcataggtacgagtataatgtttgctattgcaattactctatgtcatgacgatgatattagagtagtatctggtagtttaagtatggtgtctagattattgtgtatcaattattgnggttatatgctgcggatgaaaggtgggccgctgatggtgacagctcggtacgagtattcctccacgcgtgtatatagtcctaagttaatntcctgggggatactcctccgtatttagccccgggtgtattgtcatgacgggctatggtaaggaactcggcagccagaggtggcttctcgaagtactatgagggcatcgganagaagggtatagctagtaatcttataactagaatgtatgatactatgtatactagaagtataggaatatattctttat

SEQ ID NO: 23739 - DNA, 251 bp, Oryza sativa
agtgaatactaaatagagcttgataatctcatttccggatgtgttattactatgctcgttgcgcttgactaatgagttgatcaagttaataatgtgctaatatttaactgaaaatacatgcttataatctcataaacgaagttacaattatttaacagttcttcctgctgctatttaattgttttttctagcatcagtttgaagatgggacaggtatttcgagtgtatattgtggaggcttacctggttgg

SEQ ID NO: 23740 - DNA, 250 bp, Oryza sativa
ccaccacatcgtgtgggcagctgcctttatgatcagtcatgatattgtgctagtcgagagcttgttgacttgtcttgtcatcacatagacccttgagaagaatggtgtatgataagagatctggcttgcaacctatctcgggcattcgtcgcatcacaatgtccataacatcgttcgtgctcctgcggtcacagaggcccttgataagatgactgaagatgatcgggctcatcctcaaccccgtcgtgat

SEQ ID NO: 23741 - DNA, 405 bp, Oryza sativa
actactctggatactgatggctccatttggtgtaagtcgaggcgacctcttcgagcacactagaatcatggatgaatctaaaagggacatggaaaagatgtcggagaatgtaacagctgcagcgcaagtcttggcccttttctccgtcctcatcacaactgtaacatttgcatcggctttcacgttgcccggaggctaccgatcagccggcgactatggtggtgccaccggcacaccggtgcttgctatgcatgggagctacgctttctatgcgtttatcctcgccgacgccctggcattcgttttctcgttcgttgctacggacaaactgctctatgccggagtgccttgctttaacctcgaaagtcgcttccacagtatcgattgtgcatacagcctcatgat

SEQ ID NO: 23742 - DNA, 274 bp, Oryza sativa
  unsure (1)..(274): unsure at all n locations
catatacgcgccagtagaccatggactctgcagcaaagagtgaatcanaatgctcttagcccgcatcagtatacattgtcctatgactgataaaaaaaaactcgattcagtggcaattgagctcttatctactcccatatgatcaaatgataagagccatgtaccgatgattcatagcgctagaatattgatatttcaaattctgtcagatgtttcataaaacaaatcctgaattacagctctgactgaatggcaatntccatatgggcaaaac

SEQ ID NO: 23743 - DNA, 317 bp, Oryza sativa
  unsure (1)..(317): unsure at all n locations
atattactacaagaatcttgccacatagtgatgggattgcaaaagagcacacttttatttgntcattatgtgttcacataatttgtttcagggatagcgtcaaaggagaggatggaaatcaagacgttcacatacctgctttgctccccatagtgccatgccggttctactacctatttggcaaaccaatcgaaatgaaaggtatggataatgtcgtcagagataggataagtgcatacgaagtgtatttgcatatcatatccgaagtagagagcttaatgtcatatctgaagaggaagaaggaggaagatccttac

SEQ ID NO: 23744 - DNA, 323 bp, Oryza sativa
ctatcaatctctgtttaaatacaccaggtttgtacaaattaagcctccatttgctacatctacactcagtcagaatacagcctttcatcatcagaggtattattgctcggctgatagtctgtgttgcggaattgtactacaacatcacttgcaatattgtcagccgcactttgagcattactgataagatcaagagcatcttctttgcttgtgccgtctgcaaagacatcaatggcgtcaatttcaatcactgggacaaagatgtggtcatcgcaatgcatactagctccatactccagctgtttgaattcttgaagatacat

SEQ ID NO: 23745 - DNA, 399 bp, Oryza sativa
catactggtagacatgaattgaaatagtagttttcattccggataattgtgaatacatcctatcatttgtcggtaaagccgagtaagcgtgatcagcacttactaacatgaacatgaataaaagccagatagcacatccaggactcgcatggaacatgaataattgaatccggagatagagaaccaaattgaaaccatattgcacatctatggcaagtatgaaacttgaattatttaaccagaaccagagtccggaatatttaaacaagaataacatcgtaaagataagataaagttgaaatctatatggtgtgaacaacaatttgaacataagctatcatacagaaatatatcgtaaataaatagatagagcaaacaattcatgaatcacacaattag

SEQ ID NO: 23746 - DNA, 400 bp, Oryza sativa
  unsure (1)..(400): unsure at all n locations
cgaaagtcacgaacaatcgtcctaatcacgccagtgttgatgcaaatgcatcataaacaattatgccagccatgcccaggttatcaatggttntgagtatgattacgcatacatgcatcccagtatcccacagatcttttcagcagtagtcagtggtaagtcatgtaaagataagtagcaactcttgatgcttcttttcctagatgcttcttctgattgagtgttaaaacttatgagctataatgtcaagccacttctaattgttgggtgatacgcaagacatcaaacttatatgcttctctctacgtacatgtatgtaaatacagctgaatactgcagtgtaccagttgccgtagtaagcagcatctaagtacagtacagtacttggtactaatacatg

SEQ ID NO: 23747 - DNA, 357 bp, Oryza sativa
gacctttaaactaagctcggtgatgctaatgagtattgaaggttacaagtttttctgtccatagcagacaagaggcatgtatattctggctaaatgaaaaggcacctccaacaatggtagtttgtcccggaagctgggtggaatataacgtaatgattcttaatacctgcgaagcctgaagaagatatattcagttacttttcagtggcatgcataaactatatcaatggaataatatgaagaatgcactcacaacttaaaatgctagcacccggcgccagattatgacagtgtagaatcttttgctatgattaataaaaggatgaaaagtccactgcacataaatatacttgtgag

SEQ ID NO: 23748 - DNA, 346 bp, Oryza sativa
  unsure (1)..(346): unsure at all n locations
acattataccacataacagatagatacttaactgataagagcttataatagttcaaccatccaagagagctatacctctgtatgggctatatatctttcatgtgagagctgaacttaaaaaaaaataggagtagcatttaatttgtaatcactaatggtgttccattntatataccacagacatgtaatatgatgttaactaattaaaatttcttgtatgcttaccctttntaagacattnttcaattactgttgaagttaacacaaattaattaaaccgaatgttcaatgtatttgttatatcatgattaagaaatgtgacatcaccaaatgtaccatgcaacga

SEQ ID NO: 23749 - DNA, 517 bp, Oryza sativa
  unsure (1)..(517): unsure at all n locations
ctcagctgcttaatcctaaatggatctctgtagacgacatcccatattttcttttnctttcatgacaaaacctttcgggtgcgccatgtatactttttcctacaaatctccatttataaatgccgttnttacatccatctgatgtaattccaaatcataatgtgctactagtgccattataatcctgaaggaatctttacaagagactggagaaaatgtctcattgtaatcaatcccttctcgttgcgtgaagccttttgccacatgtcgcgccttatacttttctatattccctctggagtcatatgtggttgtgtagacccatttacagcctactgttttggctcctttaggaaattcttctaaatcccatacatcgtttagtttcattgatttcatttcatctttcatggcttccaaccattcatatgagcgagcgcttctcatggcctcttcatatgaggtgggatcatnctacatatgcgactcttctatattatatactttatagtcatca

SEQ ID NO: 23750 - DNA, 359 bp, Oryza sativa
  unsure (1)..(359): unsure at all n locations
tatcctttgtctctgtgttggtaatcaccatctgtctatcagctacttccaacagtttccgtgttgctagatatgagacatggtatgcaccgacagaaccttcaaattctctcagaatattaagaatctttggataatgagtgacaaaaattaccatgcatttcttctctttcagaagatagtgtaatgtatgataagctatagcaacaccatcatgtgtgcttgtaccacgaccaagctcatcgatgattactattgaccgatatgagcagttatgctatatgttggaagcttcactcaactcctcatataaggtacgggttccatgctgaatactatctgacgcgcncattctagta

SEQ ID NO: 23751 - DNA, 470 bp, Oryza sativa
  unsure (1)..(470): unsure at all n locations
cactttatactcagcttgtgtctngtatgacaacgaatggggatacaggttatcatttctatgtgcattagaaagctatcacttgtttttagttcatggttgtttggttcatatcgcgtatgctatctctccattataaagctatactggctgttttgttcatatccttggaattttaacatgttctatggtagttctctgaactacattaccttggtcaggttgaacccttgttttctaatgtattactggttagttgcagttcttaacacatactggatcacactccagtgtgccctctttcttttgctagttggattcaatattagagaattctgcactagtatctttntgccatactgttcaaataattcgtacccactccattgtattactgtccaaataattcgtacattaacaccactccttttatttcatctctcgcgttgttgacctgatccgtcacatgt

SEQ ID NO: 23752 - DNA, 257 bp, Oryza sativa
  unsure (1)..(257): unsure at all n locations
attatcaaacccggcctctacacctttatggtgtgtgcacagccaaaaatccgaacacgagtacataacactctccctaataaaagggtacataatgcatcaactgacctctcccattacataagagatgacagcacaaatgttgtaagaacaacaaacgaagaanagactatgcttccaatcttcttctaatgttccagccatacacggagaagaattcaccacacgcttctccggcagtatgcaaaagtcttaac

SEQ ID NO: 23753 - DNA, 399 bp, Oryza sativa
  unsure (1)..(399): unsure at all n locations
taagcttggttgattttattacttacactttactttgattgtctaactttgttctattaatccanaaacttgtgctatgtattggataaatgtcttaactccctcctttcacttgtctttatatgccgcgctacaagcctgagtacttgtttggtggtgagggaattgtccaggagttgcgtacgatgtcctttgccatatgatntgggactgctccttcttatgctcagattcctcatgatcgtcttgaagagaagtgccgagtcaaagtcaccttgtaacagaatagtgaagatgtcccctcactgatgttcgaagctataggaagaaactacaccatgcatgtcatgatgtggcatggatcgccatatgatagctccgcgatcgctatagtgatca

SEQ ID NO: 23754 - DNA, 347 bp, Oryza sativa
  unsure (1)..(347): unsure at all n locations
ctgagcctctgaagactgaaggagaaagatatggtctgataattaaactccgtacgcactgcgtattgggccgcatcttcacaattcggcaaattgcaccgcgttgggcccgacccacttcacagatgggccttcagattatggctgcttctttactgtggaggcctgaatggcgatggtccaaactgcatgcgtgccagtcattntgacaagtgctagatagatgaaatactccaatacattaatctttgtttttaaaaaaaaatgaacgcaagcatgtccagactccatataccagaatgacatgtgcgtatgaacaaagttattggccggtcgattgtcatgga

SEQ ID NO: 23755 - DNA, 451 bp, Oryza sativa
ctaagctatcttgtagggaatattgataatggttgttagtatagtatttctgataagctagtaaaactacatcggcaccttcatcctagtagtagattagaactgatgcctccattattactgcaatcgcggaatcaaaatcttgatgaaagagagttaagcaacaaatagccatgctcaagaagatgatagatgtgttgactattgcttatgcgccccaacagtttataagtgcagattttagatgactggagcccgcaccaatttccatcctgatcggttttcttcactggcagttcatgttgatggtggagagtgctatagcagatatatatggtcttggtaatacacagtgatattgtctactggagtatatggtactctactgtcatccattgatgtggagcttggacaaggttaagagatactatcaccaatactcacattaatt

SEQ ID NO: 23756 - DNA, 385 bp, Oryza sativa
  unsure (1)..(385): unsure at all n locations
tctacttcggacaccagcatntgatgtaagaagtaaaaattatgtatacttatgtaacaattccctaattagtcatttatatcagtactaactactgttctttgatattgcagaattcaatgatcttaacaaccagtatattgtctccagaactagaagagcagctggatatgacatatgatcaacacatatcaactacacactggagctatgatgaattggatcagatttacaacaacaaatacatcacaccttgtgctgaggtgattgtagctaaaatattgacctcaaactgtttagacttaagctatgttgcactattgatgaacaagaacttattgtttggcagaatacaacagcatgaatagaagagctgtgtcaatca

SEQ ID NO: 23757 - DNA, 375 bp, Oryza sativa
  unsure (1)..(375): unsure at all n locations
atcactcttacggtcctaaagatagttctgtcatatctactggatcctttgcattggacatggctttatgacatggtgggctcccgaaggtgaagtaaaggcattaaatcatttcgataataaatgttatattctaatatccaagatcactgatgcatgctctatttatgacgagtaaatgactgtctactattgaaagtttaatgaaactcattttctattataaagagtaaattgaatcagagctccctgatattgtatacttgtctcaactaactccctgagctgacttttgntgtctatgctctttgaacttataccccattgcatcactggtcatctattccgcgtttgtaacagaataatccgagccta

SEQ ID NO: 23758 - DNA, 401 bp, Oryza sativa
  unsure (1)..(401): unsure at all n locations
aacaacattcgtaagtcgttccttctttccaataaacccagtctcgcagagcaccaattaactcttttatgccagtctcaggagtttatttatttgagcctctgtctcggataagattagtgcgagccacatccaaatacctcggtcaaattattctgtttattattatattaggccgcaggtggtagaatccctctgtctcacgagcaaaacagccaagtaagctaaagttggatctggtaagggtgggttaaagccaaagtaaggaatgaatggagaagcacagtctggctctataagtaaggaaatatctctatccggttatttgtagtgaaaatcagtctcgaggggagcangcaaactccaaattaatatgaatacggacctggttcaacaagtcg

SEQ ID NO: 23759 - DNA, 393 bp, Oryza sativa
  unsure (1)..(393): unsure at all n locations
tgtggatcgtctgatcgcatccatcgggaggtggagcagtatccacgtatatacacatacatacgcgccacataatatatgcaacgacgatagttattaatcggatggattatttcctgagcgtgtttagtgtgtgtggtttatgaagcacctccaatctcatccacaccatacgacgtgcgtacggacagcttaattggttcatccatccgatccatcccaatcggncgcatgtagctggcaagctatcagccaatcataccagactttgcatctagcctgtatgagaaaaaccgtcaggaaaattggtgtaccgtcagaaaaaatattcctgtatgtgccccgtcagaaattggcgacagaaaaattaccatggaataattcaattgttct

SEQ ID NO: 23760 - DNA, 341 bp, Oryza sativa
  unsure (1)..(341): unsure at all n locations
gcttgatgcgtgtcgctcgatggcgatggatgatgcactgcgtggctgcntgtatgatcatgccgcggtcgccggtgacctctccgcgcgcggnacgccgtgagagggttntgggttttgcgtgcgtagtctcctccacccactctctccccgggttttgcggatgtgtgcgcgagcgcgacagcgcgagtagcctcacgcgcatgggcctgtactaacggatttgggtcgaaatctatacgatccgtacacacccaaatccactaaccgattagatattaatcatgggggttacctttgtattattgttctaaatcacctgcttaaagcaacaatatgtg

SEQ ID NO: 23761 - DNA, 391 bp, Oryza sativa
accacaatgtcatctacgtatgcctcgacattccgtcctaactgcttatccaagacttttcctatgagcctggcaaaagtcgctcctgcattcttcataccaaatggcattctgatgaaacaataagttccaaatggtgttataaatgatgtcttttcctcatcctccttcaccatatatacttggtgatagccagagtatgcgtctaataaactcattagttcgcatccagctgtggcatctaccaactggtctatccgtggcaaatggaatatcatctttgggcatgcctcgttgaggtctgtatagtcaatgcacattctacactttgcattttgacttctttactaacactggatttgcatgcattctgggtgatcacttctcttat

SEQ ID NO: 23762 - DNA, 474 bp, Oryza sativa
  unsure (1)..(474): unsure at all n locations
tcgtttccttctttgctgatgaattcgctggtcatctggtatattttcatganggcattnggatttggagcagtggcatgcattcttcatagttcacaaagatgatggtgtgtggtcccacatggtagtggtagactactgtagctgcaaagcttgattaattaattagcctgttcttttgataatgaaggagaggagagtaactcacaagtgtatagatggttgtctcatctctgtttgtcatagtacacaccaagtgcaagttgcagctgtgtctgctcgcaagaatgcatgcccatgtacattgcatccacctttgcttgacaaatgacacatccatacagcctccatatcctgtttcctctcgttgctacaccctgtntntgtgaagtacatgcatcgcaacaatgttcacgaataatcctggtcactggtttgagcagtcccatagctcttttatttggatatgtaaga

SEQ ID NO: 23763 - DNA, 439 bp, Oryza sativa
ctttatagaaggtcgtcgcactgcaaataatcttattattgcccattacatagatcactacttgaatgtataatcttttaagcaaaatgctgttttgctgaaacttgatcttgcataagcctttgatcgactataatggaactttattgagaaggctcttcattgtaaagggtttcaaggtcattttataaatcttgtccttgcttgcattaattcggcaaacttctctgtcaatcttaacggccagtcatatggtcaactttcagctcatagaggaatacgacaaggctgtccttttatctccttatttatctgctcttgcattatatgaactctgtgaaatgctatcaaatgctattcatacaggtcaagtcaaatgagcttctttaactccaaatgtgaccattattcactctgtaatgtatgctgacgatcttat

SEQ ID NO: 23764 - DNA, 360 bp, Oryza sativa
tcatcatatcggaagtggaagaagatggacgtcctatttcccctgccgaagccgccaataactatgtacgtcacatcggttgggttgtgcgggataacgtgcctgtcattactgtgttctggcgataaacaatggcacgcggatatcatgagagcttcgtcccagattctgagatagagatgctgtggaccacaatgctcgagacattcacccttcctgcgggtacagaggacaaagtgaaaaggtggactctgaagaatatggcagaacagtttcagagcttcaatggagatctgtaccagaagtatatactgaaggggtagacaccgatcttcacacattcccaagcttagtatcact

SEQ ID NO: 23765 - DNA, 370 bp, Oryza sativa
  unsure (1)..(370): unsure at all n locations
actcagcttaccgacantggtttttctggcctacagctatgtccgatgctgtcttatattgtgcggacatgcgaatgatgccaatattgtgccatacaaattcatttgccagcccaagagttgcaaaccatcccgttgtcctggccgtttgtggtctgggggctcgacatggtctgcccatttaatagggcagtcggcggttacacacatctctgtgtggctatcgacaaattctccaagtggattgatgcttaaccggtcatcacgatcacagcagataaagctagagatttttcatcaacattgtgcattggtttgtggacctaatcggatcatcactgacaatgacactcaattcactggtggagca

SEQ ID NO: 23766 - DNA, 395 bp, Oryza sativa
  unsure (1)..(395): unsure at all n locations
ctcgacgtacaatctgatatccgtgcctgcattgtatgcggaattcaacgtacttcccacactcgtgatgttcattgtcccattcacatggctaggactcacgacctctctagctgtaaggtctttctcaatgccatgaagacatcacctccgaaagtccaacagttgcaaatctctcctatagatgcggacaaagaacgatgagcgaccactatctcagatcgattcatcggngtaatcgatatcgatccccatgagccttctgtcttacattctgctcgaagatcaggcctcatcatcaacgagtacaccacgcgacgtgtatgctatctgtgggactagcacgtctgcgggtggatcacaaatgcggaggatcaattggctacgcaatactg

SEQ ID NO: 23767 - DNA, 400 bp, Oryza sativa
agtaccgcgtgtgttaccttctgcttctggctgtctcgcaataccttctacagcttgtcctgcagcagtaccttgaccaactccatgcccaatataagcatgacctacggtcaatccatcagcattaacggaagcagcaacaattagtggattcatgatgaagtcctcgtgtcaaataaaagacatgtgtgatgatacaatcaaccaagaaattcatatttctaagctctattggacagaagtaactataaagtacaaattgaaacgattatctgaattctccgaactgcttcgagatctcctttttagtttctaatcattagaggtttgtgtactcattattctatgtctctttctttccaaccaactgatcgttcattcatccgtctttctttactct

SEQ ID NO: 23768 - DNA, 405 bp, Oryza sativa
  unsure (1)..(405): unsure at all n locations
atattctccctcccacttattntcgtcggtntgtttgtttacgcgttctcagctgctgcgtgcgatcgctctggtcgccactctgtgtgtgccttcacaatatcagctcctgactcaagctgaagaagatggtcgcactggatggcataagcctgcttgtcggcgccaatgctggtgcattcccctgacacggtggttagtgattgcagcacgctgtctcgaccacactccttcctgtaatccaaggtcatgcttgcaagctcatgcttctccagtactgataatggagcactctgtgggaaaaaattataaagaactcataaacatgtntgatagccttctgactgaccatatgttagactaatgacaatatcaacaatacagatgggcagatcagaatctcta

SEQ ID NO: 23769 - DNA, 392 bp, Oryza sativa
cttgacatatgagctacttcacacatgtccaccatcgatggtattcttgttacttgcctccctaattcacatacttttattaccgctggcaatgatcatactattcatgttatatgtcatggcacatctgttctacctatatgaaccactaagtttgctcatagaaacatccttctcaccccttctttggtttgaaatgtacttctcgttcatcaattcacccacgacaataaatggtttattgagtttgatgagtttggtttttctgttaaggacacttcgaccacacgcgtgattcgtcaatgcaatatgtgaggtgacctctacaccctgaccactgtcgtcctgttatttgcgccacaacttcctcgccgatcctcacattgtggatc

SEQ ID NO: 23770 - DNA, 331 bp, Oryza sativa
tgctgtctatttcccatggtgcccggtgatgcctgcccatatccgctttaatatgactaccttattatgagctgtaagatagtatcaagatccatgtacatcgagaaaatttctggtacagtgagtctatttgcttaatttcatgaactgtacatgaatcagcatgagcatcaatccatttgtgagtaccccagtataacactacgagtatttgggatcaaatccacgcaacagtgagtacacttgttattctatcttgactgctgatgataatttcctcatgtttctgtgtaagtcgcatgtatttaaatggcctacaggatgcatgcat

SEQ ID NO: 23771 - DNA, 507 bp, Oryza sativa
  unsure (1)..(507): unsure at all n locations
tactaagctatctggtccacacaatctaatacttatgcgcatacgcgtgtcatatttaccttttatttgtcaagtcaatttctccttttactaatgagactatcgatcaagtctaaattattatgtttggcatttgcaagctcacatgccaaagtaattgcatgtactggttcaataatccaaaccttcttttattcatatgataataaaagaaaaagaaacaaagttacctattgcatacttcaagtcttatgtttagctaatctgatcttatactatcttatccccattataatccctaagtggaggctgtctaattctattcgaataaatgtgtgatagtccgtccgtcttctgttctatggaaagatatcntcccagcatatccactaacacctgctgtctgactangactagataaaaaaagtgggtatgagcttcttctagaacaaccatgcctattatattcctgataacactacatatcgttgccgattgtgtctttgt

SEQ ID NO: 23772 - DNA, 428 bp, Oryza sativa
caaggagcacagcataagcagagctctctctctatgccaccttattgctggctgtggtcgactcactgcagaatacaaggaatctgtcagccacatataaatattacactatgactgaatcaaaattgttaatataacaaaacaaacacaatcattcatgcattcggcattaacacctaccagcgtgtatatacggaaaataaaactactaaatcagcaagagtagaatgcatgtatatctatatgtaagttgaacaagtcattagactgcgagcatcagcatactcacccataagcaaagaaacataactacaaagaatatgttgagcttaagataacatagcatactatgacaataccaccaacacaagtgcagctacaaagcacgtttaattatagcatatctcatcttcattgaattttgaata

SEQ ID NO: 23773 - DNA, 84 bp, Oryza sativa
ggggtttttacaaaccaaaaggccgagcacccacaaacaacgatgaagaatgaacagccgagataaataacgacacagggacga

SEQ ID NO: 23774 - DNA, 217 bp, Oryza sativa
catcactttcatagacacgtggaacatccgcgaactaatttgtaatgaggtacagccctgctcgtcagactcttaatgacgccaccttcgccaacaggttaattgctatgtatctgcattgttgctttcaataatttgaatttctgcatcatcacatgttcgaatatcaaaatcgcattcagcatttctgaattacgaggaaattcttcctatgaat

SEQ ID NO: 23775 - DNA, 383 bp, Oryza sativa
atactctgcttttctctcaccaccccaagacactcttgtgctgctcattacatgttctcatccgctccctcttcaccaacgtcgtgcccaccacgtctcgtagttgacctctacctagagaccatgatcctcctcgtcgatttggatggacgaagagctcgttattggtgcgtactggcctgcatcctgcatgagaagagtggaagagagagagaagggcaataagtgtatggatattttttcctaatatgtgagttccacattatgtatattttttctctaattataagtgtgacgtagatgtcacatcacctaacactgatgtcaatattgaggaattagctgtagaaactcgataattcgatatgggacgccaattggac

SEQ ID NO: 23776 - DNA, 334 bp, Oryza sativa
  unsure (1)..(334): unsure at all n locations
atcggagatcttggcactcaagtctttgtctatcagtatattgctagccctgatatctctgtgcacaatccttatngcagactcctcatgtagatatgctaaaccccttgctattcccaggcaaatcttacgtctcgtctgccaatccaagctcaacctgtattgttcgactgtacctaatcacataaattgcacatgagttctaacatgaaataagttaagaagggaaaccacgaaattagaaagtatgattaccgaatagagcacgcgctatgcagttgtttccatgtattataaacaaacaatagctggtttcttctgacaacagccataa

SEQ ID NO: 23777 - DNA, 300 bp, Oryza sativa
  unsure (1)..(300): unsure at all n locations
tgggaccgcaatgatcatatcatatggagttatcacaccaactatgtcaggttatatcctttatcctgtaccttgttatgttcttcatggtcaagtatttgttactgggtagatcataaagaatacacaagacatccaatggatacttcacacttgtgtgtatattaaaacctcctctcctaggagagccattaggtaatatataactccttattcttgaatgcagtgctgtctgctgtcagtggctngaaagttgggataccaaatgcctcacaaggtgatcccttagatccctgtatc

SEQ ID NO: 23778 - DNA, 425 bp, Oryza sativa
  unsure (1)..(425): unsure at all n locations
ctatnatatactcaagcatcataccagatattaatatgcacatacagaagttgctgttttcatctccacaaacttccccatattacctcaaatttatacttcacttcattgtaataaatgtataactcatctccaaacccatctgttgagaattccgcacaatgtccagaagtcaatgtcaaataatacagagagaatatattgtggactacttgattgtaacgagctgtgagagatactgatagatataagatactacctccatctcgaaatattngacaccgttgacttgttaaacatgtttgactatctgtcttattcaaacaacttaagttatcattaattcttttcctatcattagactcatcggtaaatatactctgatgatacatatangcttacatatctcacgaaagtgttaataa

SEQ ID NO: 23779 - DNA, 303 bp, Oryza sativa
  unsure (1)..(303): unsure at all n locations
agatacatgtacacttatttacatgagagattcatagagaccttntattcccagatatcttttcatgttttgtttgcttgcnatttctgcataccaaacattgtatatgatgagcttttggaaactggttccacacttgactaaggatctgggttgccgagtatatcatcatccccggagtcatcttcatcttcactaagttcttcatcactcgacttatcttcgtgggttacgccagcatcctcgggcattgcatatttntcgcaatattctgcacaagcaaaatgaaagcgagtgagcttc

SEQ ID NO: 23780 - DNA, 334 bp, Oryza sativa
  unsure (1)..(334): unsure at all n locations
ctgtccggangaatcctcgagtaggagatgatcttcttggatntgctctgcagaagaatggatgcacaaaagctgaatatcgaagagttcaaacgctagaattggtagactgcatactcaaatcttgtgctggtgatgattcgagtgcatcgaaggtgttgaagaagcacctttctcagttgtgcgagctgatacaagaagttcttacaaagatcccataaaacaagtctcgtcgtctagaagtccggagattttgcacccgattattgcagacagtgacaaagcttaacctcatagaccggtttcagaagaaattgaatactgaaacgctctc

SEQ ID NO: 23781 - DNA, 379 bp, Oryza sativa
  unsure (1)..(379): unsure at all n locations
gagagtatattgtctaacctgagctctcctaatatttataaatgacagttagagattgaattatntataaatgacagcaagcttgagcgtttcaaccacaatcacaatataattctcatgatttaatttgtacacaatgtaaatttgatttgcgaattaacttcatcaaagaactgcataaatactcaccaaaacggaatcgtcatggcggatataatagatttccgcgaaaatactcgagttggtttattattcgttggatgttttnttattcacaggtcagagaacacgtgcactatatagcattgataggctttgacagcaattcttgccagggtttatatacaatacataaatcatatattaatcaccgactatt

SEQ ID NO: 23782 - DNA, 343 bp, Oryza sativa
  unsure (1)..(343): unsure at all n locations
attaatagaatttatattaaatgttcattaatttacaagtgaagttaaatgtgggaaataaaatttcctaaatataaagcatggctggatttaatttgtattaaattatccatgattaattatactctctgaaattntctcggattttttagagctcaattcctaattttaataatacaaagaatatttcagtaatgattcacacattaaattaatcattaaatgagctgtttcaattgtattaaatactttgagtgcccaattgttttcaagattattcttggaattaattgagcattggaagtatttttaacaattgaaagatcatttcanggattaattt

SEQ ID NO: 23783 - DNA, 352 bp, Oryza sativa
cagcttataattatctggcgagagcttctcactaaatgcaactgctgtcatcgctgacgttctgtatacacacttacaactgccagttccaaaatgttgtgggaaaggataaatgcatcctatcactgacaatcagtccttggaccatctaaagtataaacttgatctatctgttgtgtgtgtcatttctaggcattgcaaaattattatattagcaagtgttttttgttcctttcaatgtgccagtcacaaacttttcatgtatcaagcatttttgaaatataaaagtatttacttgatatctagtgtaacaatggtcactgaataatgtgtcatgttgattatgtctgga

SEQ ID NO: 23784 - DNA, 391 bp, Oryza sativa
ctcttataccattgaacataccatatattatttattacactattataattattataattaaatatttatatctcacatgattatattgtggatgaaaaaatatgtctaaataattatgcgttgtttaactacgattagaaagttgttccatcacttgataaaaatattttatttcactgtacaaaatattttagagagatgcagcatttcatatattgactgcaagaccaataactactatatgaaacatttatccactatataaaacattaaaacattgagtcccaacaatgaaacaatcggaaaaataatatctaaaacatacaatatatttgtaacacttgataatatagtgaaacatctttacatcatgtatgataacattagattc

SEQ ID NO: 23785 - DNA, 140 bp, Oryza sativa
caccaaccgtgctattatcaccgatctttatcccggtgtgtatattacatctttagtcccggttggaataacaaccgggctgatgatcctggggagcctgacatgacctgcttttttctaaccgggccaaatatgatctt

SEQ ID NO: 23786 - DNA, 382 bp, Oryza sativa
  unsure (1)..(382): unsure at all n locations
tatgaccatgcnttctttttcttttttatagaatcggctctctctctctctctctctctctcggcatgggaactttggaagatttgaatttgtacccaaatggcctttcactattcgaatggacaagaatagatttgtatcctttccgtgttcagtacatcagttaagggcgaattgtgttagttgaaacagatcgactntatgcatttcatcaaaagaggtgctgttgtactgagaaaaatacattccacaatctgaacatatgaaagatcgttatgcttatttgatgatgcaagacacccaatcgacatcgttgtaacacagctcttgcatagagttattntatcctgtgtgagttgaactgtctggtctctgtttaatc

SEQ ID NO: 23787 - DNA, 313 bp, Oryza sativa
tcaagagtctgaatttcttcattgctgggtgacgcccgacagcgggctgccatttgtgtaagccgaataagtaagtaactacatttctaactagcctctatgggtttaatctattaacggaagtgttttgatgtgaactcttgttctccaagcatggtggaataaacttcattataacacaacagcgataacatcatatataacatcacagagttccacacatagtacataaatcatgatgcgattgactgcccacatacgcagtccaaataatgttcatccaaaagatacatcgaactaaccatcaagctac

SEQ ID NO: 23788 - DNA, 453 bp, Oryza sativa
  unsure (1)..(453): unsure at all n locations
ntccccgtcccggtccctagcagagaagagcttccgctcccgtatgctttatctgcctctgcccccagcagcagcagcagcagccgccgcgccgcgcgaagcatctnctcctcctcctcctcctcccgccgcgcgagcgctgagccctactgctgtcgcctttgcccagatcccgtcggtggccatggcggcgagggcgcaagcgtggctgttcgcggccgcgctggtcatcttccacggctccgagtacgtcctcgccgcggccttccacggccgccgcaacgtcaccgccacatgtgagtgagacgcccccccgctaaccctgttttcctcgctgctttgggttgggatcgtcagatatagagaaaagtttactgaaagatgtgtccttgtagttgtgtggattccagccgctctattcggtaattgaagcgaatgtattcgttcagactg

SEQ ID NO: 23789 - DNA, 335 bp, Oryza sativa
  unsure (1)..(335): unsure at all n locations
cacgcgcggcganggcggctacagaggcaagcagagcggatagggttggatgtattcggcacaaagagggaggatgggcgccactgaacggaggccgagaagacaatttctcctcccctccctctgcctactctgtctctgcgaatctatatctcccagcggacagaaagacatccatggcgaagggggacggcgggcaggcgagggcccccatgtgcccacgacagagcctcgccacatagcccataaatctcaccagcattagccggatctaaagagcagtggaggtgcaacagtcgattcctcctaacgacgcgacgacaaacacaatgact

SEQ ID NO: 23790 - DNA, 319 bp, Oryza sativa
aacatacaacaggccaaagcccaagcccaacttcttcggtggctgagagaaaacactaacctcaccgcatgcgcatctctatttgctcgaggcctttgtgccctcacactcaccacatctcaagctggccgataggctgctgcagccgcactggacactgggcaacatcttccctccgtgcacgcatgattccttcgcatgcgtgcaggcgacatacttcccgccaattggcgtctatcacagccgcagcgcgccctgcaaacataatgatccatgaacttactcacaaatgtttactataaccaaaattcctcaaaaa

SEQ ID NO: 23791 - DNA, 407 bp, Oryza sativa
  unsure (1)..(407): unsure at all n locations
ttaaccaagctcttacaagatcttaccaatgcaagtggaatggtgacatacaccgactcaaccaagcaccccaatgaaggttggatgtatcgatgccttggcaaacacttgcggtacggctgtaatcaaatatgtggagctctgggtaggcttaaatatgtagcaaaggaatagcaaatgctcaaatcagataatgcaaagttgaataattgttcaaagtcaagtaccgtgctggtcctatgctagaacgtactagagacgcgagcctagacacaaacgataccacaagatagcactatgaacaactcatgcacaactctgatatatgaagtttagctcangacataacacgatttctcttttctttctttcttctttcttcctttcttgtttttgcttttcttttc

SEQ ID NO: 23792 - DNA, 450 bp, Oryza sativa
  unsure (1)..(450): unsure at all n locations
tgcgtcagtgtaaccatntacaacgagctcgtctgttctttatatactaggaacatatccttagttctgctcaggtacttcaagatattctttacagctatccagtgactctcacctggatctgattggtatccgcttgttgcactaagtgcatatgaaacatctggacgtgtacatagcatagcatacatgatggatccgattgccgattcatatggaatcacactcatcttgtttcgctcatcagtcgtttgaggacactgattcttgccaagattaatgccatatgacatcggtaagacacctttcttagaatcttgcatgttgaacctcttcaacaccttgtcaatgtatgtactctggcttaatccaattatcctctctgatctatctctatagatccttacgcctagaaatatgctgcttctctaagttctccattgaaaacta

SEQ ID NO: 23793 - DNA, 483 bp, Oryza sativa
  unsure (1)..(483): unsure at all n locations
tgtcgtaccgcaatggcagaccggaaggtgccatgatcacgatgttgtcggtgtcgatgtacgagtctccaagggaaaatatcgaggtgaaatagtgcgagatagaactcgcaccagaaatacagaagaggaagacgaggaagaatacaagtttgagctccatgcttaatttgtttgctacctgctatagaaatgggaagaaaaccaaagatacacgagaagatgaggactacctagttacttataaccgtatggagatatgcttggatgtatataatcaattgtttaagacataaattagtaacataggtacgtagccctttgtcaaactgaggtggctgttgttgcttgatcaatacaatnttcaatccatctaaatatatctatatatatatncgtcgtgacaaagagcataagttttattccctttccgttcttaataaactagtagtcgtacacatacagtgcacgttnttatcatga

SEQ ID NO: 23794 - DNA, 449 bp, Oryza sativa
  unsure (1)..(449): unsure at all n locations
gacgagtctcatgtgttgggacgaggctcatgtgttgggcagtcgcggagtgcgggtaaagtgtacatccactgcagtgtgagtaaaccaaatctattcgaatagccgtgctcgcggttattgagcaccgggacatgtattacacttggctagactctaaattcttaacttgtatgggatgggatattgcataatgatttctatgctgatggagccacttcctgagaggcgggaaggtggacgtcctcagaaaactatgacgattcaatggcgggaagctatccttgggatcacaatggatggtggacagaaccgttgttgtctaatgcgaacactggtattaaaacttgatcaatatatgctaggtcttaagcttgtgaaaagaattacaaaacttgctttgtgcaaaagaaccatagccattccttgaataccctntatcatgtgca

SEQ ID NO: 23795 - DNA, 435 bp, Oryza sativa
  unsure (1)..(435): unsure at all n locations
tcacanagcgaggttgagtccgcgccgaagatgcgctaatattacatcctcacaaaagcgctcggaaccaaagaacatcctggccgaactcggggaattggtagcgatgtgccctggaagcatggactccctcagtacagatcccaatacaggaaacggaaagtctccaaggaagagagggacgctcgtttgaaggccgaacttaaggttgaggtcattcaagaactagaagctagcatgaatgcaagggtggaagaaagggttaacaaggtcctcgccgacatgaatataccccgagtcacaacacctgctgtgcaaccaactcctcgtgtacaacacgacgcgagtccgtcacagcatatgagtagttgtgcatccacagaggtgccggcccctggtctcccgatcgcaccactagctgcagtggaccacatc

SEQ ID NO: 23796 - DNA, 481 bp, Oryza sativa
  unsure (1)..(481): unsure at all n locations
tgtcacactcgtgtcccaccgagcgtgccaaaagcatgttgatgcgaataacacacactggcctgagagatctgcttaactctagtgcaagtccaaatcttggtttcgagttcaaaggcatgctagttggtttgatcctgccaccaacaagaaacaaagaaagaaacacagttaaattcataaacgatagccgatcggccatgtgccgatgacgtatctgttgtaatctagccgatgtaacgtgaattagatcggtaatgatatgtaaagaaaaaaggacggttagatctagtcgatcggctgtagatattaacaacatataatcagtatatcaaaatatgttgaaaccatgtgactgggatagatcggacaacttgtcgagacagtataaatcacttatgtctaaaagtacttcaatatanagattatatantgttatagcatagccgatggtgcagatctgacatgtatcggctaatac

SEQ ID NO: 23797 - DNA, 335 bp, Oryza sativa
tgagctcagctagacaactttgaatttgccaactcccaatcggcttagtctttgccgacaagatccaatgccgaagaggaatttcatcaaccctgatgatggatcggctgcttagccttcaaagaccccctctgggcagtattggcaacatagaactggcaacattcagaagcaaaagtttcgataagtagtggggtgaatggaaactgcatttatttcaccaaccagcttcgatgtatatgacagacctcttttcagatgttgttcctcaagtaagcctctaacttcgctcaatttagttaaataactgtttggccattaatcttaaccaatca

SEQ ID NO: 23798 - DNA, 459 bp, Oryza sativa
  unsure (1)..(459): unsure at all n locations
taatcgattccccctctgaaacaagaagttctggaccgggaggtatatatatcaatcacttggcgtccatccgatgcatcgactatggatatttcatatccctccttttctttacgcagtatttttcttactacacctgttgacgttgcattatagaccgtatggttactcttgctaccatcaagatagatctgtccccttcctcggtttccccccacatatatgggatattttaagaaatgaacgtctntcttcatagcagggtcgggggaaagaatgggaaagacgatttcactatatttcttaccgggaactgngcctatcacaagaatatttnttttattgtgacgataactctgannagagatatttcctatcttttctttcaactaaagagaaatacggtcgggcggcgctaattcgaatcccctcggcaaaataagaacagcacccacattc

SEQ ID NO: 23799 - DNA, 406 bp, Oryza sativa
  unsure (1)..(406): unsure at all n locations
tcagtcccttgatcagcgcgcgggcctncaccaccccgacagttcatttctccgtggtctcggcgaaggccagcacgacgccgccgtcgcagccgcggatgacgccaccgatgctcgctcgccgggagccatcgttaaacacgctgccgtcgaagttgagtttgcaccaccccaccggcggcggcgcccacctgatgcgcagccgggtcggatggaacggcggcgaggacggtgacagcgccgtggagcagcggtgggcagccagcggcggcgagagaaagaacggaggcgacgggagcatgagggatggaggcatgcactataggaaagccatggcagagcagagaatgcagcgaacacaaagaatgatttgcttgcctcgacgagcggagcgagaaactattta

SEQ ID NO: 23800 - DNA, 238 bp, Oryza sativa
tgcgcgcatatggtgtgctcagagacctaccgcttctctgtgcgatgatcactgccaccttacggacctcatttttaatatacttttaagtgttgatgtagatgctgatctgcatcatacatgctacaaatcttatatatgtatgcggcactaatctaacatatatatgtcctgattgtcaagcttgtgagcatgatcaaagcactatctagagatagcccgaattactactgtaagt

SEQ ID NO: 23801 - DNA, 448 bp, Oryza sativa
  unsure (1)..(448): unsure at all n locations
ttgactaagaaatactcttaatttcatgacantaaattgatctttattgattcgtattcaaaagtagtctttaagtattatgtgaaggctttattgtactgaaacaaaatacatacttcttaatttttagacggagggagagtactactaaccgcagtttatcccctccttgtcatcggtgacaatgtagcgatgccccttagattcaagccagccgcgaatgccgagagcggagtcgacgcagccgacgaagttgggattcttgtcggcatactcgccacccttgtagaacacacccacgaccttcttgctgcctgctgatgtctgcggtacaaagagggaaaccaaaaggtgtcattcgtcatatcgagctgcatagaacaaatttngtgatcaagtggatttgttatatntatgggtgtaagtgcgtcagttgtgaacaacttat

SEQ ID NO: 23802 - DNA, 435 bp, Oryza sativa
  unsure (1)..(435): unsure at all n locations
tgcccgcangtacaccgaacacgcacttataggagtttatttttatgcgggcggagcggagactctcaaaagtattcgctagatccgagagtaaagtctcttggttgcgcgtctttacaaccaagtcatcgacataagcctcaacattacgtcctatttggctacccaaagaaattcgagtagtacgttgaaaagtaggacctgcattctttaacccgaagggcattgtcacataacaataagttcctatgggggtaatgaatgcagttttttcctcatcctccctagccatgtgaatctgatggtaaccagagtatgcatctagaacacacaaaaggtcgcaccccgctgtggagtcgacaatctgatctatgctaggcacgcggtaagggtacttatgacatgccttgttaagagtcgtgtagtcgatgcaca

SEQ ID NO: 23803 - DNA, 268 bp, Oryza sativa
  unsure (1)..(268): unsure at all n locations
ntaccacagagttacctggatatgtcaactgtttggcagtcctcttctctgcctaatgaacctgttgacattttcattggcatcttgtcatctggcaatcattntgctgagcgcatgggtgtgaggaagacatggatgtctgctgtccgaaactcaccaaatgtggtagctcgtttctttgttgcactggtaattcttgagaactaacttgatagaattccttgcttcatgtcttccataaacctgaactgatgaacgttccttattc

SEQ ID NO: 23804 - DNA, 380 bp, Oryza sativa
  unsure (1)..(380): unsure at all n locations
tgcagcctaatggtgtgtttggatccagggacttaactttagtctctgtatttagacattaatttaaagtattaaatatagactacttataaaactaattacataaatgaaagctaatttgcgagacaaattttntaagcctaattaatctataattagagaatgtttactgtagcatcatatagcctaatcatggaataattaggctcaatagattcgtctcgcgaattagttcaagattatggatggattttattaatagtctacgtttaatatttataattagtatccaaacatccgatatgataggtacttaaaaattttagtcccatctaaacagggttctaagtaggctatangggtcaacgctcaagtatgca

SEQ ID NO: 23805 - DNA, 369 bp, Oryza sativa
  unsure (1)..(369): unsure at all n locations
tctttgggcanatggcaccattattntcctcttttcgtttatcagcnnnncagcgngtgtcaagcttgggtggagaagatttcgccctcttgctccttttggcaggaggggggaggtgcggcctgctgtcaacctccataccgtcgtccccaaaatcagtatcatactgtaattggagatcttcatctctttgttcaacggcaggagggagagatacaacacgttgatggtgacgcgtcggcggcggacgagaacttggcgctggccttggagttatattgatctcaatgctgtgcttgggccattgaataaaggtcccacgtgcagtcccaaaggtcagaatctcgtcattaagtgtgtcggtgacat

SEQ ID NO: 23806 - DNA, 321 bp, Oryza sativa
  unsure (1)..(321): unsure at all n locations
ntaacaagattatntctctctntgactggtgacattgatgcatatactttaaagaccatgctaaacaatcttgaattggtttgcccttaatgaagccatattgattctcatgaaccagcttaggcattacactctgcaacctatctgccatcaatttggttaatacctttaaactgatacctatcagtgagattggcctataatcattaactgtttcttgagaggactttnttggcactaaggttatgaaagatttgttatcagctatagatcagtataacaagcatggaagtgtgctgtaacctgtaaagtcatgtgata

SEQ ID NO: 23807 - DNA, 435 bp, Oryza sativa
  unsure (1)..(435): unsure at all n locations
tcatggttctgatccaacgaaccacaagaaggatgtatcaagttctattatggatcatcacatggctagcggagacgatgcgaaagcgaaagacggagtggcaatggcatcaccaggtgcagttcagactacgattgtcgttagggtttctaaccggctctctcatcaagagcgaagggtggacacagcgtttcatctggactacgctggccctagaacccatcccccctctcacaactgatgagtatgtcgntctgtggcattctctgactctgtctgatgatcttaattactaatatgcaacttaagtgatttatgtatatgagtgttcaatctctaattctggtgcatattcttgcttgtttgctcttatatatgctcaatttgctaataaactaatattatcggtataaatagatccgacaatgtgtagtt

SEQ ID NO: 23808 - DNA, 463 bp, Oryza sativa
  unsure (1)..(463): unsure at all n locations
tacggagcacggaggaggagtctcatgtgtcactgacatctgttgtcatgatggagggctccatttgtcagtgacttatgtccccctaactttgtccctcgagctccttccacagagaacaaaagctatgtgcgtgggcctacgctcctccgcgtcttctcggtaacttcgcgcgtcgacacgcgcgacccgccctcgggcccacatgtcagtcaacgcaacgcagatagtactaggaagcatacgagaactgcagcaatttgacattcgtaaatgggaatcaaatgttccaagccttttagaactcatgagacaatgattcgtacttatctgagatgagatgaanatatgcagcaattatgggccataggcaaaaacagctatgcacccatagacatatggagaatggtgtcatgtcaacaaatgccgactggtgtcgctcacaacagcatacagattaaca

SEQ ID NO: 23809 - DNA, 448 bp, Oryza sativa
  unsure (1)..(448): unsure at all n locations
ctcagctggccgaatcgctgtaaaattcagccctgatttttttttgggctgaaaacgactgcttgaattggatggaccttnttttctaataaaatactcatctatatccacaaatataagggattttgggtttgctcacttttatgccaaaactaaagtttagttcacgccaaaattctaagtttagttgaaattggaacgatgtgatagaaaagttggaagtttgtgtgtgtaggaaagttttgatgtgatgaaaaagtttggaagtttgaagaaaaaaatttggaactaaacttggcctaaccctttcaaattttggtaacatcaaacttttgataattntgataataccaaactttagtagggtagaagtgtctgggtggttgttggtttgttaccatgccaaccattcttgtatagtgccatgtggagaagtttaagaaaatca

SEQ ID NO: 23810 - DNA, 486 bp, Oryza sativa
tggaagtccaacaatggaggtgaggagcacagcaaggtattattgtctaaccacagcacacaaccgatttaggaaaagcgatgcacaccgtataaaccactggctaatacaatgcacgggaggaagatggaaagttggcgacggcgacctaactctcgtcaggaacgctgccagcccacgttattgacttctgcagtcctatccgcgtgctgcacagtgcattggagcactacctccgcagctagcactaccagccctaacgagcacaccctaagatcgacgcagagggagggagggtttcacgtgccaatgctgctcagccgcagccggaatcactacttttccctgatgcggctgccaaggaggtcttcatgagccgtccatgtcaaccaagtgcacgccgctgatgacaacggacagagaggacagagctgtggacggcacgtcgcgtcgcattccttcttcgcatcgacgaccgacagtctc

SEQ ID NO: 23811 - DNA, 481 bp, Oryza sativa
  unsure (1)..(481): unsure at all n locations
ntccactaaagccctttcatcgaagaaatagtanatatatatgttttgggaaaaaatttaacataatacctaacgtcttgaanaaaaaaccccctgcctatctctctatagnttgagtctgttttcgtgtgctttatccaaatagtcactcatgtggcttttcttcaattagtaggatttgaggtagccctcacagcctctacattttacttgtttcataatcctgtgttctttttgtttactatggttttggtttctttaaaaaaataatttcgttgaaataatcaaacttaactcgaatttacatcatacaatcaagggtaagaacaacacatcccattgagtaggcttcactagaaggcctcattccaaagctgactaatgaaagaaggatttatcattgcatgtgaagtcatcatttttttaagaatgaataatctgcatataagtccacctatctcagcgcacatcactaaactat

SEQ ID NO: 23812 - DNA, 311 bp, Oryza sativa
tctccccacaggcggcggcaagagaagaggggtctgtctcttattgacacgctcccggtaggaggagatgacgagctaagcctccccggcaaaaagatcgcaaagcggcgagctcctcatcagaatccctagaaatgccaagattcgggcacacccacccttcctcctccccgccttttcttctcctccccctcacctcggctcctctctttcagtgccgccaccaaaaagggcgcggaattttgtcagaaagcggcaaagcgggggggcgaggtcagagcgccccggagttgttcgatggaatgggcata

SEQ ID NO: 23813 - DNA, 471 bp, Oryza sativa
  unsure (1)..(471): unsure at all n locations
ttacggacacttagaatactaagcttataactactacataaaatagaagcaaaatttaactatatattagctcaaaagggtagcttaaagaaccgatcctctttattaggggttaggctcttaagaccactttntgttttttgttaataagttaaaggattttaaggcttaagtttaataggaaaatcttatctccattctacataagaaagaaaaaactagttcaacccaactctttgctcaacagtgtaaagttgcgtttggcacctacagttggaaacccactctccttatttntcgcttatacgcttgtcaaattgttaaacggagttgtttttgaacaaaaatatatacgacaattgcttaaaaaagtatattgatcctttttttataaaaaagtacggcaggtaatacttaattaatcacacgttaatagatcactcccgttttatatggaaaggatttttcata

SEQ ID NO: 23814 - DNA, 150 bp, Oryza sativa
accggtgatacactaatctaagattacggatctagatataccatttatatggtgatggacctaagtggtacctttgtttaaagttaaagacttgtcgtttattttaccctacaaaaggtttgcaatttgctccatactgaacgctacata

SEQ ID NO: 23815 - DNA, 499 bp, Oryza sativa
  unsure (1)..(499): unsure at all n locations
ngccggaggagggccgtgtntgcttggcgtctctccccatcttttcttccactgctagccgctgctcgccctcgcgctcccagccgccggagtgaccacggtgctgctcgccgcctcgccgtcttccgatccaacggcggccatggaggcggcggtcgcgcacggcgccaccgacgtcgtggcgacgcctgacgtcgcggcggcgctcgcggctcccctgacgatgctctcctcgctgaggagggtgacggtggtgcctgctctcgcgacgacagaggcgcggcaagcgttccggcggtggctgccgtgggtcgagctgacggagatgtccggctcgccggagaagatgatggcgtcagcttctgagcaagtgcaagtggcgcctgacgctgcaagcgccgcagtgatagcacagtaagtgcgctcttactgaagattctatgtatcagtcaatattngacacttatcgaaaaatggacatttcaccttcttacatgtc

SEQ ID NO: 23816 - DNA, 349 bp, Oryza sativa
  unsure (1)..(349): unsure at all n locations
attttctgcaagggaaaatgcaacatttgtccttaagcggaaagcacactagcccacacatatttgtccttagaagaataatcattccctctagtaatattttcttccctcatggtcaccatttcaagtgcccgaggcaaaatatgagactataaggtccagtgaaaagagcatggaaattcttctagtaacatgattgtgctttgcttgctacaaccaccaagatngtcaatctgtcatgcggacatctcctaatcacagataattaacagctntattatgttatgtgtccatcgcaatatggaatgtcatgtgaagattnacctaccatggtaagcaacatggcgat

SEQ ID NO: 23817 - DNA, 339 bp, Oryza sativa
  unsure (1)..(339): unsure at all n locations
tggatctgggaatttctctttcacagattgggatcgtttgatctatttccttgaccgctacttatgggcgtgcgctcaaaggatacaaacagggattcgcacacaaaaaggggaattcgtagtcactttttcctgtcgcgtaaaaaaaaggctttacgcgagagcaatagaggttgggatacatctatctcttctgagccacctctnttggattcttaagaccaccccttgcagaagatacccgctgctttgagttctttaatatattaatctcttcgagggattttaggatcgtcangctataattagctatttgggctttaactgctcctttctcag

SEQ ID NO: 23818 - DNA, 497 bp, Oryza sativa
  unsure (1)..(497): unsure at all n locations
tgcccactgtaacagcagactgtttacctagcagagtttattttatcctttcatccttcanaccaagcgcttctacactgttcttatttggcgtagagttcttgccttcttatgtgtaagtgtttccatatatgtagatctgttgcatgtaatacagtgctactagcgtatttccgatgcctatagtatttctcacgcttctcaattcttacggatagtcacattctattccacacaacttccagggcccaactatcattgccgtgaggtaaggtgtcttgtcagggctgacatccattcataatggcagatttagatgaaaaccaggttttaatgggcacttcatatatcttatgcagggctcagctcttgccagattaccacatcctcaaaatgtagcagaggtgcttctcattaattgtaagagcccaccttgtagtttttctgttatccatcttatcaaagtgaactgccgctatatttttcttagatactta

SEQ ID NO: 23819 - DNA, 466 bp, Oryza sativa
  unsure (1)..(466): unsure at all n locations
ctgnataggcaaaggactgncaattatggcaaggtgtttttatttctattaccacaatcaaatggtggattgcagtatcacattaaatcagaaattcacatttactttctttagattactgaaacaaaatatagacccttcatgtggatatttctaaatatggattctatatattaattcttgattggctgaacatcttttnttttttggcataagcatggtattggtaggaagtactcaaaagtttacttcaatttaacacagaaaaaataagactttacttcattttaacacagaaaaaataactatggactgaatataggtggctccatgtcttgattagtatcacttatcactactgcataacatttgtttcaagtcaaccaaatccttatcgggtatctagaagattgatttttggtatagtctttcattgagcaggtggcacttgaaacatatatactct

SEQ ID NO: 23820 - DNA, 479 bp, Oryza sativa
  unsure (1)..(479): unsure at all n locations
tgaagatgaacagtgccagagaggcaaactagactttctgctgggcttctacttccaaggactgattaaaggagggacacaaagcagacttcgggaaagagaggaaaagggctgcaggctgagaggagactgggccgagagtgagaggacttttcctaattcggcccgaaaaggaaaaggtgaactttaattacttttccaattaaattaatcactgaaatgatctttgaattgttaaaaatacttctaatgctcaaataatttcaagaaaaaaaacctgaaaatacttggacactcaaagtacttaaaaaaattacaatcagaccatttaatgattaatttaatatttaaataattgctgaacttctctttgtatgattaaaattaggaattgagctccgaanaatccgagaaagttccagagagtataattaaccatggagaaattaataaaaattaaatccatccatgctntatat

SEQ ID NO: 23821 - DNA, 414 bp, Oryza sativa
atatttcatcttcattgatatcttggtacagattagtatcggagtactagccaatacatattaggtttgcttcatcggctatgctatgaatctatataatctttactttaaagtatttttagacatacgtgatttatactgtctcggcgtgctgtccgatctatcccaatcacttggtttaagcataattcggattatatagttattgatatctatagctgatcgagtagatctatttattcttgcattacatgttctcactaccgatctgattcatatcgcatcgccctggtggtaaatgatacgtcatcggcagtctagccaatcgactattggttatggattaaccttgctctttttatttcttgtggtagcaagatcaaccaactggcgatgacgatattcaaattaaat

SEQ ID NO: 23822 - DNA, 390 bp, Oryza sativa
  unsure (1)..(390): unsure at all n locations
ttggtcacatgcaccgtgttcaacctacagtatgagcatgaatatttatgaagtagaacatctgcgaaggaatttagcacattgctgatgttgagccattcatgtttgttttggctaggtacatcccaaaattaagtaaagaaaaggtcccttgtaactatatatggttgtcaatgacaggaaataaatcatctgcaagcagcatacaaaaccaagaacatgcagcatataataacatggcctcttgttgtggcaaattttgtttctggagacaacaactctgggtgacatcaaaaggaccttatagcatcaacaaaattcctgaanatgctggtaagtngagcacttgaactagtacttattatcgtacatgatgtcagcaagcatatt

SEQ ID NO: 23823 - DNA, 411 bp, Oryza sativa
  unsure (1)..(411): unsure at all n locations
ctcagctactgtgggacatgatggactgccgtggagtccatttcnattttatgttganggtggaaggaagtcccgtggacacggtgtcagagggcggcgtgattcagcgagacggggaaatcgatccatagtcaagatccagtgtaccgatgatccgcgtcagtgcctgatgagagaaatttcctgtctatggattatccgacatctttaaagactatgaagtgcggtttagtacacttcctgttgtttctggagcctgctacatgaatgagaatagttcttgtattttaggtaaggctgttgatattcatgatattgatgatggataaaatggatgggtattgacagtactggactatcatggcatgggtttgatttttggccattcacaacaatttgccgactacgcaa

SEQ ID NO: 23824 - DNA, 431 bp, Oryza sativa
actcagcttaatggatatgcccatatccctattaaaaaactttatatctttgctacatcatctacaatctatttaagtgtacagataaacatgtaagcatatccaaacatcacccctcacaccattgtcataatatttcagtaaatatatcattttataatcaatatattctacattaaagcgtggatatcatttgttagttttataataaggactgagaaacactaacgattcattattttttacttattattcctagctcaattattaaaaataaataaaattgctagtaattcttgtagcaaagggcggcgaatcaccttgattgtggatgcgtgagtgcagcgaaagtgtgtaatggcgtatgtgcatattcgcgtgtataaaaaaatactgataaggagagagagaatgagagatgcattgcttac

SEQ ID NO: 23825 - DNA, 422 bp, Oryza sativa
  unsure (1)..(422): unsure at all n locations
actcaagcttatatcaacgcanggncataggcganccgattaatgactagcttccttttatacttaacnccccttctgctgatgacaagagcacagaattaactactgacattcctagctgctatacatgaactttactttaatcattccttccacactgatcaaaagaggcatgaataaatgaaatggcattaactcatgcaagcttatgtactcaaggcgaagaagaacacgaacacgcaaacgatatatgtaacaattgccaggccggcgagattcacgcgcgaataaacgcatgctagcttctggtaaagaccggagtccaagttagccaggtaactaaagacacctagtaccacccgtcggatcactggctgaagaaaactaacacgtgaagaacaaggactctctatggtctttac

SEQ ID NO: 23826 - DNA, 424 bp, Oryza sativa
  unsure (1)..(424): unsure at all n locations
aaaactaagctccactcaattaaaactgtaactcgaaataggactcttattattttttttganactttcaactcagatgttgaaattcttcatcatattttcgaaactttcaacttaactatttatgtattattttgataataaaaactataactagattaatccatatggctagcgctgttattagcgctaatgacgcgtggccgtaatggacccacgcgcttaacctctcctgacgcggtgcggaacaggaaaaatatactaaacgatgaaacaggaggaagttatggaagtgcgcgctacaaaattatctagcgcgtctgttctaaccaagagcccccgtaggccgggctcgactggaacttgaagaaactactgtagcaatatggacataaattagacttctcgtatgacttatgttact

SEQ ID NO: 23827 - DNA, 438 bp, Oryza sativa
  unsure (1)..(438): unsure at all n locations
gtactactactaataaaggataatatgttatgtcttttcttggatgtttaattagaaaggaagcatgaagcaatgattggttgagctggaggagacctatgcctgcagcaacaaaataatgtagatcattggaaggaaactgtctggttatagcatcactgaaacggccatttaagatttcagagaaaatgatatagtagtagtatggagcaccatatgaataccacacctaagtttgcagacatttaatactaaccaaaaagctggtaataccaaacaaaccactcacagaggaggattgttgaaatcacaacaatgcaagctcatcggtntgcttatgctgattataaaccataacgggttatcaatgataannaaaaatattgtagtaaacctttttatacatgtgttcttagccgaattataagtaatgctggg

SEQ ID NO: 23828 - DNA, 290 bp, Oryza sativa
  unsure (1)..(290): unsure at all n locations
ctctattgtactatatcgtatactatattacgaagagagcncagtctaagaagtctgacgaattntggagttgtcggtaatcctctccctatttctttatgctctgctaattactctgattataatagaattatcttttgagtaatctagctttgctcgagaagaattatatgttggttagttcctattcacagtacatgatcatcgcccactataatcaactaaaatatagggacttggattagtgtgagctaccataaagtaatacttatgtgctatacatggagcta

SEQ ID NO: 23829 - DNA, 162 bp, Oryza sativa
gttgcaagaacccaatgaagtattgtcgcacaatgtacagcgaggaattaagaaaggctacgagatatggacttttcatggggaagtcagcggtcgtaacgaaacgacggatgaattctgctttgatgatgcacaaaattttataatcgaagacatgtcaca

SEQ ID NO: 23830 - DNA, 489 bp, Oryza sativa
  unsure (1)..(489): unsure at all n locations
tcgcggagtagctagctatgtagccaacgatgacanttttgtgtgtgtgatccctctcgagggtgttgcctagacgcctcgctgttcccctagtggtgaacacctggtgaaaaccgtgtccattttccctgtacaggtgatggcggcacattggcatcacgtcgtccatggagatgttgccaaagagactttgtttctgccttcaacaccttaagatgcctctggatggcggcttttctatatgagggacgagtggatcttctactctctcgcccactttacgacccttctcgttggtggtccataatggcgctcggcctcgcattgcgttggtcggtgcggtgctacttcgtgggtgggtgttagcgttttcagagtgtggagggtnttttttaccgtttcttttttgtttgagcctctcaagtctgaattttgaattttcctgtatataatataaacatcacactgtcgatgtattctctaaaaaag

SEQ ID NO: 23831 - DNA, 369 bp, Oryza sativa
  unsure (1)..(369): unsure at all n locations
atactcagctgcagnctntgtgcaagtcagagcccttgttttaattttggaacccgggaatgctttctctagcctttctccacgggggtccgtctaagaagcctaggctgaagatagaatcgtagaaatagcccgagcgactgaaaaaagtcgtagagactattccacccgatggctcacagggtactattctaacttaagagaaatcttctgggtgcacgaagtgaccacactctaatctggggcaatattgataggaggtgataagttctggagtaaagagttccgcattcggagagagtgatcaacagcccgtgggaaatggcctgtgctgggtaattgctctggagaacatcacaggatgtcccc

SEQ ID NO: 23832 - DNA, 466 bp, Oryza sativa
tcgacttgatgtggtgttgcagtaaggattatgtggttgcattctcttgattccaataaggcagattttgattgcattgtctgcaattgttcattcactatggctgtctgaggtttataggtttgacgaattcagttacattgctcccagatttactccaaatattatgttgaaacatgttttatttgattggtcatgtatttgctgaaggcctgaatgatggtacctttatttgttatgagttgaagtgctaatttaattcaactatatgcagagggagtcttgtatgccaagaaagactacaacctggccaagcacccaaaggttgatgtgcccaacttggaggtgattaagctcatgcagagcttcaagtctaaggagtatgtgagggagaccttctcgtggcagcactactactggtacctgaccaatgatggcattgagcaccttcgcagctacctcaacc

SEQ ID NO: 23833 - DNA, 310 bp, Oryza sativa
atcatgatgttactgcatcatgtcgtcgacgttggcgaactgagcattagcacattggtgccattcttgtgcttgagctatctgctccatgaggatgtactggatctcccctagatgcacatcaaaggttgccattgttctagagatttcacccaagtcctaacgagaggaacttgagcaccattcacttgtatattgaggcacaccacttgatctacatggttggttgtccgcccaatggatgtcatgatgcgcatgccaccggtcctcactggctctcgaccaagttgagactccgatgctatagcgt

SEQ ID NO: 23834 - DNA, 492 bp, Oryza sativa
  unsure (1)..(492): unsure at all n locations
actcagctgaataagagacctcgctccgatccaattgaacgtgcatttatgttcctagaggggggtgaattggctttcctgaaattttctcaacaattgcagcggttaaattaacaaggcccggaacctcctggtgatgaacaccagaacttccgggcatgatgagtagccaggaacttccggagttcttgagccaggaacttccgggcagctgagataaattaaaactgagatgaaaaataggtcctagcaagagaagtttacgcacacagaggaataagatgaagatcgcagaatatcagcagattcacacaaagatcatgcacaagagagacaaagacgattttttcccgaagttcggatcagaacgaatctactctccgttgaggtgctctcaagagccgggtctcgattaaccccttgcctcacttatgcagagatcccagaagaggtccacagtcttcaactcaacacttctaggtcatnttctag

SEQ ID NO: 23835 - DNA, 340 bp, Oryza sativa
  unsure (1)..(340): unsure at all n locations
acgacgaagacgaacccaccgaaagacccggactcacacgatctatcaaacggcatgaagctggaaagacagcccgatcaagaaagagcagccctgcatgaaggcgcgccagagacacaaattgctctggaagctatggaggctctggcacacaaggcacctgccaacaactatcagctaaagacaaaccgcagctgagaaaaggaaacgctcgcagagcaaacggcaancaaagaacagccctcacaagagaactggcagcatccatgaaggcggcacgacaccgtccgacagaagaagaccaacagagctgacccctgaacctgacaaacaaacggac

SEQ ID NO: 23836 - DNA, 454 bp, Oryza sativa
  unsure (1)..(454): unsure at all n locations
acacatanaaactcagcttcaagaagaaggttcaattagtgcacagctataatttttattatactatatgccctgggagctggctttacttaaaaatgttgcttgctacggagtctttttgtcaagctccttacgaaattaaagaaagcaaccattattcattcatggtctaatgatgtatgtctcccactattagttagccgatgatgatgagaaactaaggcatgatgggaaacttaattaatacaagttaattaagacttgatctccaatctaaacatcctagtagagcttggtagtatttgagaacaagcttgcttaactggagggattaatnggagtaagtagtaaccactgagaatgatgcaccttgcaaatggtttgaccattacaggatgatcaagtctaattaagaatagacaccaacaactctatatacaagttggcactatat

SEQ ID NO: 23837 - DNA, 264 bp, Oryza sativa
atatgtgtaccaaagcacttaatgttctcctcgtctagctctcttcggcaaaacttgaactccataatagagtgtagtcaattctaccaaagcaccgagttgattattgattgtttgcttagtaccctacagtactattttacaagggaaataacattcaattttgataacgcggtccatcgatgcacagggaaattactactgtgatgtttctagaggtgcaaatcatttacttacaagttacaaccatgctaatagagatga

SEQ ID NO: 23838 - DNA, 503 bp, Oryza sativa
  unsure (1)..(503): unsure at all n locations
tgctgaggtgcagcaatttataacatgtccattacggtgtatatctatgcccgagcatacaaataacattgtgtttcctacataagattgtgatttaaatcattcataattagcggagtttatatatatgcctggaaaagtaagaagggtataacagcacatataatcaccatcgtgcagggcaagtgaaacaacactnttggacagattagatgcaacttctccactgagctcactccagaagacaccttgattcgattcgcagggcaagtcacctagttacatacaacacaaccgtgaatgctcagcaagagatataagagacatgcagaatagaggaaggaccagcaaacctganaccaaggactcagctatctctccttcattgcaaactatgtcctcctttattctatagcttcttgaatacgtcatgacaaaatcagttgtttcatcccttcttcaagtacttctgagatcataacgaccgctccgcatcttctcag

SEQ ID NO: 23839 - DNA, 440 bp, Oryza sativa
ttgcaaaggataatatgtggagctctgcccctccaacatcggtttctagttagctaggatcatttccttgctatactatctgtctatctatttcactatttgatgcatggctagccagttgccaatgcatctctttttgcagctagtagtagtagaggcaatggtgtcggcatgcaaacatgtacctgcagcctgcaggttgaaaagtttccacgcactgcatggccttcgatgcatatcctaccttttctggtccccatatggagcgccattgttgatgctgtgacctcacttgagctggtcagattgtctctagctagcgaacaggataaggctccactagcctttaatttgtgtcatgagtcatgaggcacaagaaatgggagctgatgaagaatacggtgtatggtcttcatgcaaaggataacgccatttatact

SEQ ID NO: 23840 - DNA, 442 bp, Oryza sativa
ctagtgagtacccaagaacccagtagacacgcatgcttgcacttattcgtatagaaacgagccagagctcgacatgctctatcatgccgagaaccacctccgctcgcaccaacgccgttatagattatggccaccgtagctagacacatgttgaaaatacaagagaaatatggggactttttataaactgtggcatagacacatgttggactgcgggttctattcctcggaaccatagaggcctttttgtatattggcagaggatgacatgtggaccccatgagcttataatctgaaaatataatggaaaatcactaaagctttacattttctgcagaacaatgctcacacttgtcaaatacatattaaatgaaaagtagctcatttgagatgattcagttgctcagagtccatagtatgaacttattttattgcacacact

SEQ ID NO: 23841 - DNA, 469 bp, Oryza sativa
  unsure (1)..(469): unsure at all n locations
actcagctgcaggaggggtaccttttcaagtataagctagttgcatgcatgcctgaatcaagcctgtctctcacttctgcaaggatagagtgataagacagaggttggcaaaaaacaatgagaatatatttcattcctaagtcaactttatgggaatatataggtcatatgctggctatcctgcagtgtgacattgcctgtgcaaaatattagcaattttgcttattgatctctgttgttaatgtaacaattgaagcatgattntttttttctgaagtgtaatcagaattgaagttacctagaaaaaaatgtggaattacattttcatttcttccacgtcttcacctggagcatttgttttctgttggttgtaagagaaaagacctgctatagttaatgttgtttgaattgcatgataaaagatgcaaacttaagaaatggtccctatgccctggtaaaatcaattatt

SEQ ID NO: 23842 - DNA, 477 bp, Oryza sativa
tgtctggaaagaagatctctgcacacttgttgcttcttcgttgtaaaatccattctctagtccaatgccatagtatctcaatgaagaggatgacgttctggctgtctggaataatacactatcaagcgtgtttgtaaactggcgtgaagtgtatactatgaagctaaaattagcggcttccatgaatttccccgtgttgctaataccccatcttggtgagttcgaaacatagtatgatgcctctcctaaattcgtgtcgtcgggttcgtaataagatttatctgagcctataatgggtctagtaccaccggagtcaactgcaaatgaagaatctgcaatttaacagaaaacataagagtgcagatattattattgcggagattaagctggtacagctaatggtgaagagatagtgctcaccatctggagaagcacgtaacatggagtatttcgctgttgcaattagacctgatgaca

SEQ ID NO: 23843 - DNA, 504 bp, Oryza sativa
  unsure (1)..(504): unsure at all n locations
ggcaccacattgcgccacgtcatccttttctcttgagccattgtattanttgcaggtctccggatggacgttagatcgacattcaacaatattgggccaggccagaccagcccatcctactcagcctctgttacgtgaaacgtttttccgttggcccagcccataacgatgccacagccacgactcatcgccttctattaactgcgccatgttctgttttctctttgaagtaaatcagtgacaagaaactgcaaccacctacgcgaagatgaggtgccgtaattaacccaactaatcctcttcataacctctttcaaatcatcctataccaaccatcagtcacctcaaaagctctggatcagttgcctncccagtccccgttagatcaagtacgcgttgttggacagactcctattcccaaatcatttggatccagaggaagtctgtcaagagcctcatccggtttggacangtatgcatagtaaccaatcatatgtgcactat

SEQ ID NO: 23844 - DNA, 430 bp, Oryza sativa
  unsure (1)..(430): unsure at all n locations
taagcttattattcagcgcaagcgtttcccctgctcataagatcaatatttttctctttacaccaaaactagcatacagatcatctaaattatatatttgaacttgtgcatcacgtaagcaaacagaagaaattagtgcctgctttatattgtttaaagaagatttcttgttattgccaggatatttaattataatcatgttgatgaaatggtattgaatttgtgaagcaagtttgtgtggtcctatgagtgatgagatgtgcaacgataatgggaaacatatgaagttatgagagattatatagactagaaattcaaacttaactaacctctacaggtacacgaaattgtgaatgtatgttatcaacagattttcttgaacgacccctgcctaaagaaaaggtaacagtttngagaacgaacagataca

SEQ ID NO: 23845 - DNA, 473 bp, Oryza sativa
  unsure (1)..(473): unsure at all n locations
cttacttanagccattgagccattatataccttattctattatggatcctctacgggtctatttctttcattcttgctcgagccggatgatgaaaaattctcatgttcggttcctttgggggctggatcttaaagaattcacctatcccaataacaaagaaacctgacttaaacgatcctgtattaagagcaaaattagctaaagggatgggacataattattacggggaacccgcgtggcccaacgatcttttatatatgtttccagtagtaattctaggtactattgcatgtaatgtaggtttagcggttctcgagccgtcaatgattggtgaaccggcggatcccgttgcaactcctctggaaatattacccgagtggtacttctttcccgtgtttcaaatactgcgtacagtacctaataagatattgagcagtctcttaataggttctgtgccgacgggcttattgac

SEQ ID NO: 23846 - DNA, 502 bp, Oryza sativa
  unsure (1)..(502): unsure at all n locations
tgccaagagcgtctgaagggatgggaccaaagagccttactgtatgtttactcaattcacgaacacgcctcccatctggagtgcatgtaatcccaacccacgatgtgcagacttgagtcgcgagagtccagttgagttttcgaccatggggcactgatgcagcaaatgcaagaaaggcctgcctgtctgagtttaagtcagcacatctggcacaagggatgtgcagaaacaaaaacgaagcagaaagaaaggctatgagcacaaagtgctgcattgntatgattaacttgaccaataatgaggaccagaattataatccaaaggtccacgtcagtgcttcattcctgccacattaaaaggatcatagtcaatagcaagtaagattgttcatagcatcaggagtgagacacatagaaatacatgaagcgtctaatattaaacacatgttatttgcaaagtgggaaaactagtataaacataaaggtatttgaatacaaaacat

SEQ ID NO: 23847 - DNA, 419 bp, Oryza sativa
acggctaggggctaagaacaaagcttattcattcaacgcaggtcaagggtccaagagccttctcctccgagaacgatactccgacgaccaggctgggggctacggagagtgcacaactcacacgaccgaccaaagtcgtgaactgagaagacactcttacacaaaacattggtgcggaaatttgattcattgtcaggtcaccatacatattataacacgtcaccctttgagcattcgctcgggggctatttctaactaatattcttttctgagcactgatttcagaaaaactctattcgacatcgcggaagactccacgtctctatgggtctacacccacaacgactaaagcgagcatgaccaaagttgacaacgctccggccgagactctaccccttctccagcgccgagaacagatg

SEQ ID NO: 23848 - DNA, 480 bp, Oryza sativa
  unsure (1)..(480): unsure at all n locations
agcttgangtcgcaccctatattactatagaatatattttttttatcttcttaaaccgaacaagtcaagaggggacatcatcatccactaacaagatgccacatcatcatccactaatttacaagaagccacatcatcatccattaacaattatcgcatttaaacatcatgcaaacatgctatatctttatagttgttctaatttaagagctcttctaatataaacatgttaaattatcatccaacataattcatataatagttcaatgcgtatctttattatgtgttatgatattctatggtccaaaatacttctctcctttattcctctaattaagtcatatcacttcaattgcgtttagcctttatataattaatctacggtccaaactaattccctactattcttcttcatagaggcatacaacattattcttacgttcgaatatcttctacatactatttaattatattttataa

SEQ ID NO: 23849 - DNA, 326 bp, Oryza sativa
  unsure (1)..(326): unsure at all n locations
tgctctcgacgggctgattgcttcattactgttctacttattaaattctacgtcagaaggacgtatctntccgcatcgccgctgcttccacatccaacggcacaagttcagtggaagcgttcctgtcctcctcccattcgtctcatgcgcgatgttcagctgctttcggcccatttgcagaccaagcagagaccgaaaaacgtcgcgataaggaacgggaggggaggtaaaagcgataagggacccagctcgcgcgttttggcgcgaggagcggacgagcttctctgcagcgcgctcgagcgtgttcgaatgaagagtgattgggc

SEQ ID NO: 23850 - DNA, 433 bp, Oryza sativa
  unsure (1)..(433): unsure at all n locations
tatacgggtcgaccctacgctctantcacgtgttagcatatttacttcgagatctaattntgttaaaacaagagaagagggaaaaaaatctacatttatagtatcataaatcgattatgcatgtaataaacaaacacattaatccttttattatttttttcgagttcaatacatcaattagtcacatgcaattaaaacaaacactattcaaatcatgtctacctttnggatcccctccagacaaaggtcacacatatatttttttctcctataaatactaattagccaaaaaaaaaactgataaccggtgtcgatgatcggtaatttttgaagtcaccacagatgtcttggtgtcaacggataagtcacttataaatgaaagaataattagccgtaaatttgagcacccatgtcaaaattagtatgtaaacac

SEQ ID NO: 23851 - DNA, 210 bp, Oryza sativa
tccttccagtcctcgctctcgtcctccctgcgtcactcgcagtttataccaaagaaggcttctcgcctctcgccttcgcctcgcttcgcttccaagtcccaatgccgacgcaacagcttacctcacgcggcgcgccacgcgctagagaggggccgccaaccgcatggcggcgccgggcctggacgaggtcatggcgtttctcaccgacca

SEQ ID NO: 23852 - DNA, 409 bp, Oryza sativa
  unsure (1)..(409): unsure at all n locations
tatcagtgcagtactgtcattgtggagactggtcaatgagtgttatgtcttgtatgaatgagacatgtcaaatagtagtacatgatacccattcaaccgggagaatttagaggttgagaggaaaagagggagagaaaaggatggggaggatgcgagtgcacgcactctccctcatgcgcgcgagtcgcccggtccctcggcggccaattctatctgagcctgttactccatctaaatacacaaagataatcttactaaaagaaagatagatagaagcgtagtttgctttgtagcttttgtaactaatgaatcaattcaacatctcttctttaaattgcacagcggcctcgatgagacaggaccgcggctgtctcgatgagacngcggccgcgggacggcgggctggatg

SEQ ID NO: 23853 - DNA, 296 bp, Oryza sativa
  unsure (1)..(296): unsure at all n locations
ggagccggccatgagaggagactctgtctttcttttgcataaatagcgcatgtataacgtacaataagccaataccttcaacatatactagaagcaaaatgatacttgatgcaagtgcacttatatatttctctttgtaaacattggcgaagaaaataatattattgatcctaagtacaaagcctcagattaacatacttccaaatacttatcctaattaggacagctaaagtaatcaaaggcatcaagggtcttagttgcaggttaagtccaatataaatgtattctnttatata

SEQ ID NO: 23854 - DNA, 472 bp, Oryza sativa
  unsure (1)..(472): unsure at all n locations
aggaagtggagtagaatgaaattctcttatgggaatccaccccgacagcaaaagaaaagacacggaactcatccaaaaaaagattttttttctttttagaataatctaagtttatttacaccatccattggctgttgatccaacggttgatgttcttataaccctaataaagttaaagaccacattataattaggaatccctttgaggatagggtaagatactaatgaaggtacacgcaaatagacgcacgccagagtacgtattagatgttaggtaattcttcagcgtacttttttttttttttgcagttcatggatttttgttgcttgacgaaggcacaacaaanagctcgatgaagattcaacaacaaaattgaactgttaggccaaagatgcatgtgtttccatggttgagatatacgactagatccagtangtactgaacgtggggtagttctgcttctagtcatct

SEQ ID NO: 23855 - DNA, 430 bp, Oryza sativa
tgactggtggtcgcagtctatgaagaatttgttgtttatcttctatgaatcttactaaagacctacgagtatgacttatacgctccacccgaggggtagtctacagacggtctagtaccaaataagactctgaatgaaactagcttgcacaagacttgcaattcaaggcgtagtccattgttcaagttgtgagtaagtgtagcttatagttctaagcggatgttcaaccttgatcggtctccatcgaaccgtggtatataaaagaacattggaaaaagcaaatctcactgggagtttgagaattggtgggggattgttggaattaatagatgggctaaggcccattctaaaattaattctttggaaaatcacaaaagcccacctcatggtatggcatgcatgtgaagtttattaccaccttacttattct

SEQ ID NO: 23856 - DNA, 402 bp, Oryza sativa
tatcaagtactggtcggacccctgtgcctttcagaatttattatttcagatattgcttctttttttttgcgaggcagatattgcttaattaatccaatcattatctgcaactctctaatcattaatcaacagcactttgactcttcgctgcaagcaattaatcaaagtggcacactggcactgcaagctttgaacaaaatcatcatcaattgactctgcatctcttgtgtgatcccgcgtaatcgtttggtaacaattaatatccagctaaccataacagattaactagtgtttgaccaaacacgtactgggatgaagggacgtactcttgcacttgctgatcgccattgtgagacgtagagatatcgtacgtactctgacaacgacacatactgatgctta

SEQ ID NO: 23857 - DNA, 267 bp, Oryza sativa
actcagctgagacatcttttcaatgtcttgatatgagcaagctggttgtgttttgacatgaagaaggaaggatggttcaagttgatatgagtgcggagaccttaactgaagacagtataagaccctgctgctatgtgctgtttacacacgaaatgatcaaatacagctgcgatcatcaatatttttggggatgttttgcaagctagatcttctcatattcacatatgggcactggatctcttatcctaacctatcacagctgtcaga

SEQ ID NO: 23858 - DNA, 262 bp, Oryza sativa
aacgccccaaaggacaaaaagctcaccaacaaaaccaaacgagaagcccgcgccaggacttcccaccggaccgaacagggccgagagacgcgacgaaccggcggaaccgggcacaccgcaacggcgaaccctgacaacagaccaggcccaagccccgcgcccagctcacgagggccctcacggctcccaacccgcacacgagaaacggcgcaacgcgccccgcgcccacccgcggcgcaccacgccggcgccgaaacccgcc

SEQ ID NO: 23859 - DNA, 402 bp, Oryza sativa
acacctagaatactaagcttgctcgtgcatctggaggaggaatgagacagagctatgtatttttgggtgtgactctagacccaggtggtagcaccaaccagtgctatagataaccgggatctctattctctgcaggcagtaccaatactaaccgggactaaaggtacgctttagcaccggatggagacatgaactgacggcattcgaaccgagactcatgatgatcttaccgggactaaagaccagctatgcccgttaccctatggaaccgggactaaagatcatctctaaccccggcttcattgcgtccagaactattgcggaaacgacccgccgaacaaagatggtgcctcaccagtggtcaaccggcccaggttaaataagagaacctacggagcgtct

SEQ ID NO: 23860 - DNA, 343 bp, Oryza sativa
  unsure (1)..(343): unsure at all n locations
aagcttcgcgggggagctagctaagtaaccaacgaggagcattttgttgntttttgaccgatcctaaatgcatccgacaacacaacctctagccaataacgcggccatgtggatagaagcatgcccattctccctgtacaagtgatggcggcacaacggcatcacgccgtccatggagatgtaggcaaacagactaagctactgcgggtaactcctaaataagccacgttgacaatagaaagattaagaaaccttagcccctagcgtgattggaatccattagtagacatgaatagcatattttgtcgtgcatatatgggtggatttgaacattgggtttctt

SEQ ID NO: 23861 - DNA, 445 bp, Oryza sativa
  unsure (1)..(445): unsure at all n locations
tcggcgcgtgtaagtgcagttcggctacgttccttgccttgtttacatcgcgttcggatccgagtgcctggtttggcatgagccgttcgttctaagccagtggctttctggcgctagaagcttgtcgattntgtacctgaacttccgtggtcagaaagtacgtcacaggctgggttttcatttgttgaatattaaatatgttctgaattcagtagtctgttgacgtgcgctgtatttaattaggcctttttttttcattattgcagatttgggttaaaccggaagacccgaaattgctatctcctatattcggtaacctgagagcagggttcaccttaccagtttggggagttaccgacccccgcggtatggtggttaccgcgattaccgtgcgggtaccgcgaaaaccgcacaaanttcgttctcaattttgaaattaaaatca

SEQ ID NO: 23862 - DNA, 488 bp, Oryza sativa
  unsure (1)..(488): unsure at all n locations
tacatatggagagagagagnaaattcgaccaatatatattcttatcggntaattgctggaatatataacaccttttcttttattctgaagaagtccattttactcgctactcgctagcaaaatagttcaagggaataaaatggactttgctcttttatttttatttttgttgcaaggagatcgaagtgatagtattgttttgaattctttgtggaccagtacaaatacattagccaacgtgtttgtcagaacagtccatttataaccttgctttttcttctggtttagtatgcttcaagtgagtcatgtcagcggtcatcagtttaccagcttgcttgcaaattgaaataaggcattatttatacatgccatcgatcatttaattcataaccacacactgtcaaaaacatttacacatatatacttctaggtatcattcgatcgatttaacaagtcaagatcgatgacatgcacttgagcatttacac

SEQ ID NO: 23863 - DNA, 351 bp, Oryza sativa
  unsure (1)..(351): unsure at all n locations
ctaagctatacttgagagcaggccagctgcttgctaagcaggaaggaattcatggcatagacgcatgtatccggatgactgtgcgatctctgcaggatgacaaaacagctacgtgataaaatcttgatggatccatagattcgttggcgctttaccttgatgttactatcctttagatctgatcactttgatgttaccccctttcttttctctgcctctntctgatgctgttttagcttcaccgttgcttcagtgctccagttcgagcaaacacaggacaaaactggagaatggaagcttgatcagaaaacgaaccacacatgggaattatatctcattttttcactgata

SEQ ID NO: 23864 - DNA, 295 bp, Oryza sativa
aagctcaatccttggatcacatcagaccgcatgtcttgcaatataacactgtctatgtacataacggatgtgataattatgtctcacatgtcaaccacgatggccgaaccaaataacactaccacattgcgccgttcattaagacagttactcgaagataactttaaacatacttctttcctacatttatataaatcaacagactcacaaaaaatcgtgctgctagggacatgactgtccccctactaaggccccaccctccagcctgatgccacaatggggagtggtggggcca

SEQ ID NO: 23865 - DNA, 313 bp, Oryza sativa
  unsure (1)..(313): unsure at all n locations
tgcataacagaactacaatntccttntcaagtctatgcatttgttctttatcaatttctttggcgcacaactgtctataananaaacttagttcagacaaatccttccattctttctctggaatgaaccccctcaatgcaactggtagcagacgttctataaatatgtgaaaatcatggcttttcaacccaataaatntgcactgagacaagttcacagctttctttatagtagctgcaaaccgatcaggaaatttcaagtccttaaaccacttcataatggtcaatntaatcctcttttgaacacaatattt

SEQ ID NO: 23866 - DNA, 366 bp, Oryza sativa
  unsure (1)..(366): unsure at all n locations
gctgccagtgacaagaganatgaagcaacaagaagctactatagatcaaaacccctaactntgagatgagggaacagtactnntaattaattttaatactatatatatggccaaattaacctttgcttgtcctagtagcatatatactaagaggaagaggtagctcatcggtcgccacgtggacagggttccagagagcgccacctaactaccgccggatccagcggtgggtatggcaccaatacagttccatcagtttcttagctactgtatagtactgtactactatatttgtacgtgcatgatctgaantgtggnttttctttaaatttctttatttgcttaccttcgatacgtattggtact

SEQ ID NO: 23867 - DNA, 354 bp, Oryza sativa
  unsure (1)..(354): unsure at all n locations
tcttcttgaacacccacttgcacgccacaggtgtacacccatagtgtcgctctgtcacctcccaagtcccgttagcgataatggaatccatttcactacggacagcctccttccagtagtctgcatcaggagatgcatatgcttctgaaattgacttangagtgtcatccacgaggtacacagtgaaatcatcaccaaaagacttagccgtcctttgtctcttacatcttcgaggagcttcactgacatcctcctcagagacaagttcatgtgtatgttcagtttgttctggtggtgtgattgaactgggaattatntcagagggttggttcgaaccactatgtgtatccttca

SEQ ID NO: 23868 - DNA, 329 bp, Oryza sativa
  unsure (1)..(329): unsure at all n locations
ntattagtatcataatctaaccctacaccggccaatatctattattggaaggcatccgatagagttagatattgttggtaatctagattatatagcatatctaccatctcttagtgattntcatcaatatgtttggatcttgtatttattcttatgcttaatgctgcatcggttgagttcgatctattaagtaacattcataactgcaatatctagtttgtcttacatgggtcataggagatggctccccctacggcacgcctttataagaaagaagaaaatttcaatggtaagaaagaacttgggtctgcccctgagaatttgtccgg

SEQ ID NO: 23869 - DNA, 397 bp, Oryza sativa
  unsure (1)..(397): unsure at all n locations
ttctaacanactgctattcttatgttcggctggcgataaaagtgacgtaactntggccagggttgctttcagtgtagagaggtaggcagtaggctttgatcccctctcgacgatggaaatttaanagggattaaacaaagagctaagtcaaatctaaacaaaacccctgnggaatttgtgatagaagaatgatgcanagctctgcacatttgcacctagtttttccctcccgtgtaagctccactacacacaggaagaatcatatgcacttcacctctgtattttctatgcattgagattagcagtgtgggaggcagcttgaggctaaactatgtgggctatgtgagaattttgccctatatngtattttttattcttttaagggaaccctatctga

SEQ ID NO: 23870 - DNA, 276 bp, Oryza sativa
  unsure (1)..(276): unsure at all n locations
ctaagctgcaggtaagatggttcacaaatagaggtggcctanaccactcatattgttacatatatattgcgccaagcagctgcttagcacggcagcgtatcaggtgcacacgagccatcatatgcacacatgcactcgtgcaatggggtcctctcgatctcaatccaagggctgccaaccggatgcagcaatttaaaaaaaaaaaaaccgcccgccacatacactacntttttgaaagaaccccctgacccttggttatccatcccacgattattc

SEQ ID NO: 23871 - DNA, 358 bp, Oryza sativa
taggacactatagatactcagctagcataggcgctgtatgtgtgtgacttccactggtacaccaaatgagtgccttcgagagagagctctaacaccactcggcatttttagagacatgctctttcttgaagacagtacttctttgaaagagaggaataaaacaaatatactcgacttcagaaatatcaataaggtggcctatactaggaacagacaggagtactgttcaaagttcaaaatcatacatttaaggtgctgtatttaagaaatacagcttaagaagtagattattatgataggtcaatgatagaatagtaaaatgcatgctacaaaaccgagcctgtaagaatacaggaat

SEQ ID NO: 23872 - DNA, 351 bp, Oryza sativa
  unsure (1)..(351): unsure at all n locations
atcctaatgatgtctcaagcacagagatgaactatcttccatcagcattganactcttcctcactgagatgcgtatagatgaaagggttagaaaagtaaaaaatcttgctaatcttttcattnatgatgttgaaacaaaattgcacaatagacatgagaatggttacaagctttctcaaatggttctggtacttccagtaacaacagctagtgttgaaagaatattttctgccatgaattatgtgaagaataaatngagaaacaggatgcgggatcaatacttgaatgatngcttggtcacanttattgagcgtgagatgttcttgaagtaaggagtgtgatatataaacc

SEQ ID NO: 23873 - DNA, 369 bp, Oryza sativa
  unsure (1)..(369): unsure at all n locations
ggggctatcccatactagcacatgtggttgcactgtatatganatgaactaacattgagtgaagtccttaggtcgaattgngcgcactctcctcctatcggtacacaaccaatcaccatatgtgcaccacttgaggcccaaacctaaaatctatgttttccaccattntatttgtcaaaatcacaagtattaaagttctgtccagattattntcaaaatcaatttcatgtttgtaatgagcccataataacaaggaagaccattctaagtaaggctaagcattatagtaacctattgactccaaactcatatatataaagcagtatagtcatattgctcctatggctaggagtgatggatatggatata

SEQ ID NO: 23874 - DNA, 328 bp, Oryza sativa
  unsure (1)..(328): unsure at all n locations
agaaatntccaaagtattgggcatacgccatgcgcacactgctttaacagatgtgcttaagtccctagaagacacatggtttcaccacacctggaaatatatggcatatgtggtgtaaaatccgagtaaataaactcataaaggatttaccaaccgcctagaaaatgaccacaatatataatcagcctaagccataatattggtcaataaaaatgcacacttacgtggcanaaagcaatgatatggatccaatcaatgcttgataaaccaaacagcccttgactatataaaaagtagcggacagcttataagcttactgttgaacctt

SEQ ID NO: 23875 - DNA, 286 bp, Oryza sativa
  unsure (1)..(286): unsure at all n locations
cataagcacacatctgtccttctctaatatattaattntatcaactagattagcattttcaacatccttttgcttccccattgcttccatctattccttttgcctagcagcattggactccatctgcacctttacatcaataagtgtagatcgaagctctttgatcccctccctactggagtatacagcgtctcacagatcattcaacaattgttttacgaaaggagtactcttcccatcattataccaattccagaatcctacagattcagcatcctcattacaa

SEQ ID NO: 23876 - DNA, 379 bp, Oryza sativa
  unsure (1)..(379): unsure at all n locations
tactcagctttagagggatatcttgtcttgtcggactaagagctcttatctctttcttttcccacggtaactagagattgaataatagaagcctgattcaataatagaagccagattcaatatcataagaaaatagagattgtagcgtagagtcaggctatcccatgtttgcaataacagctttgggatctttcctgttaatgatgaatagctggcctcaacagagaatcagaattctttntattcggtataacaaccttaanaatgaatcgatctagatgccccgctcttgccatctttgatggaattgaatcatcaactgacttacttgaggaataanaaaatctgcagctttcgattcttggctatcggattctat

SEQ ID NO: 23877 - DNA, 342 bp, Oryza sativa
  unsure (1)..(342): unsure at all n locations
ggggccctacgtggacacaacaagttggttcccatgatggtcaacacatgggagggaaacttggccgccacggagagtgagaccttggaagaataataattctggccgcaagcctgcaaccacgagctntggtccagccaaacgtatggctagagtgcacggcatgaatgcgatacgaactactattatcatgcatcagtctccaagtgtgtgaaacgtacagtggatcagagaaagaaagcagtacgaactactgaaagtctntacctaaacatacacaagaaaaaggaaacaaaaagattcaatagccggcgtanattaattgagtccatctttcatact

SEQ ID NO: 23878 - DNA, 283 bp, Oryza sativa
  unsure (1)..(283): unsure at all n locations
tgcaccgngtatataatagtactgcgtagtggcagacatgatttatgcaattgatataggaatctagtaaccatataaatacccactactcagttaaaaacatggcgaaagggccataactcaagtaattccacaagtgccttgccggatctgatatttgttggagtttgattgagtctttagtcttggcgtaaacaagattacatctgcttaattgatctcaactcttgcctacttatgaagccattgttattctactagtgggtctttcctcccttatttc

SEQ ID NO: 23879 - DNA, 347 bp, Oryza sativa
  unsure (1)..(347): unsure at all n locations
ggctgcatgcttcataatcatntacgtatgatcttatcttagctttgttgtacttttcctgtgttttgtttaaccacatactgtaaaaataatatgattgtggtgtatctttgtaggcagttatggatcccatggatgatcatgacagtgacgagttgccgtcaggggtggcgtcagatgaagctcacgttgccttcagagcgagaactaagaaaaggtccaaggtgtgggatgagtacaagcctatctatgtaaacggagtggttcaaagcgcggaatgccgctactgccatattctgatgagttgcaaaggttctgatggacattccaatggaacgagtcatttg

SEQ ID NO: 23880 - DNA, 342 bp, Oryza sativa
  unsure (1)..(342): unsure at all n locations
cagcttggtaataatntctttccagtggcgccgatatccatgcgatgtttaccactagtgtgtatgtatgtgtgtacacacaaagatgacngagttttaattagtttttttgcaatntgcagacctcggactcgttgcaatgcgantagatgcagataaccatgagcacgatgagaaccttaagataatgcgtgaacagagaggctacttgcacatgggtagtcttcttgctattaggtcaatctttacttttaaaaaaagatgcatatgcatgcttaaattagtttttggttctgctttcaaaatatacttgctattaggtcaatatttacttaaaaaaag

SEQ ID NO: 23881 - DNA, 463 bp, Oryza sativa
  unsure (1)..(463): unsure at all n locations
tctttcttcaaaactganaagataaattccatagcaggctgttggatctaattgcaatcctctacaatatcattactatgtgtagtttaagatccgtataatttagtattgggaataattgntaatatatgatggaaacaagtaattgtagttagcaaactaaagctagaagaaaaccaatgccatcaaaattagcagtcaacaagttattactgtgctcactttcatagttatcctattcctgactcagtgcgtggaggaattgagccataggttgatctctgtaagactataaccctttgagattccatcaaaaatactatgaaaactttgaagggcataaaaatggttagctaaagacacattttcacattcctatgcttgtgctattttcttggtctggccctggtctaatcccattaattacagaatggcaacaagatggttttactcttagatcaat

SEQ ID NO: 23882 - DNA, 253 bp, Oryza sativa
  unsure (1)..(253): unsure at all n locations
tgcaagtgtgtgtgaaagtgaaggagtgaagctccttatatattgcagncatgaccggtgcgagaaggggaaatgtccgaactgccgcgcaaccgtcatgaggagagcatcttgagcgtccacgccaaaccctaggatctacggtgatcagaagagtatggccgaaccagagagtttatccgaaccagatcaacggtgatcagaggagcgaacctgggctgggccatcccgtgctggccttcggcttgtggac

SEQ ID NO: 23883 - DNA, 225 bp, Oryza sativa
caattccgatataaatcctcaaattccgagcattccagcaaagcccttatcggctattgatgcacatgccagcactcgaaagtagatagaatcgagaaagtcgtacaaatgcgaaaccctcaacaaggctggagaggaacaagaattggaactgcccatgcaaaatcttgaaactaacgtatatccggtgcaatattaatttctagatatctactatcttgtact

SEQ ID NO: 23884 - DNA, 354 bp, Oryza sativa
  unsure (1)..(354): unsure at all n locations
tgcatctgtgcagcacatcgccacactcgtcgtaagcgcgcttgtagatctttctctgacggagcaaggatgcatctgtgatgggcagcttcgaggatctctcgagcgcgaggtccaactcactgtgcgccatctncagcctctccatttgtgtgcctttggatgccttctctgtccggntgctggataggtaggagaagactccgctgacggtttcctggacaacggctgatgcaactgcttctgccatgagaaaactaaaacaagaagtgtccatagctagcgtgataatcgatcctcacttgaaaatatatatccgaaaaagataacatacccgccttatattatattata

SEQ ID NO: 23885 - DNA, 221 bp, Oryza sativa
gctagaacgcaacgtaccgtacctggaggatgcttgtgggagggaagcaagcggcggctggtgggcgtgcggtcggcggtgcgaacggctggatggtgcattggatcgcgacgtgcactgcgagcgacaccaatacggcggcgatgagggccagctgctgcgccatgccgccgatcgacccaccaatgtgtagccgacgacgagctcgatcgatcgatcac

SEQ ID NO: 23886 - DNA, 394 bp, Oryza sativa
  unsure (1)..(394): unsure at all n locations
agaatcactcanaagaacgaatgtaacccacaaacttttttactgtgtaaagatctaccaactatntatgaaattactagtattgaactctttcattttcccacacaanaaggtgttttcctcatccctccaaccttntaaaatgaaatcacgctatcatgaagcgtagaaaaccaataaattcaagtagaaaaaaaatagtcttgagggaataacttacacaattcactgaactcgatcacatattacagtcacaaaaaaaagctacttttgcagaatagatccaaaagcaagaagcatatcaagcgtcatgctagcagcagttactggtgattcaccacgaacatgcaactaaaccttcaagagacccacagaaacttctccgtaatcgtaa

SEQ ID NO: 23887 - DNA, 408 bp, Oryza sativa
  unsure (1)..(408): unsure at all n locations
tatggatgaactntgacaggttccttgacgaaatatgaagatgtaacccgccacccatgtntcgcagccatcgcccatggactngccaagtttctggtggtgcccattgtggatgaaattactgattgcctgaagtactcaaagtttcatgagtataacanagattacagcttgggtatctgtaaagtgggtatgttgagataaaaggacaataatttgagatttctgttacatctcaaatgtccatttaattttttacgctactttataacttcgccttntcagttaaatctcataatatgcattggttcttttatccaggattgaatcttctagcctctacaaaactgaattcatatttctttcctcttcattggtagtggtaaccatactcttcatatatgttga

SEQ ID NO: 23888 - DNA, 237 bp, Oryza sativa
  unsure (1)..(237): unsure at all n locations
gttataattgaacaatgtgagaataatatagactatatttatacggcatctacaatataagttaaaagtggtccataagcaatacagatatgtgttcagccacctaacaatattgtggaactagttcataacaaagaaataacacaagctacccataaacatatgggctgtccatagagaataaaatatattatntgtctctacctcttcactcatcctaagatggtgtttgggaac

SEQ ID NO: 23889 - DNA, 389 bp, Oryza sativa
  unsure (1)..(389): unsure at all n locations
tggagtgtgtctgaaaangaagtgataactcctttataggtttgttggcggntactgctatgcgaattattgaanatgtcccgcaaccaccatccggagagcatctggagcgtgcatgacaaccctanactgtacggtcgagattggagtccgtgcgaaccctgtctgggcccaacaagaccagaacttggcctgttctctctctcagcttgccttatccattcttaggtagttgggcctattttgatgtttgatgaagttaaggccactcttgatggtagaatcttgtatgaccgaataacccccggcgtccttagtgcggtttatccttgtccagaagcaagacccaaagttgttcatttaagttataagggagcgtaaagtattat

SEQ ID NO: 23890 - DNA, 342 bp, Oryza sativa
  unsure (1)..(342): unsure at all n locations
ntggctcanggatcctcagtccgatcccccttcctcgctaggcatggtcctccttttatactctaaggggataccacatgtgctgcgagtgctacctanggagaaggganaatattctctatattaattacatatcttgtgccttagcccagaagctatctgcacgtcggttgctgcgcggtgcccatcaaatcatgcaggacgcctttgtcattcgccatttaatggatgagtacttccgggttctcgttcacaccagaaaataggaacccgggtcagttcagagtgtgtggaccagctctgaccgaggtaagaggctgtgaagcccctcatcataatgat

SEQ ID NO: 23891 - DNA, 375 bp, Oryza sativa
gggtcaatcctagtaaacctggccagaacgtttccatttacaaatgtaagttctgtcaaccgtggatcatacatgcgtgcgagacatggaaggctatggagccatgcgactcgtacttaccatcccagctctggaaagtagcattgttcatggacaaatccaggaactgaagctccgggaatgaagagaagaccgttgtgtcgaaacgccaaaacgagtgaccgagtgcatctagcacttcattagaatcatacaggtttgagaaatagagatgtgatactcgcccagtgatgttgctgcagttgacgcgctcccacaagcagcagtcgtcgccgcggccccatgaacgcggcgccgtgccatttgagcgcgtca

SEQ ID NO: 23892 - DNA, 365 bp, Oryza sativa
  unsure (1)..(365): unsure at all n locations
tgcacctttggcctgcttccattgtttatgttgtagtggttttactctcacggctgtttagtagtttctcttgactntntatctgtatttttaatcatgcactntactgtcactttcaggaggagtttgacacccatgatcctaaggaaaacagcttgctactaccttacttgaggaaaaggtcaaaaattattgagatagttgcagcacgcgacatagtttttgctttatcacagtccggagtgtgcgctgcttttagtagagggtatgttgtgtcattgtggtgcacttctgcttcctatgatcatactaagaacagcttcatgtattatcagagaccaataggagaatatgctttctgaatg

SEQ ID NO: 23893 - DNA, 334 bp, Oryza sativa
  unsure (1)..(334): unsure at all n locations
tatcccttaagtgacagagttaaagaggatgcggcatggcagtttatctattaattaggaataatttgttagtttccttttatctttaggaaagtgtgtttattgtccgataaggacttgtatcaacccatgggtataaatatgtacacaccggggtctatgtaatatcttcacgatcaatacaattcggcgcatcgccaccctctttacttctacttttgnttttaagttccggtgggacttggcacccgacgcggngctgcatcgtcttcgatctccggcgaanggataagtccaatgttccgccggtccaggcaattgtatcgtctacgtc

SEQ ID NO: 23894 - DNA, 326 bp, Oryza sativa
  unsure (1)..(326): unsure at all n locations
ntctctgaagcctgaatgatccanagttagaaacatatatgctgaggttgtcattggttntacttggagaagcagagaactattctcaattcgattcattgattaaaactgaagggccaggtccagggcctgataacaaactttcttggtctggatgacattcagttccagccaacacctgnataacgtgagtttacatggaccattcgttgttcagctctgtggagcattaatnnttttttaattttcttattcagcaccattaaactggatgtatgctaattatgtgaacttcagcgaggaatatangattctgaaacacaatt

SEQ ID NO: 23895 - DNA, 369 bp, Oryza sativa
  unsure (1)..(369): unsure at all n locations
tatagactcggtgcattatttgaatatggaaagattgacctggtaggggctcgaggattgaacaaagaagtgcattattcacatgattaaaactattcctcttctgatttaggggtaagcaatatcttatattaatttgttngcactccctgaatcgattaataaatcttttatagaacctgctgtgcttagagtacctaacactcctcccaggaaactaattttcttcttgccgtttcatcgaccgacaaatgcaacgttttggcacacatcattacgtgtttccaccttaccttgtgatttataacaaaccacaagaattgtagtctttttacttatttacaccattagcgtatagtacatgctatg

SEQ ID NO: 23896 - DNA, 350 bp, Oryza sativa
  unsure (1)..(350): unsure at all n locations
tactaagctaactagtngtgtgattggaaataagtccccctcatctatgatgttagttaggctcttatttatacatgtactggccagaacatatcttaattaatcttaactttatgagcctttagagtatctttcacaactatatcaaagtgtaaggcagaaagcacacaacatgttgttactagaatagaaaaccgtgtttgattagtgcacaatttataacacagtataattgagtggtttacacctttgagtggttataagcgctatttaccactcttagntttgggaaatattcttatatatatgaataatcatagcatgctttaaaatctaatggcatcatcgac

SEQ ID NO: 23897 - DNA, 290 bp, Oryza sativa
  unsure (1)..(290): unsure at all n locations
tgagtcanggaaaggaggaacaccaacacttaaacgctcatcatctngcagtgaggacaggtatgtcatcgtctagcttattctgatattggactatggtgttggcaatatgcaatacaattcacggttacatgtcaagtactgtagtttatgatgtcgtatcttactgatacagtggcctttctcattgaacgcctgagctaacattggtaagttgcactaaatgttgaacatttcaatgtgttgtacagcataagttaatttctcaatgtccatcttgtacttgctat

SEQ ID NO: 23898 - DNA, 353 bp, Oryza sativa
  unsure (1)..(353): unsure at all n locations
tggacgaatttttagcataattcccctctaaatatttctgaatgaaatatccaaaattntgggcttacctgtgggtcctgataggtagctagcgactgtggtccgatatttggtcaaaactaattgttcatggtcaaattccctgattccggatttctctttctccttttcttcctaatcacgagtgagacatctcgagcagttaccagcatcgcgatgttccccattgctcccgtccagctagatggtgtagggcgatggcaatgagacaggttgagcangcagagcaaaactatgcccgatagcattgtaagtgggtttctaataatgttatagatagataacacgctact

SEQ ID NO: 23899 - DNA, 375 bp, Oryza sativa
  unsure (1)..(375): unsure at all n locations
ctcagctgcaccacctaggaagcccaacagccgcatctgcattctcttgttgttttgcttctttggcttacttgcagatgatgcctccgcacgatcatcagtagtggcaggaccatcattttcttcatcattgtcatcttgaacatcctctggtcctaggactgaacttgagtcctttgcatactttcctgtagccatggtgctaccaaatattgtaagcatctcaccataatgtgcaagaggttngttaaaataatctgcattagccttgtgatccttcatgacacacaaagtattgtataagaaaatgccataaatagttataataattanacaaagaacccacaacggtagacatatacctcaatataacca

SEQ ID NO: 23900 - DNA, 400 bp, Oryza sativa
  unsure (1)..(400): unsure at all n locations
ctaagctnggacgagcataacagacggtgtcggcttcattgtaacccatcatacgtatgtccttgacctgcagtggatctccaagagagaatttaactccaacatccccatagataaaagtggagagtttgggagcatctatctctatcacttgtagcatttgacattttgtaacctcgaggtacttgagctgttgcatcaggcaaggtaccttatactggactatatcactgcattcagaaattaccaatcgctccaaagagaatgaattggaaaggaactgccctaactcctccccacaaatatcgactntacatatatgcaagcttgtcaagcttatgttgcaaccaagagtcaccgtaggatgaaaagcacacgaggagaggaaaagtgactgaat

SEQ ID NO: 23901 - DNA, 134 bp, Oryza sativa
actaagcttcatctcctctctcggcttctctcagcttctgcctttctctcatcttccgcacttctcccccactctctcttcacttctccccgtctctctctgtgcggcggcggcgggaggggcggctacaccct

SEQ ID NO: 23902 - DNA, 335 bp, Oryza sativa
  unsure (1)..(335): unsure at all n locations
gacactatcaaactcagctacacatntcgctgctcttcgcttctcaggtccagaagagctacttcttggttagtcttgtggacaacgactacatcaacggtgatctcttcgcggcgttcaaggagaattgatgacatcttatagtctgcaacctctcgtgtctgaattcctatctttatcaagtgttattgcttccacgactataggacagctttcgtcgaaagcttttgctcatgtgatctcgaaggattcatctagtctgatttttcgtgacttgtatcggttttattggattcatccaacatatatcaataaaaaatgaagtgtgttccttt

SEQ ID NO: 23903 - DNA, 462 bp, Oryza sativa
  unsure (1)..(462): unsure at all n locations
tacacatntcgctgctcttcgcttctcatgtccagattagctacttcttggttaatcttgtggactacgactgcctctacggtgatctcttcgcggcgttcaaggagaattgatgacatcttatagtctgcaacctctcgtgtctgaattcctatctttatcaagtgttattgcttccacgactataggacagctttcgtcgaaagcctttgctcatgtgatctcgaacgattcatctagtctgatttttcgtgacttgtatcggttntattggattcatccaacatatatcaataaaaaatgagttgttttcctttcttctagttcagtaaaattatntccctcctgcgcttgtgctgaattggctgtgacctggtgttgtgactggtagttccttggtatgatttcgtattgattgacatggagaagcttacttcttattggagatgaagtagtatgcat

SEQ ID NO: 23904 - DNA, 173 bp, Oryza sativa
  unsure (1)..(173): unsure at all n locations
tctttacatgtacattgaagcgtnctctgcacgacaagatagataatgtgcgcatatctatatgcaggcctttaattattgatgttacaatctaaactggacgcagcctgcagatagggaagggctgtattatcattgagcacgacttatctaaccgacgatctatgaccttg

SEQ ID NO: 23905 - DNA, 345 bp, Oryza sativa
  unsure (1)..(345): unsure at all n locations
cctttatcaagcttgttgagcctcaaacccanagaagctattaataactttcagtcctcgcagactaagtagaanaatcgaacaaggcaatgataaaccaagtaagcaaattgaattggtaaaaaatcacactccattattatgatgatagcccccgactgacaacttcaagaagaaaacttgatgttgacagttaagataaggaagtacaatgataagcttaagcatagaaacgacgaagatgttcaatgttccaagagttgtcgacgagagtaccgtcttcgcgcttgagtcgataggaacctggccgggtgacttcagagatgataaacgggcccttccata

SEQ ID NO: 23906 - DNA, 333 bp, Oryza sativa
  unsure (1)..(333): unsure at all n locations
tctccaggntcatctcaaatctaatgtactccttttngaaatatatctcgacgaaagtctctcatgttattcgtccctgatgaaagatactcacagcattccaaatttcatgagcagctcaaaaatgcgcaacccgatcatcatccgaacgagaaataccactcacaagaatgttgtgagcttctgcaatttgttcaaaagcagttttttcacccaccggattaatagcttcacgaatcacatagggacgagacaactttcttcacatatcatacacatgaggcttatgtgaaacctacacgagtagccttgcaaaactctgatcgataaatt

SEQ ID NO: 23907 - DNA, 308 bp, Oryza sativa
  unsure (1)..(308): unsure at all n locations
taacggtagacggttgaagatacataatcgaatcccaattgagtttaccatgatnacagttggtcttcctcaagaagtcaagcccctcaatgacttgcctgagaaaagattcagcacanaataaataactaaacatataagatacatgcacagcagttatcattgcagactttgcggtataattggattattgctaccttaataaagactggagtaatggtgaaggaatgtnggttattctgtcaccccagcaatcatgtttaaaacaaagtgatgataacagtccagtgtaaggctctacaaatgct

SEQ ID NO: 23908 - DNA, 283 bp, Oryza sativa
  unsure (1)..(283): unsure at all n locations
agacgctgtctccgcatcagagcattctgttcccacttggaagcgcaacaagggtacgtcctttaccggaggaggtggaagtaacaaccatcaggaccgcaagcgtaagcctcaggaacactgtctgcgcgtctacacgttcgacaagatcatgaacgtcctatgtacgcaccatgctatactcaancacatggtcaaagattgtttggtctactagcacttatcggagcactacactcagactacacggaagatctctgaaaaaaactaaacacgtctagga

SEQ ID NO: 23909 - DNA, 357 bp, Oryza sativa
  unsure (1)..(357): unsure at all n locations
tgtcanacacttttcacatgacatccaactcccacaggagcgagtgagagttatgagctaggagttnggaattggagccctcccaaacaggccttcctgcataactagctntgtcctgtntttgtacgttgctagcacanttgtgattanactatacaagacaaaggtgagaaaaataagtgaaaattcctttataataattaataggacgttcccgtcattaacttaaccctacaaacattgcttcattgcttgaaacatcntaactaaataatttaaattctattcaaaatttatataataaatcatacgaacatcttatatatacagtaccgtggacgtgttctcagccatact

SEQ ID NO: 23910 - DNA, 308 bp, Oryza sativa
  unsure (1)..(308): unsure at all n locations
tatacatgtgtgtgcataatattcgtaggaagtaggatttcaaccttgatatgtgaatatatattcgtaggaaacaggtttcaatcaaattttatttttttaataagacatgctacatatctaanaatattatttcatgttaacgagacgattaagtaaaacatagtttcctcaaaatatgataaagtaggggtattctgattnttctattatgtttaatgtgtgaaatgagtaaaaaataaacaggtagtattagttaaatgcccagtttgtcgagagcaaggacgtactactagtagtactccact

SEQ ID NO: 23911 - DNA, 387 bp, Oryza sativa
  unsure (1)..(387): unsure at all n locations
tgtcaagtagctacctaagaaggttaaacatgacatgcccacagtattttctgtgcatgtgttcacctcattagattatttcaacataccattagattactatgcactgcatcccactatgacataatccctctgctcacaaacatacatcagcgcaatcaaactntggaatatttaattttgcaaattctattagatgactctctctctctctctctctctgagcatacacagtcaaaaattacttntaataattatacggagtgctaaaatgttgtagcaaatgatccaaacaaatatttaccttttaccaaatgttacatgtatgctatatggatgcatgctcaaaggaaaacagttcacttgaacttaacttgatggaaccaa

SEQ ID NO: 23912 - DNA, 300 bp, Oryza sativa
tagggtgagtgccacactaactaccaattaggcaggacacatgtatgtataactcttattaccacttgggtggatgcatatctcactctgatccaagctatacactggtgaaaaaggttatactaccggtcgaacccactataatctggtttcagaccggaactacgaaatccgggactacaagatctgctaatctcttagttcccggggcaaacaaatctggaggaataatctatttttagtcactggtggtcacaccaacctggacctaagataatgcattctatccgggactaaaga

SEQ ID NO: 23913 - DNA, 333 bp, Oryza sativa
  unsure (1)..(333): unsure at all n locations
taatcaatcagacctagtgcaggttgtctttgtctttctttntttttgggttggcgtacatgtattccgcagatataaaatgatagttggtattctagtgggagacagaagaacaggcatgaactagtagaaggaaaaaccattaagaaaantatttttctatcaagagctgatactaacataccatcgattggtttctccacaaaaggcttgtaaaatcgctttccatggatctcaataaaatcatcttgctcaacaaagtactttaactcttggttagggtattctcttctgacaacagcataagttggaacaggaactccgaacaattta

SEQ ID NO: 23914 - DNA, 320 bp, Oryza sativa
  unsure (1)..(320): unsure at all n locations
tatagcggtagaattacctgacanagatgtcactactgtaatgacgacctccttctcttggttgcaattgggcgtccctgtgtcttggctggaacagactcagcagcaatagggcgaagagacagattctgaaggtctttggatagatccaaacccaaaggaggaacaatgtcatcatggcacgatgagagggtcaaggacgagaggagcttcttgctgtgcattgtaatgctgaccatgtacagctctgcatcggcatcgttgagcatgaaactaatgacaccatcttcctgagggttcatgacacggctaattggtat

SEQ ID NO: 23915 - DNA, 174 bp, Oryza sativa
  unsure (1)..(174): unsure at all n locations
tctcactatatatcttctctctcaatacttatagatagaagtgtgtgcatcagaacacaacttgctgttttcagaatacagcgactaagcaagcatagagcaatagtgatgccaggagacacgtttggatgctgcatgaagctaatggaacctgctgatgtgtggncctgtgat

SEQ ID NO: 23916 - DNA, 349 bp, Oryza sativa
  unsure (1)..(349): unsure at all n locations
tagttcaatggctccaatccactctcgagatccaataaatgatgtatccttgtcaccgatttcaacaaggacttgctgaatctccctgaataggagtctcaaatacatgaatcagtctgacgtcataatttgtaaagtgtaaaaaaaagtctctccagttgaaagcacatatggcaagctagatttatgttattaatcaacaacaccagactaattgcattntaagtaaagcataccanaaataccacaattctgttccggttntcaagaatacattactaatacttatatcgaacaaatatagatgtaaatgaccttgtaattaagtgtgacgggtaacaacaagaaa

SEQ ID NO: 23917 - DNA, 407 bp, Oryza sativa
  unsure (1)..(407): unsure at all n locations
ngngaggtgaggctgngcaagaacctgttaccactgcccgagacttctaactgcctaaataattangaatttcggaatgtagtctctaacaacaaattgcccttagtggcaacacanaanaggagcttattgaccaaacaaaaggagtaccgaacaaaaggacaaaattaggtacctgaaataaggtgtaccatcagaacagtaagaaannaattgcatggattcaaaacctcaagcttcttttcatcatctagcaaaataattggaatattcataaatgaacagtaataaactgaatttcatgatcttagaggacacaattaatgcangtgtanagcattcaagtaaaaatataatatgctaaaaagtaaagattttttttcagacatctacagaacacattctat

SEQ ID NO: 23918 - DNA, 327 bp, Oryza sativa
  unsure (1)..(327): unsure at all n locations
tctgattgcagaggagtgcgtggactgacgggccggcagctatgtttctctgttntgggcacttgtcggcgaaatgacccattccttgacaattgaagcaacagatatcttcccggactcggcattttcttctcattntgattcctctgtcctggcactggagttaggctgaaactgtaatcttggcgaggatttgtgttgccttgatgcttctctccgttggaactggcgggttggttggccatcttcttcgtcagcagaaaactgaattgacaatctnttagtacatgatcagttccttcacaaaagaaacaagtgatcctgctc

SEQ ID NO: 23919 - DNA, 440 bp, Oryza sativa
  unsure (1)..(440): unsure at all n locations
actcaagctggtttagacatatactacaagtcactctattgtcttgactagtgttatatatgcaaaaagaacatttgatattatagtcaccatttcctctaatccaatcatgttcacaatttaattgatccatcatttcaacctttagacctactaattcgtcaattaaatctaactcttcatcggatgattcatattcttcggtgatggtttcaacttcgtctgtttctatgatagaatatattgattcgncatcttttatttcatcatcacatactaatatgttttcgcttacgctatctatgattagaaccctctcttgtcctcatattactaaatatctcttttgaccttatttggcatgtctacttaaagatctgggagttggtattacacattgcagtttatcatagcttcttagatatatctcttaattcttt

SEQ ID NO: 23920 - DNA, 403 bp, Oryza sativa
  unsure (1)..(403): unsure at all n locations
tggtggatttcatcgcacttcatggaggaccaccatatgtggcaggatggatgtttgtggtgtctgatataacacgtataggagaagatagcctggactttggttgggctcaacgggttgctggtggtgtgccaatggtcggagatgtcaaatgtaagcaagtgagttatcagatgagatgcatcantgacagtggtgaggattgtgttgtggcatccattgtcttaccaaaatcagccatggagatatttgccaaggagatcttggtgttgtcgtctaaagagattgaataaatcaacctttcttttgtatccaagaagtaaacaagatatatgtgtattgcaactgcttggcatgtttaagtcatttactttctccacagctagaaattgctactaataat

SEQ ID NO: 23921 - DNA, 348 bp, Oryza sativa
  unsure (1)..(348): unsure at all n locations
tgtgacttggtcgaagttcgtggtttgaacgatatgtccaaagacatcaattctaaggccaacttcgcaatccgtccgtttgcttcgcgattatgaagtatatccccgagtggaaacgatgtgaccaccgtgaccgagtgactttgaaagtagtgagataatttcctgacggtaattaagacaccatataataacttttgaacctgaggataccttgtcttggagtcggctaaaacctcgctgacaaaataaattggtcgttggactttttgaatatggccttcctcttcatgctcaacaaccaggatcgtgctcacaacctgnganggtcgcaacacatataacagt

SEQ ID NO: 23922 - DNA, 277 bp, Oryza sativa
  unsure (1)..(277): unsure at all n locations
actgctacagtgactagaaaagcaacactataatgatcggtgaagatactggtttntttgaggaaaaggaagtattattgttacattttggttactactaagtattgagtattgacacatgcaacatatttatatctttatatgtacaggtagcagctcttgttccaaaaactgaactggatggtgagatgggagatgcccatgttgcacttcaagcaaagcttatgagtcaagcacttcgcaagttgagccattctctttctcgctccaggacaat

SEQ ID NO: 23923 - DNA, 339 bp, Oryza sativa
  unsure (1)..(339): unsure at all n locations
tanagtctttcaggtcactctctgaagccgcagtcgtttgtctgtataccaccacaaatacgtacttcatctttctacgattccatctgtagtacgatctcgatgcacagatctcttgaatgcaactgatctcgcagcttgctaatgctatatgctagctactgaattggtggcccgtggtttcaacaaggactggctaatgctcgatcgccgtcttgccttgcctgcagatcacggcatcaggtgggggcacgtcggtttcaagggagcatgccgccatgtcgttcaactagtgatgccaagggaagctcttggatccacctgctagctagttcgagc

SEQ ID NO: 23924 - DNA, 412 bp, Oryza sativa
  unsure (1)..(412): unsure at all n locations
ggctacgatagaagtccanaatggtccacttgctatgtgagcatataccatagccattacgccaggtaatccacacaccaacgaaacttgaatcacaagatccttctcatattcaccgaaatcagattggctgctaagcattgatagcagaaacgcaacaataaatggtaccatacaagtgagcagcgactgataagacttcataagaacatcattttcctggaaattaattaagagtgtaaattatntatttttcttgacttataaaaataacatgtatttatcctttaccactacaaagttaaattaagaagaaaaacataattatttttagattggcgaanataaaggattatnttcaatatttgacagtcagagatgtaattntataatatagtgaatttctaaaaga

SEQ ID NO: 23925 - DNA, 345 bp, Oryza sativa
  unsure (1)..(345): unsure at all n locations
ntatatagctgccccgctgactnntttatatagtcatggcactgtttgngtttatcaagcanatgattagatacaatatcattattntntgccatgtaagtgtgcatttntattgaccaatattatggctaaggctgattatatattntggtcattttccagacgggagtttatttactcgaatgttacaccacatatgccatatatttccagttacggtgaaaccatgtgtcttttatggacttaagcacatatgttaaagcagtgtgcgcatggtgtatgcccaatactttggaaatatctttattcacaacatcaagctcttctttatagctattttgctat

SEQ ID NO: 23926 - DNA, 303 bp, Oryza sativa
tctgctgctgccgccattgctgaccaccagcagcaaccagcttctgctgctgctgctgattcttgcctgaagcaaccactcctgccggcgtcgacggtggcctcagagaatgtgtgaccgaccaaccatttttttttttttgttgatgcagatgcatgctggcactacatgtggttaggctaattatgtatgattcattaatcaattaaatcaacttaatttccctgttcaagtacttgcaagttgcaacaacctgcagtatgttaaaagaatcaaagtcgttgtgctattactgggctatac

SEQ ID NO: 23927 - DNA, 346 bp, Oryza sativa
  unsure (1)..(346): unsure at all n locations
tcanaanttctcatagaaagaggagaagtcatgccaaaatttcttgtgatattattctagcgattatatacaaatcggaggtgtctaaaaggttagtaacttcatccttcaatggttttgtcgtgctatattacttttggagctatgtttcacacatntttttttctccaaaactttcttgtaagttgatgagagaagaaaattgtgtggtgaagaagaatatatagaaattntattctcatagcttaaaatatgatgaanattaatcttacaaaaagaanacaaactaaattgaaaattaagagaagtacaacatttatattaagttatgttggcggatggcatg

SEQ ID NO: 23928 - DNA, 409 bp, Oryza sativa
  unsure (1)..(409): unsure at all n locations
actcagcttcataccgatagctctaattattatatttttttacattttctatgtaagggtagtcctttttatactaataatatcatgtattnttaatgcttacaagttaatttatagaatagaagttntggaactaaaacaatataaagttgaaattgtcaagtattataaagtggaggacggaagaacaggctgcagctgtagccaaggcccaaatccaaaagccgttctggccttagtttggacaccatgtaaatattgacgacaataaagtgcagactaatcagtgaaaacaatactccatctggttcaattttttacaaagaattcacannataattcaataaccaaacttgataaagtgtgattaatggtgagtcacattattgtacatatgtagagatctttt

SEQ ID NO: 23929 - DNA, 123 bp, Oryza sativa
tagtgaccttgatctagcttgactattgcggcctgtatctcacgcaattagtctgcatgcttcacggagctgtgacctaactggagtgtggctccacgcactcacagaccattcaacttgttt

SEQ ID NO: 23930 - DNA, 395 bp, Oryza sativa
  unsure (1)..(395): unsure at all n locations
tctcttactgaaggggggggaaagaatgagcaagagtgagtactttcacagtactcagcaagccacaccggcagatgcatgattaatgcaaggggggtacaaggtgataataatatctgggttaagttttgcagtaaacagcatttaatagtcacttagttcccaaagctattttgtaacacgatcctagagctatacaatattattaatcaaggtcgtgaaccctcacgaacctgccttaacccaaggcctacgatgattcagaccgaactggcaacccgaccctgggtcccagctcgtcccaagccaacccaggccaaccattnccacatttagttgttaagcaaatgtaaaaattaaaacactaacttgggtacattgtcggcttgccataa

SEQ ID NO: 23931 - DNA, 272 bp, Oryza sativa
  unsure (1)..(272): unsure at all n locations
cagagttctagctttggtgtaggtggattcaatgaagtcgcctatagccctgaagagatntcataagacatatgtaggaatgggatcngaagctatggaggcaacccggcccagggcccgctgtcaattgacaggacctaagaangggtcccgtcaggagcaatgaagtgtctagcttggaactatcacggtatcgggaacgccatgacagttagtgatctttgtgcttagtgaaaaggcaggttcccaaatgattcttaagtgaactagac

SEQ ID NO: 23932 - DNA, 446 bp, Oryza sativa
  unsure (1)..(446): unsure at all n locations
tactaagctnttactgaagacgcggcggcaagtattaggctaatcagctgagaagtttgtcaaggcanagttcacaggttaaaaaggggaaatatcttatcagaaacgctaacattntgtgtcacggcatcgtttggagcgtccttaatgcaccagtactaataagtaattagtgggaaaatgcttctcatcgaacgcccgaaccaaattgaaaaatcgaacggggagtctctgacacacatgcacctatccaacctgtatctctatctccaaacatgcacctttaacgatattcaaaaacgaatttctctgaaattacttatccaatctacaatccgatcattaccgtgtattcgntggcattaaatctttacaacaagatatcgcatgattatattcttgataaaaataatcatatgttcaaatcattaacattttatttatat

SEQ ID NO: 23933 - DNA, 315 bp, Oryza sativa
  unsure (1)..(315): unsure at all n locations
ctaagctgtatagttttccgtgagctcggtatcatgcttgcatgtatggcttgttcgggcagcttaggatagttggctgagagtccttgtagctatgattntcagtcggctttccttaattaatatctcatcacattgctgcgggaaattagagtgcataatatgtataaatcatatacaatatgattattaaaactaatacaaattgatacttatgaattntaagtccaaaaataatagatattgcgctgtttatgagagaagaaaanagagatgaattgaaccaaagatctatcacccactaactataaataa

SEQ ID NO: 23934 - DNA, 340 bp, Oryza sativa
  unsure (1)..(340): unsure at all n locations
ngcattatatgatagctcattgtggatggcttgttttggcccaattataaagatgcacgggtactntatcccttccaaaaactatggtgtatactatattntggttggtaaaaacataatgaacataaaaaactattaataacagaggtggttttcttttgatgatgaaatgaaatgctctccaagacagaaatacatgttaactgtagcattcagttgacaatattccattcatggtctatagtttgtttcatttctaaactccattgagtacttgctattagcttctcgagcgtcgccatccatcggaaactgattggactcgctnnttttttgtctc

SEQ ID NO: 23935 - DNA, 382 bp, Oryza sativa
  unsure (1)..(382): unsure at all n locations
ntcaggggttttactccatgatttctgganatttcagagaatactccctcatttctgaagtggaatacaatgatcaacatccatgatttctggaaatttcagagactactccctcatttctgaagtggaatacaatgatcaacatgtactcatagtattctacggagtaaaaatttcagtattctacagacatttcatgaagtgatgtacagacatttaggaatagtactcttgaaatttcagtatattaacatgatgtttggttgatgattcttaacatggcgtttgaatggcatcatcagttaagacatttcagagtgaagaatacagtacaacatcttcagtactccatttcagacatttcagaatttcagaacttaca

SEQ ID NO: 23936 - DNA, 385 bp, Oryza sativa
  unsure (1)..(385): unsure at all n locations
tcactccactgtccagctntctgtacctgaagacttcataagggtaatcaaatcagatcggattcagtgaccatcgaaattcgaaaattccatctcaataaaagatctcatcaacaccaaccagatgagcatgatcacctgatcacatcaggctccagcgtggcggcacgggcaggcatgtgggcgaagaagagatcgacgcancatgaggccgcggccgcggcggcgccgccaagaatcgccatctccgacaccgccctccttctgggaaaccaccccgcacgccgcgcccttcgcggnggagatctccccggccggcgccggcatctgatcgagagcgcgcccaagaacagcatgcatactcagaccccgagaaaagaacaca

SEQ ID NO: 23937 - DNA, 431 bp, Oryza sativa
  unsure (1)..(431): unsure at all n locations
tagctggttccttgttcgcanacattctcttcatgcgctccgcaattgggagataccacaccacctttgctgggcctcccctctttgacttacttncttcaccttcactctntgctcgtttgtatcttgatgccccacagatagggcagacatccaagtcagcgtattccttgtaatacaaaatgcagtcgttcggacatgcatgaattcttctgacctncaggcccaacggacataatacttgcttcgcttcatatgtcgtctgaggtaaatagttcccctctggcaacagatcctttaacagctcaaggagttctgtaaaactcttgtccgaccagccattactagccttaagcttcatgagttccaacacgcatgacaacttgctgtgcttcgacttgcattcatcatacaacggcatctgggcaatc

SEQ ID NO: 23938 - DNA, 134 bp, Oryza sativa
  unsure (1)..(134): unsure at all n locations
taatattataatttctttatccatcataaagcatggacattcagctagttattagaaaaaaaaaaggaaagggagtatctataaaacattcaacacattnttggttgaaaacatntttttggnggagggggggg

SEQ ID NO: 23939 - DNA, 366 bp, Oryza sativa
  unsure (1)..(366): unsure at all n locations
tcatgcactccttcagagcagatganatgtgaagatttggtntttagtgtctntctgctgtatcctctgatcttttcgaggcgtctctcagtgggtcaagaatgcatnaatttttttctccatatcaaatgcgtatagagaatagtgcagtggttgaagtagtggaataaatatctgcanattaatattgacattgcaaaagttagtggccctgaacattgcacttgatgtacttgaattttcaagatgctgntaattatcaaaccaggtggcaactaggtacgtcatatggtatcanggagtcatctttgaatgaagggagatgatcctctgggttccactggtcatcaccagcttgttgaaaca

SEQ ID NO: 23940 - DNA, 353 bp, Oryza sativa
  unsure (1)..(353): unsure at all n locations
tccaggtacagttaacctcacctacacatgttcggtagacaaatttcttttggcttgaaggcataattatagaatcaaaaatatttagtggttgttgtcaaattaggaacactcatgtattaactatatttcttattttaacacagaanaatgatggatttgaataatattaagaagttattgcttttccctagaccaagtgatgagtaccttgctggaatagatggttttcttctgtttgcatatagggaaaagagtcttgaagataagatccgatgtccatgtaaggagtgtgtcaacaagtggttattaacgcnggatgaagtgttgatcattattatgcatgaatgtac

SEQ ID NO: 23941 - DNA, 368 bp, Oryza sativa
  unsure (1)..(368): unsure at all n locations
tcgtgcatagagcgaanagatctgcccagagtcgtcgttccgcgtatattatagaagagtttccccagagatgacctanacccaatctgtcccagaagagtagtttcgttagcttctagatcgtgtgttgtttgcttgtgtgtangggtatggtttgcgtcattggtggggatgcgaccatactangttgtttgcttaagcaacttgaatcaataaaaatctactcacaacagatcattaatcaagtgggttaaggtcctatctttagcaacccctctctttcacctctctttcgccctggcagaagatggacagtgttagagagaagagcaacgatggtgtattaaagtcacagatcaatggttcag

SEQ ID NO: 23942 - DNA, 339 bp, Oryza sativa
  unsure (1)..(339): unsure at all n locations
nggactctgaagttatttcatcatggaaaactaaaaacaataatacttgtcagctacaggttatcaactagttggtgcaatatggtataaacagtgggaagtacaattctgaaatatgtgcaatcactagcatcatatacacattagcagcaaatcttctgtaaaaaaggatgatcatttacatctgtataaactgaatattaacatagtgaatcccaagatgcttgctggtngctcttgtcaacatggcctccgcttgccttttgtacactggagcttcttcttcaacctggccatggccatcctcatcatgtctttcactataatgcttaacctttc

SEQ ID NO: 23943 - DNA, 160 bp, Oryza sativa
ggcgaaaagtaatcatttgccaacaaaacatggtatttttgattaccttccgcttgatgggcagacctgcccactaggtgagggcctcaattagccaaaacgctggcacagtgccaagagggaggtattaacttccaaaaatcgattaaaaattaaaaaa

SEQ ID NO: 23944 - DNA, 237 bp, Oryza sativa
ggtgtctcctctacccgccggcaccctcgccttcgcctctcgtcgttggaagagccctagcgccgtgcaaccttgcgccgccgtcgccgccgtcgctccagtcgtgcgccgccgtcgcttcagccgtcgtcgtcgctcgggaagaccgtcgtcgtggtcgccaagtcgtcgccgtcctcgttcgccccttcgccgtcgccgaagaccgccggagcaccgtcgccgtcgtcgacccga

SEQ ID NO: 23945 - DNA, 391 bp, Oryza sativa
  unsure (1)..(391): unsure at all n locations
ggctaaccaagatgatgaaacctcgacttctcctcctccttgaatagaactttggcaaccttgaatcagacaccattaatatctcccacagcatggcccttatgtccaaatccagcaatcaacacctcgtcccagataataaatgatacatgaagaaatatgtataggcgacagagaaagcattcaagaaagtgcaggagtaagaatgtacatttttctctatgagttcangcaacgaaagttcaggaaactgtgctgccattcatgatctgcagtcttcanaattcacgatgaaaaatngaanatagtaactgatctcaatatatatttcagagatggactctcattatttatcatgngaatcagtgggcgactaaatgatggaacatgc

SEQ ID NO: 23946 - DNA, 427 bp, Oryza sativa
  unsure (1)..(427): unsure at all n locations
ntacaagaatatatcctatntatgtgaagtactaagatctntacctaaccaaaagaataatcatgtacaccgatttgaggcagctcagactgaaaacactcaacaatgctaacatcacatgaagcctcttattactatacaggaaaaagaactggctccagttgatctaccctgcaaaaatcaatacaatcagtctaccaattgccaacaaacatagttaaaacataacgtctgcacagaaaggaaggaaggaacaggagagataacggtcatagaaattcccgatcgaccgagcgccgtttccgtataagggataccgtntctgaccgtaccgtntntggctatcttaaaatnttttttctaaattctttctgccatcgattaatatcgatattgagtgagtaaaatgaataatatggtcaattac

SEQ ID NO: 23947 - DNA, 350 bp, Oryza sativa
  unsure (1)..(350): unsure at all n locations
tgaaaagctcanaagaggattgccgatcggcgtgagagaagagatcttgaagctaccatccaagccaatagagcatccatcaacgaagaanaagctaagctggatgaattggaggctggtccaagtgcaactcaagctaacattgatcggctgaataaccggaagatagaactcctagccgaaccggaacaacgcaatgcacaacttgctcttgaacaagaaaagcttgccgatttgccaaaagccatcgaagatcagaaatccaagctgaaagcatctgtaaagcatctaactgaactgaccaagtctttgaagccgatctctatcactgatgcagccgatgcccagac

SEQ ID NO: 23948 - DNA, 345 bp, Oryza sativa
  unsure (1)..(345): unsure at all n locations
tccatccgccggtgacgttgttgccacagtctgccaccgatcgtggtcaccgtcgccgagtccccgtagctcatcaccaccatcacccctccttgtgcctccatcactgcccctccgtaccccaatgacggtggcggcacatatccaccagatctgcctatcgtanggccgatggcggtggatccacccattatggcaccgtagtcgctgtcgccattgttgttgctgagcccggtaatgcccagtccgttgcggctccgcttgagcccgtcgtctgccactccacatgaggccacctctagacatactcaaccctgctcgcgctcacacaaggtcctcgctact

SEQ ID NO: 23949 - DNA, 346 bp, Oryza sativa
  unsure (1)..(346): unsure at all n locations
gaaactcatgttccatttgtgaccatgtagaaattgaattaggagcaagcgaactaaaccatgtagatgaaaagtttgacaaagaaagaggaagcaattttaacttaagcaaatcatcattaccggccttaccacatttgatcgatgaatggccgatatgctcctttgntgttctagtatcctcacttgtngaatttgtgaaaatgggcacttcaaatccttgcgggtatgggaccgaatctacgtgttcaggatacgggctttgatatgtatgcattgctactttggattctatttcactactatcccgcaagacattatcatcatcttttccaacatccacatg

SEQ ID NO: 23950 - DNA, 251 bp, Oryza sativa
  unsure (1)..(251): unsure at all n locations
taactgcatccttgaccatggaggtgtcggccactacacactnggagccagagtcaggcgacgaggacaagacgaccttccagaacaacatcacgcacttcgctgcgttgatcgtgcaatgcaagacaccagagccattgatgatggngagagacctagtgtatgcatcaacggagcgggaggctcccgaaagtagcgggagtncggataacatcccggagaaactgttcatcaagaaacgccggcggtca

SEQ ID NO: 23951 - DNA, 413 bp, Oryza sativa
  unsure (1)..(413): unsure at all n locations
ctcagcttaatgaggaagctaatacgagtgaagctntgcaacacagaggttatactcaagaactggcccatcttcctgcccgatttaatcactatggcaatgcgcaggcaacaatggctactcctgtaagcatatgcatgagaggccaggctgtaccttatgaaagcagtgacaattccaggccaaaaactggaaatatcttcccacaggattctgattcacgctttaacaatatgcctagtagttaccagaccatacctnctaagcaaccacttncactatctatcatggagcatcatgtggttcccttgggtatcagaacaccagctgacaacagtccttatagtgatcaaataattggtagtgggaattctacttctgttcctggagatatgcagctcattgattaccct

SEQ ID NO: 23952 - DNA, 349 bp, Oryza sativa
  unsure (1)..(349): unsure at all n locations
tgtgggttcattcaatagtggatcgataacaatgttttgaaccatatcattggtgtgacacatgcacgaacgttatggcagaaatatgaggaagttgttgcctgnaaagaaggtaccaacaagatngtcttgatctagaaattaatgaatctgaggtacaaagcgggttctcctgttgcagtccatgtgaatgcattccaaggcatcataaatcatctctcttcaatgggaatcacanttgagaatgaagtgggagctttgctgctactagactcattaccggacacttgggaaacctttaagggtacagcatgcaattcagcactcaatgggactgtcacttgaaact

SEQ ID NO: 23953 - DNA, 495 bp, Oryza sativa
  unsure (1)..(495): unsure at all n locations
accatatatagncttagaagtcaagagcattctcatttttgtanttctggacctggaccagacaagagccacagttcactacatgcccctcaaaatcatgactacgattctatgaacgacatagtggaataattgaagaaaatgcgttcagtggattagctgacctcaacagatacttctctcttatccacataagagaaagcactgtgcaacgttacaatagaataagaatggaccactgcgctgtagtgcacatcatatcctctaatggttgacaaccacgcgtcctaaataagaataacagaaggacaactattaatactggcaaagttgacacaattctcaagaaaacataattgaatatattgtagtggataagaaacctagagattaataagtctgatgagacctcatcatgcgcagcaattataatgcccctagcctcttcatgttggaaaggttctcttaactccttaagttgttcgggaacactac

SEQ ID NO: 23954 - DNA, 374 bp, Oryza sativa
  unsure (1)..(374): unsure at all n locations
taagcttctctcttacgctctaggaatggatcagtcagaacatcaccaccggtcgtctcgttcgncgacgactggtgttctcgcctgcacgggtggcctattatgccgccgcttgtgggcgcctacgtcttcaccgaccggctcgcctttgccgccgccgactggtgtactcgcctgcacggctggcctattatgccgccgttgttgggcgcctacgtcttcaccgaccggctcgcctacttcgccgccgactggtgtccacgcctgcacggctggcctattatgccgtcgctgatgggcgcctacgtcttcaccgacctgctcgccttcgtcgtcgccgactggtgtccacgcctgcacggctggcctattat

SEQ ID NO: 23955 - DNA, 322 bp, Oryza sativa
  unsure (1)..(322): unsure at all n locations
taaactcagctctcgatctcggctttacccggcccgctcgctgcatcttgcgctcgctctcaccttttaccctacgcgccgtcccgagaatgagagagtgaccagagagagatagagagaggtataggactcttctatatgcggcgacaaagncgagggtctgcggcgagaactgcaacggcggaagcctgtctatctctgactggtacccaatctccgccgcgccatcttgagccgctactcacctcttaccctacgcgccgcccctagagagagagagagtgtagagagagagagagagagatatacgatgacgactatg

SEQ ID NO: 23956 - DNA, 245 bp, Oryza sativa
ccgcccaacctatcttcatgctagcctcctcgaatctcggtgacgagattcttgttatgtgggcggatttgtcacgtcctgatataatcatcccgaattaaaaatcattcgctcaaatgaataatagaattaattaaaattctgaaagaaattggctaacactaaaatacgttcaaataaaattcaattgtggcccggagaatatatgttgacatctccttggtctataacgagccctcaaattt

SEQ ID NO: 23957 - DNA, 407 bp, Oryza sativa
  unsure (1)..(407): unsure at all n locations
tcgtgaagaccttgagcaaggcaagtcaccctttgaccaattgcccctataattgcaaagtcattattattttgtttgcaacatgcattagtagaatcacacacttaacttgcttggcctcggtttgcgtgccaaaccgacggacctacccagtagtcgcactaattttcgtaggtcgtaataccctgattccttgtcgctccacccttgtggtacctcggtattcgtgctctttgagcgcgtataccaaatatcccacaaacaccattggttgtcgaaaacttgtgaaatgggtttgtgaagccttcanaacccgacatgtggtgtcggtgtgtttganaataaaatgaattgtgaaactcgcgatgcggnggtttgcctatgtggcactgtcccgtattcgcata

SEQ ID NO: 23958 - DNA, 435 bp, Oryza sativa
  unsure (1)..(435): unsure at all n locations
tagccacatttaaaacacaagattacatttattaaatctaanantaattctgttttgatagtatgtctgttatctcttaaaaatggtgctatgtttttttatcaatttaatcaaacttgtgtcaaaccgtcttaatataaaatggagggagtattaacatataataaaatttggtagttccatgcacctctatttgtaaaattagttaaaaaaacaactaacttattcccacgctccaaaataccaataagtagtaaaacatatccctagttaaaatccaatcacaaattccaagctggatgctttntacctctcaaccaaacaaacattttgcatcggtaaacttacaccattatggtcttatcttatgttatgntaatccaatcaataaggggggaaaaatgatggctagtccacatgtcatgcacttctctc

SEQ ID NO: 23959 - DNA, 353 bp, Oryza sativa
gattcctgctcgtttgtttagacaaatgttatgctaaggaccctatatgagaaacctctacggtttgttctcgtttttagcctgcatcttgcataggcgcctagagaatcggtatccgtagagaagtgttcccttcgggtggaactgcctggggagacgataaactcttagctagaacaagtgtgacttggaatatctctttaagttgcttctaaaaagacagataggtgaggcatactgtgagtaccgagtaggactttacatcatctgaaacaagcttctgaggctgtctaagtaggattcgccaccctgctaagatcctaaagttaaaatatctctcgaagtgaacagta

SEQ ID NO: 23960 - DNA, 271 bp, Oryza sativa
gactaccactaacctcctcctgggtctctccacataactatccacgtgcccctgctgggtcctctccgcatgcctctatcacgttcgcttcctctgttaagtactggtgtggatcctcgttcccctcttcttcattccagtactggctgcctctctgcgcgattgtatctcacaacatctgttcctcatcgcgagcagccatctgatgatacaagaaacatctgctctggcacgagacatttatgatttaacaatctaactcatgtatgct

SEQ ID NO: 23961 - DNA, 400 bp, Oryza sativa
  unsure (1)..(400): unsure at all n locations
ctaacctgatccatcttggttttgtccactagacgccgccgctgccgtccgatgctccgaccaccangtcgagtatgtcaccatcccttccgctccggccgccgtcgctcaccagtaaggaccccactttgtatttctctctcgtcgttcaatgccgctcgtgaacgtgcgccgccgctcatcgttgttgcgccttgcaccgtcgccgtgtgccgccgcttagccgcactgccaccgtgctcgccatggctggccgagccgatctcgagcccgacaacgctagtgcgccgtccaatcgtgccttatggcagatctgggccgtcggttntgtggaccggcggtggaccacccacgtggtccaggtccatggtacgccggcaccccgtgccgctgacatgtg

SEQ ID NO: 23962 - DNA, 275 bp, Oryza sativa
  unsure (1)..(275): unsure at all n locations
atactttgtcaagactctattctcatcacaagctngacttcattcttgccaacatgacgatgtctttggcttggcgaccactaacccatggtgtgattcattatccttatcgtaatgggacctattccttttcacacctcaaaagagaacattagtctcaacaaatcggttgtcatccttcacttgatgaccaaccagttgcatatgaaagatatggatatgtttgttgagtattcgttaacatcacaagttgcatatactcgtatgcaagctca

SEQ ID NO: 23963 - DNA, 380 bp, Oryza sativa
taataagtgcattcttggggcgaactcgagaagtccaatatgtgtgtacattcttaaatctgaaaagtacaccaattacaaaaatcccaggtcatagcatacttaaggctaaaccaagcagattgagcctaagtaacacacatcaatcataaaagtacaaatgtaacagaaaactgcagtaaaacaagtttggtaatgagtttaataagccctacgtgcttaagctgaaaataattatagcaattgcagaagtggaaactacaatcacatatttgaacctaaattaaccaaccagtttaagctgtacgtcacacgagttcaatatctgtaatcatgtgcctcaccctgtgatcaatcccatcaaaacgtgaacagcaaga

SEQ ID NO: 23964 - DNA, 455 bp, Oryza sativa
  unsure (1)..(455): unsure at all n locations
actcagcttacttttctggactctggaactntcttgtgtgcctgtgtgttgggtaccataacctttcgtgccccaaacctcaaatcgggaatcctggtgacagatcaattcattgccaacgacagttgaatatgttgagaagttcacatctggtctacgtgacagttgatggatgctctcaaaaactggaaatgttaactgagcagattctgagacaagaacaagatctttgattctattgccagtgaactccacaagttttctcaaaagccaatagcagtttgttaccatgtgactactgtcaaggcaatttgaatctccatagactgcaacccgacctttgcctgcttcatcattccaagaatagaagagagctgccaaggagaagcanataagccttactatacctatacagcnagtattatatactggtaaataagggctatgatanaatg

SEQ ID NO: 23965 - DNA, 484 bp, Oryza sativa
  unsure (1)..(484): unsure at all n locations
tagcccactgcgcctttttacccatccgccgagccaccttataccgaatcatgggtaatttcttattcgacccttttctaaattctatcttaaaattgacgtacactaatttttaaaactcatcaacatacaaatactcccccgtctcatcaacatacaaatgtgtcacatcatcacccattagcaattactcccccgtctcaaaatataacaactttagccctcaagatttgtcccanaatataacttctctatcaacattctcttcccaaccaatcacaactctctaccatntactttttctacctacctccactactcaacanatcacaacactgcatcattcacttctacctagtagtactntcttaataaccgtgtncacctctaaaaatnattatattatgggacagatgtagtattatntagaaatatttaaatacatgcaagtgatcacatcatcacttactagaaaaatatatct

SEQ ID NO: 23966 - DNA, 304 bp, Oryza sativa
actgcaacccttatggtggtctgaccgaagtgtgttgttcggtctgaccgcagctcccatgacagattgaccgctgccctgaatatgaagagaggtctcgtcttggtgatctatagccgctcgagccgaggccggtctaaccgagctgatggcggcctgactgaaccgtggccgatctgaccggccgctctatggcggtccgaccggcccccgtgtgtcagtgcaattaatgcactgcaacgactatgtttctaaccattgcaatgtagtgcggtctgaccagccacccctttgcgatctgact

SEQ ID NO: 23967 - DNA, 400 bp, Oryza sativa
  unsure (1)..(400): unsure at all n locations
tgaatcccttgtatgcataactggatttggatgctgcttatcaaacatataggacgagtagtatctgatgtaaatataatactcgagaaatattcaagcagttcataaatacgtatttcttctcttgttaattatgatttccccgagcagatgacttattacgtttaaacactctgtccgaatagtcataaccaccaagcactgggagtcgggctaagcacttnccaaacatgcatatgagtgacatgagttcgtcattaatggaacaaagtttcacggatcggagtttactactcgggtacttttgcgattattaagagcatgaaataaattatcttatctctatgcttttgatgtattccgaataatacttatcaccttgcgttactcagtccattca

SEQ ID NO: 23968 - DNA, 436 bp, Oryza sativa
tctagaagattcaccccaaatcttcatagactgcgaccaacagtctagctcacaaaggtgagttccttcaagaatgctctgcaggacaacatctttgcttattaaagccaacaaaactcattaaggcatatccaacctgccttgcagctcacgagagtatatgcatcttcacttggataggagatatatattggcactctcctctagattattaatgggttgttctttccacgatctaattcacgggatctccgatcacatagactgggttaccaccataatataactcacatgggtctcacacccatctccttcgatgcattgtctatcacatttcgtgatatcccttctgaaaggactgcaggctttcctgttggatgtatccacgtataactcggagttcttaattcctacagattcatcggctttccatgct

SEQ ID NO: 23969 - DNA, 291 bp, Oryza sativa
  unsure (1)..(291): unsure at all n locations
gctcccagcctctgcgtaactacgatgccttgtacccacataagaacacacctcacaagtgaaanacaataattacgaaagaagtgttcgcgactatcgatccgaagactaaattgtcaactatacccctacgcaaaacactccctgaccatatgctccaagtaacgacataccaccgcaaccaaagtatggcctctaattaactaagacacgatagcgccaaagaatttgctattcagatataaaattataacccacgactaccgggcaaagtcaccagtacaagtattg

SEQ ID NO: 23970 - DNA, 452 bp, Oryza sativa
  unsure (1)..(452): unsure at all n locations
acctcatctcaatgatcttttgttggctcttctgcctttgcatagcttatggggacttgaanttgttctcgatgtgcctaataattgattttggttcaaagccaatgttaccaacaacactgctgtacatctcacttgccacaaaagctgaagtgatgtttcggtgatacttctccaccccttgtaagtagcacttgtgctcggtcacaatgctaactttccaataatcattccatttacccttatatgcatggacacgccacggacaatcttncttcatgcacctcacttcatacacataatntgttgactcgaccaccctaaactctctctgcaaggaaactgcccaatgcttcaccgcctncttcatctcatccttatgagcatatcttgcaccctcaattacctcgttctccttatactcncagggtacatgatcaccctctgatata

SEQ ID NO: 23971 - DNA, 482 bp, Oryza sativa
  unsure (1)..(482): unsure at all n locations
agcttggatgcagaggtccaggcactagaagaactttccaaacaactatttcttgtatatatgaactccgtcaagcaaaggtatactttntgcacctttcatcacaatgttaagaatgaaaacgaatacgattggcaggacatacccctctactttcttaaccttgtgctgnttagntctatgattgtgatggggttgccatcattgctttattgtggtgttggctacttaacattgatttggttagatagtaagagaactgttactctatcccaacaaatcggatcagccgcataaatgttacaccacttgctaaagttcattggttattgtaccttacaattgaatattgtgaatatttctccctatagattagcataacttccttccattatggtgatttctgatgtattggctgatgttttcatttcattttcgcattaaggcactgacatatatctgagaacttataatttctggga

SEQ ID NO: 23972 - DNA, 430 bp, Oryza sativa
  unsure (1)..(430): unsure at all n locations
aactcaagctnttcgtggaanatttagtcaactcagcagcttggtcagggtaattgctgactacaactgtttntctgaagaacaagcagcagctgctggcctcatagctgatcttcctccgcgggactcagtactcaccagacgtcttctacaagatggggccttttccacaatcataacaaaagtgacaatggttcggcaaggggatattcgtggtggccgttttgtcaatccatttcttgaaggtctagttagggtagtttcccggatcacatttatcttggatgatctagatatcattgatgttgctcgtgactacaatctcactcccctctttactgacctacttcagatgaatggtctcgacactgtccagattgtctctgctactgcactagagaatctctctcgccagtcaaagcttctaact

SEQ ID NO: 23973 - DNA, 456 bp, Oryza sativa
  unsure (1)..(456): unsure at all n locations
tgcaagtgttaactctaccaagttgcgggaaacagtaagcaaacagttaaagtgcctgtgctgaaaatgataatacctcagtgaactcttggtttgaggttatatcaatagtaataacctctctcttgtctaagtttagaatctccagtggtatatcagtcgactttttcccacatttatattgttctggcgctattcctgtgcctgcacacagatatgggaaagtcagcatcatgaagctaaaaccagccagattagcttgaaagtgtcttatcttaccaacaatttgcacgagaccgtagatgtcttgcctttgacctgttccagatattcttattctcacaaatgacccaagaactntctcatcanatgtgtcaacttcactgatcaattcttctaacagggtgcgacgcaggtacaataaactgatgtatgggtatctattgctgcgtagtc

SEQ ID NO: 23974 - DNA, 432 bp, Oryza sativa
  unsure (1)..(432): unsure at all n locations
taaactcagcttattngactgtctgncaaggtttcataaactgtagtacaaaactcttcctcttaatctttgtatgctcancactatggttaattatgtgaaagaaacacgtgtgctgatagatgtgtccaaagggtggtcctagtggtccggtgaccataaataaatacatagctaaacattactcttggagagagagaaaaaactccattattaatatatcatgatgcacatttggtccttgctatatttgcgggttaaaaaagtacttcctccgtttcacaatgtaagtcatgttagcattttctacattcatctatctagattcattaacatctatatgaatgaaagagttttcctaatatctgaaacggagggagtatgtaagttgaactactcatttctaaaatctgaaattccgatatatactac

SEQ ID NO: 23975 - DNA, 408 bp, Oryza sativa
gacaattcaggcttgcagctctgaagctatgaaagggattgcgtttgttctactcttctttattactatttctttgatttgagttggaagagatcaagcttttgatgcgaatgaaacagcgctactagtagcttcgctgggaatactatcctctagttctgaatcccaaattggctggacattctcatcatcgatcagtttgagatttcgcccttcttgggtttttctttctactgctggctgctccatgaggaccaagataggccacattactttctgattagatatatgatttacccgttagaacatttttcagaacgctcaacaactagataatatgtttcatattgattaaagattaaataaattatttttaagttataatattaatactcattattatatgct

SEQ ID NO: 23976 - DNA, 386 bp, Oryza sativa
  unsure (1)..(386): unsure at all n locations
catacagctttatgtnttaattgacctgtttatctattgttatgcacataattatcatgaagacgtcgttttcgncaggaaaatacactgcattatcctaagcttctgatatgatctcgcctttctctgttcttggaggctaaggtactccaaagttattattagagtttcttctatcatttcatctccatctataaatacctgcctcgagttgcttcatgatcattcattcagagcaagctcaacctagctgatcagtactcgattgatcaatcatctatatatacacagtaattaattacttgctaagtacggagtaattagctagcctctctctgtgtgtgtgagcaagacagattaattaatatgccggcggagatcagcgt

SEQ ID NO: 23977 - DNA, 351 bp, Oryza sativa
ctcagctctggtgttcttgactcttcaagaaagcctatcatgttcttatggccctaattacagcttgaattgtccctgcatgatgaggaaggagaattctttgaggaatacatatctttttattattcaggaaaaatttggagtattcaaaccatattactttgatagctacatgtatgagtattattggacttgaaaaaatcggtggatggatctaaaatggatgcagtgatgcaccatgaccaattacacatcttcattatatagaatagcattactacaaattttaaaaaactactgctttatacattagtgattctgtgcaatatttgttgcttgaatacgtgttgt

SEQ ID NO: 23978 - DNA, 287 bp, Oryza sativa
cacaccagcgcacatggagctgcttgggcaacgtatatgtacctatatcccaaaagcgtaaactcggaccaaagaccgcacatagagtgctctttggttatgctatccacggagtgggatataagttcttaataagaaattcttggagacccgacatgcgtgttgggacaattacagaacccagaaatgctaccatttttgagaacgagattcctatgaaatatgcaccaagcacttctagtcaagaacctatattatcccctgagcagtgtgcaccgatagaacac

SEQ ID NO: 23979 - DNA, 361 bp, Oryza sativa
  unsure (1)..(361): unsure at all n locations
cacctaaattcccgtgactggctaagtacgaaagtactcacccttgctctatataaatatatatagttcctccgtcctgaagttgaagatgaagtaaagtgaagattaagggttttgtcctggttcccagccgtcgcctgtggtgttgggtgttagaccgttggttccgctgctgctgttgttgttggtgtntgcctcgtccgtgtcgtcggttgcattctcgggctgtctgagctgcaacctaagttaaggtaaataagtcctctatttattntaaggattgtaatgattcatatttgtcaccgtgggtaccagcgctatgtcctgtgactggtactgagatcgcggtttcgtaaggagc

SEQ ID NO: 23980 - DNA, 426 bp, Oryza sativa
  unsure (1)..(426): unsure at all n locations
tatccatactccatccttggtagaagacttcagaaaaatatggtcttatggtgatacattggaatggaagttcagcgattacctttaagaataccaaggaccctatgaagtgctacagcaagatcaaccttttcaaactccaaagcagcttctcccgcaacaagtgcgataagtaccgcaccaccagagacagtgtggtagctgtagaagagaaagaactcgccacgctttgcttctctccttattcaaacacccaaatgtgtcaatctcctcatcccaaaatacatggggaaacaccatggcgactttgttcaacaacccaaaccccaacctctggaatgcttaagcttcctctctggcaactccggntcataaatgatgctcctgctcttgagcactccaagtggagcagtgcagagtgccatg

SEQ ID NO: 23981 - DNA, 508 bp, Oryza sativa
atgcgacactatgaaactaagctttgcaaagaacaaacttgccacatgcataagaaatgtatgaggtttaatgagaacatgaggagagaaaagagtagattggaaggagagggagaagatcataattatccgaagaaaagaaaggaaagaaaagagaaaacgaaaaaaaaagagagagaaaagatgccaaccggaggaggggtgcgcgtggtaccgagtagaggtgcacaggatgagacggtgggatggtgtgggccggatgggttgggctgggagggcgaggggttgggctgggttaggagtgtactagtagtattctagactcatgtcgaatatgatgcgagtgaaatataaccaactcaaacacagatattgtaccacaattctggtggaaacatctttaattgttataataatagatatatagatagtacataaactaatataatagttaaatattatatcgtattgataattggtacggaagataaatctgaaagaactacat

SEQ ID NO: 23982 - DNA, 446 bp, Oryza sativa
  unsure (1)..(446): unsure at all n locations
gtggtagcgtgagtgagtgcacctttgtcgtagtgttgtttgatgagtaattcacgcttgcagctctgaagctaggaaagggattgggnttgttctactcttcttctttactatttctttgatttgatttggaagagatcaagcttttgatgcgaatgaaacagtgctactagtagctttgttgggaatactatcctctagttctgaatcccaaattggctggacattctcatcatcgatcagtttgagatttcgcccttcttgggttattctttctactgctggctgctccatgaagaccaagataagccacattatgttctgattagatatagatcttacccgttagaacacttttcaatacgctatacaactagataatatgttcatattgattacaacataaataaattattttgagttataatattaaactcattatatat

SEQ ID NO: 23983 - DNA, 238 bp, Oryza sativa
gtctcgccaacagacattaatggactcaactacgatgttataagaccgagattggagttcttgtcacatgcgtaaccatccttctttgtggatcccataccgacaacgcaacagactactacttttatctcgtatactgtcgacagacattttgttaacatacgcctaggcgaaatctagggcgaagaaagatgcataaagcatagcgtaccatgagaaagcgacctaagatgcttgt

SEQ ID NO: 23984 - DNA, 462 bp, Oryza sativa
aagatttaagtaaaaggtcactggcgtcttttattgatatgtgtagaggcaagtagcttatttctagagaacccttttatagaatagttttcatattttaaatattcatacggattatgctagttcattcaccatcacggttctaaaccataggaagatttattgtagaatcatgtgatgcctaatcttggtgatgaacaattgtcaaagcactggtagagaaattaacccttcttaatcccagttcgcaaccccctgtagtctcgtgtatgcaaccgggactacgaatctgggactaaacatgcccatctttaatctcggttgaaataaccaggactaaagattaatgtccggttgaagctaccaactggaagtaatgatctttcttctttttttcctgctggcatgatttcgagcaacacaaatcattcataataatatgcacaaatcattcaacaccac

SEQ ID NO: 23985 - DNA, 381 bp, Oryza sativa
  unsure (1)..(381): unsure at all n locations
acagcttgcttagcccatccacaagagaagaccaaccataanatgttctgattttctctattaccatgcacaaacagtaggctgccctgaattctcagactctcaacaaggttaacactttcagcaaacttcccacatttgtgaaagtaccggagtaagcatgtcatactgatggcatcaagggtgattccttccacatgcatacgatagagaaccatacggataactgaagcattctgctgcctgcacgctgcagagaggatagtgctgaaagagactgaatcacatggaacaccaatagagctaatatggtccaacatctgcaatgctccctgaagatccagctccatacagaagcctttcagtatagtggtatatgtt

SEQ ID NO: 23986 - DNA, 256 bp, Oryza sativa
atttgaagcttgggcagcatacaccaacacatcaaactggtgaccatgactacattgaaagttcttctgaaatcaaacatagatattgctcacctcaaacattacaagggctgggtcaattacttgttctgccaatgatgcattacttgatattggtcgagcaaggtcagaaccatcaacactagacagatgcctcaaaccaccaccttttatttcatctaaatcaccagaagatgatatcgttccctcagcagct

SEQ ID NO: 23987 - DNA, 403 bp, Oryza sativa
tcttgacatcctgactcggatggaaagtggtcggcagtttttacttcgtaggatacagtggaaacacgggctgaggggcaaatacacggtatgagaagaataatcagataatgtataacacttttgcataaaagaccccaacctgacatatgctagagatgcgcaatctttaatagtggcgattcactactcacattgggagtgggtggcatatcctacagtgccaaactgagagggcgcactcgttgtctcactcttctatcatgtctcgctttcagaaactactaataaattaacaacttctgtgtaagtggagagatgcgattcctgctagataaaataaaagcttgctaaagagacacttctctcaaattctaactcttccgagacattttcacagctc

SEQ ID NO: 23988 - DNA, 441 bp, Oryza sativa
  unsure (1)..(441): unsure at all n locations
atactcgagtcggactttccgacagagaggaggttgcagcttcatcgtcttcctcatctggtgaagtgcatccaaattaatctcttccatccctttccatttccctttcacatatttttagataatggattttcattaatccggcctctatatccacaaggatatacacagccaaatttccctttcacatgatgtgcagcacatgtgttgatcaatgactatttgttctcagacaggtctaattaagaagatccgttacatgtgactggcttgtcagcttcatttcatttcatggatctagctttcagtacattntacggatgtaagacaaatcgtgagtgctgctgccttttatgttctgtaagaaatcgacgtaatnggatattcctgaatggatcgaactaattaactcttctttatgtgcatcacattactttcgca

SEQ ID NO: 23989 - DNA, 453 bp, Oryza sativa
  unsure (1)..(453): unsure at all n locations
cgaaacagtatgatacactactcaaagctaatgctttggtacagaaatcagttaatgaaggatnagtggcagttagattccagtaatgtgttatcgatatcagatcgattattacagtataagctatgcgcttcgctacaaaaaacgtcgcaatgaggagggattttcttctctaaaagcctcttgtctcctctttgaaagagacaagagctaccctgtttcaatattgacatatgatgactggtcctcaatgatgaactctaagacctctcacagaannaaataataataatagtaaataaagaaaataaaaacagctccggatatgactgaatgaaaggctccttccttncatggcacataagataatatacaaagttccgtacatttcanggtttctagcctatganntaaagtgattagggagagtagtaaatctgaagcaactaatct

SEQ ID NO: 23990 - DNA, 449 bp, Oryza sativa
  unsure (1)..(449): unsure at all n locations
ttattcatataattaagtatataatcagtagcagtaatctgcctaataatccaaatcaaacatagctcaagtccaaactctacagctttgagttatctctatgctggagcaataccaaacatgtcaatagatagataaagatatgttcgattgatgattaacattgccaaacctcatattacataaggtgaagctttatgcaaagtgttgcaaaaaaatgtgtctttgaaataggccgatgaanaatatagctacccataacaatggcatcaactaaacaactgcaaacaaccacctatagttgngatttggcaagtgaaagcatatccaccataaatagttcttctccgaaagaaaaatacaacatcatacaactcatccaaatatataactttagtacaatcagacatcacttgtcaaatcatagctaaaagtatactcccttatcc

SEQ ID NO: 23991 - DNA, 411 bp, Oryza sativa
cctgaagagaaacacatcgtttatgtatgaatgcactgaaaggaataaacgtgattatcagatatgatgttagaagaacacgaacaaaatgaacgagtgtgaaatgctattgaataggtaagatatggaatgtgaagacatatctgcaaaattattaaactacattaagtctatgacagagactaacttttattggttgatccaacgaacatgatattatgaattgatcccaacacaatacagacatttcaacaccctgttgatcagaaagagtctgtatgcactgcagtgttgccaaatccacacctgagagtatatgccttctgtcattactatttgtagagtgaatagaacatctatctcatcttatggaacgacgtatgtgcactctaatggaatgaaatatatatg

SEQ ID NO: 23992 - DNA, 489 bp, Oryza sativa
  unsure (1)..(489): unsure at all n locations
atgatatacaccaacaccccatgatgcttatatagaatttattattttatgcacgtaaagtctctgaaattgatgccaaaccttatcggacatgattccatggtggcactggatactatctggtgactggctgaaaccactgctggcttctatgaacgccccgccgtcggttattccaacagtctgaatcagtgattgcttacgggcatccttggtacgtataaagatggaattcattggattatctgacatccctttacccacatgttcgttgcgaaggactacagatatgttatgctttttaagttcctttctgggccaattccactancaacaatagctggggactgccaattgcaccaacagagatgataatctcgctgtctcatgttcnggtaaggaaagcatgctgctgacccccattctcatcttgattcaacaccaatggtctttgcttctgtgctctggcaaagatgatgtactatccgt

SEQ ID NO: 23993 - DNA, 273 bp, Oryza sativa
agaatatatgtcccaaagccacctatgttatgaagtacgggtataataaagataaacataaaatagtgcacacaattctatcaactacgtatttcagaatgtctatataccgcggaatgtgatcgaggtgcacgcgacgacacacgtctggatgatggtgttctcttggcgtgtgaatggtaagagtgccactgcgaagtaatctagaatgcggatcgacgcacgggatacacaaaaaccgaggaggccggctgggatgctgaacgaccgaat

SEQ ID NO: 23994 - DNA, 380 bp, Oryza sativa
ctttaaactaagctgaccggttttgactccatcaaaatatggacagttattttttttgttgaaattccctatcagattattgttaagtatgtttattttattctatatttgaaaattttgaaatgagggagtcatgatacatcgataccgatccattgtctcttgcgtgtcttacctgtgttcctttcttatctatcttcacctttatcgcatattgttctctcgagccactctatggttaaggcccacaaccgatgcatgactctttgtgcgactttattgagacttggtacttacatactgtgcggtaacagtactgttctggttgcgactctatatggctgtcatttaacccttttagagaagcactgtgttactta

SEQ ID NO: 23995 - DNA, 424 bp, Oryza sativa
ggacttggatcgatccatgacaagccatcctattatattccaattcttcggctagccgagtatgccattatcgaggataatcagaaatctttctcttaatcaacttgatcaaactcttgttagatgcctcagcgttcccattagcttctgcataatatggcgaacaattcaacaacttgatacccatgctatcggcaaactgaacaaactcatcagacacgaaaattgaacctcgatcagttgtaatggtttaaggaatgccaaaccgatagattatgtgctcttgaacaaatcgtatagcatccccagaatcaaccttcttcagagagatcgcctctacccattctgtaaaataatcagtggctaccaatagaaacttatgtcctctactcgatggtggagtaatcataccgatcatatcaat

SEQ ID NO: 23996 - DNA, 446 bp, Oryza sativa
  unsure (1)..(446): unsure at all n locations
cgtctgcacgaattggaatgcccgaatggtgcttctgacttatgcatccaacactctctctgctctatgcaagggtgaggtcgaaattaattgcaattgcttcaagcacacgtccaatttcttcgatgactttgaattgaaatgtttgaactatgatctgatggaagaaacgagtgattgcatcgtcagatgtgttgcaataaccattaaatctgccgttgatacactccccaaccatccaactatcagtttccaaataaacatttcgaattggtaagttctccatcagaatggccggcattaatattgttcactttatcgcttatgcttgatcatcgaaatgaacaatttctaacttattctgatgcgcactcttatacacatttccttttacacttctctgttctantttatctagacaatgaagacatggacagtgacggagt

SEQ ID NO: 23997 - DNA, 501 bp, Oryza sativa
ttctccacgcggaggtggactggagtcaccatctatcctgtagccaggcaagaacgtcgacgagagagagagagctatggatcgatggagacagaagagatggccgagctgtgtgttagttcacgctcaaattagaagttcgattttcccgtaaaaaaattacaaattcgattgaaattggaatgatgtgataaaaaatgtgaaaagttatgcgtatgaatagtttgatatgatgaacaagttagaagtttaaatgagaaaattagtaactaaaccacgctttacacaccagcagcgacgtcaggatggattcagaagagatcgaatgcaggtgcatggctgcagcgattggaaacttctccactttgatctgtccagactgatttgaccgactcactgatgacttgaccccctcccctcaccgaatgagatcattgtgtgtgtctgtacaactatacaaaactcatgtcgagataacacacacgcgcattcaactatata

SEQ ID NO: 23998 - DNA, 436 bp, Oryza sativa
acctattaaactcagcttactggtgacaccttctagagcattgaccaactcctaaatgttatgttactgcggtctaaaaggatgttaaggtattgagcacttgatcacgcgcactttggcctaagcaaaaagtgcctaagtccctaaaagaacgtgacacgccacacctaacaatatgggctgcagacatattaagcctaggccaaaacatatgccttctacaccctgtaaaggatgacgcatataacatgctcccgagtaataaatcttccgggtaatatagaccaagcgtagctcatatgaatagcttctgatctgagtggttattcctcatgggatactccataatagatgtaacaattgaatcccgactggcgcaagttttcagtagataacccttacggagaataatatacatgccagtctttgagcatat

SEQ ID NO: 23999 - DNA, 410 bp, Oryza sativa
  unsure (1)..(410): unsure at all n locations
cttaagcttggatcaacatcagccgtcacttcgcnatatagcggatatatgtgtggttgttattggaccngnccacgaaggcgcctaaagtcgagattctatctcaacttggtaatcacttgatgggcccatctgctccattccaaacctatatccccgggaatctttaagagactgacaaaccattattactcccacattatcttataattaactgcatcttcttataatgtatattatattcaacctcatcactaacaacatctcgttagattctacaacattttcttattgtattccttgtgacaagggacagtggcgacatatacaaaatcagttgaagaaatgtaagtgtaattagtcgctactatatactcgtacattgacactagttagactgtttgaatggt

SEQ ID NO: 24000 - DNA, 400 bp, Oryza sativa
  unsure (1)..(400): unsure at all n locations
ctattaaactcagctctttattccgtcaaaacatcgcacgcgtgtgggcgaatatatgcctatattggcattaattgccaaaggacggcgcgcgaaatcataagtgtgattttgccacgaacgcacccaatacactccaatatgttcaaaaatcaaggtttggtgcattatgaactttttcattccggtcaaaaacatcgcacccgtgtgagccaatatatgccaatattggcattaattgacaaaagctctgcgcgcgaatcaagaagtaagtttatgtcacgaacgcacacaatacactccaatatgtccgaaaatcatggtttggtgcttnttgagccttttgattccggttaaaaacattgcacccgtgtggggcagatatgccaatattggcatt

SEQ ID NO: 24001 - DNA, 375 bp, Oryza sativa
  unsure (1)..(375): unsure at all n locations
tgggaagacaacctacattganggaaaggtgttagtgtgtggatgatcatgatgaaacaaatcgacaatgttgtccatgggtttatcccgtcatggccttgggtcatgacaaatgtggagatagtgcttgttttggacggcagttcgttctatgcgaattgaaattatagatgccacaatgacaaaacaagaactcagattcgctagcttttcctctaggtcactggagtgcaaatatggagtatatctgtactgctgtacatttggactaaaataccaaatggataaacaaatgcaggtgcagtcgaagtagctttaagccacacggcattagaaattcagaggtaagaaaaatgaaacgcttacaacaaaaag

SEQ ID NO: 24002 - DNA, 381 bp, Oryza sativa
  unsure (1)..(381): unsure at all n locations
tataattaagccatttgngactgggatgcattcttggttactgatttttttgagctcgancttctgatgcgcttgatttgtgctctattgacaacgctttcactacgtaatgaaaaagcatatgattggcatgtttatgaaattacaggctgtatgcanttttacccaacaaatgcggacactctaacaagtaaacgacactttagagtagaaaatgagtagctctttctcatacagcgtggcatgctaacaataacaagcacacacattagagctcttataagaactttctccataccacttggaattataaatcgaagaacatacccataacgttctcatcggagttactttatctgcagtactcagagcatgttatga

SEQ ID NO: 24003 - DNA, 338 bp, Oryza sativa
  unsure (1)..(338): unsure at all n locations
tggccccgtgtgtgcaaatatcctttatctatttaaggggaaaagcatacgggtttatcgaacacgctagaacgctagtcctataaagaaaaaaaacacttgaaccagcggggagatggaatctactgagggcaggtaatctagaagttgagacgactagctatcaacttcatgaacagtcactgcatatgttaaaacaacacaattgcacaaacataaccagtccacatgagttggatgaaaacaagttaacatatataacatctaataccaacatgttaacatgacatttgatctggactttctcgatctattctatntatccttgattaattcat

SEQ ID NO: 24004 - DNA, 322 bp, Oryza sativa
ggcctttaactcactcaacagtgatccccaaagccaaatatatctcaagcctcgacaaaaatctgccgactaggatggacatggtcttaacatgatccgatacactccatcagaacaaagtaccagaaaaggacctgtgagccactaagtgagcatcaaacaaactactatgtcggggaaaaggtacagcctccactaatatcccagacacacgtggctcactcttgccaacaccagcgtcaatagagatggctccgaggccgccgttccgcccactctgggaccataggattgttcatcatttataaacttcctcaataat

SEQ ID NO: 24005 - DNA, 259 bp, Oryza sativa
gataacgccgagccaagcccacagcgtgaatttatggtctaagattgtatcacctgaagctgatgggtctatatcggatggaatgcatctgctgcgacatgatagagttatactacgacggatggatgatggctgaaagctcactctttgtcggacttggttctggaaaagatagtggtgaatgttgacaggagactgagtttgaagaaagtacggccatgctatctatcgattaatcttatgataagtctatatattt

SEQ ID NO: 24006 - DNA, 381 bp, Oryza sativa
  unsure (1)..(381): unsure at all n locations
ctattttgaaatacgaaaaagatccaattcttatatgcacagggtcgcttattcaaaacctcaatcatcacatcccctctctcccacttcacacctcggaacgcactgttcttatagagagaaaggggctttcccatcttcttaacccgaaatgaaatggctgaggagagggaggttccttttggggggtacccccgggaagagatccagaggagacggngtgggcctgtagctcagaggattagagcacgtggctacgaaccacggtgtcggtggttcgaatacctcctcgcccacagccgttcaaaggggaagggcctttactctccccctgacggtaggaaaaccatgatcgggatagcggacgtaaagctattgaac

SEQ ID NO: 24007 - DNA, 296 bp, Oryza sativa
  unsure (1)..(296): unsure at all n locations
ctatactgctaacgtgatctacttatatgtatatanatcccaatacaaagagttcccttcagacttcgatagtcaaagaaatgctcttctactgagtatattaccttctctgaactctgctacttattatactatattccaaaacagtgctgcctcttgaattaaaatatatggctagttctattcatagcatggattaatgcctaatgcagagcactgatgataactcattnttcactcgcagcaggttatggagctactaataaccttgcagtaatgcccttctgctcttgcac

SEQ ID NO: 24008 - DNA, 337 bp, Oryza sativa
  unsure (1)..(337): unsure at all n locations
tagttagacagccacgacgagggtaccagttcagccccgtcnatgtatggactccgtcnatgaggtgctgcanggcggcgaccggtgcaaacgagtcggcggccgccgcggccacctccctcgtgaacggcgccggggcggagacaggtacagacgccgcggcgtccgcgaggacgtccgccgggacggagaccgaagatgcggcgtcagagaggacctccgcggaggcatctatctcttctttggagcggggcgaggtggagaggctgctgcgggacgcgtggaggaggccgaaggggatgtggaggcccatcgcctgatatcttcactgctagcg

SEQ ID NO: 24009 - DNA, 380 bp, Oryza sativa
gcatatttgagttgcccttataatccttccacgggaccgtactatcactggtacacgccaattttgggttttacaaccgattcttttcacaaaagcttgcgatatgaaagaatgggaagctcccgaatctaacagaactattgcgggtacggagttaacacagaacatactcatcacaacggctggagcatcctgagcggcttcagcttgaatgtgattcacacggcctctaccaaagttgttggaagcacgtgaacctagtgcacattgctgatagctacgacgagactgagctgccgctggagtaggagttctggcagtgctgccattatcatgccctgagttggtgttgtaggattctgaggacactgtctagcata

SEQ ID NO: 24010 - DNA, 437 bp, Oryza sativa
  unsure (1)..(437): unsure at all n locations
cgagtgtgtgcgaatattgagctgccactaccactaggtaatatgatctcgcttcattttgcgnatgtgtcttgatgtctactaacaatggcagggatacgcaagataattggggatagctgtgctcaacatcgacatcttcgtcgagacatgaggagggatcaacatgaccattatgaggtaagtgatgatgttctangtaagatcaaatctgcactgccttatttcgtgggaaactatgatcctcgtgctcacattaattgggagctagcggttgatagtgaatttcacaagcatgtcttgtcggagaaacaaaaggttatgtgtgcctctagtgtttaattaaacatgcttctaatgatnggaaacatctttgtaggataacaatataccacaatcttggatagacctgaaacgatatttcagagatgtttatg

SEQ ID NO: 24011 - DNA, 325 bp, Oryza sativa
  unsure (1)..(325): unsure at all n locations
tctgcaaccttggtgtcacttgcactctatggtgcctctgtgagccgtgcggctatctctaccgttgatgttctgacaccaacagtgttcattgtgcttattgttggagctatgctcccatactggttctcaacaatgactatgaagagtgtatgcagcgcggcgctaaatatggtggaggaagtccgcaggcagttcaacaccatccctggactcatggagggcacaactaagcctgactatgcaacttgtgtcaagatctccactgatgcatccatcaatgagatgatccctcctggngctcttgttatgctcaccccactta

SEQ ID NO: 24012 - DNA, 402 bp, Oryza sativa
  unsure (1)..(402): unsure at all n locations
ggaactactaatgcggtgggtctataacgatcttggatgggttcctaacgagccaattttcactattgttgtttggaggtntcctgtgaatctacatacactgttgaaattatgggtctttttttgtttaaaccgcctatctccttcgcttgtagtcatttatcattcaattactgaagcattaactcatttgatctcctgatattaatcaaaactagcatcctttttcctttagaaagaaagcctctttccattntagcaaaattctttctttctatgtctacctgctcaaagtattcatcattccagtacaactgctgcagtagaatgacaccgattcttgtattggaactatatagcttagctacttatctatttattgtagaaatccgcgatctgtga

SEQ ID NO: 24013 - DNA, 359 bp, Oryza sativa
  unsure (1)..(359): unsure at all n locations
ctgaagacgccgttaccgtattaaagcagtcgggtcccagntggaagcaaaacaagggtacgccgactacgggaggaggtggaagtaacaatcataagtaccgcaagcgtaagcctgcggaacttgttgcaaccgccagtcactcttctcgacagcgttcgcgcgtcaacacgttcgacaagatcatgaactctcaatgcccgcaccatactaactccaaccacgtggccaaagattgttcgtctaaagcaattcgcggatcaaacaccaagactgcacggaaaactatgagaataacaaaccatctggaagaagacaccgcacaccctgaggtttaagacaccgaagagctaacatat

SEQ ID NO: 24014 - DNA, 276 bp, Oryza sativa
  unsure (1)..(276): unsure at all n locations
tgaaacgcctttgtaataatgtaaatattatcgatataataaagatgtgtcttttatatcatagttgtgtggagtaccccggcttttcctgggacggngaataatacactagcgttcgggaaaaggcaaatttcccggtcgcgacaagagagagggaatgagatgggccgagccagcccaagaggnggaggggggggaaaagactttntantggttttctctttacaaaatcattntaactatgtttatttcttaatatatattaattgngctctg

SEQ ID NO: 24015 - DNA, 410 bp, Oryza sativa
  unsure (1)..(410): unsure at all n locations
gctgtcacggtttggcaatgttcaattggcgcccgccaccgtgttgtatcctataatcaaaccatggccgntccgagggtgggctttagatttcattggtcaaatttatcctttgtcatcaaaggggcataggttcgtgctaattgctacggattacttcaccaagtgggccgaagctgtgcccgtgaagaatatgactcatacggaggtaattgactntatcttgaatcatattatccatagattcngtattccacaaacgttaactacggatcaaggtgcttcttttatatctaaagaagtgaggagatttgccgaatcttatggtattaaattggtgagttcttctccttactacgctcangctaatggacatgccgagtcaagtaatatgacattgttgaaactag

SEQ ID NO: 24016 - DNA, 284 bp, Oryza sativa
  unsure (1)..(284): unsure at all n locations
tcgcatttgtatttattttctttgagcacgaatcctgtcatgaagctttaatcctgtcatgaagtcctataataacacatctcagcaaggcaggaataaccaatgcgtcctggtgttttcattatgtctacctatctctgnccttacatttaattctaagagtctacgaagtctatgtgccacagactggcaagtctgagctgaatctaaccttttaaaacatggtactgtaactatgtgattctttacagtaactatttctgagctctagtggtctaactgaa

SEQ ID NO: 24017 - DNA, 281 bp, Oryza sativa
ctggggtatcgctgggaaatttttattggttgttcgagagcaccggacatgctggatctatctgaacgctatgctctaacatatatagatttgttgtgaatatatatgtagggctaagagatttatactgaatcggcacgacgaccgatctatcccaatcacttgatttaaatatttatccacaacacgactatatatcgctaatatctacacccgatcgcagagagttagtgctctattatctacttataactgccgatcgatgacctatgacatccgcc

SEQ ID NO: 24018 - DNA, 388 bp, Oryza sativa
actcagcttgaaagaacgagagagcattgcttgaggttgtgagttgtatgataatgagaaactccttctatagcctcccaatgacaggtgtgaccgttggaatggtcggaaatatcctccaaccgccattgggggctaatccacaccgttcaggcgaagccctgcatcggatggcgctgaggaaggttcggccgaaccccctggttcagccgaacctggggccggcccaatccagcccaattttgggtggtgacctactctgttgttcttctctgcagacttgtgaattctgacccaagttgtcacagtaattctgagttcttggcccattcatacttaaatctggttctcgacatcatccgattaatttatcgtgtgagctgatgtc

SEQ ID NO: 24019 - DNA, 270 bp, Oryza sativa
tactagtgccgaacaaaaaagtacgatcgttactgcagatcggaattgtatcactgttttgatgcacagctgccctttactcgcaagctcgtaagagaatcccaacgcattcttgtcatcaacgcatgcccaagttaaggacttggctatctaccagcttcggggacaacattgtctgtcagctacacactgagccacaatcagtcactgagatcaatagagaggtccgccatatttcatccttgtcccttaattccgactcaatgagct

SEQ ID NO: 24020 - DNA, 158 bp, Oryza sativa
ctcttattaagtatcactggtatgtacaggaggacttacttcattttacaatgtaagacattctagacattaccacactcatattgacgtctatgaaacaaattaatggtggagaatgctcgcacgacccacattgtgaagccgaaggagtaataatt

SEQ ID NO: 24021 - DNA, 323 bp, Oryza sativa
  unsure (1)..(323): unsure at all n locations
acacaaacggctggaaatggtggaganatttctatctatgaatttaactatttaggatcaacttcaacgcgacactgatagaaattaaaacgaacttaattntgcaagcagtgatagtcgataaaaatattattgttatgttagttctatgggaaaaaacggcatccgtatggtcggaaagtttccataccgcatgagacatgagaagagggtggagaatgaatctcctgcccgggaagaggctaaacatcatgtttatatagtgccaaaatggcttgtgcattcacaactctttgcccttagaggcagtgtaattacaatac

SEQ ID NO: 24022 - DNA, 307 bp, Oryza sativa
  unsure (1)..(307): unsure at all n locations
attctagagtcgccaaccacctcaatcaagcanaagctattccaagatgggttntaataaactaaaccggctagcggagcagatatagatagaacgatagataactacccgtcttgtgggcaaaacggaaagttttcagaacaaacctacaaagaggtgtcgcattctctcaacggcggcggacgatttacaacgcacatcgacaaagatggacaaactatactataactatagcaaaagtaaaagaacgattcgattgattgattagtgattgatagaatacaattaaaccggccttgtcccttat

SEQ ID NO: 24023 - DNA, 282 bp, Oryza sativa
  unsure (1)..(282): unsure at all n locations
tttaagaaagacaaacgttgtctgaatatcaatctcagcataaatatgcccgcattgtgcaaattgagcctccatgtattacatttacacttagtcagaatcaggcctttcatcatcagagttattatcgctcggctgaagagtcgttgtgcggaaatgatctacaacatcacttgcaatcttgtcagccgcactctgagcattactgattagatcaagagcagcttcttcacttgtcccgcctgcanatccatcaatggtgtcgacttcaattctcgggta

SEQ ID NO: 24024 - DNA, 195 bp, Oryza sativa
agaaacccgcggctgaactattttttatatcccacagcatgttggactctcttgcatctggacttaaaacccgggtgaccttgcaaagacccgctgatcgctgattatctcctgatcatactcctgggaaaaatcaaagactgcgataagtctggcatccttattataagacgtctgattttttctagccactcc

SEQ ID NO: 24025 - DNA, 396 bp, Oryza sativa
  unsure (1)..(396): unsure at all n locations
atttatgcctgtcatacctgtactctnntttctattagcctttgttaggcaagctgctgtaagttttcgatgaaatctttactactctgtctgccaaantgaatcatgtattcattctaaaaaaattcgataaatggataagagccgagaagtcttatattatgaacctctcgattctaaattcacattcttctacattgaatgtatatctgcagcaataaatttggatcagcctgtctactccctgcatctacgttgagcaggtatctttatgtaaccgcacaatacctaacctaatttattgataagagtgcttattataaatcaattcttgcagttttttcacaaagtgattttgcattctaggtgtcaaataacaaacccatctatggattg

SEQ ID NO: 24026 - DNA, 491 bp, Oryza sativa
  unsure (1)..(491): unsure at all n locations
ctaagctgctctagtagtagtagtaagtggaggcaatgagagcatggttgtgcatgtctgtctacgtgatgaccgttttaattcattgatataacatacagagactgtaattgcctctccctttngcccatgatatctgcatccaacgcatcccatgaccgtgtagttgggtttaaccgctgcatcttgagataagaaaatcctcagtcacactctaaaataaatttgcatgctcgcactcgactaatgcatgaaactctgattcattgccattgttacagacttacagataggacaattactctnttttcatatggcctatgtggagtgtagaaaagagaaacaaagatagattatgtgtctcagaaacatgtgactgtcaactcaacttatacaaagttgtatcaaaataaactatgaatgtgatattatgtttaggtaattatagtcgaatcgcaattatacactgcatatttgtataaatatcttgt

SEQ ID NO: 24027 - DNA, 387 bp, Oryza sativa
  unsure (1)..(387): unsure at all n locations
ctcagcttacaatcttctcgatagtatacaagactttctgtctgtattatctgctggggtcgcgctcaaaatgtgcaggcatagaaagatggtgctctgggtcttcggctatggctccctgatctggaaccccggatacgacttcgatgagaagatcctgtgcttcgtcaagggctacaaacgcaccttcaatcttggtacgatagatttacatcctggttgncttggaaaatgagcttggaaatgcagaatcagtagcttaaacttgccgctgttctatattgtgctcaacttttatgtgtgcatcttcatatttttcttcctccctgcagcttgcattgaccatctgtgcacgccggagcatcctgcgaggacctgcacacttga

SEQ ID NO: 24028 - DNA, 379 bp, Oryza sativa
  unsure (1)..(379): unsure at all n locations
ctgtgatacatagtcatataactcaatgtgtgcgttaagtcaactaataacacacatgactaccatgctatcctccatttaccagcatctcgtattagtgaagatctggtgacagattacatcaagcaagagagatgaccatgtcagcaggcaatagcgcatcatcatactaggatacgtgtattccatgttcagaattcaatccaataatccgaatagtgtacaacccaaccaagtaatctcatacaacctaacgggatagtaaaccccaaccaattacaccgtaactaaggtaatgtngtaacaagaacaatgcactccacgatcacatgctccaccttgaatccaacaagctcaaggaccggatcatcctgttcag

SEQ ID NO: 24029 - DNA, 389 bp, Oryza sativa
cgccgatcagtgcaatgggttctgtctccggcatcgacgattctcttttcccacacgggcagacgtttctgttcggcagcctcgacttcgtcaccaacaacttcagcaagatctctctccttgactcggagtcagaccagtcgggagagaaccggatttcagtcccgtttggactcccaaacgcggctgaaagttacttcaagaccgtctcaatcgagttggcttcaaaccactcgggcgggatcgcatcttctccaatgtcaccagatcaagatgatgaggcttacccaccgatcctgatgaagctccccgacgatatggcgggcggctccatcacgacagcgtctccatcccgtttgcctagacggaagtctgcttcaacaccgatt

SEQ ID NO: 24030 - DNA, 324 bp, Oryza sativa
agctcatgatggtaatgaataccgacgaaatctattatttggaagctaatacttcctgtggaacgataatatattcttgaggtatttgaaaatggagtcatttaaccaaggataacttatcaaagaggaggtgtgaagggagccctaagtgttgcttttgtaatctaatgagacatacaacacctggttctgatcgcctatgaaagaatatttgagtgcggtcatttacctttggattcgccaccgctaaatgtctaacttctcgtatcggctaatggggtatccaagtaacatcaggtttggggctaccgcgtgtctggctgg

SEQ ID NO: 24031 - DNA, 372 bp, Oryza sativa
  unsure (1)..(372): unsure at all n locations
catctaatgtaccccagaaaggaattaatcgtgatgtanaacggtctatgtaatggagcagactaacattccttagtgcctaccgatacagattaaaaaaactgctggaaattacccagaactgtgtacttttgagtcttgattattaagattagcctgngaaaacctcgtatactaactcagatatgaggaaggctgtttgcataaattcngtgtgagttgctgttacctgcaggtccatagctcacagcctccggattctagctagcaaccttaaactagtagagtaatggaataaatgaattctcacgagcgacatttagatgacaatagtaagttactgctagttntctgatcaatggtgcatgtaag

SEQ ID NO: 24032 - DNA, 321 bp, Oryza sativa
tcaggaaaagaggcgttctgagctgaactatattactgtttattatccgcaaacagacggacaaaccgagatggtgaatcagcatctggaagacacgttgagagctagtgctttatacttcggtggaagctgggataagaatctaccttatgcatagttttcatataacaacaggtatcaaactagtcttcagatggcttcttacgaagcactgtataatctgaagtgccgcactacgcttttgtgggatcaaacgggataacgtgaagttttctggaccgatatcctgacggaagcacaagaaatagttgaaatcattca

SEQ ID NO: 24033 - DNA, 428 bp, Oryza sativa
ctaagctcagaagggtagtgagctcctatgatgtgatgccactactgcttggctgattaatcgaggtctggccaagctactggtctgctctatcatgagcaagtgggattttcattgaccaaatgttctcagtctagaatgtccaactgcatggcctcgatgcctcttgtatctggaagtaatggaacacggcaagtcttttcacaacacataccccacaacacatacccacctatttcaccacacaacctcagttcagtgtgttggacagcattttgaggcaagtcctactgtcctatgaggatagatgaaaatgttacctgaccaatgaggtatgcggtgatgctgaacaatcatcaacggctatgctataatttcattgttgaaggaatgattgattgctgctgatcatgctaaagtctatgatt

SEQ ID NO: 24034 - DNA, 410 bp, Oryza sativa
  unsure (1)..(410): unsure at all n locations
cganagcgtgcacacaaacacacaacanattgtatatctggcctataagcagttagatacaactaagatccaatcatacttctatactccttctgatcaacagctttaccatcttcaccaggatccaacacagctgtagaaccaattcgtgttgatattggcttgcaattctccatcttgaaccgtctcaaaagatccttcgtgtacttcgtttgatgcacanatgtaccttgaggtgtgtgcttaatttgcaatcccaaaaagaacgatgactcacccatcatgctcatctcaaattccctgcgtatagtctcagcaaactccacaagcaaagcatgtagtgaacaaccaaagatgatatcatccacatatatgtgaacgaacagctggatatcatcatgcttaagaac

SEQ ID NO: 24035 - DNA, 335 bp, Oryza sativa
aaccactagctatctatgttcccaccgatgtttctagaatataacatgcatggtcacactctaacctcacaagttctgaagagaggcccaatctcatattctaattcttgcccggggttctcgatgaagtaacaaggtgacgcaagatggctcgatcaaagggggttgctacaaagcatattagacttttggtgtctcatagcttatcaagacacaatggcggatcatggacttgaatacctaatatggtgaattggacacataccagcatattagggtgaatataccaattctagagatcctggctggctatgaatgccacttaaatgggcgtt

SEQ ID NO: 24036 - DNA, 400 bp, Oryza sativa
  unsure (1)..(400): unsure at all n locations
cggaagtgcggaacgacgacagtccactgcgggcgccgtggttgggttgcgctctctcggcttggccgttgctttgagatcggtgatgtcttgacttgtgtggactggtcgatgttgcgatgtctgagatggatttcagagacttaactcttaaccgattaaaactcgggtctgtttggcatagctatagatcacgatatatttaaattttgtatattaaattatagtaatgatctagattttaaagttttatctaaagtgagaacaaaattatttatataaatattatcaacttaatcgcactatcgcaggtctagataatgaatntgtgaagttagaaatacacatatttaagaagaaatattgtatttgaagtcgtgccaaagagggtagtctagta

SEQ ID NO: 24037 - DNA, 382 bp, Oryza sativa
  unsure (1)..(382): unsure at all n locations
ttattgttcagaagtctctcagatttgagtattatgttcagagtctccctgagcgaattgcctaattaatgaatatagaggttttgaaatcaattactgaattcactattggtacaagcctaagtagattctaaaagatgcagcattctgaatgcaaggtgataaccaacagtggtcttaactgctgctggcaatagtaacaacctttgtagatttacctataaccacgtatattgatgccatggctactaacctcattaattatcaacatgcctttgagtactgctgactgcacactacnctctctcgtataaaactatggtcagaattatatcataatgtgtaattggcagtcatctttatcttattgttgcaaatggtg

SEQ ID NO: 24038 - DNA, 411 bp, Oryza sativa
  unsure (1)..(411): unsure at all n locations
cctctgtgcaagcactaccgtacttccacatgtctattgtgttatggctanttngtggctcagtctattcataaacaaaagtacacggattggagatggatgaagtcgngggtcgatggacattctccaaggcaaatgaatgctacacgagctgcggcccggtagtctagatgtcatggcagagggttggtgccctgctgctatggggctcaatcctgcctgcctgtcccgagggttccggccgtaagtggggttgggtcggtactcttgtttatggctaggatgggttgggaactatgtcacgtcttccgtccgtataccgtggtggtatgtggcacagtggtacacgtgaggaagatgtgtcttgtgtgtaaagatgtacacctctgatcatagtattatctattctaa

SEQ ID NO: 24039 - DNA, 375 bp, Oryza sativa
  unsure (1)..(375): unsure at all n locations
atattcactggtactacaatatgctgagggttatttatcagctattccttgncaggaaagtaagaatgagaagattaacatatataacacgttctggttataagatgtgctgcgcacactttgcctataaatgaacaattatgcagtgattcttctaaaacatcaattgtaagtacctcacaaaggcttgttcagtcatgctgaataatatgaccttggataatatgctaagtgaataatattgtttcaaatgtgcagatcattcgcggngtatttctgtgtccactagctctggcattgtccactcttctgaggtggcatgtgtatctcatctttcataataaaactactattgaagtctgagaaattgaatcc

SEQ ID NO: 24040 - DNA, 403 bp, Oryza sativa
ctcagcttagtcaatggtatcacacacataatgggtcagaatgtaatattatcttatttatcattcacaatgacagagaacatgtgtgttgaagctcgcattgttgggatctccatctccatccacaattctcatcatatttctcttgtttgaatgggacagactctcatgccgcgaaaggtcactctgtcccccactctttcctcctctaatccaatggaaggtaggaagtaatgccggtgacattaatattggccccaaagctgaagctgtctcatgtggagaaggtacagaacgggaaagttcagaatgtaatggtgctgatagcccgatacgactagtagctcagtcatactacttatctcgagtcactgatagatatattgtctttgccgctcatctg

SEQ ID NO: 24041 - DNA, 436 bp, Oryza sativa
  unsure (1)..(436): unsure at all n locations
atatggangagtcttacaaaggtttcttcactctagaaagcgcgctcgcttcctctcttctggagttcagggtctctgggcgtcgtccccttatctcagtgggcatggccttcctttatagctcaaggtgataccacatgctccgcctgcacctaccctctatcggagggggagcccactccactttttctgggtgtaaaccgtgccttctcccggaagctaagcaacaaccggttctcgagtggaacccggcgccgcccctcgcctgacacggtggacagccctgtcattccctctatatgacgaagacttgcgacagccttctcgagtgcgctccgatgtacgggtctaccaccccactccgccggtcaaggcacggaggactggtgccttcatcgatgactggacggcgtacaacggccatcgtgacaagtac

SEQ ID NO: 24042 - DNA, 488 bp, Oryza sativa
ggctgaggtcagcaagtgtataacaagtgcattacggagtgcagctatgttctatcataccaataacactgtgtggcctacataagatggtgatatataccattcataattcgcggtgtgtatatatatgcctggactagtaagaagggtgtaacagcgcatattactaccatcgtgcagggcatgtgagacaacactattggacagattacatgcaacgtgctcactgagctcgctccacaatacaccctgattcgaatcgcacggctcgtcacctacttgcatacaacacgaccgtgaatgctcatcatgagatataagagacatgcctaacagatgaacgaccagcctagctgaaccaatgactcagtatctctcttcatgccaactatgtcctccttattctatgcttttgaatacgcatgacacaacagtctttatactcttaagtactttgaagcatacgaccgtcgatgtctagactgaca

SEQ ID NO: 24043 - DNA, 441 bp, Oryza sativa
agaggagtatcgaaccggccaccgctaaatggtcggatctatctatgttctggtactatgctcacggtggaacgctcaacccagttgatggctccctggtcttcagcgatcagatacacgaggctgcgcgtcgactaacagacgcagtggtagcctcttctcatggcacattccgaccgcgcagagagatggacaagctgtcactcgtcctgcatgatcccgagcatccatgacgaacacgatggaaaggggtgattccttggaagattggactttaggaggacatccacacgtacaggagtcggatatggagcaagagagataccgatgcgaagattgcagatcttgagtacagggtatcgagctatgagctcaacatgctacaggaggtggcaatgaaagttgatgaacgcatgggcgcacatcagtcccatgatccct

SEQ ID NO: 24044 - DNA, 263 bp, Oryza sativa
ttacctacatgagggatttgtggagatagaccgctttatgctacaagaggaaattctcctcaaagtggatattgttaatatgttatccgaattttgagcccacaatatattcggattaagtttctagtatgagttcctatttagtggtcttctcttatcacctatatatacttcttgtaagccgtactggaaggggtgacgttcccattgagatttccctacatttgttatcaactactctatattgatcattgccggtcggc

SEQ ID NO: 24045 - DNA, 429 bp, Oryza sativa
  unsure (1)..(429): unsure at all n locations
gctgatagctgagcaacatacatttacttttctgtagcatttgctactgatgaatggtcctgtgctcaatgtccaaggacttgcagcagaatccgttagctcgttatattgctgtcagtattgttcttgtagacatttgttcatgatgaactcttgctcggttgagtatggtaatctgaaggttaagttattcttcttacacgatttgaggcaatgggcacggagctctgtgttgaagggagtactctgttaaagcatgatttctttcgaatgtaagaatttgtaaacactggagtaagaaaaggcaggaagttaatttacacgttgttcacacccatgctatgaaccctcacagttctatgcattggaatttngtagcgcagacagacttttatccttcgttcactgcacacaacgcgttaccacgtc

SEQ ID NO: 24046 - DNA, 444 bp, Oryza sativa
  unsure (1)..(444): unsure at all n locations
taactagtagttactattcnctctgactcataatatatcaatatgattagtagtactagtatagaatattaagttgctatatattagagcggaggtggaagtatatttttataaaacgaaattactaatttgatttacaacaaaacgaattaatggcgtttataatccatgcagtcaaccgcttatatttcccaggtccgaagtatgtatgtatgtataaattatctaattcgccgcatgaaaactatatctttcatgtgaccatgaaactatattaaatcacttttctaggatttcatgcagttaatctttctatatatatagcatattataataatagtataaccaatggtgaatatcttagaaacaacattaacggcaacaacaatgcttatggtcttggtgaatataagtatgtccaccataccctatataccatggtac

SEQ ID NO: 24047 - DNA, 390 bp, Oryza sativa
tcatggagttgtgaacttatgaacatgcataattcattttagttatagttactactcctacttactactaccatcccggccaacaaatatctagaatagaagataacctggtggatcagatctagctactgactactgtcacaatcctttcccacaaacaaaagcgctcacatcaccatcagatacacgactgcattgatcttcactgaatcgtttctctgggaaccatatctcttacacacaagtagtagcattctcgatacactaggttaaagaataattggaatccgctcaacgtctcttccattaagagatcgatgcagacacagcacacactctgcgcggtcactgcacatacgcatcctccgcatgttatcacttcttctgggc

SEQ ID NO: 24048 - DNA, 556 bp, Oryza sativa
  unsure (1)..(556): unsure at all n locations
ctaagctaactagtggtgtngttgaaaattaagtcccnctcatccatgatctttattaggctctaatttacatatgtactggccagaacgtaatcttaattaatcttaattntatgagcctttatagtatggatccatgagcaaatgtttattaattntatgagcctttagagtatggatccatgagcaaatgcttagcttaataatttgatcctgggacatgtctttcacaaccatatcaatgtgttacgaagaaaacacacaacatgctgctactagaatagaaaacagtgtttaattagtgcacaacttatagcacagtataattttgggtggtttacaccttttgagtggtttatgagcgctatntaccactcttagntctgggagagaatcttaaatatatgattaatcataacatgctgtataaatctaatcgcatcgtcgactatgcaggaagagattattttggagcttctccactggtaacgcttcnctatgtgtggaatagcttaatctaaatagctaataatcttataatatcacacatttacaa

SEQ ID NO: 24049 - DNA, 492 bp, Oryza sativa
  unsure (1)..(492): unsure at all n locations
tcatgcctaggcagttccatgctacagagtgcacctaacagtattacataagatcagaattatacanaatttaaggctgattatgtatgntagatagataaaaaagaaggcaaatagcgacagaaccagttaaatgctgcacctccatgtgtggaaggattatttataaaaacaagatacagaattcaagaaagaaacagagaaatatcgttgtactatgaatctttctgcaagtaagatatttttttccctttgaattcttcccctcagaggagtagcaactttacaaagtcagacaagaagtcccttttcgtgaaaccaaattccttcaaaaattaggagtaattatgaccaggaatcatanttgacaatgcgctcattcaccagcttccagaaggaaagcaaccaaccaaagcttattcaatctaacatggcttaccctagagcaaagagtatcatatatacggcatgaacgcgaggaatcaatcacta

SEQ ID NO: 24050 - DNA, 394 bp, Oryza sativa
gtaccacataaccaaaacttttagtggaaatgaaagtcaccctcatattcgatgtcacgcggtctaaccgaagtagatgcgccggtctgaccgagattattgctctggtcttacacgccgagatcatgctgctagtcacactgagggctcactgctgagttgaccgccggtactccgctggtctgacagtcatgatgccgtcggtctgaccaccggtatcttgccgtgtggaccatcgaacccgagcaaacacaaattgaagatctctccaaatagatgacagctgtattacttctgtgtgtgttacaaagtgcaacaaacgcactcctcatgaatatcgccgctaaactcgaaaccctactattctacaactcaatgttctctaagcgatatc

SEQ ID NO: 24051 - DNA, 258 bp, Oryza sativa
  unsure (1)..(258): unsure at all n locations
acatgtcgaatatgccatgtggcagaggaccatatatagctgttgtcttgaagaacgagtagcgtgagaccggacagagatgctatgctgtctggtattttcccgagaggctatcgatgccgatgttgactacgctcagcaatggtgcgttgtgaacacgctgtccggtattggcccgcttaagtagttggtgtcaagacggatgtatcttanggtacccagattctgcagctcccgagggatctgacctgacagatg

SEQ ID NO: 24052 - DNA, 511 bp, Oryza sativa
  unsure (1)..(511): unsure at all n locations
actctctccatccaaaagtctaagacctatttcattttttgtgttttccaanagtctaagacctacttgtaatctctgtgttaaattaaattgttgactggaacctaagaagcaatcttagtatttattggttacatgcatgtgtatagttcattggttntgttacatggtggatgagtttcggatggagtacaacttacatttaaaataaaatcagctgaacatagatatagctggtaccatgctagagcataccttgcatcattgcatgtggttgcgccacataatgcacaatacactttgacttaanaaatctttgcacatggtgattccttgttctgtacatacatctggttttgtagttattaattattatatgaagcaagcatatagcgcaagaaaataccttttcatgtttttttctcattactgctctggatgactgtccaaggtgattgtcacacaggactattgatgatgaatacaatggctactctttatttcagctgat

SEQ ID NO: 24053 - DNA, 127 bp, Oryza sativa
aaccaaatatcctggattcggccggacgttctgtacttttgcggagggcccttgatatccaggttattactcgctttagatagccacctgtttcctggccctcgggcgctgcctcacctataggcat

SEQ ID NO: 24054 - DNA, 324 bp, Oryza sativa
  unsure (1)..(324): unsure at all n locations
ngatccanagngnacggagangaatctcaagagttgcatatggtgtacattcaaacctcgtatcattaaatgaggcgagttccagaaccggtgggtatcatatgtcaggagataaattgtcataaagagaataactacgaatagtatcaaattcagtggagatattagtggtcaccacaattcttcataatccaagatggttagaggcaaagtagaatccatcattgtattgcagatatcaagataagggacctggttacaaaatcatgttactaataatgtatgagagaccagacacataatttactagcagatatgaacatc

SEQ ID NO: 24055 - DNA, 453 bp, Oryza sativa
  unsure (1)..(453): unsure at all n locations
actcagctgtctactaactctattctctgatgctttgcaaaacatatgagatacttattgtatcttctcacaaaggcctacttaagtgccatatggatagtaatgccctaaatgagtacctatgctatcaaagggacaactccaaccatgacggtcttgggtatgttcctccaccaataggaaaggtggacaacagtatgatgattaagatgccccatggttttagcaatcttgttaatgcataaatgatccttcctaatgattctgcttcacatagttcttttgatgcatcttatgatcttaggaagaatgctatcggtcgcgatgttgctaactatgtaagaccaacggacaaacatgtctccataagagagtactttgggtgcctaagctctagcactatcatgagatgagctatacaagtgtgngtaccttaaactagaaattgaactc

SEQ ID NO: 24056 - DNA, 472 bp, Oryza sativa
  unsure (1)..(472): unsure at all n locations
cggggtgactntgtcattattaagacatacttataagggggttatacttatatggtatgtatatatgtatgcattnggtaagcgggctcgtatgtaattgaacgtgcgtgggtgtattgtgttctgttttttcgaataaaagaacttatgaatcttgtactattggctgtcttacttcattaattcattcgttcgaggacaaatattcatatatttgccaacttcgtgtggcggttctctaatacaattcaatagttatggcatatttttcttctgttggtgtgtattagctcatgtttgcttagctntagttgagcttacgagaactttctatgtgagtttcgtctgagtgagtctggaatattggctgaactctttgagtaatacttgaatgtacattcattactgagagaatattcattcgataatcgcgcatatctgatatacacattaacaagacacgctacccaat

SEQ ID NO: 24057 - DNA, 410 bp, Oryza sativa
  unsure (1)..(410): unsure at all n locations
ctcaagctcnngaaccagtgaggcttatgcatntggataatgagagactctgatattatttatgtggatggcgctattcttactcatggtacttttgtttactttaaacgctgtgatagagactgcacagctctttctgaatataggagacaccgtaatcttttacttagcttccatatattgtcacttctaacacaatattctgtacctcgaaaatctgtccctagaaattatatccaaccttttgtttctacattacttctgttaaaatccatcaacctttttgtgcccacctcatctaatagctactgttcatggatactacatcaaaangaaggtacttcctggctaagatggtgctatctatgtctgaacttggaaaaatcaaatcatgctaattatttatatgt

SEQ ID NO: 24058 - DNA, 433 bp, Oryza sativa
  unsure (1)..(433): unsure at all n locations
gatggtgtagacgcatagttgaagacgagtggcggtagaagtcattgtatccgggcgcttgaatgggtgatcaaaccgaagatgcgtgaggcagaatgatgaagttgaagagagtcgatgccgatgtcggagacgtacatatgtcgacgagacggtgggtgacgcaaacccaatctcagatcgggagaaataaaggtgcagcaagcaagaagcagcacagtagcattagtccacaccacgccacaccacgccacagcacaaccctctgcaactcattagcatcagtaactcttctcttctattgtgtaagttctgtacttttattagaatactcttctatatacatttatgcgtatttttttgacgagaaacagtangagaggctcctactgtgataatagattatatatatatatatatatcttaagatatt

SEQ ID NO: 24059 - DNA, 435 bp, Oryza sativa
  unsure (1)..(435): unsure at all n locations
acatggtattcgctatacatatatgtttgatggtgaaagngaataatcggttcatatggtgctgaccaatccgcgatattgagaacggaagctcttcttcactgtcattcatcagtaacatgacatcattgagcatcctgtatgcataaccttgtatccacttaattaaccaaattaatgctccagacatattgagtggaatatggactcaagcacgtttaaatcgtataacacataacattttatatttgtgcaggatactgacgaactgtatgatatctgataatctngcatcattagacttttcaaagtttgcgaggttaagctgactgcgagcaatttgtatctactatgaattggacgcaatcatattttgtgcgagatattttatatgtattgcgatggaccatacattgtctaatgagtgcttaccat

SEQ ID NO: 24060 - DNA, 381 bp, Oryza sativa
  unsure (1)..(381): unsure at all n locations
tcncgcttaatttcgcgggcgaatgcgagatgacgtatacttatatgatgacgacggaaccctcaagtacgaatcgcttggttaaagcctccagataagaatacgcggtggntcatcgagcgagagaattctactttattaacctttcttcttctttggtgcgagtgagtgaattgagttcattcttttgtgaaatttaggcgcggtgaaagagctccgtgtacgctcctttagccactcacctactcacgtacaagcgtggagttgcagctctgtttgtacttgttgtactcctctatttatattatgtactcgcaacacgacctgttgtacgcactgaaatccactgattcttcctctgactgatcgaaccgtgtcaca

SEQ ID NO: 24061 - DNA, 342 bp, Oryza sativa
  unsure (1)..(342): unsure at all n locations
cccgcctacaggatgtctatgatctacccctgctccataatggatgtcactcaccgcgggaacctttgtgttctaatcatcttggtacataatccatgcttggagatagaaaaactgctcattacccataggacctattgtatacgacgatgcccttcnggttaataaatgcaggtcctacttttcagcgtactactcgaatgtctttgggtagccaaataggacgtaatgttgatgcttatgtcgatgacttggttgtaaagacgcgccaccaagacactntactctcagatctagccgaaacttttgaagtcttcgctccgcccgcatattactgaaccc

SEQ ID NO: 24062 - DNA, 275 bp, Oryza sativa
  unsure (1)..(275): unsure at all n locations
gagtagcgcttattgaactctgtagtgcttaaccaacccttacacagaataaggtcatactgtgattgttgggaacccacctccccaccctcaccaatagaagtgcttgttatccttatactggatgaactgtgaaggtgctaatgaatcacccatatcngtgcttgtggtgaagtttgaaaatatgattggtttaacattcatgaacatataattatttcttattgaaaaaaatttaagacggccaaattgcggttaatgagcataccttaaag

SEQ ID NO: 24063 - DNA, 413 bp, Oryza sativa
atgtcatgcccgaccacagcttctaaggccattctgaccaataaagatgactcgagcatttagtatggcgaagtccatctcgctgatacatcaagcgatggtcgcctgtaagtgttattcccactcgagcaatcatctcttcgaacctttgaccacgtgatggcgaacatccgaacatatttaacactttctcttatactgttaatggcgttgctcatggcttgtagcccatcttggacaatagattgatataggcacacagcgaatgacacactcctacatgacatgctacacaaatggttcaatagcatattgatatccactgctgctaagacactgatactatttattgcatctgatgcctacattactaaaatgagctcagggggcgctaacaatttatttttgactca

SEQ ID NO: 24064 - DNA, 288 bp, Oryza sativa
  unsure (1)..(288): unsure at all n locations
tgagtgacacataaagaacaccatctgcttcacccaagcagacgccttcaactccttctaccctcgttcattttacaaaggtaagtatctctctttgacttcttctaaaattacttctctcttcggctaattactcatagacatttgtggtgcaaaaaaagaaaactgctgtgaaaaaaaaaccgcaacaacgaatgccaagtcggctccaccagtaagatgtctttaattcttttactctacagcctcctcctgcttctnctcctgtacagaaatcgtcaagtgacc

SEQ ID NO: 24065 - DNA, 323 bp, Oryza sativa
cttggcctgtgggacttaatctgagaacagtgttggtgtctcttctgaaatctgaaagtctgaacccacttctccgctttggcttctattcattttcagaatctgtactcagattctcataatctgggactatttgggcagcttctatcaaaacagctgtgggaaaagctcagctggacaaactcccgccaaaagactaatgttgctgcttccagagttcagttgcttgcgatgtgctgaggcctcacctcccgtacctgtactaccgcgcctgcgcattggctgcaactgccgtgccttgcgacccttctcacttacgatat

SEQ ID NO: 24066 - DNA, 416 bp, Oryza sativa
  unsure (1)..(416): unsure at all n locations
ctcagcttgccggacgcgtctatgtgttggacgaggctcatgtgttgttcattctctgagtgccggtaaagtgtacatccactgcagtgtgagtaaaccatatctatttgaatagccgtgctcgcgggtattgagcaccgtgacatgtattacacttggctagactctaaattcttaactttgtggggatgggatattgcatgatgaattttatgctgatggagccacttctcgagaggagggaaagtggacatcctcagaaaaccatgacgatgtaatgtgcggaagctatccttgtgatcacaatggatggtggacagaaccggtcgttcttatagtgatcactggtactaaaatttgaacagtttatgctatgtcttangcttgtgaaaagaatagtgaaatagctttatgca

SEQ ID NO: 24067 - DNA, 402 bp, Oryza sativa
  unsure (1)..(402): unsure at all n locations
ctcagctgcagatagtgaacagtggaataagcacaatttgtcttttttctcagtccaaagaagaaaatataattcaacatgctaattatgtgatgcagcaagattaaataaaacaatattgtaaaacttctgctggtaattgagccattagtacagtaatatatgtacagtactattaacactggaataaatttgaatgagaaccaatcaanaaattatgaagtgcatgtgctattagttntgtttaattaacagagaaggggaggagaacagttctacttttccaatattttaagagggtttctatggataaccatttggcataacctaatgtcaaggaggctctgataccaactcgtcacgcccggaatttctatccaaattccacacgcttacatgtgt

SEQ ID NO: 24068 - DNA, 270 bp, Oryza sativa
  unsure (1)..(270): unsure at all n locations
ctcaaccttcattgtctcaagatccaatatgagacattctctatgttgtcctcatgtgagtgngaatgacatgtatgggaggctcaatgtcattgcgaatgatctcctggtgctcggtgcaatctacaccgatattgagggtgcccagacgatgcttagagctctacccgataagtgtgagacacttaattccatgctcatcaactcctacatgtcaatgatgacaccctgcatcctcttggcgtagatcaacactcatgacatgtacat

SEQ ID NO: 24069 - DNA, 392 bp, Oryza sativa
  unsure (1)..(392): unsure at all n locations
gctaanggctttcagagcagatcactctntgccattatcaagcatatactatacattgcttcgctggatcagcagttactagagccaatccacaccagtgctcagaagatattgcttcagtgctatgctacctgaaacatgcattctggcaattggattatggagttatggaccatagatataggattatggagttatggcccatagatatatgattcaacaacagtttgtgaatcgaacttcatccctaatacttcagagcgataactgctaatctaatgcctataaggcctgtatagccgctactgtatacaagcacccatggaagganaaataatacatttctaccactgaacctacagaatgtacaaggaacagtctcttctcttcta

SEQ ID NO: 24070 - DNA, 353 bp, Oryza sativa
actataaaaactcaagctataatcatgaagaaatgaagtcagtagctgtgtttatttattcatcacacaactcacgcgcatatatataagagaaaactatctaatattctttataaaatataaccaacggtactgtttgatctgatatagacacactagctactaaccgattcctcaccacacattatgcacattaatgtgtgttcgcgatcagtgatggagcacatcgcataattcagatggatccaacacgcgacatatgtgatttgcatgtatgagatggtacctctcgtaagaagactacaaataacaggtaaacgacagtgaacgcaataatgttgtgcaatactgct

SEQ ID NO: 24071 - DNA, 388 bp, Oryza sativa
  unsure (1)..(388): unsure at all n locations
taaggagggctgtcaacgagccgagctcgagcgagctcgtctgtctatgctcgagctcnatacaaactcgagccaagctcaagccaagcctatataatgtgcgagctgtcaaacatgctctgttcgagctcgagtcaactaccgagcttgattttatatataacaatgtatatttcataagagtaatctgtaagataataaatatatttagggggtcatcatatctggccgaacaggataaatattaaaataaatatatgatgccaatacaaggcatacaaataacatatttgatctcccaatttatgtaataacaacacaaaaaatcatatattactagactcgttagaagctcgagctcggctcgataaagctcacaagctttggg

SEQ ID NO: 24072 - DNA, 341 bp, Oryza sativa
  unsure (1)..(341): unsure at all n locations
atgatctcagctcgattacttatgtttctccgggaatggctgttatatctagaacttnctccagagaaacaggcgtatgaagtgtcaccattcaccaggcagtgtatatatacatcctgtgcacacatgttttatctcactcacccaatgaatctctctgtcgacaatatgccatcacaaaacgaatgaacaagagatactatatgccatgctatcctatcttgctgccaaccagatactactactactacaacaacaacatggctagccagctatcctgtagtagaagcagcacaagacagacactaatggcgtgagctgaaccgtcttctctgtgatgc

SEQ ID NO: 24073 - DNA, 411 bp, Oryza sativa
tgtgatgagaagaaagtcttgacacatgatggtcaagacctcattatacacatgggtcaaccgaatggtcacaagtgttgttcttggctcatacattgaccccaagttggatggcgctagaccaaggtataatggagcttagaatgttttcttagtcttttccggtcttggtgtttggtgtacaccagatttgctatataggcgccgtactattaagagtggtctatgaaacgagcatgtggatgatcttgtgccatattatttcatatgcatgtaggtgcatttggtgggcttatctagccaagtgtggtgagtattctcaagtcccaaacaaagagtgaagtgggcacatcctataggtttgggtaacctcatgtggttttgtaccgtggagtatcctttggagtgtga

SEQ ID NO: 24074 - DNA, 346 bp, Oryza sativa
tctttgtgaagcagtgagaatggacagtaagctagctgctagctttctccatgcgtcaccctagattagtagagacgacgcagctagctagctggttctccttggagctaaagttggagatgcgcaccgatggctgcagaagaacgtaagacaggagagtggtcagcggcctaatcgagtactatcaaatttgcgaagtgcgaggatgaatgaaaccacattgtgcgaatgttctatatgagtgggcgatgctgcagagtggatgggcgcatcaaggacatggccgtgaccacgcctcgctgttacatgtttacctattacagcatcacttcttggcgtgttaccg

SEQ ID NO: 24075 - DNA, 347 bp, Oryza sativa
  unsure (1)..(347): unsure at all n locations
acctgatggggatgtgtgcgatgcacccgtgggagcgcgactcgctgctggcgcaccacttgcttcaccaggcgcacgcggctgtcattatcttggagatcggttgcacccggacggaggnagagctcctctgcgctcgcaaggcgtaccaagcgctgcttcaccactccctcgatgaggacgtcgcctaccgcgccagggacaagccctactgcggtgtacgctattcaacatacaccttgagtgcacgtcgtcgactgcgtgtctgacctctaccgatgatctttctctgagtaccgtgtctcgcgtggatgcaactgctggttcggctggtatctcttaccggt

SEQ ID NO: 24076 - DNA, 352 bp, Oryza sativa
  unsure (1)..(352): unsure at all n locations
ctaagctatccttataactaacanagtgtgacttctaagccctgaagttttatcacagatgagaaaacctaagaccactgaaaggtctcaagtaatactgatacagaaagtcacatggaagagatgatataccaactataataacattaaaataacctgaagtatgggagttggactgaagcttaactttgattcttttttcttaatgaaaatgataataatggtcttcttatatcttattatgtaccaactattttaattntatcatangcaagtaattagtatttgggcaagtagatactcttgctggggtagatgaagccttcctattactactacttcgtactttcca

SEQ ID NO: 24077 - DNA, 245 bp, Oryza sativa
tcaagaaaagcgggtttttccgaagaacgaacggacgttagcacgtgctatcatattatacgattccagctagcaacgctctgacaggaatcgcatcacagaccccaaaaatgcggaacgttctaatgccactgtatgtattgaaaaaaacaggagcaccacaaacgacacagcttagtacgcaagtccccaggaaagtctcctttcagcttcgccgaatgaagaccctacatggaagacttaac

SEQ ID NO: 24078 - DNA, 414 bp, Oryza sativa
ctaagcttagtaggctcggctcactcgtcgagctttctttttttagctggagacttactgcacatggagcttgaccagtactactactagcacgcacaatagtattacttctagcatgcgcaagcagcatgcaagagcttgtactactactactagcataggagaaataattcactgatagagatgcacattaaatctactgtgcaaccttcttattgtggagtgtcaaatgtgctagtgctagtactactcgttggcattcgaagaagcaagagcatatacattagcagattattagattattagctcgctataaatatattctaataagataaaagatgagagagaaaagcagcgagcttcagatctgtagccagctgcagcaccgacttcaagacacaatatatgtatgac

SEQ ID NO: 24079 - DNA, 271 bp, Oryza sativa
  unsure (1)..(271): unsure at all n locations
acacttgaatctaagctncattcatgtcaaatagaccacagttatattattttttataagcacaaacanaccccaattgcctagataataacaggtcgtacaatcttatacacattttcttttgaatgacacgctactgaagggcattagctaatacgatgtatcacgtcttatctcactatgccttcttttctttagagcaaaggaggagacccctcccccgattccataccagaaatgtaagtttaacggaatccacagtctcatccgg

SEQ ID NO: 24080 - DNA, 268 bp, Oryza sativa
  unsure (1)..(268): unsure at all n locations
ggtgaccatccatgtctactataactctatgtcacacctaactattcatgacaactataaccctgtctgcacttactattctcaagatgctaggcattgaatngatgctatttgatctgtatttctgcacacacttacatgcattttaaattgttctcggttttcctttctaaattctaattatatatttttgccttagatacgccctatttcagctgatcctcaagtacacacctgatccccacttacaccgtgtacacctgatcaa

SEQ ID NO: 24081 - DNA, 424 bp, Oryza sativa
  unsure (1)..(424): unsure at all n locations
gtgtcgattgattctatgttcatataattntcattcacatgctatgaccaaaactgtgctcatgggctactatatatgctccttttctcttcagaattcatttcgtattttgttgagcgtgcagaacttatgaagagaacattctaatttgtagaacacactaagagagctttaagtacaccgtacttcattgtgtttgatgattgcanaatgctgacattgtctcaaccacaaaaatgcacctcttaaaattagtgacaaaatatatttgtggatgaaatcaacaatacatttggaaaacagctgagagctgttagaaaaataaaattatgggtaagtacgttgaaccagaacaggctctatagtggtactggtagcaaatgttagatcgggcactcgcaattcacaacagtggctatacgag

SEQ ID NO: 24082 - DNA, 490 bp, Oryza sativa
  unsure (1)..(490): unsure at all n locations
cccctganagcggaagtatgtttgaaggtcatcgggtctttgctgcatcanagttgtgatgttggtgaactgagcatcagtagtttggtgccattctagcgcttgtgctatgtgttcctcgaggttgtattggacctctcccatatgcatatcaagggtattcattctccgggtgatttcacccaagtcccaacgagaggaacttgagcgccattcacctggagatagaggcataccacttgatctgggggttgattgctcatgtccccccactgtatgtcatgaggcacatgccgtangtcctcattggcactttgcccatttgagactccgatgctgtggcgtggagcttggtccatccggtacatncccagtcagctcccaacctgcctcatacgttngcacgggtgttgaggatgatgaaccttctcgttcattctttgcatgttgcatatctcctgatgttcgcctacacaaaatctttatggct

SEQ ID NO: 24083 - DNA, 429 bp, Oryza sativa
  unsure (1)..(429): unsure at all n locations
ctatatgtgaatggtaccatacaatgaagtgaatctcactccctgcatgaccctttccattgagttatggaaaagagatcttgaaatttcctcanatacagatccaacataaaaggatctcagagggttaggcatgcaagtgaagttccttcttaataagctgaacaagtctgaaacattgaacttccaatgcaagggagactaaccttgaagcaactctagcattatattccatcttgggatgatagaactctgctagaccccaatcaataagacaaagctggcgtttctcatgatcaatcatgatattgtgaggtttgacatctcgatgcatgatgcctcgtgaatgacaataatctagtgcctacagacacacctggantaagtaaagaccatcanaatgaaggtagtctgatctctgatgtaaat

SEQ ID NO: 24084 - DNA, 478 bp, Oryza sativa
  unsure (1)..(478): unsure at all n locations
aagagaaattnttatcaacatatagtctaatagctgtataatatataacggtataagcatgattctttaaagctatagattcatataattgatcataaattgaatgtgctaagcatattaaagtacaatactaaagttgtaattgacaaaacatattaaatntatagagcatagaatatgaaaaaatgataagaaatcttacaatttagataagaactttccatttcttgatattntgaaaatgagtaatgatgtctatatccttaacttggaagaatagatcactttcaacgaatgtaatcaaacaatcattcaaatattcttatcccatcttgcttcttaactcgttnttgagttctcttatttgcaacagctggttctaacaaagcctttatattaaccgtgggagcaattgttctattcacgtttcagacctatataacaacaatatggtcttnncattaagtactaactatgc

SEQ ID NO: 24085 - DNA, 443 bp, Oryza sativa
  unsure (1)..(443): unsure at all n locations
gctgatagcacagaagatatggttacattactggactttactccttccatacacatttcacgganaagttaagggcttcttctggttccccattctgtgcaaagcttgaaatcattgagttccatgtcacttcgtccttagcagatatcttagagaaaatataatggctcaggtcaagcctgccacatttagcatacatgtgcattagtgcactctccacataacacctttcttcatatgcatttgtcagagcataactatggagttcctgaccaaacttcatagctgccatgctagcacaggccggcaacacactagcaatcgctacagcatttggtctgatgccttgttccaacaaatatcggaacatcttcactgcctcttgactcatcccatctagaacataaccagatatcatagtgcttgcgataaccacatcaatg

SEQ ID NO: 24086 - DNA, 541 bp, Oryza sativa
  unsure (1)..(541): unsure at all n locations
tctacacacagtccatgttagatctagagctacctctctgcacgaccaactagttaattaagttctgcaagattatatatgtagctagtcaacacttgaacagagatattcagctgctagctggtccttttgaacagtttcttataattaacaacataattaatcattgtttacttataatttgtcctaatattggctgtcgtttcctcgtacggcaagcattatataattacggtcactcatcgatcgtactgtgtacacttgacaaatcacattgatcgtatacttactccctccgtgattaaaaataatcaacttctccttcaaatataagcttttctaggattaaaatntgtatcacaacataaacgtttctaanatattgattataatgcacaaaaatcatgctacatttgttntagtcanggtgttttaagagggaatcttatatattngaccattaatacgaatgaagataattttttataactctaattntactaaacaattacanatgttatgaggaacacacggcgatgat

SEQ ID NO: 24087 - DNA, 372 bp, Oryza sativa
  unsure (1)..(372): unsure at all n locations
gcgtgacattatattttgcagattttcactaacatttttgatnagacgatcgtcntaaattaatggttaaagttaaccgcgtcaactatctatgcttgcacctctcatcaatatacaaagagtaaatatttgagatatatggtgtgattntttggaagaggagaggcaatttacacccttatcaatcatctaaagaacaaaaacaattgagaattaacatttgatacatttgataattaacttttgaggcctcattccagcccaacattcctgacggcctagcagtgtggcctacatccatagagatgcatgggccgtctctttgagagcaagtcctcataggagcagcgcgcatatacccactcgctcgta

SEQ ID NO: 24088 - DNA, 504 bp, Oryza sativa
  unsure (1)..(504): unsure at all n locations
ggctcctctgcttctgttcggccacggcgacgccacgtccctgtattgcgtgccggcgagagcactgctgccaaggagggtgggcgacggcggcgtcgacgacatgatgagaggccaccggtggtggaccacggcgcanggctggctgctcatggcgcgccgcggctcgccgtgcactttcctgtgggaccctttcaccggccgccgtgtcgggctgccccccgaccacgacggcaccgtcctcgccgccgaaggcagcagccatcgccggaggtgcctcctctcgtgctgcggtcccatggacccggccagctgcgtcgtgctcgtcatcgaccacgccgacacggtgctctggtattggcgccccggcgacaaccactgggtgaagaggcatcagcaccagtaccttcagcctgggccgcctaccacgagcaccgcggcatcgtcatccctggcgtacgccagctcacggggatggacgggcgagtctacaccgatctcatc

SEQ ID NO: 24089 - DNA, 272 bp, Oryza sativa
  unsure (1)..(272): unsure at all n locations
aaaaaacttatattatcttgccatgtgatattacaaattccagttcagctaatcctgctacagtctacatgattnttttttgtctgggatttgaaatgttagaattttggtcatccatgcaatgatgcaaaagaacatgacttgattaatgtggaaattgtattgaagctgtcatgttccagattangagtatgtgtggaaacttgactcagattgatgaactgactagttgatgatgagtataaaagagaactacacggngatgagtcatg

SEQ ID NO: 24090 - DNA, 354 bp, Oryza sativa
  unsure (1)..(354): unsure at all n locations
ctcaagctgagatgctngcatatccgtgcaaacgctccactctctggattatctctcgcagtctcctcatctcgcagagcacttgcnggaattgcatgtccaggactgcagcgacttgccgagcatccagttntcgccttccagcctctggaggcacatgagcagattgaagggcatcatcatcagtggctgctgcaacctggagaatgtcattattaccggaggtgaatacaagggcgagcaaccatggtcacttgatcggactgtcagcatgatgcgttacagggtgcccgataagcctttggacgttgacagcgtgtatcgtccacagactagccagtcattggacatgga

SEQ ID NO: 24091 - DNA, 468 bp, Oryza sativa
tctttatagactgcgaccaacagttaagctcacaaaggttatttctttcaagaatgctctgcaggacaacatcttctctaattaaaaccaacagaactcattaaggcatagccaacctgccttgcagctcacgagagtatatgcatcttcacttggagagggtatatatattggtactctcctctagaatattaatgagttggtcttaccaggatctaattcacgggatctccgatcacatagactggggtaccaccatagtataactcacatgggtctcagacccatctacttcgatgcattgtctatcacatttcgtgatagtcccttcgtgaagggatctgtcagaattctcgctgcttggatgtaatccaacgttataactcctgagtttcttaacttcctgacagacttcaatcgtctgttcacatgtctagacgagtgcatactatccttagaactattcac

SEQ ID NO: 24092 - DNA, 475 bp, Oryza sativa
  unsure (1)..(475): unsure at all n locations
tgaaaatcttcgaattcggatatccattgtcgcctatactaatacagnactctcactactctctatatattntatgcgatgtaactcttgaagctgttctgcttctgcataggtatatattcatctnttaaactcaatattcctagctacataaatctttaaatttagagataacattaaatgaattattttgtttctcttataaaaagtacttcctctatttcaccangtaggtcatattaacattctccatattcatattgatgttaatgaatctaaatagatatgtatgtctagatacatttattagaaatgctataatgacctacattgtgaaacagatggagtaaaactttccacctatataattgaacttacaacttacattccttagatatgacgtagaacagatatatgacgacgcatcatatactacctattattattaccaaagtaaatgttcagcgagataaac

SEQ ID NO: 24093 - DNA, 397 bp, Oryza sativa
  unsure (1)..(397): unsure at all n locations
atctatcgaagttctggtactatgctcacggtggaacgctcaacccagttgatggctccctggtcttcagcgatcagatacgcgaggctgcaagtcgactaacggacgcagtggaagcctcttctcagggcacgttccgacccgacagagagaaggacgagctgtcactcgccctgcagactcccaagcatccaggacaaacacgaggganaggggtgattccttggaagattggattcaaggaggacatccacacgtacaggagtcgaatgaggagcaagagagataccgaggcgaagattgcagatcttgagtacagggtatcgagctacgagcttagcatgcaagaggaggtggcaaggaaggtggatgaacgcatggncacacatcggtccct

SEQ ID NO: 24094 - DNA, 406 bp, Oryza sativa
  unsure (1)..(406): unsure at all n locations
tattgtagtctgtttatatcttagtatagattgtatcagagtattanctcgatatatcttagagttacctcattggctaagctataaatatatataatctttgtcttaaagtactcttaaacataagtgatttatactgtctcggctcactgtccgatctatcccaatcgcttagtttagacatatntctagacaaagattatatatcattgatatctgcagccaatcaagtagatttaattctatcttgtttagtatttcattgccgatctggttcacatcacatcggcctgatatcagatgaaacatcatcggcaacacagccgatcggctatcatttgcggacttaattgttcttcttttatttcttgattggtgcatgatcaaaccagctggcatgctcaaa

SEQ ID NO: 24095 - DNA, 403 bp, Oryza sativa
  unsure (1)..(403): unsure at all n locations
tgagatttgacttgactngacttctgaacagacatgaagctgattgctggtcctctatgtgtgacaactaanagaattggagagaatgggaggagacatttgaacaccgtttgacaaagaaatgccgaatggcgagaggagacaatttgcaaatagggttntcagaacacttgtccttagggattgaccatttggctcaacctacagtcaaagtggctctgataccactntgccacgcccagaaatttaacccacatttccagactattttgcgtattaaatccctgtccaggaccagccagtgtacacaaaacgacaagtaatatacagttccaaacataaataaagcgtaaaatacttaccgaagaggcacttagtcctcacaccgaaacagaacgacagc

SEQ ID NO: 24096 - DNA, 454 bp, Oryza sativa
  unsure (1)..(454): unsure at all n locations
tcagaaccatgaagatagaactgcctctgtaccattaatattaactgtcttagttcacgtcaaaattagaattgtgattgatattgaaacaatgtaacggaaaagttaaaagtttatatgtgtagaaaagtctggatgtgatagaaaaattataagtttaaagaaaaagttgggaactaagaccctatttagataagactaacacttttaagtccctatcacatcgaatgtttggatattaattagaaatattaaacatagactattaataaaacccatccataatcttaaactaattcgcgagacgaatctattgagcctaattaatccatgattagcctatataatgctacnagaaatattctctattatggatanatatgcttaaacatttattttgcaaatacgtgtcctttatgtaattagctttggtagatgtctatatttaatactc

SEQ ID NO: 24097 - DNA, 418 bp, Oryza sativa
  unsure (1)..(418): unsure at all n locations
tctatcgcattgaggtggcattcctcctctcatgctgcaaacttacaattttagttgcaatcggaaaccatggtgagcgcggngcgaggatgacgaacagattaataacgagatgggtgaggaacggaggctagcgatcgaggcggacctggcaggtaatcgatccgtcgggcgagacgcggccattgctcgaagggacgaggcggaggtcaacgacggtggagaggccgtcccggaagatcctcgcgagatcgttgacgacgaagccggagcagaacgggcacagcgtctcgtaatagaccgacatcgtgaccctcccagcggcgcatggcgccgtggcgaaggagaacagtacgagggacaagatgatgattcgaggaagaattcgcgaggaggaagaacaagaacaacaagccat

SEQ ID NO: 24098 - DNA, 409 bp, Oryza sativa
  unsure (1)..(409): unsure at all n locations
cgagaaaactagaagaaagattgtacaaaaataccagatcctttacgtattttttgctttgttatagatataaatagaanaaatacccgtgtgtaggggtgcaggcaggtttgactgcgaagccgtttataagcaaaattagtaggtaactcacgggttaccgattaatttaacctataaagaagtctataaatcgatccacttgtatctctagatgcggctagcaggcccataaaaaggaatccatgagttatcatctatttgacctataagtaaactcgtgggtcggctcgcttacatccctacccgtggttgaacgggtgccgtgcttgggccgggcagtcgggcctccggccataaggccattcatagactaaggtaagagatcacgcatgcacatacacgctat

SEQ ID NO: 24099 - DNA, 347 bp, Oryza sativa
ccggagactgggccaagagccgagcccaatgccactcatacctagcttggggccggtcgggtggcgggagatgctgagacggcggcgggcaacttacgctggcccagcggtggcgtatcgactgacgctgcagctgactcggcccggtcgagtggcggagatgcaccggtagaggaggtttgtggtggtaacgagtcgacgggcgccgcagcttactcgatccggccgagtaaaggagatgtggcaggagcggacgtacgcgctggtgacgggtccatgagtgcccgagctgactcagaccaactgagtggtggaaatgcggtcggagctgatggaggcgctggtga

SEQ ID NO: 24100 - DNA, 537 bp, Oryza sativa
  unsure (1)..(537): unsure at all n locations
ggctgttctgttgcttcccatacactgaatagactcgactccgattagtctgaccttgaccaanattgctagtgctcatagaatttcttttctttggactgaaccactagcattgtctcccttagtaacctgtgagctcaccaagcatactagaaacttgcaaagctttcatgaaaccttgtatgtggacttgcatgaatgacagattctgactntattttaacctacttctgacgggaaccacaggtatcctaagaggctgcttgattggtctttcggctgaactgcaactgttcttggcactgcttgcctaagctgaacagttgacttggcctcacgggtttaccctggaatccaatcagataacctgagaccggtgtattctgttgacccctataaatggcttttcaatattacccaatggctgactgagttgaacctcaataaacgacacgagtgagcacactatcttgagactaccccctacgagagatctactttgctgatggacaatgactgtgcttgaatgaacacact

SEQ ID NO: 24101 - DNA, 495 bp, Oryza sativa
  unsure (1)..(495): unsure at all n locations
ggcagcaaagaagattctggatattaaaccagaggatccttcaccatatattatattatccagcattcatgcttcaattgatatgtgggatgaaaaagcccggaatcgaactttattagacttccagcaattgaggaaggacgtgggaagtagtcagcttgattcacaaggagtttcagatgatatnattaacgcattacaagttggagtaacataagactgatgatgtgctgatgcttccttttctgtggagagggaactaagatgcatcgccaaactttatgggtaatattgatctccaagacagaatcattaactctacacaatctgaaagtgaccatagagttgatgttggtatttaggctttaccgtctatctggcaatagttccttacacaacatgtgatgtattnntaacttcatttttcatgcgaaaatanactggttgcacctagtttacatgcctttgctcttntgccatcgagtagatagtcat

SEQ ID NO: 24102 - DNA, 464 bp, Oryza sativa
  unsure (1)..(464): unsure at all n locations
atgctcgcaatnaantatacatagtttgatatatttttattcganatngattctatctgatttgaaggtggttcgccgtttcttatgtgttaaaagaggcccactctgtaccatgatcatatgtgtcttcctatgatcatacgcaaaanataaaattatgggcccctttgatttagaggaaaaacataaaaatcttggaggagttcaattctataggagaatttcctatgaagccttttgaaacaaaaggttgaatcctattcaattctttgaattcctatggaatggacaattctatagagactttggaggacatttaacaagagcttcaacctctttccttttgagatatgcctcttatataatagccgaggttatcatgcgagtcaatctaacatgcattcatgtgttatttctgcatttacaatcctctgtttaaccatacacttctatcacaatctatg

SEQ ID NO: 24103 - DNA, 348 bp, Oryza sativa
  unsure (1)..(348): unsure at all n locations
tgatccatctaaatcaatttaatcaaataagatccaaggctcattatgctaggaattcatgtgtattcattatcttatgggatattaatgggatgatgagttttgagaattaatccatctgattagggaattgggaacttatatcaattactcctaattgatggatggttgatgcgtgtgtactggaggatgattcatggctagttgatgacaattagtngctctatttctcttcctattccattggtaacctacatcaattacacctaattgatggttggttgatggttcatggctaattgatgagaaattagtactctatttctcttcccattccatgactcttac

SEQ ID NO: 24104 - DNA, 443 bp, Oryza sativa
  unsure (1)..(443): unsure at all n locations
ctcagcttatatgttgtacaagagtctttacttatgaacgttatgatacgatggccgtcactggaagcttacgaacaccaactagcacgctattgaactgttcggtcatgttggttgtcatgtaaccccaccggcggccatttctatcgtatgcacgagaccacttatctntatccaacaactcatcttcaagccatttacgaagaccttcggaataccttgcttagtgcctcaacatccctctcaaatatccacttctcgtcaatctgacatatccttaggagctctttngtctgatgcttgtccgcaccggccttgtggaaattagcactgaagtgcctcatgcaccaccggtggtgaaccgatggcaatcctggaacaggagtcatcatggcattcattataccancatgtcgatctgagataatacaaacctccctatg

SEQ ID NO: 24105 - DNA, 560 bp, Oryza sativa
  unsure (1)..(560): unsure at all n locations
aacacaatattgtgatggaacaatatttagagcagaataagataatataccagctaataccctagcacagacttatataggcaaatcaatctttataaatatacttcatccgtttcacaatgtaagtcattctagcattntccacattcatattgatattaatgaatttaaatagatatacatgtctagattcattaacatcaatatgagtatgaaaaatgctagaatgacttatattgtgaatcagagggagtatcaaactatgagcnggtagcagtttagatagcccagccgataccgaaataacttgatatagctatatggagtgatctgtctatataagtggcaaatatacataaaacttagtaaagaagtatatatattaggttagatcagttgaaactccaatattatacttaanntataattgttcaaggatagtttcttgggttcaataaaagactatgaatgatgcatcacanagtagatanagaaacctagagcctaaacaangtaacaatcacttttcatgatgatagatgtcttaactgatctaatct

SEQ ID NO: 24106 - DNA, 469 bp, Oryza sativa
  unsure (1)..(469): unsure at all n locations
tagactaaacagagagtgtannagttatgcgactgatgaagaatttatttcaganataaatagcanacaaaaccgaanatgaatggtcataccttgtcacctgtctnttcaaacacatgatttgcagtagatttcgccaaaagggggctctagacggccttctcctagaanaactcangaaaattcangcaattgtctcggcccggtgtagcactctggtcttgcttccttcatttggccaccttaattttatctcatctgaagtacagtatcaactcctcacattacggagaaaattaatgcaacttgttataaccgcgtcgctttggtccctgcagtatcagagcaggtacagtagcagggtataaaccggctataaccatatatcgagaagaaaagagaagagagagaagaaagcgggctacagatntatagccggctgcaacacggactcccagatattatgtgt

SEQ ID NO: 24107 - DNA, 562 bp, Oryza sativa
  unsure (1)..(562): unsure at all n locations
tcatcacctcaatcacttgctacttgtgtaagtgcatttcatctctattcttgtcaaccagatcttcaagctggcctttctttgccttctcttgcagtaaagtaatgagctgaacattctcctctgactgagagtagtcaatgttctttcttccactgatgatttccatgaccacaacaccaaagctatatacatcaaccttctctgtgatttgtgaagtcagccattcaggtgccatgtatccaggtgtccctttcattcttgtcacaactttgcttatctccctctcgatcagctatgatagaccaaagtcagcaactttcgcattgaagctgtcatctaagagaatgttatgtggtttaatgtccaaatgaacaattctctgcctacactcgtcatgaagataagacagacccctggcgacattggtgattatcctcttccgcgtgccccaatctagtggagcatcgctatgcaaagtatatatgcacttgtctagtgatctctangcatatactcataaaccaggagcctgtgtgatctcttcacacaaaaacctatc

SEQ ID NO: 24108 - DNA, 453 bp, Oryza sativa
  unsure (1)..(453): unsure at all n locations
ctgtatgaatgcgcttgaatcataatacctggaattgctaaatctgcagactgcccttggacagtactatgctgagagtgaagccaaggttatttaaatctttaaacttttcattcctcagaatttatttttttattgtgaatttctgcttgattntgatcttgacatatatgtgtacgttattatataggaacggctnggaggtgatttagctatggccagggaagaattggctaaattgtcagagtcattgaaggtagagtacaagttcatctaaaattataatatgtacatgcttgagcaagtgtttgttgactttgctgattgtgattatcatttctgaatatcacttgacctacttctgttagattattgagttaatggtatatgttgctttgtacaagagaacatgcattgagcgcatatactttgtctttgaatatgtgtcacact

SEQ ID NO: 24109 - DNA, 494 bp, Oryza sativa
  unsure (1)..(494): unsure at all n locations
taagtaggggatattntagtgtattaatgatacatttagtttatattattggtacatatgcagttcacttagcttttaaagcataataagtaatggtgacaataggagaatttatatgttactcggtcaaaatgttntttttagtttgagagatattcttcttgtttaataacatttaaatggaaatggcgggatgtaacttcttttagcattggttatattaaacatttaataagaagcccacgtatctggcacgggctttcttcctagtcggagattaaagctctttttaacatattcatttccatgtggctgttcaattttgtggaagtactcgttcacaaatcaaagttacaaaaatgtatttatatttagaaagcctggactacgcagaatcaggaccctgacatcttntaatctcaaggagaaaggggacgagaaactgtcaatgttgcacgtcactgtatccatcgatcagtgactccctcgcaaaa

SEQ ID NO: 24110 - DNA, 419 bp, Oryza sativa
  unsure (1)..(419): unsure at all n locations
atgctcccgtccgttgcggttgaaggtgtagtgcaggatgttctctcacttttccatttctacggtctctccggctgcggcgagatcacccgatcgcccatgcgccagaacgcgactcggtgggcggagaggaaaggttcgatgatgccggcgacgacgcatcctcgttcagttggcggccgcgagagcgcggcggcgacgatggcgactttcttgaggtccagcttgtccggctcgtaccagttgtggaggaggatcgcgttggggaggtcgaggtactggaagttgttgaggttgacgaggaggtggtcttgtgcttgtgctcctcggccatccacggcgaggaagagccaggcgccgtcgtcgaaccgantagcgcgcgcgccgcgcgccgctcgggaggaagaagcggtgtgcgc

SEQ ID NO: 24111 - DNA, 421 bp, Oryza sativa
  unsure (1)..(421): unsure at all n locations
ctcgagaacatctcttcattactctaactcaatgccttatgtcttnctatctccaaactcacatgcatgtaggcccatagtaataagctccagacttcttcaaaaagggaaactctgtaaagaaccaaccttttctgaatgttatgtttttgcattcatgtattcacctagatcaagtaacccttggattcatatatttgatatttattttatgttattatttctttcaggaagacttctgcgtggtgcacaacccgaattgatggacactctaatccagtattcgaaggatggcgatgataacaggttacttgcattaatgagtgaaaatacattcttgatggaagatgaggaaatagaggacttgccttgcaatgaagaagaggtgcatcttatttcttgtccctcaactttagacctg

SEQ ID NO: 24112 - DNA, 513 bp, Oryza sativa
  unsure (1)..(513): unsure at all n locations
ctccgctgactattctaacaaatgtgatatttgtttcacaaatatttgtttccatggagactgtacgccatgcctacntaatttatcacctctttatacaatagttatctatactacacttatcatacacacattgtgtctacaaatctgtagcccgctactcctatctctcctctttgatcttctcgaaatgtctttatagctggcttataatttgttattatacctgctctgacatgtgcatctagcgcctaaacgtcaatgagtattagagacaaatactggatcacataatctttttggaaattaacgaactgccccttttattaaggggcagttgcctaaacacaaatacantttttttaacaattggatccatgtactgatccctattaaacanaaaatcaatcaattgcaatggacaagtaaactgccctcaagcaatgaagcaatcgatagacagttcattgacttgttcatctgatcacaaagacatgccatacccccaataca

SEQ ID NO: 24113 - DNA, 370 bp, Oryza sativa
  unsure (1)..(370): unsure at all n locations
taagacattaaagtggtcatataaatggttttcgaaccatataagaataattgagattgatgaacaaaataaagaatttagtagaagtttctgaatgagtcacaatattgggccatttagtggggtaataaaattaagcctgactctgatggaagattcaaacaattcaagtgaggtggacaggtgcatgaaaattaaagggtgggaattcattcaccggtactccattctaatgacattntattgtcaagcaatgcatattgctcttagaaactaanggaattttttccattgaatatttttggtccgaggagtactgggtttatatcagtnagtcatacactgacatatagaaataatttgagagaat

SEQ ID NO: 24114 - DNA, 421 bp, Oryza sativa
  unsure (1)..(421): unsure at all n locations
tcaaagtatgtaatgagctntagtttcagtacctcttctgcagacaagggcttgtcacgttgacaagatccaccttcattccagtcaccaccttcaaaatgcctatgagattgagtgcggaagagtttcaccccattgggtctcattgctttgntcacaaatattatcttgatggacattgtatatccatagaatgaggaagataggttgagtggcataacgacaganaacaggaagttagtaatgttcaccttggatacatacgaaggctactaaggcccaacaatcaaataaaattcacaaggtggaaatatatatattcaagtaaaacaaaggtggaaaagatatttctatatctatactcctttanagaaagtagtgatggtggtactgaatctgcaccctatctacttttatattt

SEQ ID NO: 24115 - DNA, 545 bp, Oryza sativa
  unsure (1)..(545): unsure at all n locations
nttccagtctctcttggtaatgtgantgctgtgatgatcgatctactgatctctgaatacgggggtggtccttcggaatcgaatcgatcgtgcagtgggcgatggatggatggcaaagccgggcattgcagcaggatccgagggcgacttttgccgattggctccacgttggtgctagcttggtcgatcgacaactactctactagtcgatggctgctttgtgtttggatctgcaacattggatgaacagtgggaatggcagagtttgcagctgtacttgagctttcggtcaaggggctccctccctcacacagttatgaactccttccctgtcctaaaatataattatttntaaacttataacatagtcttatatatactnatttaattaataatatctataanagtaagatgttntagatagaaagagttacgtatctctttaatgataaatttagtaacatgagctttacgtgattgatngttttatttnttcgtataatagtcaagaagaatattgacttacactatttaaatgttatatt

SEQ ID NO: 24116 - DNA, 315 bp, Oryza sativa
  unsure (1)..(315): unsure at all n locations
ccttctgtatgcctaaacacgcataacccctcgtgttcatatgtactagaatctctgcgaagacatattttcagggcggaggcgagcgacactatcccgctttacagagataggtacaaatttgccatcggagatactaatataatcataactagaaagatccctccctgataacatatgaatatccctatgatgccactcaaacgtagccatccccattgcaacctcggtcgatgtatccgtttgaacaatatcaacatcatcgccgtcctcttgaattaaacattgatgcaanggataatgcacacaacaatt

SEQ ID NO: 24117 - DNA, 390 bp, Oryza sativa
  unsure (1)..(390): unsure at all n locations
ggcggtggtcgtcgacgacgacgacngtgacggcgacgttgattgtgtcacatgggcatcgaccgatcgatcgctttcacggcggcgccggcgactattcaacgcggaattgaaacataataatgcatcggagcagatgagatcagaacgagatcgcagcaatagcaacaatctgacggcgtccttgatggctctgttcccccgatcgatatgctcctcctttttttggttttttgcccaatcgttggatcgatcgatcgatcctcatcaatgacgatatgctcatgcatggaccacgacaagggcctagctaccctagctatagctatagctactggtttattgagcggaattcgcaatcagtaaaagctagcagcggagatagctcaa

SEQ ID NO: 24118 - DNA, 365 bp, Oryza sativa
  unsure (1)..(365): unsure at all n locations
tgtgagacagcaaaatcacccacctacggagacgccgatatccttatccgcgacctgattcttccgcagcttccgctccaaatgcgccgcgatccatatggtcccgaggggccccttcttggccaagatgaactgcgagtagaacattntccaccccccaccttcctttctcagcacctcaccaccaaaccctagctcagctcagcaccacccanacacacacacaccccaagcaaagctcccaccctcccaacaccctccttatcccatctctccacgccccccaaattccaaaccctatgcggaacaaggaacaacaccccccgaagctcccccgaaaccctatattcgtgccgggaaaccct

SEQ ID NO: 24119 - DNA, 448 bp, Oryza sativa
  unsure (1)..(448): unsure at all n locations
taagtatntgctgtgcatcataagaggcaaatgaattaaatggttttaatgctgacatgcaaatgagtaattccaacctcatcaaacctgttgttcagctcttggctaattntgtcaatcataccaatgtacacttctcttctaaaatgatcattatttgtttggtccggataaaaccttggagatatttaattgaggcnnacatatttaccatcaaagggttggaaacttggatactnatgttattgcaaaatgaaacaatagttccttgaaaaaaaatcttcccaatcttcagatcttaattntttgcattctttccttggccaaagttacaattgatattgcattaacaatatcttggtctctcttttgcaaacacaaacacaacttatttgtatatgtaagaaatgacagcatcaaatgtgcacttgannnacaaataaatgat

SEQ ID NO: 24120 - DNA, 316 bp, Oryza sativa
gtactcgccgctagcggggcaggctgatgacaagctaaactttctagctatccagatcgttcgcttgttgttttattaccaagagacccttaacaagatgacacgacgatataatccacatatatttacaatttccttcagctcccaacaaataacacatctaggcgcgccatcccgtttcacactattgctgattatcagacaagtcaaacttttgcagggtgcttgctagttagttgaggctttacaccaacgcgacagcgccgttcctagctagtaactcagctcgctctaccgtgttacttccatgcacttc

SEQ ID NO: 24121 - DNA, 515 bp, Oryza sativa
  unsure (1)..(515): unsure at all n locations
actggcttaaagttagaatgtggttatgtgaaacttangctttctattaccgatgcagtggtgtttaaagaagggttagataatcggatgtaaatccaatatgaaactatnggttctatcttattcaaaatgccctcttctttagttaaattgtgatgtaggctgtctttcatacgttgacacaaatctgtttcgttaggtcattttgtttcaatctcantaatattctcacagtaacatgtacaacattgctgattgtctatccacattataacgtgaatttgtttgcacaatggactttcagcatttaagcgaacaaagtaactgatttgataatctacacttgcaggttgagttttttgacctggaagttctatataagaacttgaggcctgaatatatatccaagtatgctattgacagtagcaagcacccccatctaaggatcatgtcatatatgcgagaagtatgcgccttgtatgaattctgatatcagcttgacatatgtcatatat

SEQ ID NO: 24122 - DNA, 351 bp, Oryza sativa
  unsure (1)..(351): unsure at all n locations
ctgggtaaatatgagcactgggaagaacgcatactaagctggtgtggagtatcgtcattacttattacaaggaagggcaatagtgatgggaatgacttgatcattntgattatccaacagctacaagtgccatgggatccgggtgggttgcattgtcagaatattaattgccatcgacttgcggacgaactcaattttaagaagaggggatcggtaggaatagagtgggctgccaatgggcctgtgcaaccgttcattcgagctggtccaagcaaacccaagggaagaaacatatgcaacagcatcggttctttcacgggaggaaaaacacagaaaggggcatgaccgcga

SEQ ID NO: 24123 - DNA, 507 bp, Oryza sativa
  unsure (1)..(507): unsure at all n locations
actcaattttgacctcgcacaagaattaggttaatgtanggtcctttctgcaaaagctcaagacacacagaacagtcataggattggcgttgatttcctgaaaccctagaggccctcttgcatattggcctgagaccgacaggtggaccccatgagtttaaaatctgaaaatgtaaaagataatactaaaagcctctactttttaacagcaaaacacctaaacttgtaaatccatataaaatcaaatataacttattttgagatgattcanatttctataggttcacaaaactatgaactttaatgtggtaacattaagcttggcaccctcagcacaaaccttgtctctaaaatgggtctaagataaatcatacatanagcatacancaacttataaaatgcatataaagtacatctcaactcattttggagcanactcagtttctacagattccagcacttatgttcttctatatagcaanatgaaatagtatacatactatacat

SEQ ID NO: 24124 - DNA, 482 bp, Oryza sativa
  unsure (1)..(482): unsure at all n locations
tctgtcctnccattgactcgcttagcgcttatgatctgaactttatccccggcttcagactgagcaaggtcatgcaccaagtcgtgaatattgtacttaactcttccatcaacctctaatcctttctttgacaaatcatgttggtctacctcttgaaggaatgacatccacaacaagtgctcaaaacagtcgtccgctttatcagaaaccggctggcaaccatactttgatggttcaacaaagccaagagcaacccattgctgaataagcttacccttgtcaatctcatggtttcgaggaaacaccgagcaatacgcgaagcattgcttcagaacgggtggcatttgatcatagctgagtttgagagatggcangatggtctcctccttatccagctgccanatctcactgttcctgacagcaatncatgattcctcattcctcttgaacctcagcatgcttccaagggcccttcgcgcagc

SEQ ID NO: 24125 - DNA, 414 bp, Oryza sativa
  unsure (1)..(414): unsure at all n locations
actcagcttattaattaaattttgtactagggtgctctctacttagcaagttgttgtcctaacaagctcatttctcaagtttctacactaaatcacaccaacttgccaagttgatgtaccgtgaatacagtttactcaaattataatggtaaaaataagggtccctttgatttgttggaaaagtgtaggaaatttaaaggaatttaattctatggaaaaaattcctatgaaagcatttgaaacgaaggattgaatcctatactatcctttaaaattcctatggaatgactaatcctatagagattntagaggaaagttagcaagaggtccaaccttttgaaaaaattcctttgagtctatctctnntcatccgattcctccgttttcctatggtccaatcaaacgggtatttct

SEQ ID NO: 24126 - DNA, 461 bp, Oryza sativa
  unsure (1)..(461): unsure at all n locations
ngctaacatgataatgatatagcaacatatggcagggtaaatgtatcttgcagttngcaattcacgtagaacaatgtcaagaactngaagagcttcctgaggagcatccgcttgccttccagctaaaaacatggctaaatggtggagatcagcgcgtgcagcaaatttgatcacgaccttaaatggtctctcacgcctgaagacaagcagatgaatcattggaagatgaatttatcanattgctgaatgttgatatgtccagagagtacctctgtgcaccttgcccaacagcaaggctctcttcctcatcctgcagaataacgtcaaaggtcctagaagtaaatggtaatggaccagctgtgtataagctcttccttccatcatagactggaagaccgccacncacatgagactgcctatattgtgnacaatttctccaatgacagcacgaatgacaccac

SEQ ID NO: 24127 - DNA, 310 bp, Oryza sativa
  unsure (1)..(310): unsure at all n locations
caagatatgatcatttactgattgtgaactgtagtctctgtggtctctttcgtctcggtctttgtgggcttggagtccaatcttcacgaagtctggntgtggtcttgtgttggaccgtnacgtttgaagactcgttgggacattanggtggctccaccgcttnttcctccctctatatatgagcagatntttcgttagcagntctttnttcgtttcctttccgagttctttnntttttcttccattcccctggcanatgtctccatggcctgttacgttgtatattaaaaatcttgctctcttctaatat

SEQ ID NO: 24128 - DNA, 395 bp, Oryza sativa
tgtgcggatgccaaggagacaaggaagagagagagcgcgtgatatgcttggaagagtgatatttagccccgggtggtattaccaaccgggactaatgtttgttcgagggcttgacatgacctgtggctattgaaccgggacttgccaactgggactaaagatcaaaaagtgccgctgggcttttgaaccgggactaaacctattctttagtcccgggttctattcgaaccgggtctaatggtaattttgcatgacctagcaaagatcacttctccagtagagtatatattgtccggtttaactactgacagcatgtcgttattttctctgaatagagatattatgcaaaggacaactaccaatgtatttgtgtacgaaagttcatgtgccattaa

SEQ ID NO: 24129 - DNA, 422 bp, Oryza sativa
  unsure (1)..(422): unsure at all n locations
tcatgctcncgtccgttgcgggtgaaggtgtagtgcangatgttctccacttcttccagcggcaacggccacgccggctgcggcgagatcacccgatcgcccatgcgccagaacgcgactcggtgggcggagaggaaaggttcgatgatgccggcgacgacgcatcctcgttcagttggcggccgcgagagcgcggcggcgacgatggcgactttcttgagggtcagcttgtccggctcgtaccagttgtggaggaggatcgcgttggggaggtcgaggtactggaagttgttgaggttgacgaggaggtggtcttgtgcttgtgctcctcggccatccacggcgaggaagagccaggcgccgtcgtacgaaccgaagtagcgcgcgcgccgcgcgccgctcgggaggaagaagcggtgtgc

SEQ ID NO: 24130 - DNA, 477 bp, Oryza sativa
  unsure (1)..(477): unsure at all n locations
ggattgaagccctggaagcggaagacgcttgaatgtgtcgttctgttgctgcatcatgttgttgaacttggcgaactgagcatcagcattctattgccattcttgcgtctgtgctatgtgttccgtgaggttgtattggatctccctgtctgcacatcaagagtgtccattctcctagtgatttcaccctagtcccaacgataggaactcgagtgccattcacttggagatggaggtacttcacttggtctggtgggttggttgtccccccattatatgtcatgaggcacacgccaccggtcctcactagcacttgcccagcttgagactacgatgctgtgacgtggagcttgagtccatcctagcgcatccccagtnggttcccaacctgcctcatatatctatacgggtgttgatgatgatgaactattcgttcatttcttgcatgttgtcgtctccctggatgctcacctgcac

SEQ ID NO: 24131 - DNA, 400 bp, Oryza sativa
tatttcagaactctccaggggaacagttagaagcctcgcttcatgacgggacatcatggtggaccttccaccatgattatccggcagcacttgtccctaccacccgggtagcttcaacaagaactacaagagtggcagtcacagcaacagcgagcagcacaggcttcaatccgactccaagtccattaatgagtccagctcagtcagttcagccaactctgccaactcagccagaacagctcaagaagtttggagaaaagcccgaactctacttcaattgtaacaaacctggacacatggttggtaagtgcccgaagccaagacgtgctggacccaagcttggtcaggcccgtctcaatcatgcgtctacagaggaagcacggtcagcaccagaggcata

SEQ ID NO: 24132 - DNA, 421 bp, Oryza sativa
ctattcctgccctaatcaggatcagatcaatttgcctttatataaaggaatgtgagacctacttcccaatcaacccccctattaatttcatcatttaccccaccccttccaaaggatccttcatggttcagaagcgctatcacgcctagcggtggtagtggggcctatgtcggatagtcagatccaataaattagcaagcataacatgaaaattagttatataacaccaagatagcaactaaataccacccaagcaacgtcagctacctaatgcaccatatagggggtgcctagcgccatactttagaagacagtctccgtatattaaggatgaaagcgctatatggctatgttgatgtacttctggagcaattatgatggctcacattcaggagtcatgacatcacaaacttcataaata

SEQ ID NO: 24133 - DNA, 324 bp, Oryza sativa
atacagtgagcgactctgtaggattcctgggtgacctcattacaatcgctcctgagtcttgaaagagcgattggatccatcgctgatcttctgtgtggctatccccatagcttgctgagtgtgagcagctatgcatatatgatgcataagggaatccatcatggtaaacattcctcatatgctgatcaaaggtccattctacaactccacaacaaaatgacagacgctctagtgcgacagcacgcgattggatatctgtggactgttccgtagactatcgtactccgtacatcgcggccacagtcatgtattaccgcgctaact

SEQ ID NO: 24134 - DNA, 446 bp, Oryza sativa
  unsure (1)..(446): unsure at all n locations
tcaattcaagacttcccagnggatcagtcagaagcctcacttcatgacaggacatcaaggtggacctatcaccatgattatccggcagcaccgatcctaccacccaagcagcttcaataaaacctacaacagtggtagtcacaactacagtgagcagcacagtctcaacccaactccaagtccactaatgactccagctctgctagttctgtcaatcctgccagctcaacctgatcagcccaaggagattggaggaaagcccgaactctgctttaattgtaacaagcccggacaaatggctgataagtgcccgaagcccaggcgtgccggacccaattcgtcaagcccgtgtcaatcatgcgtctgcgaagaggcgcaatcacaccagaagcataatatgccatttctgtaacctacaccacatatactgttgatctgtgcaccac

SEQ ID NO: 24135 - DNA, 524 bp, Oryza sativa
  unsure (1)..(524): unsure at all n locations
gcttctgatanaaaacgggtggttctagcgagatttgtatatgagtatctttacgcttngccgagatgtaaggtgccattntatgattccatttcttaataccatgaccaaaatgaactcccgcttctatcatctctctcaaattgatgttccaatatcttcttgtcatattttccacacttccttttgattttttcttttatttcatcctaacctttcattacgaaatttcttttcttttcgaagaataagatagagccgaaatagctggaaataaataataattgttccgatggaaccttctacatggtataagcataaccttaatgaattaactaaacttccttttaaattaaaataaaaatagaaaatctaacctcttagcgttctataggtcaaaatctagtttaaagtaaaaaatccgctctatgtatccctaaatcatataaatggcgtaaatggtgattctgatgtctcatacaaattgttngttacgtcagaatcagaagaaacttattctgtat

SEQ ID NO: 24136 - DNA, 484 bp, Oryza sativa
  unsure (1)..(484): unsure at all n locations
tcaacttatatagctgcacgctgactctttatatatattcaagtctgtttggttttaagcaatcgattggatacaatatcattgcttttcgccacgtaagtgtgcatttatattgaccaatattatggcttatgctgattatatattgtggtcattttctaggcggctggtaaatcctttatgagtttatttactctgattntacaccacatatgccatatatttccaagtgtggggaaaccatgtgtcttctaaggacttaagcacatctgttaaagcaatgtgcgcatggcgtatgcccaatactttggaaatttctttattcacaatatacaagcttctttatagctattttgctatatcactcatcatcatttgccnagcagtcggtatatcacttgatcatattattccgggagtcacaccgcatatgctatatattggtataagacacttggttgactattattatcataaaccactc

SEQ ID NO: 24137 - DNA, 414 bp, Oryza sativa
  unsure (1)..(414): unsure at all n locations
actaagctntaacanaatggtgttgaccacagtagtgtgtggccaagtttattactgatactacagccttaaacatgctaaaataatcacaacttcctcaccaacatacagtgcaggtgactaattgagtacccaagcatcctctagcataacgatgttacgaatgtaattaacatcatgcaccctataccccacgttgcacaggcacccatgagctataaaggactcatcttcaaatgggtattgaatgacagataaaaaagaaatcaaactcgtggactgattcgggcttaagaagagattgcccgtcacagaaatcaagcaatatgactacttgctcctctagaggacgatgcaaatcaacaaaacatggtactaaaccatatataattctgggtattctgggtcacaagc

SEQ ID NO: 24138 - DNA, 417 bp, Oryza sativa
  unsure (1)..(417): unsure at all n locations
tgatagcgtgcacacaaacacacagcaaatggtatgtctggcctataagtagttctatacaacgaagatccaatcatacttctatattcctttagatcaacagcattaccatactgatgacgatccaacatgactgtagaaccaattggggttgatataggcttgcaattctccatcttgatccgtctcagaagatccttcgtatacttcgtttgatgcacaanagtaccttgatgtgtttgcttaattcgcaatcccaaaaagtacgataactcacccatcatgctcatgtcaaattgcctgtgcatagtctcagcaaactccacaacctatgcgtgagatgagcaaccaaagatgatatcatctacatatatctgaacagatagttggtatcactatgcttaagaaccaaaagcg

SEQ ID NO: 24139 - DNA, 487 bp, Oryza sativa
tcagctaaattcttctgtagacggtgcaccttgctcttctacttgcagatgttgtctcgattccagcttttcctgtcatgaactgctttgactcgctccacacttactgcatccatagcactaagcatatgcaccacatgcaccatagtggcactctcttcaccatcacgacaggtatatgttccatagtcttgaccatgaggcttgtgacgatgatattggagagcggatgaatccaactcttcttcaaagtgttgtcgcaactctccaatggccaccagagctacttcttgacacgcatggcagtacaatcttcctacagctgcgaacttgaagacagaacggatttactgcacttgcaacgtacccgacacgaacttctctgtcgggtatggaaactgacatactcggagcactataacaactcaaagcataactgagtcctgcaatctacactgatcaatttcggatgggagattaagacatg

SEQ ID NO: 24140 - DNA, 406 bp, Oryza sativa
aacattatacatgctcaccttgagctacccgattcactgaccaagcttcatagcctccacatagtgaactcattgttagtgatcaactgaactaatgagggacaatctcagtcgaatgggcagtaacaagaggtgaatctgactgaagagatttggcgttcgatatgtatgcactaatgcgtgattcttgtaacctagtggagcacattactgtcaagaaaaccatgaaattcagttacatacggacaggcaacactgttgatattatctaacgatggaaacacgggatgaattgacccccaggtgaatactatgttctagtcctcccctaaagcttctttttatataaggtagatggtaattagatgtttctcacacactgcggccacgtggctcaacattaaaa

SEQ ID NO: 24141 - DNA, 271 bp, Oryza sativa
gtaaacacgcggtgttgggctgaatcccgtgattccaccggaaatgatgcccaatactgcctcgtggtgcgttgaccttgtgcaagtttgggacagaaagggctctatgcttctttgtaatataagttttcccgaagatacttctcacttagcagcgagaatttgtaaggcctttcaaccactgaaccaataatgtgcaccccttaactcactctaacctgtcatccgaggtccctctgcagtattttctgcctgttatactgacatgaca

SEQ ID NO: 24142 - DNA, 437 bp, Oryza sativa
  unsure (1)..(437): unsure at all n locations
atgccacaatttttagcaagctggtctacttgccatagagtgagttttttgccataacttgccacaattgtggccaacaaattcttagctatatattgtatggcatgccacactttgctaatattttttgtagtaaattatggaagtcatccaaaccgccccttagacatgggagagaaaaagttaggatgaagacgatgagagaaggaataatagtagatggagttagctgggtgaataaaatatatgtgggtctctctgaggattcaccttgcagaaattcaatttcgtagaaatgtctttactgaacaaccactactacagaaacgagttntctgtacgaagacctctatangntgcaagcggaccgtanatgatgacgtctgcaagaatcactttcacatgcagctcgttaagaggcccgcatggaaaaacct

SEQ ID NO: 24143 - DNA, 308 bp, Oryza sativa
  unsure (1)..(308): unsure at all n locations
acttatccagtgcatgactctgctcattgatctgctgatgatcaacagcatcatacactgcttggatctggttgagcatttgtaacagcctaatctttgacaaccttcataccctcagcctggtgccactcactgagatagctgaatgctatgttcacaatgaattgaaatggtcggctgtgcaactgacttccctgctaaaaccaatgcagcagtagtagccatttgntaagaacacgagggctcgttgttgctctctcttggcacgaaacaaaaaggatcacaaagtcgaatggatgtgcatgtgt

SEQ ID NO: 24144 - DNA, 170 bp, Oryza sativa
atgacacatgtcaagtacaccatgcttccttgtatcactggagacctctcacattcaagtacccgaacacggagatgcgatcatcgactttagcatcgtcacaagcttttctctgtccaaacaacatttatggtcctgatttctactacgaactgatggctacggcccgc

SEQ ID NO: 24145 - DNA, 402 bp, Oryza sativa
  unsure (1)..(402): unsure at all n locations
ggcgccgtccgacgtaacggaagagaacctgtttgaaatggttgctcacggcgttctccctgctaaggagatcatcgggtggcggccagcgtgcggtgagatttttccgacccccgatacacatgagattgtggtcttctcgcattttttctacggcggcttcgctcttccgacctcgaaatatttccgcgggatcttgaacttctatggaatcagctggcatcacctaaacccaaattccatagtgcatatcgccaatttcgtccatgtttgtcgaagccttttgggaatcaagcctcactttgccctggttcgccggatcttcttcctcaaaccccaaccgaacaagagcanaccgtgcgtagtcggggaggcaggattccagctgatgggaactctgag

SEQ ID NO: 24146 - DNA, 396 bp, Oryza sativa
tgcgatgtcacattggccacttgtttttgagaatttattcctctgatacagtatctcctcacattatgctctgactctatcaccctcatcctatactaactccacatacacttctgtaggctagtgcatgctttataactgcatcctagaactctattttacaactcaataactggcctatagtaaagacggagtgatgtttctactaccttcgaaccttaaaacttactacttttagtgacaactgaccatcactatcctcttcaatgaatcatctgcactactgtatcataagcgtgcattccatcatctcaattgccttggcttttcactccttactactcttttcacaaacacttatctaatcgcaactgtcacccttacttttctaaactc

SEQ ID NO: 24147 - DNA, 495 bp, Oryza sativa
  unsure (1)..(495): unsure at all n locations
cccgcgtatcagaatttggccttgcaaggctgcttgtagataatgatgcccacgttaccactggtgtcgcgggtacttttggatacctagcaccaggtacttattctctattccacactgtgatgctttcaatcaaaacaaaagatcatgctgtcctgcataattactgctccnccttttgtattgtacagagtacagactaacagtagaagcttatgactgttaagcactttctccgtcctaaaatatagtaacctaatattcgattagacaccacctagtactaaatccagattcgtagtagtttgtactactttgtagtcaagctactggagataaatcgagacanatcatgcttttttaagacaacaccaatgctgcctgttaaatctgtgtgagaccttccatcagactgacatggtcattttaacntatatgacagaaacctgcaaatggcatgctctgaaaactgagtgatactttgagtgctttgtc

SEQ ID NO: 24148 - DNA, 448 bp, Oryza sativa
  unsure (1)..(448): unsure at all n locations
ttgttctggaagagcatgttcgtgtggcatgttgtgaacttacaaacaaaatatactggcagttgatgattatatatggtgatatccttgcaaatttctggagaccacaatgtgaaagctgtaatttntgtctatatttttcacatctcacaggaccagccgaataaatgcacagataccttgtttggtttgatgtacanacatgtgcctactgcagagtgcccaactatgaaagagtcgccttcttttaaatactttcttagtatatattgaataaattattacagtggtattaatatttcatatagctctaaattaatatgtgacctacctgcctgtcaaatatattcatgtttgcctgaaaatggaacattggtatgtttagtccaactcttggaattaagctgacatcacatgtatagtgtgatgagacccttatttcataaat

SEQ ID NO: 24149 - DNA, 327 bp, Oryza sativa
atttaaattcaagactttactctgtcaagtgctttcatctcctccagtgatcactggttgtaatcacatttgtcgagcattggttcagattcttgaaaaccttaaccttcatggctccatatgcatacaatctgaagcatcaacggtggctcggattatccaactagcaagtgcaaatgtttgcttgatatttgattattgccaaacacgttcgggtgtttgatttgcttcagcgaatttgtgatgatggacaccacgcgttgcggaaggtggatcacatggcatggaaccatggatggatagttccgcccttatcctgtctctttt

SEQ ID NO: 24150 - DNA, 494 bp, Oryza sativa
  unsure (1)..(494): unsure at all n locations
cgcaagataagttgaaatagttggaaacaaggttgacaattttgtactttngaacaacaggtttcaaaagaaataaaagaaagttataaaatcgacatactaaatntattttattgcagcaagattaaataaaacaacattgtaaaacttttgctggtaaatgagccattagtacagtaatagatgtacagtactaataacactggaataaattttgaatgagaaccattaaaagagattatgaagtgcatgtgccattagtttggtttaattaaaagagaaagggaggagaacagttctacttttccaatatttttagagggcttctatggataaccatttggcataacctatggtcaaggggctctgataccaacttgtcacgcccgggaattctatttcaaattctaaacgcttacatgtgtgtgaaccctcgtccaggaatcagccgaggcacataataacanattggatatagagtacaattattactc

SEQ ID NO: 24151 - DNA, 479 bp, Oryza sativa
  unsure (1)..(479): unsure at all n locations
attccctctcgtggtaaggctttggttccagagaattctgtnttttatatattgtcttctgctcttccggtgatctctacagttgtcaagaataaaaaggttgttaatgtggataagcctatgatcccgcccaagacttttccggtgatcgccgacggtgataaggaatctaaggtggttcttcatggtgctttgactgccggtttttctggaatttcaaaatctggagctgttggggataatggtaaatgtatcattgatgatcctttgaaagctccaatttcagggactgatattttgaaaggttcactgccttagggattgatttcttctaaatctgatactcctagacattcaaattgttctgggcctagntgtacaagatgcttgaagttgggccatctggagtctgagtgtgttaatagggtccgatgtgcctcttgtaacaagttggatcatatggccctcagtctgttgaa

SEQ ID NO: 24152 - DNA, 493 bp, Oryza sativa
  unsure (1)..(493): unsure at all n locations
agaggcaacttgagttatagaaactcaccagaaagaggtggttatggatgcatatattttatgtcttctgcatactctagttatgacttttgattttgttgcatgcttgtttgctctttcatttgctgatccccatggatgacatcataatattgactagtgaattgctttcctgtaagctcattatttatatgctatgctgccagggatgcatcatatttcggctgtcatctcctttttacacaatngcgcacaatatggttaatgaagataggttgactgaatttttttttaaggatgacaagctttcaactgccaagctgcattttagaatgcattaatatggaatgccttttctaagttctatgtcatctagaatacattacaattcttatattntataatcgtctctcataagctgggttattggtatggaggaatatttttccatggcatcgtgattatccttcctctggatggtaagatgatctta

SEQ ID NO: 24153 - DNA, 397 bp, Oryza sativa
  unsure (1)..(397): unsure at all n locations
cctttnttgtgcggaacatnagttgacattgtgtgattggtagcctctttttcacctaccattntctgttacttctnttctcanatgcattgcaatgtattagtgtttgtagaatttacatgaatataaatgacaccaactgtttttccatacatggaattgtattttgcagccactaccttgacgagttggcatcttcttgtcacattttgctccctccatgtagccatattgatgaagttcttcgagcacaagcctttcgactcgagaactgtcatgggatntggagtgctcaatggcatctccattggcctcctcaacttgagtcttggttttaattcttgtggattntaccaggtacaaggtttgcgatcttctttacgttgattcttgtacc

SEQ ID NO: 24154 - DNA, 553 bp, Oryza sativa
  unsure (1)..(553): unsure at all n locations
tcaacgcaaccttgtggtttaagtactccactataatagttatgtgttaaaacattacaaaagttatttctaaaggtagcccatgagtccgaggcaaaagggtcatcacacaagaggctgcacatttgaggaacatgtgaaaagtattatcgcggaaatcatttgtttagaagtgtgatgaacataattgtacattcaattaataaagttggaaaagtggcttacagttgtcatttcacattgattggatatgaaaataatggtttatacaaatctttgtgcccatatcanttgttgccaacaatcaatagaacttgatagttacttttggtgttccttttggtatgtactaacatggcgtacatatttacaaacttgccgtatcctttgctgagatatacctgctttttttctctgtatactggattgctcatttgttgtaatggatgcctatgncatgtgacacaattatatattcanataaaagccttctcagtctaattgattcgagtgtggaatagttattgttctgtaagttgcagatcactacttg

SEQ ID NO: 24155 - DNA, 389 bp, Oryza sativa
agaaatagttgagcagaagcttcagcacatatccccagctcagctgtagcaaccatggcaaggaaatcagaaagccaaaccagagcatgaagggtgtttgagctccacgaagaggagcaaggacttcatctcctggagttggtactccagctcaagaaccaagttagatcaataacactcagcaggaggattagctgcatgaggaagagaatcaccagtagcagatcaagcaagatgacggagagcaggtccaggaaccaaacggagaagaaccagagaagcaccaaatagccaagtaaatcgaaaccttccaccacacacgaacagatcatcaatcaaggtaatatagccaagaaaatgaatagagatacaagagagagagagagaat

SEQ ID NO: 24156 - DNA, 399 bp, Oryza sativa
tcgaagttctggtactatgctcacggtggaacgctcaacccagttgatggctccctggtcttcagcgatcagatacgcgaggctgcaagtcgactaacggacgcagtggaagcctcttctcagggcacgttccgacccgacagagagaaggacgagctgtcactcgccctgcagaactccaagcatccaggacaaacacgagggaaaggggtgattccttggaagattggattcaaggaggacatccacacgtacaggagtcgaatgaggagcaagagagataccgaggcgaagattgcagatcttgagtacagggtatcgagctacgagcttagcatgcaagaggagggtggcaggaatgtggatgaacgcatggccacacatcggtccctagatccc

SEQ ID NO: 24157 - DNA, 504 bp, Oryza sativa
  unsure (1)..(504): unsure at all n locations
actcagcttgtagttngtaaattaggctgngtttgtatgttgtggatgttatctcattcccttcgcacgagaaacagagcgatccattagcgcgttattaattaagtattaactattttctntaaaatggattaattagaattttttaagcaactctcgtgtagaaactttttgtaaaaaacatattgtttacagtttgaaaagcgtgcgcgcggaaaacaanggagagggggctgagaacaagggcatgccaacagacccttagaatgtagcaacacattctgataaatgtttttttttggcaaaaaggtcacaagttgaaagcgttgttttttggactgatcaccacggactttaggagttaatttccaccttcattgattgatattangaggganaatactacgctcattgatttacgatagaatatcttataggaagtaaactacaatcccgtctgcttatntcggacgctacngctcatgtgtagcatcatctacatat

SEQ ID NO: 24158 - DNA, 408 bp, Oryza sativa
tactcagctttgtatagctcaagtctgtagcacttgcgatagtaaaaatatccaggaggaggtaatgaaacgtacatagctcaggtttacagcacttgcaaattgcaatataaaaaaaatgaagtttttggatcttgtgttagcaagtaaaaaaaatgaaaagtgaaatttgctggggaaaagaaaataatcttatagtacatgcagtataaaaaacgaagttatgggatcttgtgttagcgaaaaataaatgaagagtgaaaaattgccggtgaaagaaaataaccttctagcgaggggaaaaaaggaagaataatgaaattcgcacggaaaagaagagaaattataaaagagaaggaaaaaggagagtgaaatttcatgaacaaaggaaagaattttggagatgct

SEQ ID NO: 24159 - DNA, 453 bp, Oryza sativa
  unsure (1)..(453): unsure at all n locations
ccggcattcgctcccactgcaagtcaccctgcgcatatgcatatagttacttagctaatactaattaattntagtataattaactctgaattaatcctactagctgggtatcggtatcctagctagtgcggttgctgacgcttgctttctgactgcgccggattccttggcttctagtggattcaattcattctagatttctagtacgtcctagntggtggcttgcagctcgtggggtcactcactgcactaactagctagtgtgactcgcatctcttttcggcaagggccatggggtaagatctcctcatatagtatcactcgatcatcatatctcatatgtaactaattagcactactagattccgacgactcttcttcgatcgggccatctgcatgcatgcatctactatctggagtatactgatttgctgaacgcatatagtatacata

SEQ ID NO: 24160 - DNA, 459 bp, Oryza sativa
  unsure (1)..(459): unsure at all n locations
agagaaatttttttcaacataaagtctaatagctgtataatatataacggtataagcatgattntttaaagttatagattcatataattgatcataaattgaatgtgttaagcatattaaagtacaatactaaagttntaattgacaaaacatattanatttatagagcatagaaaatgaaaaaatgataagaaatcttacaatttagataagaactttccatttcttgatattntgaaaatgagtaatgatgtctatatccttaacttggaagaatagatcactttcaacgaatgtaatcaaacaatcattcaaatattcttatcccatcttgcttcttaacttgggtttgagttctcttatttgcaacagctggttctaaaaaagcctttatattaacccgtggagcatttttctattcacgttcaacctataaacaacaaatggtcttcaattaag

SEQ ID NO: 24161 - DNA, 521 bp, Oryza sativa
  unsure (1)..(521): unsure at all n locations
tttctgtagtcgcaaccttactatatatttcaaattattgaaagcatcatctcactattgcatccagaattaaattatcttgttacagtgctgntcttggattttgtatataacatttgtcttaatcttcagtaccttttgtgagagtttttttactgagtctaatcctatgatgtcacataggttaagagcctgaaaggtggaaaggagatgaagattgatgttctagtgatggacaatcttctgtttgaacgtcatgtgacaagattggatgatttaaagggatctacaagatcaagatataaccccgactcaaatggtagcaataagtacttcttgatcagaacttacttgaagctatgccaaccttccccatttttgntgggaacaaagcaaagcggctgctatagagagcccgttggaatgatactgtcattcttgcttgtgagtataatcnggcttctactgctcagtgctacatgctgacatctgattntctagatctatatacattcatattc

SEQ ID NO: 24162 - DNA, 493 bp, Oryza sativa
  unsure (1)..(493): unsure at all n locations
tcttttctgccatgaatcatgaagaaaataaattaagaaacagactacggatcaatacttgaatgattgcttggtcgcatttattgagcgtgagatgttttgatagtcaagtaccgcgatattataaacctacttcaagtcatgagggaacgcataattaacactactcttacaagctatgaagaaaccgaagtaaaagattagagatctcatgtaataatttgtagttatatttcttcgattatcggcattgacatattgtgaaccattgattnttatactatgaacatattttagttagatgggaattgaatacctaagtttgaaatcctagctctgtgccactagacagagggagtacgctcgttgtggcaattattggagcttactaatatgcctatcggacgcgcctcttgctcttactctactgaagaagaatcatggtgcgcgcgcgagcaacatcacgttttctgactggcatttgtacccgtca

SEQ ID NO: 24163 - DNA, 287 bp, Oryza sativa
atgtcacatggccgtcacggacagctacatatggaccagttccacggtccaccagcaaagaagcgttcatcccaacaaacccggtgcctcatcaacagaacatgaagaagaggggtctacctatgacatgtggacccggtgtttacattgtgcccaccgtcattgacaccagtacacgacagaggaaaaactcaaaactgcgggactgtttggatggaggctaactttgccatagctcgatttgcataactgtggaagccaccacagtgtggcacaactatgccaac

SEQ ID NO: 24164 - DNA, 392 bp, Oryza sativa
  unsure (1)..(392): unsure at all n locations
aagaacaaagttgcacataccagcaaatgggagaaatccagcttcttatgcgtgacagacaactcaatatcagatggagcaatctgaatacatgtatagtaccacatgagtngcccgatggacttatgcatgctatanaattctgacttgacatactgtacaaaatgtatcacctgttctcttaatataagaaggtgcttaattatgaaaagctgtccatccatagcagttgccttttttgcaatgaccttgcttgcattctgttcacaggatcaaacagatacgctctgaatatcaaagagtgcagttcaacacataanacatgttctttagatcttgttaagacatgaacaataatggaacgagaatacagacctgaagagatgtggagc

SEQ ID NO: 24165 - DNA, 431 bp, Oryza sativa
  unsure (1)..(431): unsure at all n locations
ctagatactgatgcaggcatgcagctggccattctctactntcctcatgattcgcaatcgtaccattctcgctntgtgttaaaagggttagctgaataagtttatcggctctgattaaaacaaatgatatacgctataatatacaggatttatttacaaagaattntcctacggccgccgccgccgtcccatctcgtgcgacgccggcgacttcacagccggtggccgtcgccggcgtcgatctccttgatctccagtatctcgacgcggcgggtggtcttcttgcggagcttgatggcgacgtcctgcggcacgaaggcgccgcagacgctcacccgctgctgcttccggtcgatcaggtggctatncagatcttcttgcatacatacatacatacacaggggggtaaaatgtgagatgaaatccacatt

SEQ ID NO: 24166 - DNA, 425 bp, Oryza sativa
  unsure (1)..(425): unsure at all n locations
acttaatggtgtaaaattcatttcaagcttatgctagcttgttctcacattntcatttaaaaattgaattcatattaaaaaaaggggcaaaagtcatgataaaatgcaagggcatgtgtgaaattattatttaaaaatgataggaaaatcataaaattaaaaaaccagtggtaaattaaaatcatgaccgaaatctctttttttttaaaaaaaaggaagaacgtaattgtcccatatatatgggccattccaattaattaatcagactaagatattgactacaactcattgactacagtacatatctgcattnttttttactacttgcagctagatcaagtttgttaattaaggatagtgtctgctaccttccaggtttccggccaaaattaacagccaaatgccaccgtttttatactcctgtg

SEQ ID NO: 24167 - DNA, 456 bp, Oryza sativa
  unsure (1)..(456): unsure at all n locations
acagcaagtctaaatagaacctcaaataatcctaaatagcgagaccagntgtcgaagtgatgtcatcgaacctataaatttaacagtcaacgtanaccacgcacgtgtaacgatgtgagttgatccaaaccacatactcactccatactttgaaagaaagtcgctctggacagtgacacggcctccataacacaattttgacttcttatttctataaaatatttattaaanagtgatatatgtatacttttatcaagtatgtttcaagacaatctattctataattttacattttatacttaataacttgagagtcatcatgattatattccaagcttgacttaacaatgtttaatgactacttacagtccgcggatactgcatatgaagatagactacactttccgtttcataacgagttgattcgaaatgtagcttattagtagacatattatt

SEQ ID NO: 24168 - DNA, 405 bp, Oryza sativa
tatcaccgagatattcatgctaatggttcgacatggaagcggttacaccaaagaagagactgacagcttgatggaatcgctgtccgaggctgcagttgaaatgtctgatcttgagaacttcatgcttatatctcgtaataacagagacggcacaaagactcttgatttcattgtgaaagaagcaaaggaggaactcatgcagagagagagagagctccagaaacgggagaggtctaactctgttaacggaaacccgatttattattgataaaatcataaccattcagcctgtattatggtaacttgcatccttattgtaaaatgtcagcagcctgaagaacatgtaaggcgcgcagttgtcggataatgaacataacactaatggcgggaagatggcactgaagc

SEQ ID NO: 24169 - DNA, 456 bp, Oryza sativa
  unsure (1)..(456): unsure at all n locations
tcatgtgcgtgctcttcgtgttcatcatctggatctgatcatgttctgtncctccacgtagntaatctaccatcgngggtatccgcctcagtggactgccgaccatatttagtcaaagtgaactataggagcctgtgagcacagctaattgcatagccaactactaaatgcaaatcatctatagccaatctaatagctcattcatacaataggtatccataaaccattaatacatgggcccacctctcatacacacataacgtattggagtttgtgctacagctggctacgaatctgtagcccgcttatcttctctctcttctctcctccacatatgcttacaatagacttgtagcctgctattgactcactcttatagattactgtaacctgcccttaacaactaattaatgtggagataaaataccacggtctcataacacagtaacacatgag

SEQ ID NO: 24170 - DNA, 430 bp, Oryza sativa
gaccaagagaccgcggttaagtgcataaacgatagccgatcggctaggtgccgatgacatatcatttatctctaagccgatgtcatatgtggattgatcggcaatcataaataagtaagagagagctaaatctactcgatcggctatagatattaacaatatataatcattatgtcgatatatgcttaaatcaagtgattgggatagatcggttaccatgccgagacagtataaatcacttagatcgaaatatatattaacactgagactatatatgtttatagcatactcgatcagatagatctagcgtgtatcggctaatactctaactagactccatattaagatatcaaagcaagtagaatataccaaacataagcctaatatacttatatgcaacaagatcttaatatataggcggatttaacgt

SEQ ID NO: 24171 - DNA, 229 bp, Oryza sativa
  unsure (1)..(229): unsure at all n locations
acatattatatggtgttgagttctgacagacactaagctggtcgagttaggtgggccaaggctggatgggtccagcatctaaatgggctagggagtangtagcactttaggttaatactaaattcagagatcagaanatctaacttatatatgtcataaatatgtgagaaatgagaactatgttgaatttgatgccgttcatcaagttacttgagcacaactgcattca

SEQ ID NO: 24172 - DNA, 332 bp, Oryza sativa
  unsure (1)..(332): unsure at all n locations
agatggtggcgcaccgcgttctccctgccaaggaaatcatcgggtggcgaccagcgcacggtgaggctntcccgtctccggatactcatgagattgtggacttctcgcatttcttctacggcggctctgctcttccgacctcaaaacttttccgcgggatcttgaatttctatggaatcagcttgcatcacctagacccgaattccatagtgcatatcgccaacttcgtccatgcttgtgaagcctttttggngatcaaacctcactcttgcctattccgccggatcttatttctcacaccccaaccaaacaagaacaaaccgtgtgtagtc

SEQ ID NO: 24173 - DNA, 371 bp, Oryza sativa
  unsure (1)..(371): unsure at all n locations
ctctgnctgaacactagcatcttccttctgagtatantctnccagctcatcgcattcaacttcctttggcacctgcatgtccgcacgacgcctatcaacgcagcaactctctttctgcacatcggtttcgcattccggcggcgcatacatttcggaatcctcatgtcctgtgatgtcaccatgttcacatgataattcacttctctccgtctctggcaaaatacgttcatccttcaattctctatgagcactntcatgagtatcagcttccattcccagtcccacaagagggggctcttctttcgcagaatctcctgtcagattgttagcggattcattntgcttaccaacaagtactgactcatattcac

SEQ ID NO: 24174 - DNA, 276 bp, Oryza sativa
  unsure (1)..(276): unsure at all n locations
aaaaggcatctcacataacaaaaattctataacccgctaaaaggggactacaataatcatcaaactttagtccaatcaattatcagatatctgagtacaacgggtacgacataatgaaatactcagtttaattattattatntnactgctaccagcaacaacacgtatgcctccatacatgcccttcatcattatcactggcacagcctatatatgatgntctatacatgccacaaggcccacaacagtacacctttntaataatctaatgcatgt

SEQ ID NO: 24175 - DNA, 303 bp, Oryza sativa
tgtgagtaaaccacatctattccaatagccgtgctcgccgatattgagcacccggaccgtgattacacttggctagatctaaatactaacttgtgtgggatgaaatagtgcatgacgatctcatactgacggagcccttccttgaaggagggaatatggtacgttcttagataatcatgacgactcaatggcgggaagctatccttgggattacaatggatggtggacaatattgctattgttaacatgaacactaccactaaatttgtgcacttatgctggtcttagcttgtgaaagattac

SEQ ID NO: 24176 - DNA, 222 bp, Oryza sativa
ctgtatgttaaatgcattatcgaacatgagtctaaccgtatcacacggcacttcatgtctatcataacatcatttttacatgtacgatcatggtgacaacagtagggccataatgcctcctctaacaagggtgagatatctagctcataaatctccacatatgcatttatatgatgtggaagagaatatagatactgtgagagaatgcactatctcttcttc

SEQ ID NO: 24177 - DNA, 313 bp, Oryza sativa
  unsure (1)..(313): unsure at all n locations
cacacgcatctttacacttaccacctgacgaatatgttccctaacataagatcaaaacaacacaaccatagtctcacaaaaaatctattggaagaccactcatttatggatactatgatttagaccctgatgagtngtgcatgtgcttntataaataacttactaaaactcacttgcaaactttcttttaactattagcagtcgctagctgcttactactccctccgcctcataatataagagatattgactttttacttgtactgtttgacgagttatcttattaaaaacatagaattagtattctatttat

SEQ ID NO: 24178 - DNA, 189 bp, Oryza sativa
  unsure (1)..(189): unsure at all n locations
atatatactacacccgggtaattatatcctctggaagatatggtcttctatgctctgcattctcgtatataatattactgcatacgctnatttttcccttgacagagagataatgacgacgatatgatgatgatgatgatgatgattatgttgaagaaatgagaaaggcgcatgagctagttggtcata

SEQ ID NO: 24179 - DNA, 414 bp, Oryza sativa
gtggagatattgatgaagatagtgaaagactgggaatctgtaaagctgcagcagtttcctctgtagttggtggtctagctagcttacccatatctctttatgaagcccatgaatttccacaattatttgttcagttgtcagctattttcatatagtgtgctttgtttggagtaacattccggtatgccattatgagagatctggacaatgtccaacttaaaacaggggctgctggctgcatttgcttttgtagaggtaaaactcgataatgctatttcatataacttctcagcacatattcaagcacattgtcattttgtttatttgaactaaattatttgcaggccttgctatggtggaatctgggaggtcctttgagctgagcactgatgccttaatatcacttgcccttga

SEQ ID NO: 24180 - DNA, 520 bp, Oryza sativa
  unsure (1)..(520): unsure at all n locations
ctcgcgagcntcgctgcagcggtgtcatgatgcttcattaacgatggcanggtcatgccggagttttttgggcatctctatgttacgatgtaccgcggactttcctggctgcagcactggctggtctggtctcatattgtacatgcgtcatcggataggagaatgatgattatctctcagataatacggtatcagggcatatcggctggataagtgaggcacttggccactgataatcgcaggtgctaaccatgccgctattatgcatatcatcagtatgcttctatgtatgtccttggcactcctgagttaacctggatgctaaatgggtgattatctgctctatgagatagtagtattaagtgaatctacattatttgctctcgtacattcgccctcgccagacaaagaaacaatgcggttagtaccaattccttgcgatgaagagatgctaattaacaggcccccgccatgcaatgggttgcttgtctaattatccagatgctgtgtttttttaaaa

SEQ ID NO: 24181 - DNA, 548 bp, Oryza sativa
  unsure (1)..(548): unsure at all n locations
tatcttgtgcaacggaatcatatgtccactactaccaagaatgtgtttctatgcggctagacattcttttcacgcacaactacaaataacatatcttgtagcaaccaaaataggatattgttggcagtcataagctccgccacataccaagggtccatacgggtggtagagcatccgagcgcgaatttcttttcataaatggttagggcattcacccgaaactagatgttggtaaaaattagtatgagttatatatacggctccacaaccatatgtaaaaacttgattttcttcatccagagagagatatggtttgtttgttatggaaagatagtggtttcccaccaatntagctatgatggtttacttgactccaaattccataccgtgtgtcagccatcaacaatatatatagcacaatccatggactgttgtcatcttgacaaataagcaagatctacctgccctctaaagtatccagaaaacgaactgccaaacggatcatatcataattcccgaaaacagaagagaggactattttgacgatc

SEQ ID NO: 24182 - DNA, 300 bp, Oryza sativa
  unsure (1)..(300): unsure at all n locations
gttgggaacttttggaaacttgtaagtatagttcgcggttgtggagtgggtttcgcaatactaccgcacaggtgggttcatctcaaagatatttgccctgtttcttttcatattaatccaaaccttgtatcgcttattcagctcctgctttcctgatgggggatagcattcatacgtgtcatcatagnacaagcaggcaaatatcttccaagatcatcggaaacactaatctttcgatacacacatagaccaagtactttcaccgacgacctgcgaactaatgcatatcatgaattttca

SEQ ID NO: 24183 - DNA, 442 bp, Oryza sativa
  unsure (1)..(442): unsure at all n locations
gacctatgaaactcagcttgcgcaatccgcacctcgtctctcgagctcctgtgatagatggagaaggatggcangcagcaacggctcacgcggaacgccccacganaaggaggagaatggtggcggcgcggatggcggcgcatgatgcaagctgtggcacgcgcacgtgcaataggttaaagcatgcatcggctggagatccgatattgctaaatccaaatgagtagataatcagtagaacatttgttgcaatcggctagaaccaacttatatgtaatccttataagccgatgcaacgtgcagataactcataggctgaaaccctgatgaaacccttattggcaatcaaaggcaagttagctattatgattctaaacacgacttagtaggtcanaactaattgatgcaacactaaatgtgataagaagcatanagtctaaac

SEQ ID NO: 24184 - DNA, 383 bp, Oryza sativa
  unsure (1)..(383): unsure at all n locations
ctctgtctgacactagcatcttccttctgattatcatctcccagctcatcgcattcaacttcctttggcacctgcatgtccgcacgacgcctatcaacgcagcaactctctttctgcacatcggnttcgcattccggtggcgcatacatttcggaatcctcatgtcctgtgatgtcaccatgttcacatgataattcacttctctccgtctcttgcaaaataggttcatccttcaattctctacgagcactttcatgagtatcagcttccattcccagtcccacaagaggnggctcttctttcgcagaatctcctgtcagaatgttagcggattcattntgcttaccaacaagtactgactcatattcaccagaaacgtcaga

SEQ ID NO: 24185 - DNA, 278 bp, Oryza sativa
  unsure (1)..(278): unsure at all n locations
gagggaaagagctctctatctggcaacgggaactagttaacccaatattgctcttgttatgatgctacataaatgggaacttcgttggaggatcgactttcttttgatatcttcttttgcaatgaagatagacaactcttgcttttcatgatagaatgtacggagggccaccagggccttcacaatcctcactctcctgagattcatcagaaactccattcctgttgcttttcanggaaacattttctgctacaacaaatttacatgattacataact

SEQ ID NO: 24186 - DNA, 423 bp, Oryza sativa
  unsure (1)..(423): unsure at all n locations
acttgaagtaactctgactgtgtcaatccattgtacgaatggacatttccttacatcctcctatgtacatccattttgggatagttaagttaatgatagtactgaggagtgatgaaaagaatagttgtaattaccacgatatcatcgtcgacaatgtgtggacacacgaaacacctttgtcctcgagttcggtgccttactgaccttatgacctgacaacggtcaccacaacgacactccggacgctcacgccacgtggggagtcctaggggatatacgtgccattctaaagcctcagcagcaattcgacgttcatgctcatncttccaccttaggtactccgatcttgtttcactacgtggtaagcacgggttcatcgtttgtgggtctcatgttaccacttatgaagtgccattgacatat

SEQ ID NO: 24187 - DNA, 451 bp, Oryza sativa
  unsure (1)..(451): unsure at all n locations
agagagagagagagagagagagagagattangatatggacatggatgaagaagaagctttctntacacgtggatggaggagagaggaacgccagggttngcatgaagctgtgaacgtggaggtatttaatggaggaaagaggttagcttaatcgcaaggctaanggagtaaggacgcgcgacgacaacgacgacgacctaagctagggttcttgaggccgtacgttaattaagatggatctctttttagattcgaacgatgtcggattacatgtgcagtgacataaggggtaacatatattctctttgctgtcaaaacgatacttacaagaggaaattatagtaacctgtcatgtgattaaacatatcgattggatgtcgcatttctttacntaattatagcatgcatacatgtacccngttctgaaatttggcaaatcccttatgtaaac

SEQ ID NO: 24188 - DNA, 391 bp, Oryza sativa
  unsure (1)..(391): unsure at all n locations
gctatccagaagtaccgagttcaggacgatgcggcatggcaagttatctattaattaggaagaagttgttagtttccttctatctttatgagagtgtgtttagtgtcaaataatgactatatgtttagtatctccccatgggtcattgtaaactatctctcgatcaatacaactactctcggtgcatcgccaccctctttaccgaggttnttacttatcatccggtggaacttgacacctgacagagggctgcatcggttcagtntgatctccggcgaaggggtaagtactacgttccgctggacctggtgaatctatcggctacattgctgttgttcacggctgcatcgcttcgatctcttggatcgctctggttcaatgatttagcgat

SEQ ID NO: 24189 - DNA, 484 bp, Oryza sativa
  unsure (1)..(484): unsure at all n locations
ccggagtgtacaacgtgcattgtnttattggatggtttacacacatacagatgatgtaatcatgtaatccttgtagcaaaggccttgttcttacgttaaccttctgtctgtacatngttggcttgtggattgtgtattggaaagaaaagatgcagttaacagtgatctcttgttgtgtgataaatttgcaagatgaatgctgccaacctgttgaaaggaagtcgagaagactcgctgacgctgagcaacgagagttttcaatgataagttgtatatgtgtacccaaaacattacgctgcattattngttcctgctaaattgcaaccaataggccgtatacgtgcctcggcctcagtcttagctgaactggagctctgcgtgccgcacgagtcacctaactctagtataattatcaatttatcaggcatactagctcgcaattaaaaanatacttcttagattctatnataaagtatttttaacc

SEQ ID NO: 24190 - DNA, 383 bp, Oryza sativa
ccgcacatgcttactaggaggccggctcgctgctgcaggagcgtgactcgcacggcgaacgcaagagctacaaccaggcctatagcgtgggatctggtccaacagcacacgcaatttggttggttctaatgaattcatcaatgtgtgatcctctactactttgatgcataatctgctcatttcttgtcttaatttgtggtatgaaggcaaataaatacatgataagtacgatctttgtgtcgggcatatgataatatgagtcaatttttgccacttgtagttactttgacagtatatgaagattgtctacattgtggagtactgttagctgagtatgtatcatggaatacttttacatttatctagtacggaacatggagtta

SEQ ID NO: 24191 - DNA, 320 bp, Oryza sativa
tataatacttgaaaacaacataaacatttgcacaataggacatacacaaaagatatgataggtgtgagacatgctaggcataacagctagatctctggttataccacatacacatatcgcacaatcttgatcttaagtatgatgactcatttgcttaagactaagatattgacctagtaatatatgtgactgctagtatgccatgattgatctctaccgtgctacacatatcacacctgagagcacgaataagaaatgcataactggtgaggaattaaattgttacacttgatagactgagcgaatcattgaggaacttg

SEQ ID NO: 24192 - DNA, 478 bp, Oryza sativa
  unsure (1)..(478): unsure at all n locations
ngaggccacccgaatgcattaccactccaaccacgccgacagtctaggcaagtgtggccaatcaattggtttccttttccttaatatgaatcttgagcaatcactattcacctcttaagatagaaatcaactacaccctcccctctggtcagcgatcacaaaaacatgtcattttagacatcggtatggtcttaanatgcaactctgactgctgattcttatagaanacatttgaagaacttgataaaattatgatattctgaaagtacttctcgacacacatttctgcacatgattttcatacatccaattgagatatttaagaatatatggatgataaaaattntaacgctttacttgaaacatgcccaaaaccacatgttnntgtgaccagggtagtatgcgcctgtaacttgttttgaatcccacttgtcatcacaatgaatgaaaaggtggcgcctaaaattctggtcttata

SEQ ID NO: 24193 - DNA, 379 bp, Oryza sativa
  unsure (1)..(379): unsure at all n locations
actcagcttctgtcaggaagttctcttgcacaatgttgaaatggcaccttagcatcaatctgttctctttaactggttcaagatcggtcagagttttgacattaatttaagtcttgccaattaaccatgcatcatcatcatagnttcttcacatatttctgtccttgtgagtgtctntcttgtctgctctgctctgccctaccctgtatatgactaattcatcaagaanaaaaaaaggggctcttatctgttcttttctctatgatctgtacgtgctgtattattgtatcagtacaggtataatcgcaatcttgttgtgatcatcgcactagcgtgtatacgtataaacaaataataccacanatgttcttggcctgtc

SEQ ID NO: 24194 - DNA, 447 bp, Oryza sativa
tcttcttgacactcacttgcaccctatatgttgacacccatttggtcgctctgtcacctcccaagtcccgttagcgataatggaatccatttcactacggacagcctccttccagtagtctgcatcacgagatgcatatgcttctgagattgacttatgagtgtcatccacgaggtacacagtgaaatcatcaccaaaagaacttagccgcctttgtctcttactccttcgaggagcttcactgacatcctcctcagagacaagttcatgtgtatgttcagactgttctggtggtgtgattgaactgggaattatttcagagggttggttcgaaccactatgtgtatccttcattgtgagatagctctcaaagaaggtatcatcacgagactccataattgtaccaacatgcatgtgcggtaccttggattaactactataaattat

SEQ ID NO: 24195 - DNA, 387 bp, Oryza sativa
  unsure (1)..(387): unsure at all n locations
agtactccatgacactgtatntagttagtattacctccatccncaaatatagaacaatgacacttgagttaccanaatatagaacagtgacacttgagttatgagtacgaatgagttttttccgtacagaaattaacgagttgaggacaaaaactaatgactntatcactggttgcanattgcatatatganaaaaagaagaagagagaatcctaactcanaacatataaccatcatgtgatngggcattggtagtggtagcaggagtattagttagttcaacatgtgagacaggctcatcattcacacattaggtggcaaggggccttttctgattgcacggcttaaagattaacaacagcatctacagcacttaacaacaacaca

SEQ ID NO: 24196 - DNA, 420 bp, Oryza sativa
  unsure (1)..(420): unsure at all n locations
ctccacctccactacacgagacaaccacgagtgtgatttgtcaccaagcggtatgcggtaataatagcggtggagactagcgctctgcggtggtgaccggatcttccgggcggtggggcccactggcagtggcagcgggagaagggtggngccactcgccgctgcgctgctccgccggtgaggataaccagttcgacgccgtgcgggttgtcgcggagtggcagtacactacngggtggcactgagccactgacagtttagctgtggggatgtgggcccatgtgtcagtagatgaatggagtattttttttcccttctttcccgaaagataagggcaaagggagcaacatgggctggggagcagagacccctcgttcgagctagtaatgcgcacttatgaacgttaggacgcgagattac

SEQ ID NO: 24197 - DNA, 386 bp, Oryza sativa
  unsure (1)..(386): unsure at all n locations
tttcagagcttatccttgccttgatgatctcattgcattggattggatgatccatcttgcaggcctgtggcatggagctgctaaggaagagagataaccctgaataccaggtgatcaatctgcaganaaaataacttcatttggggaccattcatgtacaatgtggtgacattttcaagtgcttgtgtagtacacagtggcaatgatggggtatggtcctgaagacaagaatgctgtgctggagctgacatacaactatggtgtcactgaatatgacaaggngaatgcatatgcccaggtgaacaccatggatggatccatctatcatggatctcctttattccattcatccatcaatggtttctagagctgaactggcatgacgt

SEQ ID NO: 24198 - DNA, 474 bp, Oryza sativa
  unsure (1)..(474): unsure at all n locations
taaagctttaagaaatcaaagattggctggaactatcatgctcagcatagatacaccagtattgacaaattgagtctccatttgttacattaatactcagtcagagtcagtcctttcatcatcagagttattgttgctcggctgaaggtcgttgttgcggaattgctctacaacgtcacttgcaatcttgtcagccgcattntgagcattgttgataagatcaagagcagcctcttcgcttgtcccgtctgcaaatccatcaatggtgtcgatttcaattctcgggtacaaggatttggtcatcgccaatgccatgctagctcccatacttccagctttcttgatgttcttgaaatatacatccggtgcaactctcagcttgcaaagaacttcggtgcgtcaagtgcactcggnaccactgtattaaggaacatagcttggacaagtggtgtagcgacattggcaacttcatct

SEQ ID NO: 24199 - DNA, 342 bp, Oryza sativa
  unsure (1)..(342): unsure at all n locations
tggtgttctgactcgtgactctacaacgttgttggcagctatgtcactattgcttgatgttgntntataatcagcgattatctgatgccaattntaatggggacgtcttttctgtattatctgctttacctgttacaagttatgtcttgaacatatgatataatgggtcatagtgagtctacagtactattacatgtttgcactagacgcanaaacaacaanattgttaatggatggaaaataaatccttaaatcaggtctcttaaatagtttgtccctttatagcataaactttgttcctcgattcctctangtgaagtggttaggtggctctagtagcac

SEQ ID NO: 24200 - DNA, 269 bp, Oryza sativa
  unsure (1)..(269): unsure at all n locations
tgcgtgcgtttggaacttcctncgcagctatctgccttgctctcgccatctcgccattctagactccgcaaagctctcctccctcgaggcgagctctctctgctcccgagcgagagctctcgccatggcgaagaacgcatgcaagctctgctaccgccgcttcgctagcccacgcgccctcgcggagcacatgcggtctcactctgtggcggccgccaacgcagccgcggctggggaggcggccgcagccgcgaagctgcagatctcat

SEQ ID NO: 24201 - DNA, 353 bp, Oryza sativa
  unsure (1)..(353): unsure at all n locations
ctctgctgcaggagcgtgactcgcacagcgaacgctagagcgacaaccacgcctatagcgggngatctgggccaacagcacacgcgatttggttggttctaatgaattcataaatgagtgatcctctactagtctgatgcaaaatctgctcatttcttgacttaatttgnggaatgacggcatatgaatacaggaatagtacgatctttgtgtcgggcatatgacaatatgagtcaatttctgccactttgaaatactccgacagtatatgaaaattgtctacattgcggagtactgatagctgagtatgcatcatggaatactttacattntatctagtactgaacatggag

SEQ ID NO: 24202 - DNA, 332 bp, Oryza sativa
  unsure (1)..(332): unsure at all n locations
tcttagtcttttcccggtcttggtgnttggtgtagaccggatttgctagataggcaccgtactatcaagaggggtttatgaagcgagcttgtggatgatcttgtgccatattagttcatatgcatataggtgtatttggtgggcttgtctagccaagtgtggtgaggtttcttaagtcctanacatagagagatatgggcaaatcctataggtttgggtagcctcatgtggttatgtctggtagagtatcctttggagtgtgagccctttctccctaaganaagttgtgtttcttggatggattgtcatgggttggataccctttgagaatc

SEQ ID NO: 24203 - DNA, 541 bp, Oryza sativa
  unsure (1)..(541): unsure at all n locations
ctaagctgggcactatgcttcaattggtgcgtttttactgaaggttatttaatgcctgacgtaatcgttntgcacagagtgaaactaagaacagtggaacatgagaacagcaccagttgcgagttctgaccaatcttagatgaacccttattaaggcataaatctctctgcttgtattgatgtaatcaacttctctagctctccacattcttcttttactataataaaatattataatgtatcatcaatgaattgacatcaaggttctctatatatttcgcacgtatgacatttcttatttgaagagatcgataatgtttaaatggtaatactcctatctatgaacaagagagaagcgttcaaactagaattctcctgtttcagctgcagaagagagataaatacgttatacataagcttgtcgatgaggaagtgcagattcatagtgaatgtgatcttacaaccactcgagntacttgagaatggtcagattacatactttgactgaagcctactgctgcgatatatgaactacactgaa

SEQ ID NO: 24204 - DNA, 169 bp, Oryza sativa
tatacccctcaagtgctgtacatgtcggaaagacaggcatcattgtgacagcccatggaaggaagtagctcgaggaacacatgcggtgaagccagtgatgcacgtgtgttatatttggccgttgcgcctcatgtcccggagacacaaatttttgacaatttgttctttg

SEQ ID NO: 24205 - DNA, 339 bp, Oryza sativa
  unsure (1)..(339): unsure at all n locations
ctgaaccgctatgttagtgatgtgtattaggatgagaatctcacaaatatgatgagcttgtcagacctgtctatgatgctagtgaacacaaacaaagtatctcgtatgaccttgttacaaactaatgaaacttgtgtaagatctacctgatgcaactgctactggnagagggtgtctttcatgactatataaaacaagcttagatacaagatggggcaagaatatgagaatgattgcttggttatatccatagaaagatatatcttcctcgcgggagacgagtgaagacatcatcacatcattttgcaaagagtctgacactgaatgatcgtctctata

SEQ ID NO: 24206 - DNA, 437 bp, Oryza sativa
  unsure (1)..(437): unsure at all n locations
gctgtcccaaacagttcatagcttctgagaatctgttgttacatattctgagaaatgaactaagaagtcagaagctggagaagctgagtttcagagcttttctagatattcagaagctggctaccaaacagctgcttctcagaatctaaagctcccccaaacaggccctcaaggtcctctgcagtgcagtactcttcactaacatgtgggcctaaagatatgtangatccacatgtcagtgagcaatactgcctgcagaggatctggattgcctctacctatctcatgtatacaatccagctatcaaaaaatcttctcacgacaacgaacagtggtttattacgaatttatctatcccgtgcatagaatccgctattgagaaatcttctcacgagaatctgctgatgctttaacaatagaaagaatgaagctgtatg

SEQ ID NO: 24207 - DNA, 415 bp, Oryza sativa
  unsure (1)..(415): unsure at all n locations
agcactaagatccacacggattgtattggaaccccacccttttgggccactgagtggtaaaagatgcccttgaacatatgcttttaccacttaaattgcgtggtgcatgtaaatggcgcattcacaagtgtgtacattgtgagacagctacatgaatattttcaagtatatntattagatacaacaatacagtttttcgatatatattntcactatagcagcagnttaattatattcaagataactacatatgctggccaggctgccatgagcccaggactagttgtagtcatacttgttgatgaagcatgctctgtcaacaattggtccttacttcacttngttatttgtaagcatttagtgttgaacttganaggtacagagtgggctggccctacacttgtaacgtgaaaaa

SEQ ID NO: 24208 - DNA, 366 bp, Oryza sativa
ctcagtctagtcataaacaaaagtacacggattggagatggatgaagtcgggtgtcgatggacattctccagggcaaatgaaggctacacgagctgcggcccggtagtcgagatgtcatatggcagagggttggtgccctgctgctaggggctcagttctgcctacctgtcccgggtatcccggccgtaggtgggattgggtcggtactcttgtctatggctaggatgggttggaaactatgtcacgtctttcgtccgtataccgcggtggtatgtggcacgtggtcacacgtgaggaagatgtgtcttgtgggtaaagatgtacacctctgatcagagtaaatctattcgaatagccgagccctc

SEQ ID NO: 24209 - DNA, 438 bp, Oryza sativa
  unsure (1)..(438): unsure at all n locations
cgagaatctgcttgcccagncggattggggagcttggatngtgagtttgacctaatttttggtcccccactcccatggacggtctgacgacggtgagatcggcgttgagcaattgtggggtcagacttcatcaaagcaaattcctaaataagatgctttccacggtcagttcattcaatacgtagacacaatcatattatgaggaaagttgaagaactntaacacataccggtggaggggggttgaatgcgttatatggcacaactggcagcagacgtgaatagctgatgacgactagcgttgagaagatcttgtacatcctctccttcatgatcttanagtccaatgaatctggatcttcatgggttggatcatgctntccatcgaattcanaagccgngcgagatctttcttaattggagctagcagctcttgatg

SEQ ID NO: 24210 - DNA, 408 bp, Oryza sativa
  unsure (1)..(408): unsure at all n locations
cgtattagttcactcttcttcctctttctcagcacagcgtgttcatcaactttattccacatgaatgtgattgcgaattgtgaccacgaatgcatgatataacaatcccgatcaaccctgttgtcggtggtggcactaaaaattaccaaacagcaacctatcaagcaatgacaaatactttccaatccacaaaatgatccaagccaaaagtctgacaaaatggaggaggaagcttcatagctttggaaccttgcctaagcaacgcaatggcaggaaagaggagganaggatcaagttcttttcttgctctttcttccacccacgatgtaccaatcgatcacccatcaattcatcatcaagaatgcaaaagttaaacatgattcgaagaagactaaaagaagctagata

SEQ ID NO: 24211 - DNA, 259 bp, Oryza sativa
tgcgagcgcgagacgtgcaacttcgacctgcacacgtgctgcgccctcgcgccagcgaccagagagcaccgcctcttcccgggctgcacgttcgtcctcctcccggagcctccgccgtcgaccgtcgctggtgaacggaggatctgcgacgcgtgcggcgagggcgagcatgcgcgcggccatgtgtaccactgctccggccgaggcgacggcggcctctgtctcgacctccacccgacgtgcgcgtacctgccggcgc

SEQ ID NO: 24212 - DNA, 396 bp, Oryza sativa
cttctggtgaatgaaatggatgagactgagcgcaagccataagacggtgagaagaagcagagtttggagatgagggtcttcaacgaggcggtagaatctgggatccctgctggggagaagaaagtggatgtccttcagtccactgtggatatgctacaaacccaagtagcgaaactctctgcttcacctccaacaaatatcggcgactcctttcctcttcgttgccattccggagcggcaggtgttcgagcaattgactctaccggcttaaatggccaaggcgctgcatattctacacgggaggaggctgatggggtattcaatacccccaagccaccctccggcaatggtacgcttgcgtcacacaatttttctccattccattgtcgagttgat

SEQ ID NO: 24213 - DNA, 434 bp, Oryza sativa
  unsure (1)..(434): unsure at all n locations
ctatactcataaagaaggcgaagatttctttgacacttactcacctcgtgctagattgaccacaattcgtgtgctactttccctagcagcctcacatggtcttctcgttcatcaaatggacgttaagacagcttttcttaatggagagctggatgaggagatctatatggatcaacctgatgggtttgtacttgaaggtcaagaaggcaaagtgtgcaaattggtgaagtctttgtatggtctgaaacaagctcctaagcaatggcatgagaanattgacaaaacattgacatctgcaggctntgcagtcaatgaggcagataaatgtgtgtactatcaccactggtggggtgagggagttattntgtgcttgtatgttacaacatactgatatttgggacaaaccttgaggtgataaatgaggtaaatcattc

SEQ ID NO: 24214 - DNA, 423 bp, Oryza sativa
  unsure (1)..(423): unsure at all n locations
acctattaaactcagcttatgacaggcattcgaagccgatcaggntaccatattttactagaggggtcccagaccaacaacaggttaggtcccagaccatactgtgccacgaagcccaggggtcctccccgacaccaccccggcgaatccacatgtctctcggcatcaaggctcccctgataagctagttactcagccaggggtgtcccattccacccatgtggtcatacttgtcttatgnttggatgaaatcccaaggaatcggtccttaagtgcgagagcgggaaaccgtacacccggtacgttccccggtccgcggttttggaaattcatttagttcgcaagcaccgacccaggtgtcgggttttccaagtcttttgtaaaactccagttttacccaagttgttctcagatttaagtttg

SEQ ID NO: 24215 - DNA, 454 bp, Oryza sativa
  unsure (1)..(454): unsure at all n locations
tagctcctctcgtgctctgaatangggaaccccgagttaagtttgtgcgcttgctgntttgtattttaggacacctaaggagtaaggagacctttttaacttctagattagagtagtgaagaagagtgggaacttgttgatttgaaggttggtttgccgcttggttttgaaatattgatagaagtgatatgtacagtgctcttttccttttctgtataaagaattctgattgggaattttgacctgnactgctgcttaatcaagggtttctatttatttcccaattcgattatatgtaatttaaaatggcaaattcgttctggtagtatgtaacttacaatttaaaatcttactttatttgtggtgaactgaagtaatacgactgttcaatgctcgtcttaccattcngatttggatattgcattgatgagtcgtacattcattangatacgga

SEQ ID NO: 24216 - DNA, 350 bp, Oryza sativa
  unsure (1)..(350): unsure at all n locations
tgtattctcanagatggaatatcatgttgaccgagaagattggatttaagtataaggccggcatgtttctaagttggtttcgaggatttcaaacctacgtatcggtcctcaaagctatctttctcaatatgtagtatgtttctgatggaatcgatcactattgtggaagaagcatcatcaaacataattgaacatgttgccagattgatgagttgtcctgtgcccagagcgtaatcatggagaacttccttgacaacttctgcctccttggtatcagctntaaaaatccagtgtgtcatccgtgaataacagatgagatataccgggtgtgttgcgacaatatnttaatg

SEQ ID NO: 24217 - DNA, 374 bp, Oryza sativa
  unsure (1)..(374): unsure at all n locations
atgctgtctaacacagtacctgcagcaactacacagattatgatggagtgaccatgaatgaagctcantacacttattattagcacggtattggtatcgatggacctgggacctccgaggtcccaataatgaatatatctctgtacaggaattaaacggtataaaagctcctccgagcacactaatgttagtaataaaatataaactgcaccatttgataactgataccttggatttaccaggatgggataaagtacgaaccaatatacttgtcctatctcatttagcaaccgtaaactaatgtaccagtccatgccatgtaatttgtcttgcctgaatactgaggtacaatgtatgtctaataccaatcttac

SEQ ID NO: 24218 - DNA, 428 bp, Oryza sativa
  unsure (1)..(428): unsure at all n locations
gacaaatggagatgttattngtagcgctgcccttttactattcgcactgatcacanaagtctatgtcacttgaatgatcaagttcttggaactgatttgcaatagaaggctatgactaaattgatgggtgttcaatatacttttcaatacaaaaaaggagttgacaatatagttgctgatgcgctgtccaggatgcctgttatacctcattgtgctgcactgtcagtggcttctcccctctggctccaggaggtgttaaattcttattcagtggatcctgctgctcaaactttgctgactgaattggctgttcaatctactaatacacaanggttttctctgcatgatagaatgatcatacatcatggccgagtatggattggagctaacattggattacaaaccgaaatgaatactggctntcattc

SEQ ID NO: 24219 - DNA, 400 bp, Oryza sativa
tgtaaccgctacgcatactgcaggatacaagagctttgcacggataattgaggatgtatgaataaaatcctggtgccttgctctcactatcaccaatgacgtgctaattgtattaccgcatgcaacagaagcagaagcgtgctaacaatgaggagcccactgctgcggatttgttcctattgactcatacacacagaaacgggaagcctatgaagaaggaaaaagctgatatcattgtgagacacaaggaagtaatttatactaataattttctggttgagatctgacgtttattttccatgcaggcacgagtccgtgaacaatctcataagcaagccgaatgctcacgaagtgactctgcagcacacaaagtcggacttgaatcctgctccataggcct

SEQ ID NO: 24220 - DNA, 468 bp, Oryza sativa
gctactacaggaactgcaaactgttttctttctttctgatacctatatcaattcgtgcaaaaaagacgagtgtgaaaatgcatatgatgtggcatataaataaccaacaaatgaggaactggtccataccgatggcagacatcaaacacccccattgatataccaatcggttgccatgccaccatgacacgtgaaatagcaaggacctgattgggcactcataagttggtaccaggactggagtactctatgcaacatgttaatgtatcagtataagcgaaaatgctatgaaatatcaataccttgcttatatctgaatgaattgcacctgcgagcgacttcctatggacaatacttattaaaaacatatcaccagtctgaccatctgagaccatttgtctcatcttgtgctttagccggacacctcctccataattacagagccatgaatttaatcacctacgagca

SEQ ID NO: 24221 - DNA, 512 bp, Oryza sativa
  unsure (1)..(512): unsure at all n locations
tttataatgtaagaagtagcatgaagaacgctgttacatgatgaagtgggataaagaatgcacctttatctttccaaagccattagtctctacccattcagtaactctcaaagcagcatccttggagagcataccatcaatatttaatccagatgaagaactggatgagtttatcatgataccatcatctgcatatgcctcctcagagtcacaattgccattgagtggacttacaaccttaatgatcggaagtgtatatttcaaggcaaattcatggtcacgtgagtcatgtgcaggcacagccatgatagccccagtgccatagctgcaaggtagcatttataacttagagcatgctatactaacaggtataaagtacgttcttcatatctcatatatcgntaatttactgcgagtgtggataacagcccgcattcagcggtcaattccataatcatgaatacactttgcagacctctccatgcattgataaagcaattcacttctaatga

SEQ ID NO: 24222 - DNA, 387 bp, Oryza sativa
  unsure (1)..(387): unsure at all n locations
attgtgcttgagacttgatcttgccgtccgcgtcgacagattcacattaatgaatcagcatatagaagataatggcttctgaggtattgattattgttaccttcaacctnctttaaagtcgaatccctctgtcttgccagctctgccttgtcattttccagagtttggatctgcttctctagttgagatatcttggcagcttgcactacattaactncggttaatcaagattacagagataacaacacaaatcagttgggcagagtttgcgccgaacctttgatgagccactcagttcgaaattggactcctggagctcagcaatccgatccctcagatcgtgttcattcttcttggcaagttctctggcctcgtgcagntgactcc

SEQ ID NO: 24223 - DNA, 357 bp, Oryza sativa
tactatagtttagcacagtgtgatcttgacatagagagcagaattatcatatcaagtaaacattgaaaaaaacaagataactaaaccaggtaagatcggctgagactccgatactatctctaatagcaatcataaaacaagctagatattatgattccaagtattacttgataggtcggacccaaccgatgcagcattaagcatagagagaagcataagatctataatatgtaagatcaacgtgtgttttgattcttattctgtgatgaacaattggcgtctgtgattatcggttttgatatttggagattatcgtcgaagagcgtttgtagaataatcaatttcaagtgatgaaca

SEQ ID NO: 24224 - DNA, 232 bp, Oryza sativa
ttgcaacatctctttacatctatgtgttgccactacctctgacatacattgcaggtgggacaaatataagcactctatttgaggctggagctgctatcttatttcatgggtgactcctatacacatctttctataaaataatccgggcgagtgaagaccgactcatttataccaagtctaatacaatgatgacatgaaacctttgaagccccatgtagatactaagattata

SEQ ID NO: 24225 - DNA, 427 bp, Oryza sativa
  unsure (1)..(427): unsure at all n locations
gcttangtgcctgtgttaacactcattttttggagactntaccttctataaatgtgcctgggtattaactcgtgctctttaagtaggtgaattgttcatgcattacatctaacacactaatctttgtttcagcctttcagattatactgcatgataccttcttctaggttgtaggaactacacagaattttctcatggatttgntcaattatattatcaatattgatatatcatttattggtcaatatattgttttgctctctgactaaggagttttcctctctaattagatgccagacttctagatgctgtttcgcgtaacgatcctgatattgtcaaattctcatggtgatggctctttgcaatacagtatgtcctatcanaaggtaagtggcatcttcttcatgtaccagactgaactttgaaa

SEQ ID NO: 24226 - DNA, 316 bp, Oryza sativa
  unsure (1)..(316): unsure at all n locations
gcacgtgctgcagcaacatttaagttctgatcaaattcccatgctgctgcatagattcagaagcccagaaccttggggtggtaacgaatagcttgtgccagagcctgaaatataatacaatgaacatgagatatgtaaatttagtanatagtgagatcaattcaatgttagcctttccaaaatatatatacgcatgtgtacatatcatcggaggagaagttcatacaatataggcatgaaatggggcacataaatacacaacataagaaggacaaacaggcatcaactcatactaagatttaaaatgagatctaca

SEQ ID NO: 24227 - DNA, 417 bp, Oryza sativa
  unsure (1)..(417): unsure at all n locations
gtgctattatactgacataactcaagacaagattagccttgtgtatctattgtgttgatatcaacagcgaaatgattgctacatacttgcgtatatatttgaggcctcgttcggattacaggatagccatgggatctgtggaggaatactattcataggtgtttattccttttcataccattcggatcgcacaagccacacgctagagaatcacaagagattctcctacaccatctattccacgggaagaaacacattaacaacgatgggtgaattcgatccatgccaatacaaatatgtgattttatattgtatatgtgtcatggcgaattagggaatnggaacctgccactccgtcgcgttttgaataagaatctccggtagcctcaactgcacataataatctccgttagcctc

SEQ ID NO: 24228 - DNA, 528 bp, Oryza sativa
  unsure (1)..(528): unsure at all n locations
cactcaaggttctaccttttatatgttagaaacttgaatgcttccttgcagaaccctatggatggaataataaatactacactctacataagctatctttccaactacattgtggagattagcaacgaanatgtgctaggcccaggtgagcttttctagtgattgttgatacctacataagtcatctttccagcctattgaaaatgaagtctctttacttgtgaatngtggtgttaatgttactaagatttacgctactaagtaccaatacaaatatttgaaatcccggtgcagatattttctccatgaatggctttttaaatatttgggcttctactaatctgaatagtttgtattactagtatctaatatgcttattttctgcagtcagtatacttgcaagtattggtggccttatgcctcagtgtggcatatttctttgcttatggctaagaagcatcacaatctatccttgtgttgtaaataactgcagnttttttactttagttactaccacactgtgacttg

SEQ ID NO: 24229 - DNA, 330 bp, Oryza sativa
agaagctgtatgaaacacacattgagcagcttgcatatctccaattgcgagctcatgatcaggtgatgagatatatgggcgcatattcaatcttgacatttgaagcattctgatattccagaacggtgttataaattcaaattgacaggaaattggtttgtttggtagataataatgcttgagagcgcacaggcaaccacagataccgttgatgctttgcgctctggatcatctgctggaaagctattcatagtcagtgttgtctctgattgcctccatcatggttttgagatgaatcgtaatacaagaatcagagctaagatgcttaat

SEQ ID NO: 24230 - DNA, 145 bp, Oryza sativa
accacagctcgacttcagcaatgccactcatgcaccaacccatttaccacaagcaccgacactatgtcttagaacaaatcaagcaccgaaccaggtcgccatggcttggacccagcccttcgtcgacccatccatgacggcacac

SEQ ID NO: 24231 - DNA, 387 bp, Oryza sativa
  unsure (1)..(387): unsure at all n locations
ctactgangggtttatatgtaatgctactcacctaactatctgtactgatgatggntgagtggactgtccagtgaaccatgaaaccatgatatctgcagaacacctgagactgagcaaattagcaaagccagatgaatgttgaaaacgacaaataattacttagcccttattgcactttctttgagagtacaccatgcaactcaatatgtctacaaattcttntttcaaaataaacctggatgcattatcccggaatgtgtttgttcagcaagactcaccttcaggcttcaacagtcaagctacttgatggtgaacggttgcctgagaagacatataccattcacagtaccaatctttgatccggatagtgctttactctacatcat

SEQ ID NO: 24232 - DNA, 376 bp, Oryza sativa
  unsure (1)..(376): unsure at all n locations
ggtattgggcacttgatcacgcgcactttggcctaagcaaaaagtgcctaagtccctaaaagaacgtgacaggccacacctganaatatgggctgcagacatattaggcctaggccaaaaaatatgccttcgacactcctttataggatgacgcatgtaacatgctcccgagtaataaatctttcgggtaatatagaccaagtgtagctcatatgaatagcttctgatctgaatgattatcccttataggatactccanaataaatataataatggaatcccgactggcgcaagtattcgggtgataacccttacggngaataataaatagtccagtctttgagcatagaaaaatgatccatgatcatgaattcat

SEQ ID NO: 24233 - DNA, 330 bp, Oryza sativa
  unsure (1)..(330): unsure at all n locations
cgatgagccgatgacaatcacagatcacgcgggcagggcanggaccagccaccatccaggcagccgataggaagcgtcgacagcgataccgtcttggcggcttggccgatgggcgacggcgatcacgcgctataggctagtggcgccgatgcggtctcggcactcacggcgggctctcgcggactatgacatcggcgagaccgtgacgaagcgacgcggctcggcctgtgcctgcgctgcggttctcatggtgtggggccggtgggcanggcggcatgcgaagcgacgcgcacgcgcactgctccctggctgatcgctgattcgctgagc

SEQ ID NO: 24234 - DNA, 494 bp, Oryza sativa
  unsure (1)..(494): unsure at all n locations
actatacatactaagctngtttacaatcggccacattacttgtaagtgccattgtttaatgcgatcatcgaccaactttctaccaagcaaccggagatattctgaacaaaacaaatctaatgaaacctcattcaaattatgttaccatgatggctgggatgctatatgaaggggtaaatggcagcaatgggtgaagtagtgcttgagaaataatgtgaggcagccatatatgtgatgacgacgactatattatgctgaanaaataaaggccatcagaccctgcttttcattgatagtcacaatggtttgtactatgataccaggctaccaactaccgcaagagtttgtaagcacaaattgagcctgttaagtaaccttgatggactgtggctgcagctataccaacagtaactacaacactagcggtacatgagtgctattacctgtaaggctatgttctgtatccccttttctaacacctctctctcgttttt

SEQ ID NO: 24235 - DNA, 438 bp, Oryza sativa
  unsure (1)..(438): unsure at all n locations
tactcagcttctaggcaattgaggcattgtatgctcatacgataatcacgggactacgtaacatgtctgaagaccaagcaagagctgagaggtctaatacctcanagtccttgtttgcgtgcaggcttgcagaaggtaatccagtgagcccacatgtgatcaaaatgattggttacaccgagagtctggataagcttggctttccccttaaccgagagtatggtactgatttgattctncagtcgctttctcccagctttgaagccgtcataatgaatttcaatatgaacaacctgaacaggaccttggcagaatagcatgggatgctaaagactgccgaggaaagcattaagaaaaactccaaccatgtgatggttatgcataaagcgcagcccaacaacaagaagagtggtcaaaagagaaagctaaactctgatg

SEQ ID NO: 24236 - DNA, 411 bp, Oryza sativa
  unsure (1)..(411): unsure at all n locations
gtgacacatcctattactactaatctggacaagntttctaatctggattaggagactcgtagaanacttgtccagattcatagtactaaaatcccttacattatgagacggagggagtatatcactagaaagaatagggatattgaatctgctctaatatagtatttcaattccactaaaaaaatatagtacttcatccgtccaggttataagatgttctgactttcgtcaaagttaaactgttctaagtttgactaagtttggagtaaaatataataatatttataaaactaaattagtgtcatcaaatcaataattgaatattatttcataataaatttatcttgggttgaaatattactatttttctacaacttggcaaactaagacagttgacttgacgaagtaaac

SEQ ID NO: 24237 - DNA, 473 bp, Oryza sativa
  unsure (1)..(473): unsure at all n locations
tgcttattgccgtcaccatggtcgtcgccatcgtgctatatattgcaaagcccaactgctgagtctgcaagaattcgaggatctgaagtctttagtactagttggagtatattattatagcgtatgtgttgaatgacgattgacgtatntgcctgccattctatcaagctttcgatgcattttgtgtngctattggttgctactgaaatcgatcgaaacagctgtacaacacaccataccatatccgttgccagagctatagcatgactgcatgacgtgccgaagtgatccncanattctcagttagccagcgcttcccgtacgctcgcaagtgattggcagcggaagagaataccatccattctgtcagtgtacaggtggctgtacaggcccactcactcgcaattcgttgggccaacggccgacctactgaccgccacttatgatggcatgtcttgatactgacatatgac

SEQ ID NO: 24238 - DNA, 430 bp, Oryza sativa
  unsure (1)..(430): unsure at all n locations
ctcagcttaataagcaaagatatttctttggtaaagaatgtttttatattccacaaaataagattattttcttaggataatctgcacttctaatataacaaaaaaagctagcagcatgtagagtaacttatatatggattngaatgtggactaacatgcatatattgtagcatgcattntgntntgtangctgcattcctacattccaacccatgcacagagaacacatctctagattagatttctgataatcctntacaaatgctagtagcagactatatagcagaaactgcaggtggatgcttattgattgctntctttgtttggntcttaatattgtttgaacatgccatngtattatatggtagaaataacaatgcacccattcattagcctgcagaatctccgtctggcagaggatttttttctg

SEQ ID NO: 24239 - DNA, 414 bp, Oryza sativa
  unsure (1)..(414): unsure at all n locations
tcactgtagtatttgatcttttagaataataaaggagaatattgtttactgatatacaaatatcccatgtttacaaaaaaaataccatctaaaattctaacattcagaaatttacaattccaatctcctcctgctgctagttttcatggttnntctttntcactttactggaaaaagcggnntgatgggtaaaatggatttgcccttgttgtggtgcacatcctcccaagacgcaatgcgcatgtctgtcacctcttccacacaccaccagatgacgtgcacagaggatgctcatgaaagttgccaagatgctttgtcatgtntntatccaangtgttctgctgctacgacatccctctccagaactgtagatcttntcccctttcttttttcaactttttatcttacaacacc

SEQ ID NO: 24240 - DNA, 378 bp, Oryza sativa
  unsure (1)..(378): unsure at all n locations
tttctccgaagagattaggagaagcacacacgaatactgaacactgaagaagttctgaagatatttctgataaaagtagcgtggttccatttgcacacaaaaaagtgcagtgacgttagtttcagttttctttcgtcttccttgacagaatagtccaaggaatgccttcaacttggaaccacatgatatctctcatctggttgtataaatgttactaatatgttatcagataaaaaaataacataaataaaagttatatatcttgatgagttatacaactctttntggtaatgacttcttagttgaaatcatctattatttgaaaatatttatttgaagttgtcatactttcaaattcatattcaactgttcataaaa

SEQ ID NO: 24241 - DNA, 368 bp, Oryza sativa
  unsure (1)..(368): unsure at all n locations
ttgcccgcagggacaccgaacacgcacttatctgggttcagttctatgcgggcggagcggagactctcaaaagtttccgctagatccgagagtaaagtctcttggttgcgcgtctttacaatcaagtcatcgacataagcctcaacattacgatctaattggctacccaaagaaattcgagtagtacattgaaaagtaggacctgcattctttaacccgaatggcattgtcgtataacaataaagttctatggnggtaatgaatgcagcttttttcttatccttcctagccatgcgaatctgatggtaactagagtatgcatctataacacacaatanggtcgaccccgctgtggagtcgacaatctg

SEQ ID NO: 24242 - DNA, 504 bp, Oryza sativa
  unsure (1)..(504): unsure at all n locations
gcttctcataatgatatatgaatgggagagtcggaataatccagcacatctgcatgtgcttgagcaaagaatatattctattaatattgcaagaaagntctctattcattatacatgtcgaaatatttttgaggttgcaataatagtttatgccactatgcatgttatctgtaaccaattaggatgattggtgactgcatatgttctgctatttactgcagtcccaaatttatgttgtgtgaatctgtgcaggaagaactggacaacatggccaaaacctaccctgatcgctntaagatctactatgtcttgaatcaggtgaaccctatgcttctattattntacaagaattgtgtatcaacatcagtactctagatacatatcaatagctntgctggacacagtggtctccaggaatccacgttcgccatttctcttgaatatattggagtcgtgctgaattatgtatgacntgctgatggacanaggatggtgttatcatta

SEQ ID NO: 24243 - DNA, 452 bp, Oryza sativa
  unsure (1)..(452): unsure at all n locations
gtctatggcgaccctaatctctagaggagttgtgagctttcatgcctgccaaacctaaccattgtgaactgtccaaagctgatgttgntggatggtggtgcatcagttcacatcatggaacttggggaccacgggatggaaacgctccccgagtacctgcgacatctgacgttacgacatntgaagattggttgcagcttgaatctgctcatggtgatgtcgaccaagcatgatgcaagcaggtcagagtgggagaagatcagccatatcatgcatgtggagggattcgctagcgataacggcgaccgcatcttgagatggtacatgtcctacacaagagatccatacaacctggagacanacattacaagcagatagctccacaccaccaggtacatgcatggtttngttcattacgagtanagtacactccctttgcctncaatacatat

SEQ ID NO: 24244 - DNA, 446 bp, Oryza sativa
  unsure (1)..(446): unsure at all n locations
gactatgatcacattattntcttggtatatatcaaatttgggctaaccaacctccacgtagccaacgtaacctaatcgtgtgtcacgcccggaatttctatccaaaattccaaacgcttacatgtgtgtaaaccctcgttcaggaatcagccgatgcacacaataacaaattgataatagagtacaattattactctaattaataagcgaataatatgtcattacagaggtagatagtccctctcaaacaataaagatctaagcagcggaaaataagataaacggcgcagacggctccactccacaggcagcttgaccaaggctacacctaatacttcacaccatcagcttcactgtagaactcttactctgatgaatgaattgagggtgagtatatgacatactcagcaagccacgcagcatatatgcaagtgcacacgataaca

SEQ ID NO: 24245 - DNA, 489 bp, Oryza sativa
  unsure (1)..(489): unsure at all n locations
cttatattatacttgatctatatcataatataagggttttcttctccataaataatcacgtggtgtgttttttaatatgtgtgcgtcagctctatgctgtcatttgtaccggtttgtatgtgtcaaaaagttatcatctgcatgtctatgtcattgtgaaatattgtgtgcgttcaaagtactggcaatcaactggtacggattatgatttctctagatgaaatcagcacttattaccagatgaactattctgctcagtgtccggcgaattcaagcaacatggctcttctttcattntattggtttgaaatatatangcggtgctaaactctctttntcagttgacgtggngataactctccacaccatatatctcaatatataaatcacaatgggacatcatggaaacaatcataattgtaaaatcagtgaaatttgggcttgaggtacctgtgtgaccatacatattggctgactcatgcatcataa

SEQ ID NO: 24246 - DNA, 346 bp, Oryza sativa
  unsure (1)..(346): unsure at all n locations
cttcacttgtgctctgcaattacctggatgtatgagccgtgaaacataaatgcattgacatcaataactgaggacgaattatcaacatttttttgtttacttggaaatcgctgtgctattagttaaaatttaactagttttagatgtatctgtattatgctatcctnntttggttgcaatgcactgctttaccaagattagtctcccttcggctggtgattntgtagttgtcctggcattctttataattttgtatggcaggtggaaagttgttttatcaatgaattctgatccactctgtttacacccaatggtctatttgggttctgcacttgatttctggatt

SEQ ID NO: 24247 - DNA, 473 bp, Oryza sativa
  unsure (1)..(473): unsure at all n locations
agagacatcaccaagagatcgaccgacaattaatgatggttattatcagatcattttcatcaaagaaaaatatcatgcactgatcaatcactgaggaaatggatggatactactgaagttcgcctgctgaagcttgtaagataattatgagactcatctttcagtttatagcagtaaagattatctctctttgatttgaaataaatcatgatgaatttgtaattaaattggtgtgagccaaactgcaatattagttaaatcatgacgaagcacgcctatgttgtcaacacaatgcatcagaattaactataccaatctgtaatctttgatatataaacccaatttcctccaaatattaactgtaccaatctgaatttccactagagaaccaattctgntgcccagatgtttgagctcaagcactcacatnctcacatactcgcgcactccagaagtcagaacaacacaacaca

SEQ ID NO: 24248 - DNA, 433 bp, Oryza sativa
taaagagtgagagagacatatctcgttaataaacaacatataaccttttaaaatatgtgaacaccatgttaagcatattataagtttaactataattgtaatccgcagaatgtttggaaaatgcacttcagttataaaaacgttacaccatttcaccaaatgtacattgttctgaagaaaattatgtagcaccaattccatttaagttgtgtaaaatttgaagtgaacttaatttaccctgtgataagatttctcacaccactagcctacaatacaaaacaggctaattgtcttgagctgttacagatcaattatctgtctcgagaccataactggtatatcataatgtatgaccagccatcccatatgtatcttcaagaagttgtcgtaataaaatgtggtcaattacagaagtatcacagcttcccatatg

SEQ ID NO: 24249 - DNA, 354 bp, Oryza sativa
  unsure (1)..(354): unsure at all n locations
catgaactcaatgtgataagtcgaccagcttgcgaacgagaagagagtaccacaacggttgctgcggtgaatgttgcgctgtgggatattctgttatagttaatctgggttactgcattttctgcngattaattcaatcggttgatgattgattattaaattagctagtcgtataacagagcagccagtcagtagtagatggaattacgatgcgatcggatttcagcatacaggacacccagtgcggaccacgtggggtcggtgagaatatttctttcttttctatgctggctgatggcccaatcatactgcgtatgtactggatgatcttatctatagcttggctagttcatt

SEQ ID NO: 24250 - DNA, 481 bp, Oryza sativa
  unsure (1)..(481): unsure at all n locations
ggagagggccgtatctatatgtggagagatgtcttgtgaatgtggagatgctaagcatcctaagagcattttctctcttgtgttgacaagtgtgctctctatgacggtttccaccggtagaaacggtcacaaccgccaatggatgaggattgcaactgccaggtgaaaaatgggcctggatggactagctggtggtttggccgaaccctggccggctctgctagcccagccctttctcctagagactgatatgtgggccccattgtatattcttctgaagaatggctcagatgattgcatcttattgngtttatgggctcaagactccattagcttggatatgaaaagtatattctcatccttcatgtatattntctctcaactctagtaacttgtcacctgcatacaaatatataccaacactcgtggaaatcgtagaaataaccctaccactatngtggatgtttacatctatggttta

SEQ ID NO: 24251 - DNA, 385 bp, Oryza sativa
  unsure (1)..(385): unsure at all n locations
gtgactgagattntnttaagtcaaaggatattaggagccatcttcaataaagntaggtatgtgaacaggatggattcactcgattttgctggtgctttcttattgttctttcacagnattcttgttataatgtttgggttagttgtgcttgttgctattcatgatggttttactttgtgatgaaccatcaatcattgcttacacagttctcctggtaagttccaattatttttattgaacttcaagtttcaagttccactatttcttcataagtgttggcctagccaactgaaagtaaagatctagtntttaaactgtagcctaataaatatcttgtatccattgctgttangaaggcaattggaagagtctggagttctaaatg

SEQ ID NO: 24252 - DNA, 366 bp, Oryza sativa
  unsure (1)..(366): unsure at all n locations
gatgtcttaggtggagccctagcttataccccagttgtgcgcctgtgtatatggagccgcangcccgctattccgctgctcgttatttttgattagcaagccttacatgcctctgtaataatgtaaatattatcgatataataaagatgtgtcttttatatcatgtttgtgtggagtaccccggctttttctgggacggggattaatacactaacgttcgggaaaaggcaattattccggtcgcgacaagctggtatcaaagccatctcgactgtaggataagccaagtggataaaacctaatgacatattgtataaataaaactatttgcgaaaagttctcttttcttcttccactaatgctatt

SEQ ID NO: 24253 - DNA, 399 bp, Oryza sativa
cagcttacacccttatgaagagaaacatgtcactaatgtgtttagtcaaacatgttaagttgtgcatacaacgtctgcgtaagaaggaggcccagttggacattaagtctaccaattcggtccctttttgtagaatagacaccgacccattggagaaagacgctgcccgtatatacacaacagtcatgttcaagaaagtccgtgcacagatacggctaattgctggacttgaagtcatcagtgggactaatcaagatggttcgtcactgtatgttgttggtttgaaggatgataatgaggtgtgggatgaagtgagggttacttttaaaggccaggcattgaaaggtgtggaatgtcactgtcggaagatggagtgcgaagacatcccttgctcacaca

SEQ ID NO: 24254 - DNA, 406 bp, Oryza sativa
  unsure (1)..(406): unsure at all n locations
actcagctgcctatcatttcttttttactcctncttncaaaaacaccatctttntaaaaactccttctctaccacgtacaataagggtgtgtttacttcatactaaaattgaaagtttgattgaaattgaaacgatgtgatggaaaagttaaaagtttatgtgtgtagaaaagtttggatgtgatgaaaaagttagaagtttgaagaanaagttgggaacttaatcaagcctaattctaaacatgtgtcagaggaatagtggtactctctctgtccaaaaaaacaaatataaagctaagtactaggttggttnttttataggacggagggagtaggttatactgtgcacgtggttcgtgccaggctgtctaccatacgatcacccaacgagaagctgtctacattc

SEQ ID NO: 24255 - DNA, 411 bp, Oryza sativa
  unsure (1)..(411): unsure at all n locations
tcttagtgccggcattgcacgggtcgactagatgtcaactggatttctcatttggngcactcggtggccaaatgacccagttcatggcaattgaagcaaccgatatttttccaactcgggatttgctcttcccatcttgattcttctgtcttggcaatggaattaagcaaaaactgtagtcttatcagggaattgcgttgccttcatgcttctcttcattggaactggcgggttgtgtggccatcttcttcgtcagcggaaaactgaattgacaatcttttggtgcatgatcagatcctttgcacaagaaacaagagatctttgcttgaggacattcgcctggtggatgctcttcttcaccataanggcacggagcaatacacgtgctagcaatgtgtccaaatgatcacc

SEQ ID NO: 24256 - DNA, 499 bp, Oryza sativa
  unsure (1)..(499): unsure at all n locations
tggggggagacatctctcccactactgaggtaacttgtatcacattgtatatttccctttccaattgcatgtgtactttccaattgcattntataaacctaaaaacaatatgaaaatttgcaaaatagaaaataccaaaaaagataggttaagtcttgtcatgctatgtaagacaaactagttctctttgttgaaatgattaatagttgctctggtttatatctcttatatatgggttcgtaggtaagtgctctctcaaaaattaaatataagtagccaacaattatctgggaacctgaggtaaatgagctacattngctaatctagtctaagttgttgccagatatgagatagtaaaaaagagttgctatgattctggtctaagtttgacttaaattccggatggctctgttntcanaatgataaatntganaagntcctcatttgatatataatactaccagagccaaaaatgtgccatcatgaatgaaccatatac

SEQ ID NO: 24257 - DNA, 436 bp, Oryza sativa
  unsure (1)..(436): unsure at all n locations
tataacaaggaaggtgtagagggtttccttatctttccatattgtttaaggacattctgattaggagagtagaactccagatatggttgctttagtgtggacaatctgaaatcttgggcagattctgaagcttgttttgatgtgcgctttatgccatataaatgacagaataaaaatatggtttctacacgaaagttgtaggtattattctgtagtttcctanaatgtattcgttttcagtggtaaacttaataattactggagtaacaatgttgtttatagatgggagaggtgattntctgtttgcttgacggtgggatagcgtcgtaggagcgtgccacttaatttattatagnntatattgaatgtgtttatacgggtgtgtttacttattatagtatattcaatgtngctgctgaggtatgttgtgatatgt

SEQ ID NO: 24258 - DNA, 291 bp, Oryza sativa
  unsure (1)..(291): unsure at all n locations
cttggcagcggcagcggccccatctgcactgcagtcggtgaacttcctcgtctatcccccaaccaccttcgctggctccatttgagccaccgcctcgatacgacgcaaatcagcccgcctgcatcggctcccatcatccatgactcggccggagttgctcattccttttgctgggattggtctctcatgaagatgagttcatccgtcgaagcagtttgccggtggtgattcattcaacgatgcaagtgaatgatcccaatctctgctcttgaccatngctcaaactcactt

SEQ ID NO: 24259 - DNA, 450 bp, Oryza sativa
  unsure (1)..(450): unsure at all n locations
tagtgtgtgtgagtgaaggagtgaagctccttatatagatgttcttatgacggttatccttatgngagatggctgaattgccccgcaatcgccatcacggagtaatctgggacgtccatgccaaaccccagcttgaacggctgagacccctggctcgggttcggccgaacctgggctgggcccacctggcctggccttcgacccatctcnttccctggtcctcctctatccatttctgggagtgttggactgattctttggtattttgatgaagttcacaaaccatccttgtatggatacatatttctcccacactttagtctgaatttcctcctaacactcgtgaaatatgtgagatttaacacctatcactatgtcggatgatttattatctggactntatgcagactgtggcggtatanaattggcatttaataaccgcaacagcgg

SEQ ID NO: 24260 - DNA, 368 bp, Oryza sativa
  unsure (1)..(368): unsure at all n locations
cagcttctcgggttcttggtctctgcccgaggcattgaggccaaccccgagaagattcgatctatcgagcggatgcgcccccccagcaaacttatggacgtgcaatgcgtcaccggttgcatggccgccctaagtcgtttcatatcaaggctgggagagaaggcgctacccttgtttaagctcctcaagcgctcggngccgttcacttggacggaggaagctgaaaatgccctcgcccacgtgaaggcgtatcttaactctcctccggttctagtcgccccggagccaaatgagtccctgctactttacttagcggcgaccccncaagtagttagtgcaacgtttgttgtggagcgcgatgaggacaa

SEQ ID NO: 24261 - DNA, 316 bp, Oryza sativa
  unsure (1)..(316): unsure at all n locations
ctcagcttanagaccgctctttggtggagtgagtggagcaaagaggcagcttcatatcatgtatacccccacacaagccttcattcccttcaattgcagattcatttatattgagaaatatcccatcattatgaactggcccttcaaaatggttgaatgagaggttcaaactatctaagccgttcatgcttgctagaaattgaggaatgtctccagaaaagttgttgtgtgaaagatcaagtacttgaagacctttcagccgactcactgatgctgggattggcccttgaaggaagttcccctgtatcttaaaata

SEQ ID NO: 24262 - DNA, 368 bp, Oryza sativa
  unsure (1)..(368): unsure at all n locations
gcttcagtgtgtgttctaagtgtgggatgagagctcctcanataggcttcatatggcggcaactctgatgggaatttaccaccatgccctctggaaccgccatcagcaagtgatcctggccctccacgtggaagatgggggccaggtggcacaacactggttccaccaaaccaggctggtcgccaaccgacttcagccttggtcagtctctgacaggtgggtccccatggtcggtgtggatgcgatgatagtttgtatggcgggtacacctatcaggtgggccctcttatcccttgggacttgcttgaagtgagggaagctccatttaggatgaattctcccatttntggtaatatattcctgcatac

SEQ ID NO: 24263 - DNA, 342 bp, Oryza sativa
  unsure (1)..(342): unsure at all n locations
actcagcttanggctagtatggctggtcggacaagagttttacagaacttcttgagctgnttaaggatctgttgccagaggggaacaatttaccgcagacgacatatgaagcgaagcaagtattatgtccggtgggcctggaggtcagaagaattcatgcatgtctgaacgactgcattntgtattacaaggaatacgctgacttggatgtctgccctatctgtggggcatcaagatacaaacgagcaaagagtgaaggtgaaggaagtaagtcaaagaggggaggcccaacaaaggtggtgtggtatctcccaattgcggagcgcatgaagagaatgtttg

SEQ ID NO: 24264 - DNA, 346 bp, Oryza sativa
  unsure (1)..(346): unsure at all n locations
tgtcaattctattccagagggcattctggcttgctcttggatggtacattctgataacagctgatacatgtgtactgtttaataaaataacataagtntattattccaatcatacgtgtttaattgtggatatataatattccaatgaatataagtttaagaatgcatttatattataatttagattttagaagcaaggttaagtgatgcggttattaggttgtgtatttagagtgcttttgagctgatgctggagtgaagatggaatgcgatgtatgctattcatgtacttgtggtgacggcaaagntagagttgcatagtttctaaattttcactcaacgctat

SEQ ID NO: 24265 - DNA, 155 bp, Oryza sativa
  unsure (1)..(155): unsure at all n locations
actcagcttcgctcattgaagnagagaactgtccgcacctcgtccctgttatcttcgaaattcgcgtgatgggtgaagctgtgcccaatcatgctgaacctgtcatctacatcgtaagtgatgaggaagaagaggaagacccctgagaaagagag

SEQ ID NO: 24266 - DNA, 375 bp, Oryza sativa
  unsure (1)..(375): unsure at all n locations
ctgctactgtgttcgccttcttccttaggacgagatgaccatgtatgagctccgtgggtcgaactcttttggtgaagatgccgaagtgcttgtggcgtacttgtgcatgtgctcgagcgcttcgactcttactccttccaaaagttcgagcgatacttcgcgtgcttcttcgcccgcggaaaacatcacccttggtgagttagcccctagctctgctggggtcattgcctcatcgccataaagaagcataaacgggccaaacttggttggtcttgtgggggtcgtccgaagagcccagagaaccgatagcaattcctctggccatttgcctttcgccacccnctcaagtcttttcttcagtgcttctataatctt

SEQ ID NO: 24267 - DNA, 488 bp, Oryza sativa
  unsure (1)..(488): unsure at all n locations
ctgtatcttcatanaatggtgtagccaatgataagacacatatattacttctgaatacctcttttgagtaacatgtatacattcttctactatcatttaagcatcctacattcaactatttcttttagttcttatgattataaagtgcaagtaacacataaagatgtatgctccaacctccaaggctaatgcactgaaagatcttaatttctaccaatgatgtttaaggtgatttgttgaagctgctggatgtttcatctgctgaaaatgttctgccaacgacatatggagtcttacaacctcctctatgaaagcaacgcttgaaggtatgagtgcttaattatatgcaggtctgtcgagccacaaagtgcatagagtacatgacataacagcgaattgtgcctacttgtgtttgccagcattntacatncgctgtgcacaattatacactnntttgtctgcgaagacccttgatataaatatactta

SEQ ID NO: 24268 - DNA, 291 bp, Oryza sativa
  unsure (1)..(291): unsure at all n locations
tatgtgttgtgaccacgctcacgtggtggtcaatcgctgtttgccggtaaagngtacatccactgcagtgtgagtaaacccaatctattctaatagccgtgctcgcggatattgagcacccggacatgtattacacttggctagactctaaatttttaacttgtgggggatgggatattgcatgaagaattctatgctgatggagccacattccgagaggacggaatgtggacattctcacaaaaccatgacgattcaatggcgggaagctatccttgggaacacaatgga

SEQ ID NO: 24269 - DNA, 494 bp, Oryza sativa
  unsure (1)..(494): unsure at all n locations
aagctacacgctgtaatgaacggaatgaagatcaatagatcatccgttaggtcgccttctgttntgaacaagccctacaaggtggtcaaagaaattctattcttttatttaccattgattgngctatctgtgatgcttttattattcaaccaaactggtggaggagccaatgtcacagtaatcttattaaaggtggtacttatagaacttccattcttatcggtacatgtgagtgtgagctaatgtattccatgatgaaatgcattccatagcattangattggatgctacagggaggtagatctcggctgtgtcatgtattccatgatgcanagtcgatgttggctattgtctcggagttttaaatatatcgaagattataaaatagaatgtaatgcgtacttctctgggcatgatgtacaagaactttaactcaacttgattaagcgaaggatgatatcttttacttcattaaatgtagtgtaaacgtgcct

SEQ ID NO: 24270 - DNA, 270 bp, Oryza sativa
  unsure (1)..(270): unsure at all n locations
gaatgacgcttcgcaaacgtccctctgacctggtgaatgccatgttgaaatggtgatcaccaagtcggaggatgtatgttgccaccggtatagtcaagacacctcgtcctactcaccaaagagcctgtggcttttcgtatccatggtgcacaaacacccacaagatacgggacggntctaatactcaccatcattcccactaaaaagatgaagatggcggcctatcaggactccccacctatcagacgccacatatcttcacctctgatc

SEQ ID NO: 24271 - DNA, 481 bp, Oryza sativa
  unsure (1)..(481): unsure at all n locations
ctcagcttatgatgctaaatctgacttggtgtagcgcatgcgactgatgagaagcgcatgcctaccaggaagagctgtagcatctcccactttgaggagcaatgaccacctaaagatagaataaagcactctatagtatggaagcaacccacaagtagtccccaaacaatccttgggagcatccttctcatacaagaaagtagtgctggtcactgataaagcatcctctgcaaagagatgtggacaactcaggtcatcatcatctaactccaaagctgcagcaaactgagccatagaaacctaggattcaatcaccagacacaaacatttatttaccgacgtgaactgttagtattttctcccttgatgatagtatttcaaactcgccattctataaaagttccccgaaattgcaccatatgcaagaatattctcaccacgtacgaattttataatagatccaatatatntggggttttta

SEQ ID NO: 24272 - DNA, 400 bp, Oryza sativa
  unsure (1)..(400): unsure at all n locations
tacgcatctaacacacatcagtctcagatttttcttttactcttcactgcatcaggtcacttcacgtaaccaactgacaactagcctctattataacggaatgaacaaagcacacacacaccacgcaagggtgcctgcctaactactaccactacactactagccacttactagccagtagccactcgcagcgtcctctggtccagtacgtgtggttctggttcatcatcgtcgaacgaagcaaacgacgacgaaacaaactcccggatacggcgcccttctttggtcagaatctttcaaacctcanagcangaaaaaacacagacaaacaagaaccatctctgcattccgccatacattcgcgtcgatcggtggtcactgtacaggttgatcgatctct

SEQ ID NO: 24273 - DNA, 407 bp, Oryza sativa
  unsure (1)..(407): unsure at all n locations
ngatatgaaataattattttatataagttgcttataaatattagataaatnntattgtaagtttataataatgaaaactcaattaataatgcggtaatattttttcccgcgtcctaactttattttcatgctagtaacaaaaaaataaaataaaactatatgcacagcaaactgactcccaggctctccccagtcatgactcacctcagtagagatagaaactgactacaaactctccgtcttctccacccagcacagcatcccaccctttcctcccctccgatccagagctctccgtccgcttcccgcgctcgtgtcgcgcttctcctcttcagcgtcgcgccgcgccattggcgtatccgtatncttgcaacgcgggcgccgcgcgttccactctctggtcggtg

SEQ ID NO: 24274 - DNA, 293 bp, Oryza sativa
atattgggaaaaaacactcttcaacgactgtttattcttttaggaatgaattctgttcacgttagaattacattccatgagaaaacacctataatagtgacgtccgacattgatctgtgagcgatgaccatatacgaaatagatatttaatcttaataaggaagtgatttctaaataacaaataatataatgtctgaagcacataacaataattcactatcacctcatgtgtaaacaatttgtacaaggtacatccacttgcacaagtgaacaggaaagaaaatgcatgacag

SEQ ID NO: 24275 - DNA, 444 bp, Oryza sativa
  unsure (1)..(444): unsure at all n locations
gagcaaatagtatttgtgagattcagaagccgctggagttgtctctgattgaacacctcgacttcaacgatgaaggtggagctgacaggtcgatgatctgagaggttcaaacctgagctccaatatgatagttgcttgataccctttcccagccatagtatgcgatcacacctgattcagttaggaggtacgtaccaaatgaggatcttaaaagaaaaagaaagccggagacaaatgacagaattgactatagaagttcagaaacaaagcatatcactgtctgatcagtacaactgacggtatatatttaggtctacaaggaaacatgaatgaacaatntaatgacagaaacatgcacttatgtggttaanaagagtatgttcagagatntcaccatgcttgagatcttttattcctcacttcgtcagggttctccccaacata

SEQ ID NO: 24276 - DNA, 383 bp, Oryza sativa
  unsure (1)..(383): unsure at all n locations
gcatcaactcgcggcggttacctcgtattacaatatggatgctactaagattttgtttagcgagtatattttacaaatgtcttataacttgtgaaaattcatgctagctcttaaaataatgaaataaatcttgttaaattcaggaaaacaaactctttactgaagtaagcgagtataaatcttggtttgcagntgatagaattgtttcagattgaggattctggaccattgcttgttcangattggattctaataaggttctacccctattcagcttggttatgagttatgtgaagacaagctttcgcgaatctttatttatttgtgcaggtgggctaagatagagttaaaattaagttcttgcctacatctttgtatatcat

SEQ ID NO: 24277 - DNA, 372 bp, Oryza sativa
  unsure (1)..(372): unsure at all n locations
tgcccgcaggtacaccgaacacgcacttatcggtgttcatgtttatgcgggcggagcggagactctcaaaagtttccgctagatccgagagtaaggtctcttggttgcgcgtctttacaaccaagtcatcgacataagcctcaacattacgtcctatttggctacccaaagaaattcaagtagtacgttgaaaagtatgacctgcattctttaacccgaagggcattgtcgtataacaataagttcctatgggggtaatgaacgcagttntttcctcatcctccctagccatgcaaatctgatggtaaccagagtatgcatctagaanacacaaaaggtcgcaccccgctgtggagtcgacaatctgatcta

SEQ ID NO: 24278 - DNA, 404 bp, Oryza sativa
gagaaaatattggcttcgcctctggttctatgcaatatagaatcggatagtgtagctgggagattattcaatatgttttcaaatttatgtttcctcgtgtctacatatgtgaacaaggggtgcataactatgactataattttcctatactttattagtgaacgtgctgactactagaattggccagccggcatctcagtcacacttgcatccgaggatgatttaaacaagaatgacatattggtagactcaaatagaccctattgaaatgtaatcgacgaaattaccctccttttaagtctcccttcgcagtaacgtaattgtgtctggtcaacgcacacattcagtcagtaacttcctgtcccaccaccactcttctttgggaaaaatacgtggtggaaacc

SEQ ID NO: 24279 - DNA, 491 bp, Oryza sativa
  unsure (1)..(491): unsure at all n locations
tattaggacctatgatactcagctcggattaagcatcgtcgtcgtgtcgacgacgagatgatgttctttcaaagtatgcatgaatcagccacagctaatttgcatggtttgcttaccttttccaatcattaaaacacaagctggattttccaataattggtttgcatcgagctgggatttataacttaagggtataattagatttatattccactcttgtttataatttttgtaaatacaatggttttgatcgatcgatctacattngtataactaatcagcagaccacaatcaaataatgtattctatttctcggtattttctaagttaattaacttgtaatnttcaggactgtagatacgtggtgatacattatcgtcanatttttttaatagtataattaaaaatatacctttacatatatactnataatatgtgtttcctgtatagnngcataaatattaaaattgatgagtgcatataaacatcta

SEQ ID NO: 24280 - DNA, 342 bp, Oryza sativa
  unsure (1)..(342): unsure at all n locations
tgactgctttgtgaggtagaaactattatgccattactggtatctcanaactaatatatactgcttgcatttgtcaaatgcgtcacattggctgcaatttgcaacaatggaagttcttgtgcatgcaagcaaatggtgaaatggctgtctgcaatgtaaatggttatatgaatcacatctcagtgtgtagatctagccatcaacaattcctgttccatcacactggattggngtattgccatttgccgtctcagattttcatattctcagaaataacaatggtggggtggaaatataatgcagcaatgtgttattgtcaattttatgatgatatataatttc

SEQ ID NO: 24281 - DNA, 476 bp, Oryza sativa
  unsure (1)..(476): unsure at all n locations
gttgagtaaattgatgggcaattgagtctgaccgtagggtgagggagatgctgacctctctcaagccaccgcttcgcctccaccagtgtggcgntgctgctacgctgaacaagaaagtgtgtgagctcgttgagacgctgaatgggagtgaggaatcgcctcccgctgatctcctgttctctatgagcgagagcttgccgccggactgaactggatgaaggaatcactgctgtgccatttcatatgtgccaacagaggagaactgagagattgctttgagaatgtcacgttttgaaacacagtctttatgataagcataagactttagtcctaccaaatnttctttcattcatgtgggcttggtgggccaccgttgaaaacagacaagaatcaaaatcatgatgggcgctaattaccgattctgcgtgatattaataaccctgcatgcaacttttatgtctcaaatgggtgtacca

SEQ ID NO: 24282 - DNA, 428 bp, Oryza sativa
  unsure (1)..(428): unsure at all n locations
gcacacatatgcacttaatcaatgccacagagccaaaccaaacggactttccgtntgtgaatagaaaacagactagcattntgtcaatggaaaataaggtacctttaaaaatgaaaaanaaactaaaggatttctaattatgaataggtatgccaatagaacattgcaaatgatatgcttcgcataatgttcattcaatcaactcaatagctntggaactttaaaaggtgaaaaaaagccatttacaaatagaaagccttacgaggcatgcttgggatataggttagatggcatcaaaaccaactaattatacaagttnntttttgtgtgtccatccacacgaggagctccatggcgtgctcatttggagagaagagggagaatggggaggaatgaaatanggagaataaggagtgcgtcgcaatatg

SEQ ID NO: 24283 - DNA, 447 bp, Oryza sativa
  unsure (1)..(447): unsure at all n locations
actcaagcttctcctcgtgcttcacatcgtcaagcggtcaagcgaataatgatgtatttgaatctttcactcgagnntggagatttggattctacttcatcttctatatgcttaagtggatattctgatgctgattttcgagggtgtagaattgataggaaaagtactagtggaacatgtcattttcttggtaaatcattgattgcatggtcttctaagaaacaatctagtgttgctcaatcaactgctgaatctgaatatgttgctgctgctagttgttgttcacaaattctttggcttttatctactttgaaatattatggtcttactttcgagaaagtacctctcttttgtgataatactagtgctatcaatattgctaagaatcttgttcaacactcacgcacaaagcacaatgatattcgttttcactttttgagggatcat

SEQ ID NO: 24284 - DNA, 335 bp, Oryza sativa
  unsure (1)..(335): unsure at all n locations
actcagctgagcattagattacatttctccaaccgtcccacgggtatcaatcgctttcaactgaatgggagaattcgaaaccctatattggaagaccgtttcaacgaaattcataattgaacgcttggaacttgaggtacgaggagatcacctaaggctttctctacacacgaaatagctagatgatgccgttgacccataatgcaacttgcgcttggtggctanggtgggagagacaactatgggtctgtgggatcctttgcagggaacaaaaggagacttgagagcaagatagactcactgcaatatatcgatctcagtgtgcagagtacata

SEQ ID NO: 24285 - DNA, 462 bp, Oryza sativa
  unsure (1)..(462): unsure at all n locations
tgtagtatgggtgctntgatgtccatcattagtgaactgatattactagagatntatgcaaaagcaggttaaagcactagtagagtatagtaaaaattaccatcacaggtatcatctttgcacatttggcaagtgtttggacagggaagctcacatacttgagtgcctgaaacaatcaaattatatttggtaaattaataacatgaatcaataccaatgacactagacatgaataaatgggattgaatataacctcatattggcaagttgtagtcagtatgtttgatacagagaccacacagtacttctgaagtggagccacagggtccagggatttcttacttgcctgcatgaatgtacatacaggaattaggggttagcatattctgttggaggtaatctcacagagagatctgtaccgttagcaccagcgcagacaccgtagacgtggtgatacgggta

SEQ ID NO: 24286 - DNA, 446 bp, Oryza sativa
  unsure (1)..(446): unsure at all n locations
tgctttcatccatctcaagaaaacgggcgtcctgcacctaatgctctaattaccctatactcagtagcagaccagagtgagaggccgagagcaatgccaggtgcaaaaaccatcttaaatcacacgcaaaaatcttgacttgacaggcagaatcattcatcatttcgtcaaaggaaaactcagctaccaccactgcactgtaaccaccgagacattcagaattaagcaacgaattcgatctgaaagtgcatgtctaggacaattaatcattagctcanaggaattgatcagctggtgtgtttcaggcaaacaagtaaacaacagaattcagtagtacataaatatatatcagcgcgtctccatgtatagagaatcgattatataggttngaataaacattatgcgaccgaagaacaggaagaaaaagagaaaaaagatagtgtgac

SEQ ID NO: 24287 - DNA, 370 bp, Oryza sativa
  unsure (1)..(370): unsure at all n locations
ctaatgtattgggcatacgccatgcgcacactgctntaacagatgtgcttaagtccctaaaagacacatggtttcaccacacctggaaatatatggcatatgtggtgtgaaatccgagtaaataaactcataaaggatttaccaaccgcctggaaaatgaccaagatatataatcagcttaagccataatattggtcaataaaaatgcacacttacgtggcgaanagcaatgatattgtatctaatcaattgcttgataaacccaaacagtgtcatgactatataaaaaagtcagcggagcagctatataaagctntactgtttgacaccttttaagatgcattgtaccaactctaaaaagtgagtaact

SEQ ID NO: 24288 - DNA, 456 bp, Oryza sativa
  unsure (1)..(456): unsure at all n locations
actgctatggtcgcaattcagatgcatctacaattcaattcttcatggttgctaaaatatgtcaaacatatcatattacctattattctatcgacaaaataataagttgcgttcaggatcatatatagcttaaaaaatgcttatatttgtgggtggatatagtacgtgatgtccaccaaagtcttatcacattcttttttcttttactcattacttcttgtcctttgtcaaaagtaactagtaaacacttgttagctgttaggaaaatagaaacgacattgtttgaccaagttacgtccagttcccctctctttgcagtctagataagcaccggccatagccttgtgctgcatgatgaccatgagatgacaaagtaaacatgaagatattctctttgtcctaaatatttgaacgccgtgatnntttanatcatgttgaccgttcgtctttttaaaa

SEQ ID NO: 24289 - DNA, 457 bp, Oryza sativa
  unsure (1)..(457): unsure at all n locations
gatgctcatatataaagntactatgatttccccaaatgcaagttccctagccattggatctcaacgtaagaactcaccgatgtctgacggtgcgacctgaacttcagaaagcatgccaaatngaggtctctatggttggaggggcgacgacgtacagatccaacgtcacaataagtgcactatagttgcangaagacaagaggagcggagcaaaattattgagaaagcggagcacaaatttattatgacattaatctattaatggttngcatatactctattttggaaagctttacacatgttatgttcaagcaaatactttagtctagaattctaccaaaaaaatgacgttttattntacatanaaactacttcatttggtcaaaatatatatattnttntgaaaattcttacaatanacataagttaatttttgaacgnntgtattattttatgc

SEQ ID NO: 24290 - DNA, 368 bp, Oryza sativa
  unsure (1)..(368): unsure at all n locations
ntatctctgtattatcagacctggttaatgattatttnttgctgtacatgtataagctgaagattatatgtttntgtccaaaggttgaaattttcaggtgcaggatgtgttgtgatttgtttgttactatcagttacaaagttagtgttcaatctgctgtaaccagggtttgcacttttaatttcagcgaaaatttcggtagcatcggtatttacaaattttttgcactttttgaccgaaattatttgaaattntaaccatacttgaataaactttaaccaaaatcaacaaaaaaattgaggaaatccaaaattttcggttgatataagactcgctggagatgtccaaaatttccgttgtataatgac

SEQ ID NO: 24291 - DNA, 347 bp, Oryza sativa
  unsure (1)..(347): unsure at all n locations
ctttagcaccttgatctcacttgtccgagtgagatgctggatttttgttctcctntgccggaagatatagttagactgtcgtttattttctgctgcatttgtaagtttattctaatattattgtgagacatggatctgtatcaatatgtcgattgtgtactctggctggtcctggacagagattcaggttgttgaatttctaagcatgacagcactgcacaagtagagagatacatcataaaagaatagttggtgagatggaacaaatatatttatgaacattaaaaaagaatagttgctgattaataagctagttaatcagagatgcccacacaaccagacttcac

SEQ ID NO: 24292 - DNA, 309 bp, Oryza sativa
  unsure (1)..(309): unsure at all n locations
cctcatcatgatattggtaatatctgctcctattctgccaaaaaccaagagatgacagtgatagcactggttagatccatgtagcagtggtttaataaaccatataacaatctggactgaaaaaaacaccgtgatgaacatgaaagatgtttgcaatttactgaagtgtacaagaccacataatccacggacagaacatgatcggaaaactgtcagtgtgtcttaagaaataattatacatgcacaatcatgagccaacaccagaagttgtatnntattttaatcattgatagatgttataaatggtac

SEQ ID NO: 24293 - DNA, 383 bp, Oryza sativa
  unsure (1)..(383): unsure at all n locations
taccatgaacataacctatgagtttagatagaattattgagatctttggntnttaaaaacttcatatttgtatattacttctcaaatttatgttcattaaatttcgcttcatgacacataaatatgcaatttatcacaattttggaataaaaaagattctggcctgttgcattttattttttcttggaggaggcctcctggctcgagccttgtttcttgcgtcacaaaccaggtgcaccaccactataacggcttacaagatcaaaaagacatcctcgcatcgcccgcatgttccagaacccanacacaacgaagagacatatagcaagcaggagccgataaaggaggaatccatcgtcgcagctgcttactcaccgacaata

SEQ ID NO: 24294 - DNA, 239 bp, Oryza sativa
gctgcagacgtgatccttctagttgattataaactggagctcagacgggagagaaatatcaataatccggttacgctttgcttgccgtgctggccgaggtacaaagctgtttgcctgtgagctagagagtgattgagaaaacacacaggcgtggttgagttcaaacggagacactctgtcatcccaaggcgcacgaacctccacctcggaggttattccctaccatctcactttgcgga

SEQ ID NO: 24295 - DNA, 494 bp, Oryza sativa
  unsure (1)..(494): unsure at all n locations
tggcaccagaagattatagattgtcgcttcgtgcatgtacatgtaattaattcatctgcattgctttcgttctgtttgggtaaatcaaatttaagttcagtttttgctaagctcatatgccagattactatgaggtttttatgaagatcaaaatacttcttttttcacccaaagtgcatcgcgtttctgctaggtttacgcaagtttataccaataaattcagaatttattcccaatggcgagtttgaagtatggtatacctcttatagattaagggtgttatggttttattgtccaagtgactatttcgcacacaatgattntgtcacatcatgagtnntgttggagaataaagaattttatgctacaagaacgaaattgctcaaggagagatgtgaaatatgtaactaaattntgcatacaatatattcnggttagtacctaataggactntgtatacatatangactcatagattctcctttatatatctc

SEQ ID NO: 24296 - DNA, 363 bp, Oryza sativa
  unsure (1)..(363): unsure at all n locations
tanggatgtgcaatgcgtcaccggttgcatggccgccctaagtcttttcatatcgaggctgggagagaaggcgctacccttatttaagctcctcaaacgctcctgggccgttacttggacggaggaagctgaacgtgccctcactcagttgaaggcgtatctcagctctcccccagttctggtcgccccggagccaaatgaacccttgctactctaaggctgatatcaaacctaaggctgcaaccaactttaagaagaaaggcaagggataggcgaanggagactgctntgtgtgtggcaagtctgggcatttgtgccagaactgtcctgagcgcanagacaggaagtctgctaacatggtca

SEQ ID NO: 24297 - DNA, 391 bp, Oryza sativa
  unsure (1)..(391): unsure at all n locations
tctncattatgtcaccaagacgaacatctcttggctctctgaacacatactccnatttgatgagtgtgccaaaccgctccccataaaaccctacccggtagtaggtagcatcaatgaatgggataggactatcctcctgttcaagaattgactcatagatatccttgagtgatggatgacacttaaccaaatgcccatatgcccttctgctcttatacacaagaatgatgagttcctgaatactatcacaagagtgatagagttcggcttgtgcaaanaagttgtttgccagctgaagatacttgacagctgaatccacagtaagcttggatgcaccatatccctcaacttctgctgcagatgcttctgagctaacatcagtgttcacaat

SEQ ID NO: 24298 - DNA, 377 bp, Oryza sativa
  unsure (1)..(377): unsure at all n locations
cctgaagaaatcctacacctatacagtaccaccggtgtatatattcaatcagatggacagcctcatgatctactgcagtgtgaaaaagaagtgagcaccatcccatacactatgacagaagaacccataagaataatcatgactgctattcctggcaataccctggtccataagctttggaaaatcagcaaaaaaaacatggtataggtaggtgtggtaataaaatgtagtttcagaatagatctaaaacagcataggtgttngactgctatattagcttataataagaaacgagcatatataactacatatagtgagatgagatgagatggaattaatggaaggaagtggagtatataagtaagagatatagtata

SEQ ID NO: 24299 - DNA, 368 bp, Oryza sativa
  unsure (1)..(368): unsure at all n locations
gctctatacctttgcaagagctgggagtagaaatggaaatttcagcgaataattcatatcagaatcgcaaatctcacgggatgccgcaagacgaaattanggttctagagctatctactcctaatgacaaagaatatgcttttcgatatcctctttctttctccagcgatcacttaaatagtcttactaaagggtaaggaccacattcatcgcggcctcagnttcagatagctggttacataactaagttcacgaaaacgaccatgattaccttaacagtggccaccgacaaagatggacggccagatgatgttcataccgctttgctctgatccgccaccgtcggatttgcatactcaatatatctc

SEQ ID NO: 24300 - DNA, 451 bp, Oryza sativa
actcaagcttgagcctattaggggagcttctaactgccgtagcttctcccataatcatggttcatattacgtgaaactgcagttgcggaatccagaaaatgaattagaagctggaagctgggttttatttctaacttctccagattctcaccatgttgcttcccataatcttaaactcctccaaacagaaccttaatgtcacatcacgttcaccacatcggttgccaaaagttttgcatgaaatgggagttacagtctacacaagacagtacacaatacacacttgatctgcgggaagctacaggctacttccttccggtccataattcttacattttggctaaggttgaggggtaaattttcaaactttgactatcaataactgtgaagctattgtagttaaaagcattagaacaacatatatatttgattgtcttatacacagtattac

SEQ ID NO: 24301 - DNA, 469 bp, Oryza sativa
  unsure (1)..(469): unsure at all n locations
ctcaagcttatggactngncgatattgtaggggatgaaatgcttgacgagcactgcgatacttatcctattgtggttccagaaatgtttaaggatttggagtggccaaatttcttgtaaatttatttcaaccctaaattcgggttntatgcaatgtaatggaaatacttcataatgatcaatcattcaggttaagatcgatctaaaccaatccattttttctatatacatacgacatgccaacggttaaacaacttattagaaacgcaagacagccaatacgaaatgctataaaatcggccgcgcttaatggatgtcctcagcgtcgaggaacatgtgctatggtgtatgtgcgactcgttcggatcatgggttccacanataagacaattttgaagtaccatgatcgnaccaatgaatangtagagctttctatctagattctaccgatatggaattctggttccttt

SEQ ID NO: 24302 - DNA, 366 bp, Oryza sativa
  unsure (1)..(366): unsure at all n locations
atgtcaactaactctgtaagtacctttatatggttcgtcaatcaaaatttanaactaaactagtatattaattaagggaagtacatgcagttntatcttatcaagaacagccatgttcctatgttagcgcggaaggaggtattacgtaaaaaaaatgttgacatgttagccacattcccacctatattattataatatgaagagaaaccccaacccgattatatataccctaatttaattaaactcactttaaactatagaaaaaaaattcccaccatttggcaaggaagcgtgagcatgcaatgtaaacaatgtcaactaacttcgtcggtactctttaatttgtcaacaacaaatactaaaact

SEQ ID NO: 24303 - DNA, 363 bp, Oryza sativa
  unsure (1)..(363): unsure at all n locations
tgtgatcttggagcaagtgtcagcgtcatgccaaaggacgtcttttaccatctcaacttcacggtgttggcaccaacaccgatgcgcctacaactagctgactcgtcagtccgttacctggcanggatagcggaggatgtgcgactcaagatactggatttcttcatcccggttcacttcgtggtgttggagatggacacaggaaaagagacaccgctcatcttggggcgtcctgtccttagcaccgcgggagccaatattgacgtgggaacggngagtatccattttcatatcaactggaaggaggaaaagnttgagttccagctgaggacggaacaatgctccatggtcagaataaagtac

SEQ ID NO: 24304 - DNA, 476 bp, Oryza sativa
  unsure (1)..(476): unsure at all n locations
tanataagggtgacgccttctctcccagcctcgatatgaaccgtcttanggcggccatgcaaccggtgacgcattgcacatccctaagtttgctgggggggcgcatccgctctatagcccgtatcttctcggggttggcctcaatgcctcgggcagagaccaagaacccgagaagcttgcccgcaggtacaccgaacacacacttatcggngtttagttttatgcgggcggagcggagactctcaaaagtttccgctagatctgtgagtaacgtttcctgggtgtgcgtctttacaaccaagtcatcgacataagcctcaacattacgtcctaattggctacccaaagaaattcgagtagtacgttgaaaagtaggacctgcattctntaacccgaagggcattgttgtataacaatanggttctatgggggtaatgaacgcagtttttcctcatcctcctagccatgcgaatctg

SEQ ID NO: 24305 - DNA, 89 bp, Oryza sativa
  unsure (1)..(89): unsure at all n locations
tggagaacgcatcncgaagatgtgcaagctgttggagcgcatgtggcccggtatgaacgctggcctaatcttcttcaaggcctgtgcgc

SEQ ID NO: 24306 - DNA, 294 bp, Oryza sativa
  unsure (1)..(294): unsure at all n locations
atataacattncacatacagggaagcgaccccgaactggaaatcctctactctcacacactgtaattcagtggagacatctcacacaaatttagcacaattctggccatactgagaaaacgatgcctaactgacagaaaacgatatctaatgcattgcgctcttgtagaccacgcatcttgtccgaattcctactgcggtctgctgaaccacgacgtatctttaccttaagtccaccgtgccgtccagtaaccgaatgagacttagaattcatagcatgcatcattctttctct

SEQ ID NO: 24307 - DNA, 275 bp, Oryza sativa
  unsure (1)..(275): unsure at all n locations
tcggctcccgtacatctgctgtgctcngntgaagatgcgacgacaaattctgaacttgattntggtggaggcggtggagcctacgtctcactcgacttctcgcctctgcatacccactcaagaagatactgcatgaactggttccctactattcctatgaaatgcttaatgctggtgtggacagtgataggagctctagaacacatacaaaatgaacatgttatcttacatgtatttgtcacagtagggaaaatagacaatggataaatattgat

SEQ ID NO: 24308 - DNA, 496 bp, Oryza sativa
  unsure (1)..(496): unsure at all n locations
attaggaactatgaaactcaagctgggctggtagaaaacatcgatttttctttngagatagagntcgatcctcaactatttctcgcgatatcttcttacgaaggtttgtagggcatctataacagcctctggtttatgtgggcaacccggcaagtagacgtccacaggaattaacttatcaactccccgaacagtactataggaatccgtactgaacattccaccagtaatagtacaagctcccatagcaatgacgtattttggttcaggcatttgctcatataatctcactaaagagggagccattttcattgttactgtaccggctgttaaaattaggtccgcttgcctaggacttgatcttggtaccaatccataacgatcaaagtcgaatcgtgagcctattaatgaagcanattcaatgaaacaacaactgggaccatatagaaggggccataaactagagagtcttgaccaattcgaaagatcttttagt

SEQ ID NO: 24309 - DNA, 446 bp, Oryza sativa
  unsure (1)..(446): unsure at all n locations
gacatagtaccagttggctgaggaaatcattctggaactttgtttagcatttatctcctgggccacctggaaaaaatcaatcaagcctcacaaactgagcgcccagaaatgtgaacagaacccaagatcaacagcttatgaacaaaggaaaaaaaaaatcataacttgaaggattttcttataaagtcatactcgttactggttgaaatctggcataacatgtacacataatttatgggattgtacagcggcctaatacaaaaggtgcaattccatatgaaggttcaatgaaattacataatgctcataacaacaaagacaatattaagtaccatgtcactatangagccttagtttggacgtacaagaaggatnntatttctaaaagtaaatatctaaagaacctttataaattcttaactcttcatgagttcgggattacaaca

SEQ ID NO: 24310 - DNA, 426 bp, Oryza sativa
  unsure (1)..(426): unsure at all n locations
actcaagctgtatngatctgttaagtcatcttaacacttgattgatctctatttaatatattttgtttatattgntatcttagtataaagtggtatcggagtattagccaatacatgttagatctaaaacaccggctatgctatgaacatatataatatctgattcaagttacttttaaacataagtgatttatactatctcggcaagctgtccgatctatcccaatcacttagtttaaatatatcttgaggtatatattatatactgttgatatctatagccgatcgactaggtctaaccttccttttaccttatatttcattgctgatctaattcacgttacatcggctaagntacaatggatatgtcatcggtgactgcccgatcggcctatcgttaatggattaaatgtgtttctttatttc

SEQ ID NO: 24311 - DNA, 305 bp, Oryza sativa
  unsure (1)..(305): unsure at all n locations
ttttattgaccggngtgagcccgagacgtanngggtggactcaagaaggaacacccatagctcactggttctcattcaaccaagagtgcgcacgtattcacgcagcaacagtacacgttactgatataataatccgatgtggacaacgcgaggagcgccccctaaccatcgccttatataagttcgatttcaaacgggagcagctcttgcgtgtgtggtcactattagcatctctctttaaagtggtttatcaatatattcaacatctggtatcaatatttttgttaataatagaatgagtaaca

SEQ ID NO: 24312 - DNA, 349 bp, Oryza sativa
  unsure (1)..(349): unsure at all n locations
gcttggcgcacacganagagtgcaagagctcagaagatcactcgcagagtcccctacctggcgcgccagatgacggagcgtgtggctcctcaccgggagaccgcactggcccccctttgccggttcggccggggaccctgngtgagactctaagctcccaatctgtggaagggtcgcgagacacgaagcacacaagacgtcggcgatgtatacaggttcgggccgctgagaagccgaataccctactcctgtgttttggtggattcgtgtatgaaggaactacaaagtatgagccagcctcttcctcggtctgggttcccaatctggaaaaatccaaaatcccctctct

SEQ ID NO: 24313 - DNA, 228 bp, Oryza sativa
aacgacgacgccagagagacttaagagatgaaataaatgggagaacaataatatatctagagagctgatgagatacatttggatcaaagaccgcattatgtgcgtgtctttgaaatatggttatacatctcactatgagcgatcatggtgccaggcttcacctagttcctctatcaagctcatgtggcgcctttgctcatgctttattcactcctagctgtgcacaac

SEQ ID NO: 24314 - DNA, 292 bp, Oryza sativa
taatgcgccatacttatacatacgccagtggcggtatgtggctacacacacctttgtacccaccgtgatgggtgaaaacacgctgcacgtagcactcatggcgggacaatggtcattttggaaaattataacaataaaaaaataaatattaaaatcgcggctttgtatcacttaactaagcttcgtcatacacggacgatgtatctcgcatcacatgctgagtgagaaaatgaggaaatgacagaaggcttttgtaatagatataaagtgggtataacaaaaacataagggg

SEQ ID NO: 24315 - DNA, 419 bp, Oryza sativa
  unsure (1)..(419): unsure at all n locations
actaagctagggtcaccgttcacgatgatcacaattattgtttttatttgttcgagcggccggatctctaccgtaccgtacanagacggactgcataatcgtacggaactatcggccgtatagcgctccacgaccgctataacagccatattgactntgttagatcgcttaatgcttaaacgggtgctcacgtatggatagaaaattagcattgttggcttctttatcttatatatttaatgttatttcataatatatgtatgaaatgagaagtattaaaaatgcagtctaatttaaatttaagggaacttgatataatatgatatacatctaattatggtattttcttattcctatagaacttacgccgaatacacccgctatccagatgcttccagacactatccgtacaaccccta

SEQ ID NO: 24316 - DNA, 469 bp, Oryza sativa
  unsure (1)..(469): unsure at all n locations
ngaacataccatattgacatatgccagaacanagtacctggaatttgagaattacaattgcaagttatgcgttaaataatcattaagcaatgagtcaacgatgttatggtaaacgcatggatcagttgtcaaatataacagcttcatatgatatggccagtcaggccagacaatcttttatgtaaggatatcagtaacctgtaaggctgtaaatacccaaacagatgagaacttctttgaggggaagatgagaacttactaattcgtctaaggtatgaatcattgtatctgtcaaaaatagagtttgttggatttccacccttctcaacatcctgaggaagcttccaaaagaaatcaacagttaaatagctgcactccatatcaaccagcttcagagtacttttcttgctntcattccgcattctgtccaatgattcanaagctgcattgcttattttcacacggagag

SEQ ID NO: 24317 - DNA, 462 bp, Oryza sativa
  unsure (1)..(462): unsure at all n locations
ctcagcttcttgttggacagaatggaagacgtccattgctgcttctacttctccctaatagggcacgctatctgcctccagctgatctggcttgactgaactatcgtgtgccatctcttatttaaaggcaagctagctattctgtttagtattttaaggagaacactaggaagtgctgtgttataaatattccacttttggttaagatgaagcttccgagagtgctgcagaagatatcccataaaatatagtggatgttgcaactaataaggagcaagatggttacaaagcaacacagtgcgtctgacagcaaaaggacccattaacggcacatgaattgtgatcaaagtgacttgccgaggtgcatttatcattgtatgttattcaatacangttaaaggatgaccttttccactgttactgcaganggacaatatgattctttgtgctcgttagtcgcat

SEQ ID NO: 24318 - DNA, 246 bp, Oryza sativa
gaaacaatgactgccgtcccgaaatggaactaccccagacaggcactcatattcgccagttcttgctgttggcgagatactaccggagggttatcgagaacttcttcaagatcgctcgacccatgacacagttgttgaataaagagagaaacttgtgtggagcccaccatgtgagaaggcgttccaaactctcaaagaaaagctggtttcctcgccagtgttatcttgccggatactcgcaaggat

SEQ ID NO: 24319 - DNA, 409 bp, Oryza sativa
ctcagctatataagggcttcacagggggtttattcgttctttgagcattaagataaagatcggatagattcgaaccgcaattgcaaaggtaatcactactatgccagcccaaatcatgatcttcaccaacttggatttggttctctcgcgaaaatcgcgagttgcagagatgagaaccatgaaaagcaagatcccgaataagaaaacagaaaccgaggaaaccacaagagtgaagactagtagagtctcgtcttttgtcattctttgctcctttttcactcaatgattcattcgaatttcccgaccaaaaattctatatgtctattcatagggcctcgttgctaagtgctacaagatatagtgcactgggaactcgtggtatggacccgaatcctttagtatggaacat

SEQ ID NO: 24320 - DNA, 386 bp, Oryza sativa
  unsure (1)..(386): unsure at all n locations
gatggtcgntcttaataaagaagaaacttatgaaagatggtaagatggcggcggcttgctaggaccggacggcggcacatgcccccgcggcttggacggaaacaacacccccttgtcctcgtcagcttggaagcgttcgtggtttggtggcggcggcggtgggtcggaggtgatggggttcggtccggtgggaacgcttctcagcaccggggagacacgcggcccgcttatcaccgacggcggcggtggtgtgcggatcggcgggagctcgccgggcggaccatgccgcgcacggcgcgccgtcgccgtggtggacagcatcaggagcaccagcgacgccatcgccgcagccgcggtgacgttcctctcgactgccatggcaatcg

SEQ ID NO: 24321 - DNA, 507 bp, Oryza sativa
  unsure (1)..(507): unsure at all n locations
catcatgttctgccactagatcttggacctctgctgcagattttctntattctgaaattagaacaagaacatgtatntagaaacctgccattgctgaaaccagagaggtagctggcagcgtaactaccactttgacaaatgttcttggttgccacaagagatgaaaaaacaaaagaaggttattgcagaagaaagatgtgccagctaaaagtgggtgggaacagtntgttgggatatcgaatgcccacaagatttactttntcccaaggaatcataagattggtagtaggaatcatcacgttgtttgaagcatatcccgcacagaatgttcaacaagaaaagtgttgacaacaacatgaaaggataaagaagaaaaagtatgtctcctttctgcagatctttgtattcacatcagctggatatcaagttttaactccctgtctggaatntacatctttacagatggaagctatctatcatgatangagtattcctgctcaatttcaa

SEQ ID NO: 24322 - DNA, 411 bp, Oryza sativa
  unsure (1)..(411): unsure at all n locations
cgctccaggttntactggcaaagtgatggtaaaataaaaagtatcgtcttgctaaatggaacatactgtgccaccccaaggaacaagggggattaggaattcatgatttggaaattaagaatatggctctacttagtaagtggttattcaagttgctctccacggaaggggtttggcaacagttgatgcgtaataagtatcttggtgataaacctctttctcaagctcaatggaaggcaggggactcacacttttggtctagcctcatgaaggtgaaacgggactttctccgttttggatcctttataattaaagatggctcctaaattaggttttgggaagacaaatggttgggcaattcaaccttgaaagaacagtatccttgcctttacaacatagttaggcataagc

SEQ ID NO: 24323 - DNA, 306 bp, Oryza sativa
  unsure (1)..(306): unsure at all n locations
tactcattntatttatcactacctagatgaggcaagttctagacctaaacctctaaagccatgaaccttctcctagacggttaggtatcgcctcggttttggagatggcttgaagattanngttgattgagcactttggatatcttgtgggctgtcacttgggcttattactcttggagatcttctcctagacggttatgtatcgcccgtgagctctcaaagatcttgtggatgtcccgggaaagtttgtgaaggctttcgtcacctccgcaaggaaacgaggtaagtgagtaaagattcttgtgc

SEQ ID NO: 24324 - DNA, 417 bp, Oryza sativa
  unsure (1)..(417): unsure at all n locations
ggctactatgtatgtatctttgtatgggtaaagagaattactntatcactggtgttaacttgtgaccatgcacatgcacntttttagcacttgtantttgcacaagattgagatttaaaacttttgctatgcacaagttgtggtactgtagtagtaccgttactatcatatgctctctgttactgcaatttcatcataatgttattgaanaaatgcagtaacgacctataaatntcacagtaacgacctataaatttcacagtaatgtatcgtgttactgcacttctgcgataatattactaccgaatcacagtaacaaggtatgattcctacagtaaacataacaggtttatgttcataaaatctgaacagatatatagagaaaggcaacaatgatccccaatcacatagtggtat

SEQ ID NO: 24325 - DNA, 490 bp, Oryza sativa
  unsure (1)..(490): unsure at all n locations
gggctntccccttagccgagagttggctactgatttgattctccagtncgctcctcccagctttgagccattcataatgaatntcaacatgaacaacctgaacaggaccttggcagaattgcatgtgacgctaaagactgccgaggaaagcattaagaanaactccaaccatgtgatgggtatgcataagcgcaagccaaacaataagaagagtggtcaaaagagaaagctaaactctgatgagatcacgactactagcaactctaagaccaaggttcanaagacagggccagctaaggatgcagagtgcttcatttgcaaggagataggtcattggaagagaaactgtaagaaatacctagagcagctcaagcagaagcagcaggatggaaagagttccacctcaggtattaatgttataganaataatcttggctacttctatacttgatctggggtatttgataccgggtcacttgctcacacatgc

SEQ ID NO: 24326 - DNA, 226 bp, Oryza sativa
gcgagatggcatgatcctcttcagcttgatgggatgtctgataatcacgcgaaagagtcattgacatcacacgggagatctcctttgcatctgtctctggatctctgcatatcttctcatctgtgatacgtacatgcttcatcctgtgatcagcgaggtgaacgaacgttcaggccattttgattctgacaatccaactcgatctagtcagacaacctgatgaatc

SEQ ID NO: 24327 - DNA, 402 bp, Oryza sativa
  unsure (1)..(402): unsure at all n locations
tcttgcattcatcaccatgcagtcaattaaagtttatgtatatttttgngaattgattntgaaacaaagtattggcacttatagttacttgacttaacacaccataggagttcaggttggtgatggtttatacaatctaactactggaacttatgggagaaatcaatgcatactcagcggtctagttctattgatttgtagtacctgacatcaccctgcttttttgctgccaaatctgatatgcctcanactattatccttggcagatgcaagtcatatgaacgtgccaaaaagaagttgacaatatcagaagcaccaaacatcctgactattgcgctgaanagatatcangtaccattaanactcttangtatttccttacttcaggttcaatatgcactc

SEQ ID NO: 24328 - DNA, 351 bp, Oryza sativa
  unsure (1)..(351): unsure at all n locations
taagatccaacgtcgtgctgccatgttgcttaattactgggtgttatcttgtgtgtgctctttatatttgatcagctgtttgtttcataagagtgttcatgaaatgagtttgctaatacgcacaattgagttctcgggttcattccagcatatacatgctntctgatccgtgcttgtcttgtcctcgtttccggtgggctggcaccgaatgtgtaatattgctagaaccccacaatgtatgatatanatgatgtaaactgaaggcactgtgctggaatggtaatggtaatgaacattcggttgttttgatttattctattcactactagcnaaccattttaccatacaata

SEQ ID NO: 24329 - DNA, 467 bp, Oryza sativa
  unsure (1)..(467): unsure at all n locations
tatgaaactcagctttgccttcttaataaaaanaggccggataaaacgatgntttaacataaacgaccgcggtacttcctttctccggcgtgcgatggacaaatacgtacagaaaatggactacgggcaaagaggtgattggaagcaactttcattntttttaaaacgttagtagagatatgcaatgcaagtttcggattttgccaacaataatagtgttagtaaattgttatgatgcanaaaaatgggcacatatacctagctagtacacaaaaaaaaacgtgtagatgaaacgcacatagatacatataagatagatacactaaaaatttaaattataaagcaattttattcaaccagaggagaaaataaaaaagggtgtacagtacatcctctcatacnctcccaataacagaggaaataaacgaaacattgcagntaacaacaanaaaactctcatgaaatag

SEQ ID NO: 24330 - DNA, 318 bp, Oryza sativa
  unsure (1)..(318): unsure at all n locations
tgaaaccccactcttctaagcaaccaatttatcttccgggccgattgatgaatttcacaaatcccttcacgtactactctcctagcaactntagattgatcattatctaagtaatacttcatctatttttcggcgatataatatttgaacgcttgccgccgaatcttccgatcaactntaagtgtaggatctttcanatatctaatcaaaggaattctccaagctatttctaactcatgggcacaaatgtccgaatntacaattaattctgcctttgaatcaattgtaacgtgccccccagctctctgcccgagatcg

SEQ ID NO: 24331 - DNA, 358 bp, Oryza sativa
  unsure (1)..(358): unsure at all n locations
gatcgttatgtaatatttggtaatgaccagtgctagagtatctacataaagggtgctatctcgctattattcacagggatgtgaaggcgaccaacatcctactaaacacaaaggtggaggcaaagattgccgatnttggcttgtccaaggcatccagctatgacaacatcacccatgtatccacgaacgctctcgttggcacacttggatatgtcgatccagagtacgacaagcccatttatatttatcanagttgctgtttattgtntcagtgacaaatgctaaataaggctgattgatcgggctaaacatgcangtaccagatgacaatgcaagccaacaacaaaagcgatgtcta

SEQ ID NO: 24332 - DNA, 386 bp, Oryza sativa
  unsure (1)..(386): unsure at all n locations
tcatagactaagcttgaagtccctcttcttgaaccatngaagccaacagactgcgtctagaggtaataacattacttacgatcataccagntatcctctgatagcagagcagtggaaaactganaattcatgcctgaaactacatgtctatctgattnttcacccttgcaggatttacattcctgagctcgtggtcgcgttctacctcctggtatgcgcgtctcacgatttggtgcttggagccaagcactactacctgtacatctaccctggaatttttacaatttggtccttttaaaaaacttatttcgtaaatagaccactgaaaaaacttatcccagaaatggtcctttntgaagcgccaaagtggctggcgctgtcaccgt

SEQ ID NO: 24333 - DNA, 398 bp, Oryza sativa
tctcttacgctccaggaatggatcagtcagaacaccaccacttgctcgcctcgaccgtcgccgactggtgtttccgcctgcacggctggcctattatgccgccgttgttgggcgtctacgtcttcaccgaccggcttgccttcgccgccgccaactggtgtttccgcctgcacggccggcctattatgccgccgttgttgggcgtctacgtcttcaccgaccggcttgccttcgccgccgccgactggtgtttccgcctgcacggctggcctattatgccgccgttgttgggcgtctacgtcttcaccgaccggcttgccttcgccgccgccgactggtgtttccgcctgcacggctggcctttatgccgccgttgttgggcgtctacgtcttcaccg

SEQ ID NO: 24334 - DNA, 409 bp, Oryza sativa
  unsure (1)..(409): unsure at all n locations
tcacgaatagttcgagaagaaggatntgtagcagtttgganaggctatctggtgacaattgtgcatcgtttaccttattctgccatcagcntttattcatatgagcgctacacaanagtaagcagttcgttagcacttaatgcatgaattatgatgaggttctgcattntattatcattagctaaatgatgtgaaatatcattgcagtttctccaaagggttcctggccttgatgaagactcanattatgttggtgttgctcgtttacttagtggcggtttggcaggaattactgctgcatctgtaacttatcccttggatgttgtccgtactcgtttggcaacacaggtaatgctatcctttntcaaataanacattgttattgatgaattaacatcatcttatatct

SEQ ID NO: 24335 - DNA, 328 bp, Oryza sativa
  unsure (1)..(328): unsure at all n locations
tgaagaaggcgagcaagtgccaccctctccgattaatctagctcacccaagaatctaccaaagtatctaacgagatcaccccaccgacaacatcttatgagacatcaacaagggagtatccactcgttctcgtattggcaaattttgtgagcattacacgtttgtgtcttctcttgaacctctaagggtggaagaagctcttaatgatccggattgggggatggcgatgcatgaggagtngaacaacttcacccggaatgaagtgtggactntggtggagcgacctcggcaaaatgtgattggcacaaagtggatctttcgcaacaag

SEQ ID NO: 24336 - DNA, 376 bp, Oryza sativa
  unsure (1)..(376): unsure at all n locations
tttaatcangaatactggaagagaaaaaaagaggaattgaatgtggaatttgaccgactctatgtttttccccctgaggataggggtacgggatntaattatttgagatgcaaaggatgggatttaaattcagataattggaacaattctcaagcgaagctaagaaattttacaattatgaaaatatcataacaataaaagagtaattaacaccttataaaagtagggaattacagcatcgatattgtcttaatactctgacaggaagatgtcctgttgcccaatcgtatatcgatgtannatacggaaagaatttatatataggttcttgcaccctanataataataatatattatatcattactatnaaatgga

SEQ ID NO: 24337 - DNA, 496 bp, Oryza sativa
  unsure (1)..(496): unsure at all n locations
cttgcattanaacaactgtagaatatgcatgaagtgcaacagtgtatgacctactacccagttttcaggacaagacatgaagcacttggctgtgcgcaatttgttaattttcttgtgcaaaatgccttaatctctctcaaaggagatggtaaagcgaccggcatgtgaccctgccaagaaatgtcaagattagtctcggttagcctccggatcatgagggacctagctntcactgatgactngtccaagaattttatagtaattaagcgtgatttccatgtggatatcatgtagcggtctctgaacgttagacgattgcatttttgttattccctccgtttcatctttttttcataagctaaatgtttgtatctttataacttagaaattcatacaacttagaattatatctgtagattatcttgagaaatactataagacatacatggcactgttgtaaccatacgagctaaatatattgttatcacagataaaa

SEQ ID NO: 24338 - DNA, 436 bp, Oryza sativa
  unsure (1)..(436): unsure at all n locations
tataaanacataagagaagactccgtatatatattatttatgtttaatctattaatgtcatntttaccacattaaatcttagcgcttgtacatatatagtagtgatttaagattcaagattcgaatgtatgcattttgaaacgtcttttatttgagaacggaggaagtaaaaatatggtcacgaaattaacatgcaaactgatgtgcgataaaaaaaaacagcactaccaagtgcatattggtcgttttgttcttttttaatgattagattcttattagtggagagtgcaaacggtgcacttgaagtttcttctattcagttgtctctaggaaaagaaagttcttccatttcagttggtcatatgaaaaagaagctcatctccctataatctcactacgtntctgctttaataatattgaaacgcaaacaccccta

SEQ ID NO: 24339 - DNA, 375 bp, Oryza sativa
  unsure (1)..(375): unsure at all n locations
gtngaatgttgttattgtgcgtatattgcactgttgacgcttgactacgctctcnaacgcgttcggtgttntccgacgtggataaatgcatatcttttcggtctgtaaatgacagaaagaaattcaaccagacttcttggcattaaatggcaggggcaatggccggaatgcctcttggctactggcacccttcggtgtcagcttacttatcactcgtggccgtgggttcgtcaacacgtgcgtgcattattcaagtgtggccgtgcttacacttgacaagttgacatgttaaaaacagtcatctctgaaaaaaattatgatgncaatgatcaatgtgatgttgcaggaaactgacatgaattgcatgtccgcagg

SEQ ID NO: 24340 - DNA, 490 bp, Oryza sativa
  unsure (1)..(490): unsure at all n locations
tgagacctaacacatatccaagatgactatatgatgaaacagatggatcgaagtaacanaatatgcaatccaattatccaaacgtataggacaaaagagggaaataattacgtggtgataaataaatagatatgcgagtccatttaacaataattttagagaatgatggaccgccaacaatgaattaatctctatgttcctaaaccaccaacttgcgatggcagcttgtgttaattgttcatacccttagagctcataaaaaatggcatgtatcacgaatatccataaataaaaactctgtaacattcaccaatctaagctgtccattgtgtcatacgacatgcataggactatgtgattacacaactttgattatatgaagataacttaagattcgtgcatggacataatatgaatatatttcataattacttaagagattatattaaggttcaacatttatgctatataaggagcagtatattataaa

SEQ ID NO: 24341 - DNA, 486 bp, Oryza sativa
  unsure (1)..(486): unsure at all n locations
gcctgagcttctccctcatggactaagggtctggtntatagagctctaactcctaattntagtttcaggagtttagtctagagtggagttgtgagagcgctccacccagctctgcttccattntacatggaactaaaactgtttggttgggctccagctccaggagagatggagttggagttagaactgtgccaaacaagccctaagcagctctggaagggtgctcaattgattttggatgataattattccggtaaaatcagaagtaattttcctaaatagatatacatctggataacagaattctaaacaaaaatgctgcatattttataccaattaggtgctgctcanaattaaataggtatataatgtgtgagcctttgctatattaaatangtccctccttcgtctanaaaacttaatctggatttgatctggacatagtcagacagntagcggatctttttatgttgtaccttctcaatg

SEQ ID NO: 24342 - DNA, 401 bp, Oryza sativa
  unsure (1)..(401): unsure at all n locations
atctattaatgtcatttttaccacattgaatcttagcgcttgtacatatatagtagtgatctaagattcaagattcgaatgtatgcatnttgaaacgtcttttatttgagaacggaggaagtaaaaatatggtcacgaaattaacatgcaaactgatgtgcgataataaaaaacagcactaccaagtgcatattgggcgttttgttcttttttaatgattagattcttattagtggagagtgcaaacggtgcacttgaagtttcttctattcagttgtctctaggaaaagaaagttcttccattcagtttgtccatatgaaaaagaagctcatctccctatattctcactacatttctgctttaatatatattggatagggcaacaccnctatagtagagt

SEQ ID NO: 24343 - DNA, 492 bp, Oryza sativa
  unsure (1)..(492): unsure at all n locations
gtgagcctagatccagtacattgtttagatcacactacttacttctaaatcccatagcttttgctaatctattgaggttgacctcagcatcacatggngcatgtctcgtcacactgtacatgtggatgatgcatgtaggttcagaacttcagattcatttgatcatttcgtttacaagcatccatataattctagtcaactctgtctgtatattgcctaatggtcggcacaaactgtcaatggtgataaacattcatgtcagtttctgcataaaataaaaataaaacagcctaatattttttttgaactctaatgctcttatcaggaactgagaaaattcctgcatttaaatcatggcgacactgcggtgatgcactgatttaattgtacggtttaaatcttataattgtgcaacacacatgatctacactattgatngngtccaagagtgaacctgngcaatctacatcgcaacaaaagtccccatctaat

SEQ ID NO: 24344 - DNA, 474 bp, Oryza sativa
  unsure (1)..(474): unsure at all n locations
ccctcagccacatcctccattgtcttgtgttcagtaactgcgatgaatcccgctgtgacccaatgtctaatcagcctttntctcttaatcaaatagtcctccggaaatattgtgcagtgtaaaaagcagtttttcaaaatatatggaaggtcgtccaaactgagctttagaacaatattaacatcaagaatcgcattattgctcagctgtaactctagttctttgtataaattntcccattcagagtaacatgggcttttgcatgacagcaaacgacctatacatgcaatagcaataggtaaaccattgcatttatccacaaatctttgcgccaaattctgtagatccaatgggcatattctgtcctcgttccanaatgcttatttacaaaataactcccaagaatggtgcgcttctaggggtttcaacttcaatttatgatttccagttgctattaatgctatgtcatggact

SEQ ID NO: 24345 - DNA, 451 bp, Oryza sativa
  unsure (1)..(451): unsure at all n locations
ctatcccatactagcacatgtggttgcactgtatacgaaatgaactgacattgagtgaagtccttaggtcggttngngcacactctccccctatcggtacacaactaatcaccatatgtgcaccacttgaggcccaaacctaaaatccatgttttccatcattntatttatcaaaatcacaagtattaaagttctgtccagattatttcaaaagtcaattttcatatttgtaatgagcccataatgacaaggaagaccattctaagcatggctaagcattatagtaacctagtgactccaaaattcatatataaagtggtatagtcatattgttcctaaggttaggaatgagggatatggatatatgtggngtcaaggtgaatgcaaacaatangagtttgtctaacaagtttaacaaaattntaatttattagtgtacaatcgacatgca

SEQ ID NO: 24346 - DNA, 452 bp, Oryza sativa
  unsure (1)..(452): unsure at all n locations
ctagttctctngaagagcacgaacaattgaatatttnttcctgaatactgagacgctcttttgatgggactaacactcttaattacttatcacatcggatgtttggacactaattataaatattaaacgtagaccattaataaacccatccataatcttagaataattcacgagacgaatctattgaacctaattaattcatgattagcctatgtgatgctacagtaaacattatttaactatggattaattaggcttaacaatatgtctcgcaaattagctttcatttatataattagctttataagtacgttatatttaatactctaaattagtgtacagagactacagaagttcctggattaaacaccacctgaatatctgaagcttttgtctaatctgtgcttctacttgaccgtgcgcaactctttaattatgaaagtatgcaaact

SEQ ID NO: 24347 - DNA, 451 bp, Oryza sativa
  unsure (1)..(451): unsure at all n locations
ntactgtnttgacacctttaagatgcattgtaccaactcctatatagtcgagtaactgcggtataaaaggaatttaaggtattgggcacttgatcacgcgcactttggcctaagcgaaaagtgcctaagtccctaaaagaacgtgacaggccacacctgaaaatatgggctgcagacatattaggcctagaccaaanaatatgccttcgacaccctttataggatgacgcatgtaacatgctctcgagtaataaatcttccgggtgatatagaccaggtgtagctcatatgaatagcttctgatctgagtgattatcccttatgggatactccaaaatagatataacaattgaatcccgactggcgcaagtattcagttgataacctttacggggaataataaatagaccagtctttgagcatatanaatagacccatgatcatgaattca

SEQ ID NO: 24348 - DNA, 378 bp, Oryza sativa
  unsure (1)..(378): unsure at all n locations
ntatagctntataacttattgcttgagttctattatagttttcaacctcgccaattcatggatgagaattangagatcttgtcgtccgananacanaaaaattatcacatatatattaatcatgcacatgttcttattgataatcagaaccaaatattttagtatacatgcaacatcataacatccatatcataacaaatctgctgtaagcccaagtattagtgttctggtactgcagtttggaaaacatatatgtatatgacaagaagttaacaaaatgactnttgttcttaggaattctgtaaacttctggttgttccttcagaaggctagtttcataatanaaactactacctctgtgccataatacaactactt

SEQ ID NO: 24349 - DNA, 511 bp, Oryza sativa
  unsure (1)..(511): unsure at all n locations
tacaaaagaggagaggagagctactagagccatatctgaactctttcgaagacttccggactcctgatttccggactctattcctattccactagattgagaatactaaactaaacttgagagaatatgagagagctcttgcttgaggtgtttgttgaagtgaagagagtgaagtccttatataggctgccaatgacggttgtggtagttggaatgttcggaatttccctctaactgtcattggggagtgatccacgccgtccagcccanacctggatccaaattcagcaggtggcctacaacattgcttcacttcgtagacttgtgaattttggcccaattcattgtgtcaattctgagttcttggcccattcatgcataagtctgatcctcaacatcgtccgattgatntatcngttgagttgatgtcgattcttcctcactctatggntattctctgcanaaggttagtgaacctcaatactagtgaatattattattctaacatgta

SEQ ID NO: 24350 - DNA, 350 bp, Oryza sativa
  unsure (1)..(350): unsure at all n locations
ngcataaccagacaaacaagtcaatgccttctgacctagctaggttcatctcttcatatcattctcggctgataaatgaagaaagaaaaagtcagagcccagagggatcaaggaggtatgagatgtggtcgctggaggattgggacctagaggtggtcgctgttggcagcgatgcggtggaggggacatagatgccaacggtggggttgatctgatggtgacgacagtgggtggtgggttccaagtagcaacaagacggaataattccaggagtggtgttcctcggtaggtggcaaggagggcctgttccttccggcagcggagcggaggcctgggacaagcacaatcac

SEQ ID NO: 24351 - DNA, 383 bp, Oryza sativa
  unsure (1)..(383): unsure at all n locations
cttcctgttcagcccaatggccgaacaagcaaaggcgcacaacctctctccgagtgtgagcggtgacgacggngagccgaacccacgccgtcgagctcgtactccaccgccccctccacgccaaagtcctatgcgggaggaggcgctcgagagggtcgaaggatccgcgacttcgacatccacgggtgatggagaagggcgccgagatggngagcgtcgccttctcgtctacggcgacggcagcacgccccagggcgcgctccaagctgcgggcgcgctcctgcgtcacccgcccgtcgtccctgacccggagtctccagcccaacgttggctggacgacgtggccattttggtcatgacggcgcggcagcgcctagatgctg

SEQ ID NO: 24352 - DNA, 486 bp, Oryza sativa
  unsure (1)..(486): unsure at all n locations
tatctaaatggtagtattatgttgtgtcatatccacctaanatctcttatattntagaatggatggagtagtgcgtaattgagcagccttgattntgatgaggttaagcctgttgttttgtgatccttactatgagaagcaagaataaatactactacttatcgaatcanaattgtggcgcattttgaaatggaggaattgagcccaacgctcttttgaatttgaatgtaactatcattgtacagctgatcatccatgttcagcttctcttctactcaaactttggcgtgtttttggaaagtacggttcagatccttatgcccacgaatattacatacacgcgagtgcacttccaatggaggtctgagagttgtcgttggtctttaatntatctctntaagtgcggtgtatgtgccgtaacggttgcacacgtatgcgcgtaattgannaaaaatgggtttggcttggtattcttttgtattaaat

SEQ ID NO: 24353 - DNA, 372 bp, Oryza sativa
  unsure (1)..(372): unsure at all n locations
attccctggcgacagtggccgtgatcagcttggtgaaatcatcaaggtaaattatatcttgcttccatcgaaatcactccctttttggtgttaacctctacttaactgactattctctcaggttctgggtacccctacacgagaggagattaagtgcatgaacccaaattacaccgagtttaaatttccgcanatcaaagctcacccatggcacaaggtagaagaaaataatcttatgttggactgtttattntttattntagggttgaaacctaatgtagctttcctttntttttaccaccagatcttccataanagaatgcctgctgaagcagtcgatctcgtcttcaggcttttgcagtattcaccata

SEQ ID NO: 24354 - DNA, 470 bp, Oryza sativa
  unsure (1)..(470): unsure at all n locations
atatgataataataaagtgtatgatgattacatgggattaatatattatntagttacagatgatgcaatattaaagacttgtgcaagaataattgtacttcacaatgcctttagcataaaaatattcaacttgtatcaatcactggtgaattaggattgggcattttctataagacttgctacagttataagtagcttctacagttctattggttntagattcacttaatgcagatatctgctagaatttggaatttggattacttgtttaaaacaaaatttagcctgtgtttcttttagctgggccggctgaagataagccaaccatagcctgtgtttntagtactaattctatttgggatcaacttcagatattctctctatgggcagaaagtgacaggaagtaccgtgggctgagtttgtcatctgaagatgtgggtcaagtgctngcaatcacangtagcattttc

SEQ ID NO: 24355 - DNA, 484 bp, Oryza sativa
  unsure (1)..(484): unsure at all n locations
gccttaccaggaacccgagttgtccgaccccgcctcgtgtgttccaactattggcatgcgaggtttccctgaaccgactagttacttagccagggtgtctcattccaccttgtggttgcactttgattatgttcgatgagttttccacaggaatcggtccttatatgcgaatactggacagtgccacatatgcacaacccccgcatcgcgagttttcacaattcagtttattttcaaacacaccgacaccacatgtcgggttntgaaggcttcacaaacccatttcccaagttttcgacaaacaacggtgtatgtgggatatttggtatacgcgctcagagagcacgaataccgaggtaccacaagggtggagcgacaaggaatcatggtagtacgacctacagaaattagtgcgactactgtgtatgttcgtcggtttggacgcaaaccgacgccaacacagtaagtgtgtgattctaataat

SEQ ID NO: 24356 - DNA, 367 bp, Oryza sativa
  unsure (1)..(367): unsure at all n locations
acttcgatccagattcgttgatgactcaatcgcacacagcagncgcatcactagaatgggctatatcggaaggcaaacggcgtgtctatgtccattgcactgctggacttgggagagcacctgcagttgcaattgcttacatgttctggatcgagaatatgaatgtaggtttcatcttcttgcattcttatcttgtcagggttataagccacgccacattcttagcatttatcttttgcttgcagcttaagacagcttatgagaaactaacttctaataggtcctgtggacccaataagagagcgatccgtgctgccacttatgatcttgctgagaatgatccacataaagagtctttgtacagtct

SEQ ID NO: 24357 - DNA, 345 bp, Oryza sativa
  unsure (1)..(345): unsure at all n locations
ctacctgaatactcacgctcnctccgttntaaaatatttgacactcgttgattntntaacacatgtttgatcgttcgtcttattaanaaaaattatgaaatatgtaaaactatatgtgtacatggaagtatatttaacaatgaatcaaatgacatgaaaagaataaataattacttaaattttntgaataagacgaatggtcaaacacgtactaaaaagtcaacggtggtcaaacatttgaaatggagggagtatctttttagagatcggatgggcttangacgtgtttagttggttacacgggaagtggttcgtatctcgcgtgcagcaaccagcaacatattt

SEQ ID NO: 24358 - DNA, 439 bp, Oryza sativa
  unsure (1)..(439): unsure at all n locations
taagtacttattatgcatcataagaggctcatgaattgaatggattcaatgctgacatacaaatgagcaattccatattaacctcatcaaacctactattgagctcttggctaattntgtcaatcacaccaatgtacacttctcttctaaaatgatcatcatttgtttggtccggataaaaccgtggaggtcttccatgtggcacatatttttcatctaaggttggaacttggatactatgtttattgcaaagtgaaacaacagttctttgaaaaaattcttcccatccttcagatcttaattnttgtattctttccttggccaaagttacaagtgacattgcattaatagtatcttggtctctcttttgcaaacacaaacacaacttcattttatatccaagaatgacaagcatcaaatgtgcactgaannacaaatc

SEQ ID NO: 24359 - DNA, 426 bp, Oryza sativa
  unsure (1)..(426): unsure at all n locations
tcgagtgtcagtgggcgccctccgatgtaacagagganaacctgaatgagatggtggcgcacggtgttcttccggcgaaggagatcattggatggcgtccagcattcggcgaagcattcccgacccccgacacacatgaagtcgtggtattttctcatttcttctatggaggattttctcttccaacctcaagattcttccggngaattttggatttctacgggattagtntacatcacctaaacccgaactccatagttcgtattgccaacttcatacatgcctgcgaagcttttttgggcatcaggccacantttgccctattccgtcgcatcttcttcctcaagccccaaccgaacaaaagcaagccatgcgtagttggnggagctggatntcaacttangggaactctgagccaaaagtatt

SEQ ID NO: 24360 - DNA, 388 bp, Oryza sativa
  unsure (1)..(388): unsure at all n locations
tatcagaactatagtaatatgcttgattgatatggaagatatcatgaaaatcactcaagagaggttggaaacacgatatgggtaaaattctcagggcgaanactgtagctctgcccgaatcctttaaccggcaaaactcgccgcanaactgtagctagtatcatctctttcgatatacatgacaacaaccaactcaccatcagtttcatctcaagcactcaaggctcgatctcactgtatacaaacacctacactagtctctcctctcanactcctccctgaagatctggtattatttttcatcgccgcgccgcaattaacctaacccaccanagctgtgatgaanatttctgatgcaacatcatcttggatcatttccagccatagc

SEQ ID NO: 24361 - DNA, 498 bp, Oryza sativa
  unsure (1)..(498): unsure at all n locations
ntgagtggcggcggtcgtaagagctcaatgcggtagatgaactctgttggagctctatggtagaattntggcaagtaccgagcagcacgcctgtcgtggacaatggtcatcgggggccgagcaacgcctccaggcgatcctcatggtgtcttcgatggccggctgagctagcgttggcggttaggtgtagcggaggatcaactatggtattgggggaattgcaactcccccttcattcggaaggagttggggtgattcattggtatatantttttggatatgggaaaatagaaaactgctggtgcacccacattttcaatatgaatatatatatatatatctggacatatatctgtacatgctgatacatagccagggtttgccttttttgggatggagggagtgatatataaaatatatatatgagatatctgggaagtgggaacggatgaatatgctcttactttaatanaaggggtttttttctggtcatgggtc

SEQ ID NO: 24362 - DNA, 470 bp, Oryza sativa
  unsure (1)..(470): unsure at all n locations
ctcagcttccnacatcgggtggagagatccttcacttgtctcctttatctgtgcaaatntactttgagcaagtttacatactggagtttatttgtgctattatcaccctangcttgcaaactttaatataggccagcttctttgtgcatttagttgagactagttgatttaggttttgaattgtgtaaaactgttttggtttatgcttccacatacaaaactcggttttagccaaatgttntanaaccgcctattcacccccctctagttggcctcctagatcctacaaccggngatccgcccctatagggccggnggtggnggagaattgtcacccgtgggtgagtggnggagtgagaatgctgaggngcgatcgatcgcccctagcgatcatgcggacccccttccctccttcacgtggtttcttttttgcaccgattactttccaatttagtaaattatgcacctaa

SEQ ID NO: 24363 - DNA, 399 bp, Oryza sativa
  unsure (1)..(399): unsure at all n locations
tgatantttatccaaacctttagttggctaanatgatatatntatctacatatgactagatgttngtggcgtcttaatttgctttntaccaggacaactggttaagggaaatataaagcacctgctgcatatgaggagcaccanaagtaatatgtagaaggccgtgtgtggaattntgctacaaacgcaagatttctgcagtggaatttggttgtgtttcttcatctactggttggatgcggaagcttatcatgcaggtaaacgtctgctgctactcagagtagaagcatctctgcaagatatttcttatccattntcatgtcaatactcataaggtgcaattgaaccatgatgcataaatatctntacaactatatctgagaagggaattgtgataat

SEQ ID NO: 24364 - DNA, 490 bp, Oryza sativa
  unsure (1)..(490): unsure at all n locations
ngaggacnctgtctntctcaccagatgcaatcttctcaccgtcttggctccaatccacagcatacaccttacagatgttacatacaaatgtgaatatcatgctgattgttctagacttacccgcgcagttagtctggaacaaaatggacttactagacaacaaaaggaaaatacatgcgtacctcatctgcgtggcctggcaagtcctgtttcaacttgtgtgttcgaatatcccanacctgaattatacaaacagagagcgtcagcgctcagcagttagatattcacggcgagatagagcctcataaaaaaagataagtgtatcggtcagtttgtgctatcaaggtccatgctatacnaagtaattgagtttataatccagtatgcataannatagaaacaattatgacatctcagtagcagtttcagcanaatttcatgttggattcaccagtttttgggatgattattgaagcatcacagtaactcc

SEQ ID NO: 24365 - DNA, 361 bp, Oryza sativa
  unsure (1)..(361): unsure at all n locations
ctatcttgcanaagcgaatctacccgagtactactattacaatagctaaaccacgaaggattattaatattattntacttactctggagcttcttgtccatgtacctggcgacccaccaaagaaaaactcaaatcagtaaaccgaacaccagttaaaaatcgatggaaacacacgtgagggagagagaggagacggaggcttacttcttgagatccggnggctgccccgatcggctcatgacgggagtagagaggggaggagatctggaagcgcctccactcctctcggcagcagcaaaaaaccctcgcgatgaaggaacccgagccgacgcgtccagtttaaagcgaggaggcggagcag

SEQ ID NO: 24366 - DNA, 490 bp, Oryza sativa
  unsure (1)..(490): unsure at all n locations
ctgtgataattngatccctgtgtatgatatcacgtagaacctgatttatcattacatcattgtccaattcaatagattcagaccatttcatctaanaaaaattcaaaattaaaaacaagaatgatggaaaaatataaaatgaaaaataacaaacaaaataattaccttaatgttatcatcttcacttcttttagacttactgagtttccttttcaaagttttcagaagttcatttgtagaaatttcatttacatgtggttgtgaaacatccatatcctanaaaaacatattaaacaattaaaacattgcaaatgtgctatgaaacatggctacaacagagctacaactgcatactaatgaanaaaataatgaaagaataatggatactattctgaccttggaacaacatgacaattcaagaacaaataaaacaagaaaatatnggtcctactattacattggctaccaagcaatgagaatgtataattgc

SEQ ID NO: 24367 - DNA, 476 bp, Oryza sativa
  unsure (1)..(476): unsure at all n locations
ctggctacctcgatcggatactatcttcttaggcacactgtgcaaacacacaattcttgccatatacaattccgccaaacgacttccggaataggtggtcctcaccgggatgaaatgagccactttggtaagtctatcgactatcacccaaatagagtcatggcccgatgacgttctgggtagaccagtaatgaaatccataccgatttcctcccacttccattctggtatcttcaaaggctgcaacaaacctacgggtttttgatgttctgccttgactcgctgacaaacatcacatactgctacatattccgctatctcacgctntatacttgcccaccaaaatctttccttgagatgctggtacatcttagtactacctgngtgaatggagtataaagtatcatgagctntcttcagaatngcatctntcanatctttgntgtctaggacacagatcctctcacccaatcata

SEQ ID NO: 24368 - DNA, 432 bp, Oryza sativa
  unsure (1)..(432): unsure at all n locations
tttccttaaccgaatatagcacgaatcctacaactgacgacttgtcaactctcatcggctaatctcaggacttcaaagccgatgctgactctaagccgatgactactctgggcttaccaaatttcactgttcacacatgccccccaattttggagtatgaggactcatgcttcaaaattatcttctgtctcgcgttgattacctccaaaatgatcctctgttgcttcttgcaatcggctctcatgagccgatactgatgtgcttgccccccccccgagccgatattgttattgctcttcaatctgcccccgagctggtgtctctgaacaattaactcatcaactgttctcttgatcaaaatttacaatgtaaccaccanaacttcagactgttcaatcaaggtgcaatgagctgcttcatcaacttaatctt

SEQ ID NO: 24369 - DNA, 397 bp, Oryza sativa
  unsure (1)..(397): unsure at all n locations
tcttanggttcttgatatctgctaaaggagttgctgtggatcccgaaacagtgaccgccgtcaccgattggaagcaacccaagacagtcactcaagttcgcagtctcttatgtttggcaggatactaccggagattcatcgagaacttctccagaatcgctcgacccatgacacagctgttgaagaaagaagagacatctgtgtggagcccgcaatgcgagaaggcgtttcaaactctcaaggaaaagctggtttcctcgccagtgataatcttgccggatactcgcaaggacttcatggtgtattgtgatgcttcgcgccaaggattggggtgcgtgctcatgcangacggtcatgtggtagcctatgcctcacgtcagctatgacctcatgaagt

SEQ ID NO: 24370 - DNA, 485 bp, Oryza sativa
  unsure (1)..(485): unsure at all n locations
tactaagcttgacaacagggccagcctaatgggcgagtgatcgccttgngcgatcagcacccttgtccctcccctaacatgcagacatctcccaatttctccccttcctaccacactatgaatttcaaaccatttaaaaatataagagaaatctaatacacttgaaaacatattcatgtgaataaactttatacttataaatatatataaaaaatttcgtacatatagactntatgtatagagatattctatataaaaatatatttgaatccaaatttaaattcgaatttgaactgggtatantaaattttaacctataaactntgggtatacaaactttagatgtgtaaacttgactntatgtatagaaatattctatataaaaatatatttgaatccaaattcgatttcgaattaaaccggaatataaactttaacctataactttgggatacaacttagatgtataactgtgtgaccactta

SEQ ID NO: 24371 - DNA, 235 bp, Oryza sativa
tgagaattggtgagcagctagaaccttctccatgctacatactcactatactgatgaggagatgtatcttatgtggaacgtatatgctatacgtgtagagagattccatatccgactgtatcagaggacaattattagatcggagaggaactgagcatatgagttaatgacctatgaagataggctatactctctctaaatgcgtcaacttgactgtaggtatgcatctattcta

SEQ ID NO: 24372 - DNA, 434 bp, Oryza sativa
  unsure (1)..(434): unsure at all n locations
tcggtccttgtagatatccaactgagttntaccaagttttntgtattgttatanaagatgattctctagacttgttaacgcaataatttcataatgtttcattgcacttgtattcgcttaactttggtacgattatcttgtaacccaagtctaacgatgctactaaaatacaacaatataggccaatatgctaattaaatataagttttaagatatttactaaggtggtcacaaatagaattatgggaatggcacaaaatgttataagcccaactcagatggctnttattcatggtaggaatatcatggacgggtagttatttaacatgagacgattcatgagttgcataggaaaaaacaaaatgggattattttatgaatgagtttgagaaagcgtgtgaataaaattatnggtcttttgtcaacanactatt

SEQ ID NO: 24373 - DNA, 327 bp, Oryza sativa
  unsure (1)..(327): unsure at all n locations
ngacagcgagcacactcacacacagcatattgtatgtctgcactataatcagctacatgcatcatacatccaatcatacttctatattcctcgggatcaacagctactccatcttcatcaggatccaacacagctgtatagaccaatggtgccaaattggcttgtcattctccatcttgaaccgtctcaatacatacttcgtatactacgtttgatgcacaaaaatacctcgaagcgactgcttaatttgcaatccctataagtacattcactcacccatcatgctcatctgagatagcctgtgcatagtcttaacagaatctacaa

SEQ ID NO: 24374 - DNA, 445 bp, Oryza sativa
  unsure (1)..(445): unsure at all n locations
tgtagaatcaactaacagaagttgtctgccatcaaatattggtgtgctatttttttgttcattggtgcaaacataccctaatcatttatttggtcagcatttattngacttattacaacttcatgcatatgagtcataccatgcaatgtgcacttcaagagatttgaattacggatatggcaaaagaaagtagtatttggaagtttaaacacctatgatgcacttatattgcaatcattacttccactgagtataaacttacggttaaacttggatgtctaagctatttacctttccacagtatgcattgaagcangagaggcaatctgcaggcaaccactacatatagtaagggatacaggcaagttccatcttaattnttaatccctcttttgaacttataaggatctgaaactnntttgtcttattggtgtccctttataca

SEQ ID NO: 24375 - DNA, 502 bp, Oryza sativa
  unsure (1)..(502): unsure at all n locations
tctaagttcgaatggatacttaaacatcatatattctccgcctctgtgtggtgtctcttctctggcggcgatagagtaagggggagagaaataataagggaaataaaaagaaaaccgtaganaacaaagaacgtggcctatgtattctagtggattttgatcttaacctacatgtaagttagattttacgggtaaacgggcaaagcgggcatggttaatgattacccatacccatgtccatttacccatcaggcatagtttttgacccaataagatacccatggttataaaatggagaacaaacccaactctaatagggttnttatccacggataaacggacaaacgggcacaattgccatccctactcatgcatgatgttcaacgaagttcacatgacagatccaagagcatgcatagtttcaaactggtgatgataaantctttagtataataagcagacccgtatgtaataatgatcttnttttctcataagtatttga

SEQ ID NO: 24376 - DNA, 343 bp, Oryza sativa
  unsure (1)..(343): unsure at all n locations
cgagtctttggctgattggctcgtggatctctaccgtcttaatccttccaatntaactaggtgtcactcgtggccacatcagatntggtccatgctagccgtgtctgactccttattacactactgctcggattcaagtccgttccgaacccaacagcctagcaatacctccatgcttcctcgcctaacctctgcacctgtaccaaacatttgttctgctctcttgataaccatcgtatgcatgtatgtcgtgcctccatgcacgacgtccgtgcccctgcacgcaccgcagtcgcaaccctcgtgttcaccgtccacgaccccgtcgtcatgggcctgcacg

SEQ ID NO: 24377 - DNA, 231 bp, Oryza sativa
tcgacttgataacaagttttactttattgtaagctgctttcatttatttaaataggcatataaaaagatagctattaagacttgatataacattgcaacaataatatatttaaatttaataacgatataacttgcaacaacttaaacagtttagacggtgctaccgtggagcttcatcctctcaaaccttgcgtatggggaactctgtctctcacaagcaacacccctact

SEQ ID NO: 24378 - DNA, 517 bp, Oryza sativa
  unsure (1)..(517): unsure at all n locations
tatganaatgttgagtactntcaatatgagatcaaatgtacttgaaggaggcattcctggtttaccagctagtgttaaagtgctggatctatccaaaaacttcttgtctggatccttaccacaaagcttaggagccaagtacgcttattacatcaagctctcagataatcaactgaatggaactatcccagcatatctttgcgagatggattcgatggaattagttgacctctcanacaacttaatttcaggtgttctaccagattgttggaagaattcctcaagactgcataccattgactnttcgaataataatcttcatggagaaataccttcaaccatgggtttcataacctcccttgcaatattatctcttagagagaacagtttatctggcacattaccctcctcattgcagtcatgtaatggattgatcattctcgatctcggatcntaatagttatcaggaagcttaccatcatggctgggtgatagtctgggctctctgattactcta

SEQ ID NO: 24379 - DNA, 399 bp, Oryza sativa
  unsure (1)..(399): unsure at all n locations
acttaccttntactctgattntctaactttattcagattaatccataaacttgtgcctattaatggataaaggtcttaactccctcctttcacttgtctttagatgccgcgttacaagcctgagtacctgtttggtgttgagggttttgtccaggagttgcgtatgatgtcctttgtcattggattcgggactgcccctttntatacccagattcctcatgatcgtcatgaagagaagtgccgagtcaaagtcaccttgaacagcaatagtgaagaggtcccctcagtaatgtttgaagctggaggaagaaactacatccatgcatgtcangaggtggcaaggatcgccatangagagctccgtgatcgctacagtgatcaattggccgacactgagta

SEQ ID NO: 24380 - DNA, 410 bp, Oryza sativa
tcgtgaagaccttgagcaaggcaagcaccctgtgaccaattgcttctatatattggaaatcattattaatttgtttgcaactcgcattattagcaacacacatttatagcatgcttggtttcggtttgcgtgccaaaccgacggacctacctagtagtcgcactaattcctgtaggctgtactaccctgattccttgtcgctccacctttgtggtacttcggtatccgtgctctctgagcgcgtataccaactattccacatacaccgttgtttgtcgataatctgggaaatgggtttgagaagcctttaaaacccgacatgtggtgtcggcgtgtttgaaaataaaatgaattgtgaaagctcgcgatgcgggtgctgtgccttggtggcactgtcccgtattcgcata

SEQ ID NO: 24381 - DNA, 369 bp, Oryza sativa
  unsure (1)..(369): unsure at all n locations
taattaanacanagcgaataggcgatcttgttatatatgaaagatataaaaaagagagagagagaagacgaagtgtgtacgtacgagcgggtaggggaggtggaggtagtcgaggatgagggcgtactggagggcgtatgctgcgaggccggaggcggcggagaggatgaggacggcggcgagggggaggtggatganggctangcccgactaccagctcagcgccttgcccaggtcggaggcggcggccaggtagttgagcgcctcctgcgagacacccatggacgccttgagcgccgacgagtatgccgagaagtcgaagttttgtccctgtaccgcctgtatccacaccgtctgcaccagtactgt

SEQ ID NO: 24382 - DNA, 454 bp, Oryza sativa
  unsure (1)..(454): unsure at all n locations
gcagctntcttctaccagctcccagctagatcctctcttgccttctttggcacattcgntcttgctctctgctgtggattatatgcctccggctccggccaatcggcggcgtggcgcgggcagatcgatcgatctcatcggcggcggggattgcctgttctagctatagcttgatagcttagctagcttggtcatttctggtgagagatcgatcgagatagcggcgaagaagatggggagggggaagattgtgatccgccggatcgacaactcgacgagccggcaggtgacgttctcgaagcggaggaacgggatcttcaagaaggccaaggagctggccatcctctgcgacgccgagggtcggctcatgatcttctccagcaccggccggctctacgagtactccagcaccaggtctggtctggtcttcatatcatcgatcatncgtcctctc

SEQ ID NO: 24383 - DNA, 458 bp, Oryza sativa
  unsure (1)..(458): unsure at all n locations
tcttctgtttcaccatccacagtgttacttatttcttctggttcaagctcctttacttgcacatcatcagttggctcacttgctagtaaataggcttcttgagctgtctcctcaacaatagccccactgctttgatcaggtatttcttcgtccttcacaccatcatgttcctttgttaattctgctccatcattttgtatttctctgtcatcaaaagcaggttcttttgctgtaggcatttcttctgggacagactcctcggaagtaggaacaatgtttttctggaaaatggtttcagattcagtagcttcagtgtctttaatatcctggactgattccatttccaaaatttgtggttcactntctgttagactntcctctgttgcttgctcctcacattgagtaatattactttggtggcaatggcttgatcttcagaggcttcaacactgctctct

SEQ ID NO: 24384 - DNA, 485 bp, Oryza sativa
  unsure (1)..(485): unsure at all n locations
gacctatgaaactcaagcttacataggacagaggaagtctgttatataacttatgcaagtttttcataggaacagcattattttgcattccaagattggtttccctagggctggacggaaaactcgaagctcgttagctcgctcggctcgtagcaggctcggctcgactcgactcggctcattaggataacgagccgagccgagccaagattntagctcgttagtataacgagccgagccgagctaactcgcgagctgctcgcgagctgaacgagctgcgctntctggactgcaggccgcatccacctgtgtccgcaggccacaacccagtagcccaaaagcccccccagcccacacgcacatataggagaagaataaaccctaagcctcttgcccttctcacttcctcagtcctcagaggctcacgcgtggccgacagggcacctggccgcgaagcttgcngtatggtactgaacagcgcagac

SEQ ID NO: 24385 - DNA, 352 bp, Oryza sativa
  unsure (1)..(352): unsure at all n locations
ntntgagctccttctgtgaaagagggagagagcangtangagcatcatgttggaaatttggatatatagttggatatattgaagtttgaacgccggcctttntgacgctggatgtacggtactacagtattgattcctggcgttaggcgggcccgcatgtcagtgccttgacgctggttgctgtcttggtactgtacggtgatgctcacttgaatctttggcgagctgatcatgtgaatggaggaccttgacttgaatatttgctaaggaaaattaagcaacatgtgcgatggacatggtggagtagtagtgtagtactattacttgngaaattgtggttctgtggaaaatg

SEQ ID NO: 24386 - DNA, 483 bp, Oryza sativa
  unsure (1)..(483): unsure at all n locations
acctatgaaactaagcttacagctacaaccagctgttgagtccactagttggtctattttatggagagggaagtgatccttggggcacgccttgttgaggtcggtgaagtcgacgcacatcctccacttcccgttggccttccgcaccatgactgggttggctagccactctggatggagtacttctctgatgaaaccagctctgagaagtttatcgagctcttctcgtatggcctgtttctgatctggtgcanatctccgcagcttttgctttactggcttggcaacgggtcgcaccatgagtttgtactcaatcacctccctagggacccctggcatgtcggacagttgccaagcgaatacgtccgcattatcgcggaggaaggtgatgagcgcgagttcctatttctcgttcagtgatgccccgatcttgactgtcttgtcggtggtggcactggagagtggaacgattntaattgcgtc

SEQ ID NO: 24387 - DNA, 476 bp, Oryza sativa
  unsure (1)..(476): unsure at all n locations
tcgtgaagaccttgagcaaggcaagtcactctttgatcaattgtccctataattgaaaagtcattattattntgtttgcaacttgcattagtggaatcacacacttaacttgcttggcctcggtttgcgtgccagaccgacggacctacccagtagtcacactaatttccgtaggtcgtactaccctgattccttgtcgctccacccttgtggtacctcggtattcgtgctctctgagcgcgtataccanatatcccacatacaccgttgcttgtcgaanacttgggaaatgggtttgtgaagccttcaaaacccgacatgtggtgtcggtgtgtttgaaaataaaatgaattgtgaaaactcgcgatgcggnggttgtgcctatgtggcactgtcccgtattcgcatataaggaccgattcctgtgggaaactcatcgaacataatcaagtgcaaccacanggtggaatgggaca

SEQ ID NO: 24388 - DNA, 389 bp, Oryza sativa
  unsure (1)..(389): unsure at all n locations
ctccgacgtggctgatccccacgggctgggtgatccttgttagtaatgtcgtgtgggtaaagtgtaccccctctgcagaggttaacaaactgttcgaacagccgtgcccacggtcatgggtggatgtgaggtgattcctagcgtagttntgtttgactactgcttgtgaaattgctgttgtggaaaggggttcgatgtttgaaaaatcagcagctgatgggatcagctaggcccgggtggccgtttgaaaagttngtggcccgggtggccgtttgaaaagctattggccgggtgccaaccttgattcaattctaaagactgatacattgcacatactccgaccggacgagacgcactgtctcattcgcgtcgtttgagaagcactcact

SEQ ID NO: 24389 - DNA, 431 bp, Oryza sativa
  unsure (1)..(431): unsure at all n locations
ctaagcttttctactctgctatacctagcgcatcagtttttgttgagaataccaccgaaagaccaaaantaatttacttcaatggcaatgcaacaagacctacctcttacgcattcctggttgctggggttcctctggcgcgttctccttctctttgttcaatctgacacctccattagctcatacatcatctttaatcacaaaccaacagatcaaacagatagtttatcanatatctttgtcaccattacagaaatctcctatttcataggtacaaataaaagaaagaaagcaaatctgtctgcttgcatctactttgattntccgaacgccaatgctcaatcccctacatagctccagcagttcatggaatacaaaattaaacttggtcattnggcttcaaagtggagtgaagaacgaatgtgtgcatg

SEQ ID NO: 24390 - DNA, 453 bp, Oryza sativa
  unsure (1)..(453): unsure at all n locations
ttcccactggttctagtgcaatgaaggagaagaacgacagataaacacaattcatatttgtttttcttcaaacattgattattataggtttaaaaaacatttagtatatcatagatagattgaatgcaattganaccgcgctaaaaaatttaacaggtgtacataatctcanatganaatgagtgaaggcaaaggaattatagcgcacttaatatgactgggtaaaatggatcaatactcacatgccattctagcacctccagtagaggagtgaattccaagtagtgcgccaattgaacaactcccttacaagtattcggagcactagttaagacatatacctcacacttcagatgcctcanatgcataaacatgttgcgtggttgtcgaaactagatttcgacaataataaaagggggtggctatcaagcttggaaagtgtatgggtttgga

SEQ ID NO: 24391 - DNA, 427 bp, Oryza sativa
  unsure (1)..(427): unsure at all n locations
ctccgctanagcctgaatccctttatgcatatctggatctggatcctgcagaacanacatataggatgagtagtatctgatataaatataatactcgagaaaaaatcaagtattttaaaatatttataaatatgtatttctcctcttgtcaattntgatttccccgagcagatgattcattacgtttaaacgctctgtccgactagtcatagcccccaagcatcgggagtcggcctaggcacttcccagacatgcatatgagtgacatgagttcgccattaatagaacaaagtttcacgaatcagaatttactactcgggtacttttgcaattattaagagcagaaaataaatntatctcatctctatgcttttgatttattccgaataatacttagcaccttgcgttactcggtccatccaacgag

SEQ ID NO: 24392 - DNA, 377 bp, Oryza sativa
  unsure (1)..(377): unsure at all n locations
ttacactgaggtttcacatcttattttgatgctcagcagtagcacacattntgtgctgtatagtaaatatatggtggaaactatgtagaacaaagcacgaatgttctcaaaacatcacagaacaatcgaatatgtagctaagataatatttgacaccatacaaaatctgagggtgaaatttgactacgttngatagataattgataaataatggacaaaaagacaatcaggaatagnttctttctcttcgcttgttgttagtctcataccttgtgaatgtacacgagcttgatcttgaacttttatatggttacctaaatagtataacattacctatatgtgagttatgtcttagacttctctgataagttttgtgc

SEQ ID NO: 24393 - DNA, 443 bp, Oryza sativa
  unsure (1)..(443): unsure at all n locations
ntctttntnntttcctcctgcanaatataatgtgtggtttttttttcccatcgtcaatctctgtgcctaacatggtgcgtttgtttgttgtttgtcccttgcatagagtagcatgattgatatgtcagcctgattntgcggtgtgtttgcatcaagtcacatgggggacatatgtcagctaatattttacttgccttaactgtctctgtgtcaattatttcggtggtcagaagaccagtggtttaggaatattcaaagggagttttaatgtcaatagatgatagatctttcaggcctccaacagttagcattatatattcggttctactaacttgtctatcaacttaacatggcatttttaaataaatcattgcagtgtaaatggtaatattcaggccacaatgcaatactgtgtgatagtgctgaactatgagtctcactat

SEQ ID NO: 24394 - DNA, 475 bp, Oryza sativa
  unsure (1)..(475): unsure at all n locations
ntccgacaaggggttttctggccaaccgccctcaaagacgcctgcgacatggttcagtggtgtgaagcctgtcaattccacagtaaacacacaaagctgccagcgcaagcactccagactatccctctcacttggccgttctcgtgctgggggctagatatactcgggccattcccacgagggcagggcggctacagattcctattcgtggcgatcgacaaattcaccaagtggattgaagcgacacccacggtggaaatcaaggccgacaacgccatcaaattcatcaaagggatattctgcagattcggattgcgccaccgtatcataacagacaacgactcccagttcattagtgccgatttccaggattactgcatcaggctgggagtcaagatctgcttcgcctcgggttctcaccctcagagcaatggacaagtcgagagggcanacggcatagtactacaaggaatca

SEQ ID NO: 24395 - DNA, 500 bp, Oryza sativa
  unsure (1)..(500): unsure at all n locations
tcatttctaaaccacgtacatgttcacattatatccatcgattgttacaataaacactcaccgtcgttggtacacatatatggctacaacacacacgcctttattgttccttacggtagtatagatactgtagcagtagctctcctctcggttgttagtaccaatatacagaggatctatgcccggaaactggagccgacctatcaatcagtggacttgtggtctcgatcatcatggtcgtttcgtccagaattgaatccccatatatcaatatcgatctctgtcctatccatctctatgtctgtggatatatatatgagtccaatataagctagcctgctcgtgtcttggtccggcgagaaaaagttnttccacgaagacgacgtgcccagatcgagactagcgcagaagagacccgtaatgtgagcgacgacgcgatcgaccaacgaccttcgacctaacctttgctagctaccgataacgtccgagatcgatcgatc

SEQ ID NO: 24396 - DNA, 467 bp, Oryza sativa
  unsure (1)..(467): unsure at all n locations
tactaagcttgcagggtgcctctgctcatctcatcaaagtctacaagggcgatttgcaaatgagagttcgtccactgccacgccgtgggcaagtaaagtccaggattgcacgcattgtgatgagcgccatcacttcggcacttgtcagggctttgtcacagctccccgctcttgatcacaagtcgatgccacccaatgtgtaaattaggttcttgttgtagattgcttgctcgctgtcgtaaattttttaatcagcaaattgcaatcttgaaatgttgctcctctttcggtacattgtggtgtgaccttcatggatgatggcatggtctattctcactttcctgcttgctcttgtgtagcatcctttntttcttcaatttgatcaccgctaggctggtggcaatctgattccctctcatcttcagattnttcatcatctgaactatctgaactatccgaacacatga

SEQ ID NO: 24397 - DNA, 364 bp, Oryza sativa
  unsure (1)..(364): unsure at all n locations
cggacctctcncacaatgaactgagtggattgattccatggcttctgaccaaattatcgtcattagcggcgttctctgtggcatataacaacttatcacgatgtattccaaactctggtcagttcggcacgtacggtatggatagctaccaaagcaacagtaatcttcggagtatgtcaaagggaaacatatgctctccagattcaggagcaggtgactngccatcggaaggaagagacagtatggcagatgatccagtgctctatgcagacagtgctgcctcattcgtcctgggcgtttgggcaccgatgctttcttggttatccatccactcggacggcgtgcaattctcgcgacaaggaat

SEQ ID NO: 24398 - DNA, 445 bp, Oryza sativa
  unsure (1)..(445): unsure at all n locations
ctcagcttcacggtggcctcgagcgacgatgacgatgaggaggcagtcgttaatggcgccgctggccccgcacgctctcgccggccggaactgtgtcgtcccggccgccgacgatgacgagaaggaggcggttgggagcggcgccaccggccctgcgtgcacgcgtggtggccggatccacgccgccccgccgacaacgaggaggaggaggcggcggctangagcggtgccaccggctccgcatgcctgtcggatccgcgctgtcgccgccggattttannggtttccttttttgatntttnttttgtaattttatttttccgtgcgggagtcataacctgacagcatgcganaatccgattatcccgtgtggtcgacttaacccgaccgcacaggaagatggattntntcgttgcagtgggcccgccgcacgtgataatattta

SEQ ID NO: 24399 - DNA, 378 bp, Oryza sativa
tgacgccagcccgtcacggatagccaagctcgagctacagcatgtatattgccgaactagctgctcattcattcaataggaacatactacactatctatacctgctctcatctatcatgcacacgctgagatttcgccgccgagctacatctggctactgagctctgaccaggtgaccatgtgtctgctaattgatgtactaacactatgtatgcgcctggcttatagtccgacctcgtgcccgctcttatactcgttacactatctaggcggagcagaaaacaatgtaccgcaatagctgcgatgatagcctgttaatatggtcgggattgcagcactgctctgacatcatatgccataccaacacggagtgctcac

SEQ ID NO: 24400 - DNA, 251 bp, Oryza sativa
  unsure (1)..(251): unsure at all n locations
gccctggctggttggaagtgacctatttggttcttgtaaatggtttaaatagttttaataccttgaggggaattgacatataaggtgcatgcacatttaactaacattgttttttccacaacgagcacacccaaatttcattaccaggaaagcaatgatattngcaatgttgtcgcacaacagcattctcgacgagttaacaacctacagcatttaaccttgattgcaacagagcgcatatggctcaatta

SEQ ID NO: 24401 - DNA, 437 bp, Oryza sativa
  unsure (1)..(437): unsure at all n locations
catcagtcatcactgcccanattcataaatattttgataagaaactcccanatttacaccaggacaatatttaaatntggagatccaagctgtcatattagcataagaaagatacctaggaatctgacttggcaatgtgcagacacgggtgacttggaagaccaggcaaagcatatctgcttcttggcatcaaatgatgctccatcgtggtcaattactctatccattaatgaaggagagagatgggatgaattaggctaanatagtttagttaagctgttgtaccatcaaatatatgtatgtccaacttgcaacaactcattaatgttagtacattgagacagagagatgtgtacattcagttcagaatgctctgaacttgngattaatatgcttcagaccaagattagcatggattatcaccacacgatgtcaca

SEQ ID NO: 24402 - DNA, 354 bp, Oryza sativa
catgacaagctgcagcgtggcgaataattaggcctcattgttagactgggctgtatgagtgaatgatagtcatattccttaagcattacgctagtacctgcgctgctccaccctctcgagaggagcatctccgatgccgtctccacatgaatactttaagcgtggagagacgacagctatctcttagccgtatggttgacgcctatagcgatgcgttacatgattatgctctaccatctagcatataccttggacagctacatgtcgtgatacacgttcacgtgtagatacggcctatactctgttgctagaccctttcatcgggtagcaacgacataactcgttgcgatatcc

SEQ ID NO: 24403 - DNA, 515 bp, Oryza sativa
  unsure (1)..(515): unsure at all n locations
cttactntaattatgaaccatatttacttgtcacgagaaattatattatgttaataattattcatgctctgtatgtcagagntgcttaggttaatcatattatggttacagattatcccatcacataattttacaatgagtaatcctaatttacaggttaactataattataattatatgaggtcaagaattataactagcatttatctaatatacatgtntgtcatacactccctcttaatttcatatatgcaacacgcaaattaatactataccgtaccactataatgggatgtatagtatatgtgtaggcaacaatatcttattattggatcatatatttgagtagnttctttttactggacgctatacaatacatgttgantctaagatggctcctgttgttaactaatggatatccaccgactctatatatatatattctacttcacatgacattgtatcaacataatatttgtaagtggtccanatacaactagctctgtgattactat

SEQ ID NO: 24404 - DNA, 323 bp, Oryza sativa
  unsure (1)..(323): unsure at all n locations
gtttaactgcatcanaccaatggcattcgagttactcaccgcgttcggattaccacccgattcgatagcgataatcgccgtgatcaattgtggatcgacgccccangctgcaccggctntctggcttattggcatccactgcatcgcacgttgcaccggaactttcgcgttccacggcgggttcgtatagtcatgctttgatgaacaacccgctaataacacaatcaaaaaggcaaaccatctcaatttcacttcttctatccttatnagcctggaatcgccgtgaggtgacaacggcacacctaagcggcatgatatacatt

SEQ ID NO: 24405 - DNA, 413 bp, Oryza sativa
  unsure (1)..(413): unsure at all n locations
acaagtccttgacaggatctnttcgcctatcgacactcgaaggcgaggagttcgaccattcctggaacgccacctctctcaagcgcttcggccctactagccttcaggcgaagagccttcatcttcggctcagtaaggtttgagtagtcaatcagcaccgtcgaatgggccttctccttctacagatcggccttgaggcgatcaacctcgcccctggcctctttccccttatccagctcagactgaaggcgtttgacttcagttttcgcctccttgagggtgttggccagagcctccacctccaggttcttgcggcttatttcgtcgttcttggcccgaagaccgctcttaaaaccgtgcaaacgggcccatactgttcgctccctcgaacactgagccgcaataatctatat

SEQ ID NO: 24406 - DNA, 459 bp, Oryza sativa
  unsure (1)..(459): unsure at all n locations
aggacctatgaaactcagctaacctttanngggctgatggtcagtgagctaaacttatccattatcactgggtcgcanaccttcaaaattcagtggttatccccacacctttgttntgcgtaacgccttcacacactacagtggcattaaaagaatgttgtatatttgtaaaacatctcattctgtagtctcaactatatattntaatagatatttcgcctatatgggttaatgcacatgtcanacatgcaaaatatgtaacacaaaatatgttaattccacatgttacgctacttgaataatgctgctctaacttgccttctaactagaccattgtaagtgctcctcaatagtaactntcttatcangcataatttgtctcagagatccaattagaanaagaaataaatgaaatttccatagaatgtgtcanataagtanatttccatctactacatg

SEQ ID NO: 24407 - DNA, 420 bp, Oryza sativa
  unsure (1)..(420): unsure at all n locations
taaccatttcgagagaattatctcgatttaacgaatntagagattcattatggcctctaaatggacaccctcgaaatgttaaccacctacaaggacataatcagcacacaaacacaaggctattagatattataatagtatagcctgtagagtttagatgtaaataatgtgcaaaaaaaaaaaagaacaactcatataattatctaatggattcaatggtagtcgtaagccttagtcttgctccttccaccaatatatcattctgcttaaccatcacctcgtcaatgtgagccataaagttttttatattattgtaacaaccaactcataagttatgagcagaagtggcattccccatgtgtntcacacaagcacattctnttccatcattaactttcttccattttgaacttcttcact

SEQ ID NO: 24408 - DNA, 384 bp, Oryza sativa
  unsure (1)..(384): unsure at all n locations
ntgacgatacaggcatcacanatgtccagagcgatttgtgtcacttcatccaccgtgagtgctgtcatgtgtgaggagatttattcgtaccagagggtgccctagctacaagtgacgaattcaagcaactctgggagtagagtactgctatgccataatgtaattagatggcgtatttgaagtgacaatgtataaaaatattggtaatatatatttgacaacactattcacttatgcaatatatgtagatttctcagtaccaaatgcttgttaattctaataatcttcctacatcaatttctattaaataattaagaattaatttatgggcaaattattattgtatcaaatntcagaatattctacccatcttcacaggcggat

SEQ ID NO: 24409 - DNA, 248 bp, Oryza sativa
tgtgaagattctttcatgccttgaccatagtactatctctctattttcactgaagcagatagatagattgattgatagactgatagatagctatctatgccattgccaatggcggcagtgtatatttgatacgcatgtcaaaacctcggattctcaccaatggcgtggtgtccgcgtactgcttctcttcgcctaggcgtgttcttggcaatcgtttagctgcgctgagcgaccaatggcaactccat

SEQ ID NO: 24410 - DNA, 450 bp, Oryza sativa
  unsure (1)..(450): unsure at all n locations
tacggacctatgaaactcagcttataggagggacttgaaccgatgcgtgacaagtccatccgaattaccataatgtttcagccaaccttgtgagccattgccgaggaaaatcaganatctttcttttgatcaacttaatcaagctcttgttagatgcctcagctcgcccattagcttgtgcataatatggtgaagaattcaacaacttgatacccatgctatcggcaaactgaacaaattcatcaaatacaaagaatgacccctgatctgttgtaatagtctgaggaatcccaaatcggtagataatatactccttgacaaactgtattgcatccccataatcaactntcttcaatggaactgccaccacccatttggaaaataatcggtcgccaccaatataaacttatgtcccttgcttgaaggtggattaatctgaccgatcatatc

SEQ ID NO: 24411 - DNA, 446 bp, Oryza sativa
  unsure (1)..(446): unsure at all n locations
tatgacttagctcagggggcatcatgatacaagccgatggtgaatgatgttgaggtggaggtagccgcaatcatagccgatggttggaggtatgatgtttatcagtatttacagaatccatctcaatcggcttcacgaaaattgtgctataaggccttgaagtataccttattggatgatgagctgtattatcggacgattgatggagtattggttaaatgtttgagtgccgatcaagctaaggttgtgatgggcgaagtacatgaaggtatttgtggtactcaataattggctcacaagatgaagtggttgctttggtgcacaaggtatttttggccgaacatgttagaggattgctnttaatattacaaaggatgtcaagattgccaaaaattggagcaattcagagagcaccagcatcggctatgaatcatatcatcanacta

SEQ ID NO: 24412 - DNA, 433 bp, Oryza sativa
  unsure (1)..(433): unsure at all n locations
agcttctatggaatcagctcgcatcactctanttncatattccatagggcacatcgccaattccatccatgtttgtgaagccttcttgggaatgaaaccccacttctctctgttttgccgaagcttctttctctaacctcaaccgaacgagaataaaccatgtgtagcccgaggggccggattacatctgacggggactctgagccagaacgacttctctatgcccttcaagacttgacacaaagggaggcatgcgaactggccctatattcataatcctgagcctagctcttccgagtactcttagcatnctccggtgtaccaagatacttggaactctcttccgatcggtgatgaagctgcctcagccttggaattgatggatcgtatgctaaaactcagagaacaaggcttacaaagagagcagagtact

SEQ ID NO: 24413 - DNA, 462 bp, Oryza sativa
  unsure (1)..(462): unsure at all n locations
agcttgcgagtctaggactatcggcttttctatgaattcaacttcctcaattctaaggttaacttccgggcatatttgagttgcccttatattcctcccaggggaatgtactatcattggtacacgtaaattttgggttttccaaccatttcttttcacaaaagcttgtgatatgaaagaatgggaagctcctgaatcaaacagaactatcgcgggttcagagttgacagagaacatacccatcacaacgtctggagcatcctgagcgggttcagcttgaatgtgactcacccggcctcgaccaaagttgttggaagcacgtgaaccttgtccacttgcctgagagctatgacgagacggagctgcctgtggagtangagttctggcagtgctgccattagcatgccctaagatggtgttggtaagaatctgagggcactgtctggcatattgacccatctg

SEQ ID NO: 24414 - DNA, 448 bp, Oryza sativa
agcttcatccgttagaggggttttacgtcttatttttacggtgttattccattaaccagtagaagtggtattcttacaataaatatacatggatttggaaataagtgagacctgaacactcaaattaatggtaaaccttttagtatattaataatgtattaggcttaattttggtgataggacatatgcaatttcatccattatataggcccaggttttaaaacaatgataataaatagtcgtgataatatgggaatttatacataaccgggtgaacgtcattcttattagaatctgggagaaattattatcatctaacatatctagggtctatctgacaacgtagatacctttttattataaggtaataacgaaatcttataatacatatgttcttttagccgtcgtgttcatgacatagtaaataagacacccgcgcatttgtgcg

SEQ ID NO: 24415 - DNA, 447 bp, Oryza sativa
  unsure (1)..(447): unsure at all n locations
agctttgaactgagcaatcctgctgtttcttctgttccattgggttgtacttatcctcctgacgaatggccttatccaccaacttctggaaatcagaataatccccagtcattagcgggtaagaaagctcatcattcagtcctgccaagaaattctcttgacgctcttcatctgtgcgcacatcctccggaacataacgggccagacgattgaactcatgcatgtactcggtgacagaacgggatccctgagtgagcgccctgaactccttcttcttgagagacaccactctcgatggtacacgagtcttcctgaaagcagcagtgaactcaagccaagtgattggttcagcagtagccctgttgagacagaagtgatcccactactcanaggcagggccatgaagctgatatgaagcaaaggagactttttcttagttagtgcact

SEQ ID NO: 24416 - DNA, 448 bp, Oryza sativa
agcttccctctaattgttcccgttcaattctagtacgtacaatccattatcaggcaatttatctaacaatttttctatgtcaccactgatattattctgtgcaaggtacagaaacttcaagttgcttagtctcttgaatgtggttggcagccctgtgagatcgttgaagttaaggcccaaatttacaagggatgtggaatttcccatatactcggggaggataccctgaagcccacaactttctagataaattgtttcaagtctaggaaaatcccaaaatggccaaaagagtttttcgactgcaacaggtgagtggaaggggttaccacttaggtcaattacctccagagatgaagggtcatgtgtagcggaggagggatagcgttgcgtaggccacagttgcgaaggctcaagtgctgtaaagatggaagcatgttgagagagtgag

SEQ ID NO: 24417 - DNA, 343 bp, Oryza sativa
agcctggacagagccgagccgctcttttgtgttctgtgcacccaccgcttccttcggttattccgccacatcccgagctccgcttgcaaaattagttgaggggaaatattcctcttatcctcctctatctttacccccaaaaatcggagctaatcgttgagtatcttatccgaatccaactcggtctcgagtttatcttcaaaaccgagtttttgatttcccggatcgatttcttgcgggaggagtccgatctctttaatccaaggctataaataggaccccctagacctcctctttcgtttgccccctctcccgtggtctctcgtgcttcgtagctccgtcg

SEQ ID NO: 24418 - DNA, 435 bp, Oryza sativa
agcttgttcttgctgtggtgtggatggatgtgttttgagggactgctcggctcaatgcattggcttgtcgtgacaagccgatgaatcgagccagaattttttgttttatggaaccttaaaggtgtcggttgttaaaccggcacctatttcttttcatatcagagtcgcctccgtggtgtcgtttgggagaactgacacctaagggggttttccaaccggcgattatttgtgtttctgtagtagtggtgggaggtggctatttttcttcgattttctagttacgatctcctccaggggtgtaatcttgtgttctattaatataaactacgcactatctggtacgagtcgttcataaaagagaaatataacgtggtcatgaatcagaccacgaacattacgcacgtttgtgtgcgtacgttgtcatcactatatgac

SEQ ID NO: 24419 - DNA, 430 bp, Oryza sativa
agcttacaagatgggggagaagctgactcggagccggagagaagcagctccagctccggctccggccggtcggatgagcgagctcatcgccagagcgcaagcggagaggctccgccgcgacgccgagaggaagagggcgcgcgaggaacaaccacgttgatcgggatcactcatcggagtagagggcatcgtacggagaaattccggcggccggccaagccgcggcgtcggcttcttgatgagcggcaactcggattcatcaatgctgtactctgcaggtcctgcagattgtcatactgtcacattaggaacttgtactgatgatcaaagagatgatcatccatataccatagtgttgtactctgtaggtcgtagttgtaaaatcttcttttaatatatatatcgatggagatggattctaatagctgga

SEQ ID NO: 24420 - DNA, 455 bp, Oryza sativa
  unsure (1)..(455): unsure at all n locations
agcttagctatgactatctattttttcatctacaacaatgattcacatattgtgctgtgttccctgaagattacaagtttgatagtgaggagatgattcacttgtggatagggcaaggcattttacattcccaggatgaaaacaaaacaattgaagatattgggttgagatatttgaatgatttggttaattatggatttttcataaaagatgtgaatgaagatgggtcaccttactacactatgcatgacctactacatgagttagcattgaaggtttcatcatatgaatatctttctataagtaatactaaagtaatgtctatgcaaattccgccatctatacggcacttatctattgtgatagatgacatggacgtaaacgacagagcaacttttgaaaatattaagaacgattntggcacactaagtaagaggcttgatgtcgaaaagcta

SEQ ID NO: 24421 - DNA, 309 bp, Oryza sativa
aagcttgtaaagctggatttattatagtttattttcgtccaaagaggatagccaatcgagacctggcgcgcaagggctactggaagctgcagatgtgaggtgactttaacgaccattacatggcgagcccaagagatcacttgcctctttcctgaatataggaacgtggctaaagatgacgaggagaagacaacattcatcacgccgcctggaggattctgccactttaaaacgccggtcggactgattaccgtatgatatactttacaatgcgcggtgcagggagcacttagcgatcagattgggaac

SEQ ID NO: 24422 - DNA, 443 bp, Oryza sativa
  unsure (1)..(443): unsure at all n locations
ctgcagcttctgaagcacttatgatgcttttgttgtagggtgctcgagaaacatcaaaaggtatgcaatctactttctttcggaagaaagttttgactgtagattaccagtttgttgaattttagttcttattattgatttatttccatgtangtattgctggctttgttgatggaaataagcagggcttttcagttacaagtgctattcttctcagcttagtatgtctctaacatagaaaaatatttcgtttaatacatttcttgcatgcatttgttgaatttaaaaaatattaggttataataaaggtgatgcttacttggaccaagagagaaaaaaaaggttcaatatggtttcctgtttcaagcatgtgttggataagtttatgtatgaactctcgactaattgaaagagggtggacagtggacaagctanggagttat

SEQ ID NO: 24423 - DNA, 187 bp, Oryza sativa
aaaaaaaaaaaaaaaaaagaaaaaaaaaaaaaaaaaaaaacagaaaaaaagaaagaaaaaaaaaagaaaaaaagaaaaaaaaaagaaaaagaaaaaaaaaaaaacaaaagaaaaaaaaaaagagaaaaaaaaaaaaaaaaaaacaaaaaaaaaaaaaaaaaaaaaacaacaaaaacaaaaaagaaaa

SEQ ID NO: 24424 - DNA, 451 bp, Oryza sativa
  unsure (1)..(451): unsure at all n locations
agcttcttcttcactattggcaattatgttccttatttcttcagncaactcctcacggcttggaattacaagaatattttcctggttctcctcttcattcctcatgggatgttcctcctttccctgttctccattgtcgaaaagcaacttgccctcattttcagcatcataaattatttggatctcttggttctcctgagttccttgctcctcattatctcctacactgtccagacagatcgcctccccatcaatctcaatagcaatgctagtttcttccattactgtacaatccacaacagaagacaacattctttgttcagcatttacagctatgaaattatatgtaacgcaaacagaggtaaggtacacattcagatacaacaaacatacatgagaacgggacaacgctaaactagagcgcactagctntacatccatttcttatttt

SEQ ID NO: 24425 - DNA, 146 bp, Oryza sativa
agcatagtaagtgtgagtacttaacactctggagagacctgtatgcggtatctcaaaatttgacgtgtgcaagctacaatcaaaagatgcgcaagtagcaaaccgtatgcaatggatgaacgcttaatatccgctttcttatcccc

SEQ ID NO: 24426 - DNA, 399 bp, Oryza sativa
  unsure (1)..(399): unsure at all n locations
gcttctgtttatattgaagcttgtttgttnctacccgtgtaggatactaggaaactgaagagaatattaggtaggagccaatcaccagaaggaacagtaaatcaaaagtaacacttgcaacctgtgaattaataattcgaagaatgtatgagaatatttcaatgtgttcatatcttgcataagtccatttaaaatgaattctttgttgctgttaagcaattcataacagaatacatgagcagaatattataatactccctctgtctcaatatatagctacatctagcattcaaatttctcataatgtacttctcgacctaattccccatctcaaccaatcacaactatcccttgattaattcttcacctactttctcatcttaaccaatcacaaccatt

SEQ ID NO: 24427 - DNA, 277 bp, Oryza sativa
tcccccatatctaaaactttcatttacaccatttcccctctctgaactttcaccccactccaaaggaattggagagtgaggaaactgtcgtttacctctgcccacgggtcgctcttgagccgcaagggactcaacagcagccccctggtgttgttcttctacgcggggccctaccggcgtcttcatgttcatcggcgtcgacgccttcagagcggtgacgtgcacttcgatcccctccatggacttgttcaactctcggatcccattgtcgacgcac

SEQ ID NO: 24428 - DNA, 450 bp, Oryza sativa
  unsure (1)..(450): unsure at all n locations
agcttcgaagaacatgcccagcgtgtccttacctatcagcgatgaagttgatgtttctaaaggttatacatgcacaactgtcaacgatgatgctgagaatggaatagaggtcaaccaaacaccatctttaggaaatgatgtaaaagatgtgagtgcagctgctgccaattgtacaccgatggttcatactcacaacttgaaagaagaatcaatcgacttgaatcgcactgttccacacaggacttatactggtctggacttcgatcctccatcatttgatctaaatattgactactcaccatcaaataacacaggttattttcctacacgtatatgtttgctgcctgatttcatgtttacatagtaagtacccttattgttccttnntttttccatcggctggtgtgcatgctgacagtgaggcgagagaatcatggagtaagttgtcat

SEQ ID NO: 24429 - DNA, 459 bp, Oryza sativa
  unsure (1)..(459): unsure at all n locations
agcttggaagtgtgtgagtgaagttatttatttatgtctttacataaaggtaggtgtgacggttggtgaaagggaaatttccaaagtgccctccaaccgtcatcaaggatgcatctgggacatccacgccaaaccccacatcaaacggtgaggatggtggttcgaccaaacctgggctgggcccatctggccttggctttggcccatgtcctcccctggtcctcctctatccattctttggtatttttggctgattctctagtgttttgatgaagttcacaacccatccttgtatggatacataattctcctcactttactctaaattttctcctaacctcagggtttatcacctgcatacaaatatacactaacacttgtggaatatgtgagaatacataagcacctatcactatgttggatgttttattatctgaactntatgcagatgttggcagt

SEQ ID NO: 24430 - DNA, 383 bp, Oryza sativa
gcttattatattagggctgcttttatcttcttttcatatgtaaattagtacgggtgtgttctttccctcattttccaaacccacctatgttgttttccgtacgtacgcttttcaaactgctaaattatatgatttatgcaaaaaaaaaaactttctatataaaagttgttttaaaaaatcatattaatccatattttaaaaaaaatagttaatacttaattaattatgcaataatacgggaggaggggtctctcctcccgaagacagcctaattgtttaacaccacaaaaacgttgaaaaatccactcaacttgcttaattggtaaaagttgtcacaagtagctagctagcatattaattcctctatagttggtacgtgcact

SEQ ID NO: 24431 - DNA, 324 bp, Oryza sativa
  unsure (1)..(324): unsure at all n locations
ccgctgcagcttntatagtggggggttttttttgtgtcgctngggggccgggggaacccctggcgcctctgcgggcccaccctcgcacgattcgacccaccgagctggacacctccccgcaccttgcgcggttacggcgcctgtcaggaagtgactgcccttctcccgcaccctgaaggcctccactgctccggtgagatgggcttccgccatggtgatgggcccgaagagctgggctcatacctcacgacctgggcgactacgctctcatcgagatctggagaggtcacgaatctacgacgagcgattgccgtctttctggcc

SEQ ID NO: 24432 - DNA, 374 bp, Oryza sativa
agcttcttccctgtgtctgggagtttttataatttgtatataatacccattatgtggtccatctcaatgaaaaatcttattccgaaaacaaggggtgagtgttatctcacctaatctgagggggaaaaaagagtgtaggcttaagactgaaaataaccactgtgaatcatgatataccaatattaatttaattaaattacttattataggtggaattcagaacttactaccaattacttccaactggcaattcattttggatttttaatggaagtctgaatggatttcttaaacatatttatgatccagcacttagatacgtagaaagatagcccaattttacttaatttttctcatcactggtttactcaaaa

SEQ ID NO: 24433 - DNA, 460 bp, Oryza sativa
  unsure (1)..(460): unsure at all n locations
agcnttgctcgattcttctatatattttatattaaggantatcaaacctgacctctttacatttgtgggggtgtacacagctaaatattcgaacacgagtacataagactttcccttaaaggggtacaaactgcagcaactaacctctcccattacatgagagataacaacacaaaagtcttaagaacaacaaaagaaggaaaagactaggcttcaaatcttccaccaaagttccagtgatacaccgagaagaactccaatacacacttctccagcaacttgcaagagctcttaactgtttcttcatcgactcctttaagaagcaaagaccaagttcttgcccaatgcattcccacaaaaaagacctgcaagaaagatgtagaantggcaccattaaagaccacatctctgttcctacataaccaaattgtccaaagaaatacagctatgcccacaaagc

SEQ ID NO: 24434 - DNA, 434 bp, Oryza sativa
  unsure (1)..(434): unsure at all n locations
agcttattgtctaaactgctagtaacatttctgtttctgttcattcaaaaaacaagaaanaaaaaagaaactgaactgctagtaacagctcacatctttgctagctattccgcttgaaggtatgcttggcatgtgttggtgcttggcaaggtgctagggtccaataactgaaaactggaaccttattttctgtaagcagtgtactctaccaaatatacagagctcgtgcgtacataaggccccaaatggcgcatgattcatttttgttgatcaatcgtgctgatatatgtcatcctttgggtcatttctgttgtagaaaattcatgttgtacaaaatcatctagcagttccgtactaccattgtctccaatccgataatttctgatgcaaaatgatcttcaaaattaggtccctctattnattcatcacctata

SEQ ID NO: 24435 - DNA, 368 bp, Oryza sativa
catatgccttcatgtatgtcgaggaggaggtgtctgtcgtcgtcagtagagacgcatttgagaagtaccccgtttagcgcttttttgtataaatcgttaccgaccatacagtagatctttgctttacggggtattttctcggcctctgtatcgtcctcgggcaactcctcgctgctgatgaatttgattaatgggatgcgccagtcgtctgtggtttcgatgtcagcaacggcgcgttctgcctcggtgacctccgagctgatgtcgggggtgttcgggctaacttcgccgctaacttctttcaccgatggcttcgtcaggatatcgagaaaggtgccgggttcgagtggttctcgtctggctcgacg

SEQ ID NO: 24436 - DNA, 436 bp, Oryza sativa
  unsure (1)..(436): unsure at all n locations
gctttcgtcanaactcgaaacgtcaatgcttttatagtaaaacatagctggataagaaagcagctcttagaatcaagttttttttacatgaattttgttcacagaaattcagaatcgaaaatgagatctccttcaactcgttactgaatcttcgcacattcgcaacatcgccgttctttcctgaattggatcaacagttcaacactccacagaatcggacaggcataaactggttaagggtagaaggaatcccgcggagctgcggcgagaggccgcttcnggcaatagatgctgcgatctgcgaagggatacagaatcaaacagaaggcgaccgggctccggcaagccgtcgaggagagcgtgcgagagggtttctatgaaccgtcggatntaaattacattcttcagattaacaagggatactggttgggcgttt

SEQ ID NO: 24437 - DNA, 207 bp, Oryza sativa
acagagcagtttaaacataccccattctgaaacaatgttactatggtttgaacagcctacatgcaaaattccctctgacgattaaaaaatctaagaaggtcatctggacacgggaggaaggcagcaacagcgcaaaagcgcattgtacagggctaataacagtgaacgagtatccttgcctataccaacatggatcgacggcaagaa

SEQ ID NO: 24438 - DNA, 345 bp, Oryza sativa
  unsure (1)..(345): unsure at all n locations
agcttgctagctgcatcctcctcttattctagtgctagtccagccttcttcttcctcctcctnctttccctttctcacccactcttcctctccccttcggagcgacacatccatctacaggtgaggaccgtctcacacccagcggaaagcttcgccgccacctcctccatgagccctccaacttcactcgcggcgtanggaaagtacaggggtgagcagcatggcacgcgtcggcgaaggtggtggcatgctccagtgtaggcggcaatgcgggcagcatgctccaacgaaggcagcgaagccagcgacatgggaaagaagcagctatgaagggagtcgagctcg

SEQ ID NO: 24439 - DNA, 435 bp, Oryza sativa
agcttcccaatcgctgtagggccctgattgttcgcctcgtgtgcttgcctcctcctgatcaggatggagatgaggatgaggagactcttggtgcgctgctcgtgttctgggtgaaagccatgaagcccaagaggacggattggttgctggtgctgaaggagctcacggctatggagagccctctccttgctgaggtcagtatgcatttcagagtcttgctgctaaatcttggtagcaaaatggggatcttgagctggtctaatgcttgctgaagtagtggaacacatagggaacaatagatttcatgttttttttaagtatttaggattcattatgttttatttcttgccatttgtttggttggaatgaatctctgcttgctgctgtgattagtttaaatgatcattgctgacaccaaattggctgaatgacatt

SEQ ID NO: 24440 - DNA, 427 bp, Oryza sativa
agcttggcctgctcctccttcatgatcatcttcttgtggcacttggagcacatgttcatggtcgccgcgctgccaaagaagccgcagttattgatgcaaaggattgggccctcgggctgttggcagccagcctccttgtgttccatcgcaactgtgatctgttcatcaaacaaacaatgcaaaactcaataccgaaatgcgtataagaaacaaatttaaaatttaacatacggataaatcaactagtgtccaattaaatcgggcggtaagataatccaagaagcacctagttgctacaattttcctatcgaaatttccatataattgtgacttttaaaataacctataacccactgcggcgagcttacactttatgaaacaagatcctaatttctatgaggcgcaacgaaatcgccatcacaaaagt

SEQ ID NO: 24441 - DNA, 384 bp, Oryza sativa
  unsure (1)..(384): unsure at all n locations
agcttcaccacttcctctacagttccatgttaaccagcaccaaatctgtgctcccaccttgtacaaggcagcttctcaccaagatcgatatccgctggagacccttcaatacagagatcaaggtgactacgtctcaccaccgccacaacagaactaattttgcgactagattgtgcaacacctcggaagagacggagcacatcgctgaagccactggttttggcatataacttcagattaaggccacaagcacgtgaatgtataatctcaacatcaactgttgcttgaactgcatttacaagcagaagaaacttcacacccaacccacacttctcaccatacagacggacagtttcggtgaatgatngttgatctcaaatgttg

SEQ ID NO: 24442 - DNA, 462 bp, Oryza sativa
  unsure (1)..(462): unsure at all n locations
agcttagagntatntacttaagttcaattcacacacaaaaaaaggtgaatggtgattcatgtggtcattcgcatgccagttaaaagtaagaaaaataagtgagaacttacgaattaaccatatttcttatgtcatcaatgtcctggggagctgtttctgcaaatgcatcctatagatacaggataaagtgagacttttgcagcacataagtcattgacatatggaggcatatttaattatagacaaatcaggagttttcaaaatgacaaccagaagcaccacgcaacttactttgaagatctcaatgacctgatgttgcacatcgctcctcatattcgttccatataaaagttgccaacaaatgttgtatcttatccgtctgagaaagggcatatcttcccttttttcagtccttcgtgtaaagaagcacgtagcaactggcatttctcacaacacatgaag

SEQ ID NO: 24443 - DNA, 463 bp, Oryza sativa
  unsure (1)..(463): unsure at all n locations
agcttcaattgatgattcatctctaaaattgtgttatttatctatagctgcaggacatgtgaacaatgattaacttttggagttattcggattggagtaaaaacaaaggatttggattttgaaggattaatctctatgattttttttgtttgtaagagcctaagcctggactaaagattccctcttacatcttataattaagaatcataaaattaggttagtatatatactacatgacttactatgaataaatttgcaaagtgctatataatttattataacacatataaccccgaataataaatttttataatatttagcaaaagttgaacaagctcatgcgagtcgcttggtgggaaactgtgctggcttgaaacaacatgaagaattaganggttgtgtaacttgaatataatacgagtgccagatctatacttatgttactattttctatgctaagtta

SEQ ID NO: 24444 - DNA, 412 bp, Oryza sativa
  unsure (1)..(412): unsure at all n locations
agctttactgagtcatttaagttatagtataattcctgaacccaagaattcaaaataacaagttcctctttacccagaaaaaaagaaccacttagaatagcccaacagattatatttgtcgagaaatgcaaaatgatatggagatgaccctcattatctattttggccaattgtattatttccttgcgtattcctatagggggggtttggacatgtgtattcgggttctcttttatcatttcgtccaagataaaaaggtcttctaattccatgaatctttctagaactcttttctcttgaatagcagttaagagagtttgggattgcctggtattccaccaattcttaatccaaagttccagacatttggtaaaagagaaagagactccncanggcaaagtacgataaatac

SEQ ID NO: 24445 - DNA, 400 bp, Oryza sativa
  unsure (1)..(400): unsure at all n locations
tgacggtgattgtttttctgccatgagaaaaagttgtcacaactcgatcccaccggacgtgccaaaagcgtgttgatgtgaaaaaacacacactagcctggaagatctgcttaaatcctgtacaggtccaaaatctcgcctttatgttcatgagcgtgccagttgatttgatcctacaatcaaccagaataaagacgagagaaaccgccgttaaatccataaacgatagccgatcggctacttacctatgacatatcatttatcttcgagccgatgtcatctttgaatcgattggccataatgaataaataagataaaactcaatctactcgatcggctgtagacattaacagcatatagtctttactccgatatatacttanactaagtgattgggata

SEQ ID NO: 24446 - DNA, 470 bp, Oryza sativa
agcttatagggaacagatagacacatctacacacacaaactgaccctggtaatccattaattgactccacatctaccttcatggctacaacatctgtctttcctttcatctgcatgtgcattttgtttctcaattagtttacgaagacagacatttttttccacccatcacttgtgtatctgcaatatttgctttcacttttgaaacattgtaatcacgctactttgtttctgccaaatagttaatcatgctttattgtctgtattgcagtattgcaagttgccgtgaaaggccattctagggaatgcagaaagatgtgcttgcacgccagagatatctcctatgaagagaagggcatttctcccattgatttgacatcactaattcttgatgagcgaggatttcagttgctcacctggtgcattctgcaatcacaaagtaataatgatgctatcaatgtcagaaatact

SEQ ID NO: 24447 - DNA, 182 bp, Oryza sativa
  unsure (1)..(182): unsure at all n locations
aaaaaaaagggggaggggaggggggggggggggggggggggggggggggagggggggagggggaggggggggggaggaaggaaggggagggggagggaagggggnnnngangggggggggagggggagggggggggggggggggaggggggggggagggggggggggagggggggggggggg

SEQ ID NO: 24448 - DNA, 387 bp, Oryza sativa
  unsure (1)..(387): unsure at all n locations
agcttaataggttccagtttaggttatttttgtatgacctaaggatgttgatagccggcttggcctcgtgtatctttccctttagcagnttaaaagttaaggtaaaaaaataaataaataagtctaaaataatctaaaattaagcctgaaaattaaaattttgggtctggcttattagccaacaaaccatgaggaatataatataacactaagattaggtagggttcaaaatttcggaatttcaatcctatggaacccccgccccttatacgatattattttggccgaattgtttaaaaactttcatgaaattcggcaatattttttcaaaatcgactaaattttgctcaaaatttcagaaatattgccatatctaacacaaacgaa

SEQ ID NO: 24449 - DNA, 458 bp, Oryza sativa
  unsure (1)..(458): unsure at all n locations
agctctttaatagagcaagctagttctttattcatnatcaagataacatcctgcacaagcgagccccctaaagcagcatatctctcattgtgaatggagaccgccaatgtcaatgagggagcgagtagctgaaaaaatgtagtttggggatcagcattagggtttgggacccctgaagtgtagctcagtcacaatgccagcactagctaggggctattttgccttggaataatgagatatgagggctggtgggtgggatagagatcgaaatgagcgaagaattaggacgaaatgaagtgggaaaaaaatagatagctagtgtgtaaaagtaaccccatgatgtgtaggaaattactttcattttctattatccaaacgagtagcctagtagatgatggataataattagttacgacgatgctagattntcagtactaaaatcatggatatattcaagt

SEQ ID NO: 24450 - DNA, 465 bp, Oryza sativa
  unsure (1)..(465): unsure at all n locations
agctngatcaactatctgaaggcccaatttagtcttacattgattggcttgaggctcgcaagaatgaccttttagcacaacttgaagaatgtaacgctgagctggatatggaacacaagaaactagccgatctccccaagtctattgaagaacagaaagcgagactcaaatcggctattaaacatgttgctgaactgaccaagtccctgaaagttatcccaggaaccgatgctcaagatgcccaagccaaagaggaagtagagcagattaggtagaaggctatatcggctatccagcgatacttatcgcgggaatctttgctaaaacattctgttactgtactgttggaacgatcctttgcgccgattaatacgactttgaaatttgcgcaaacaaaatttaaaagtttatactgcatgcctggatatatatatatatatatatatatatatatatatatatata

SEQ ID NO: 24451 - DNA, 459 bp, Oryza sativa
  unsure (1)..(459): unsure at all n locations
agcttgacccatccatccattcgaacggttctttactatacttttcaaactattggttagaaaacttcctatatcgaaatttctattgaaaatcaaataaatttgtcttgtttatgatagttaatacataatcaattatacattaatcatttgtcttgttttacatgtactctttccattcgtaatataagagattttaggtggatgtgacatatctaataccacaaatctggacagttttcttaacaagattcaagattcgtagtactaggatgtgtcacatccatccaaaatcccttacggcctgtttggtaagagcagggaaggggaatttatatttttgggatggagggagtagctgataagctagacccatccatcaattcgaacgcagcctaaccaggcaaaaggattntagagtgttcctattggatgattccatcacctgaaataacatat

SEQ ID NO: 24452 - DNA, 343 bp, Oryza sativa
agcttgaatcaagagcacaaggctctgttctctattgaacgtgctgatgaagcctagaggggggtgggggtgaatacgctgtccctgaaaacttaaaaacaaatcacagcggtaaaattcaaacagaccctgaacttcctattaaggaacaccggaacttccggtctgccaggcccggaacttccgagtaacagaacaaggatgaaattcaaatttcgaaacaagagactaagccaatcttcacaagatgaagcacaggtattctaagcagaggatagatcacagaaacatccacagaaacatcacagaaaagacaagagcgatttttcccgaagttcggatc

SEQ ID NO: 24453 - DNA, 451 bp, Oryza sativa
  unsure (1)..(451): unsure at all n locations
agcttgagatattccagtattgcctggatcctcagcgccgcagagatgtctcgagtccacctcttgtcttgcaaagcctcaaccaccgttcgcctgttccggaaccgagcgggaacagctgcgtagacagccggcgcgagtgaccgaattgaagagccctgtagccagcaatcctgccagaacagtaccaacttcccatcgcccactgagcaaaccatagaatcgagacaaggttgtgttccttctgcaaaattgggatatttagtccctgccacagcttatctggtgaggttctttgttgccagagccatcgcgacctcaaggccatacccaatctctcgagatcgaggatgaaacgattatgcattgaatatggatagagaaacaacatacgcgatcatacaacaagggactctgaacgctatagtatgggagacatgtnctttgaagt

SEQ ID NO: 24454 - DNA, 463 bp, Oryza sativa
agcttggacaaaataacctatggcaaacttgttattttatcagccatatgggatatcgacgttttattatacgtcagcaagcctaggcagctaataaagatgtcggataactaatgctggtatctgcgaagatttgtatcctgacataatggacattatgtatcgcagctttagtaagttgatttctccgctaacaaaccgagagaccacgtcgtaaagggcgtggtccgccccatgcctaaatcacacactttctaaactgtacgccatgattggcgatacattggtgatactctttacgttttgtttggcaaatagagcaaggaaataatcccattctccaaagagtaatattgtatcctaaccattcattcttcacactcaattaatcctgaccattcatacatttacctttttcacaccccctccctcctctcattatccaattgcaatgacattagtc

SEQ ID NO: 24455 - DNA, 465 bp, Oryza sativa
  unsure (1)..(465): unsure at all n locations
agctttgaccgcccgatcggaatgaatggtgtttggaattgatgtcaactttcgattcattccgttttttttcccctatcgagtgctgggggtgtttttttcagaggtgaaattactagtttatgttcagaggttgatctctttcctcctcccctgcctgcctgacttgatcgagtagtaatgatacttcaccggtaattcgcactttgcagaacctggagatgatgacagcagtagtagtagtagtaatctcgatcgatctctttggatgcgtttcgttgaaggattggttattagcacaaggtgggatggtagcttgacccataactacaaatatatagtattattatcatgctcgtgcatgggttgtgttagaagcgtgcaatcaatttcctcttgcgaacacttacttatcctgcctgtaactttatactcgaaattaccattnttgctagccacaaacat

SEQ ID NO: 24456 - DNA, 467 bp, Oryza sativa
  unsure (1)..(467): unsure at all n locations
agctggtggagttgggagttggggccttgtattgggctcgttccacgcgtcgtctgacgctgaatttaaccagcccatctgacaggaggaaatttacctgaaacccagttactgcttttcatcatatttggtgttctaaaactcgtaaaaccccgctacaccgagtgaatttacttcacaaaccttgttgttcgaattccgatgattcccttgtttctttcaaatgattcctttgtatctttcaaataaagatatttgaaatagtaaaatgagaacaggagcgatataagttgaaaagaaatcggcttgagatggaaagagagaatatgtcaacttgtcaagcagatgtatcattatacagactcaataaacgaattcttccaccatttcacatttcatatattatgagttatgacgcttctgaacaaacagttcagaacanaccataattcacaanttcacatatg

SEQ ID NO: 24457 - DNA, 367 bp, Oryza sativa
  unsure (1)..(367): unsure at all n locations
tcatgcnncacattcattcctttccatgactctggtggaagatgaacacccatcatgctccaagggcactttttctaatataaatgaggggggctccacgtcgtcacttcactttcgccccttcttctcgagaagggtggaacacagctaaggaaaagatagttgacaaggaaagaaatctcagagaccagaaaaatactataggccggaatgctaacactccaaatntgtaccacttcgatgattntttcttcccgatggaataaaactcctatcccttcaatccggtaaaattctgatgtgagcttattatntctttctaggttactatttggtatctggtggacctcgtctattacactttatg

SEQ ID NO: 24458 - DNA, 450 bp, Oryza sativa
agcttattgacggtccagtgctgatcttattatataccgtcagcactaaacatattcataagcgatatcaatccgttgctgctgtttaatcagaatttcttggatcaatttacttggatctgggaggttatgcatggtagcatacactgttatcatttttattgtttaaaggaatcgccatttgtttagctgtcaaatcttaagcctgactttgcaaacaactatcgacttctgatggcaaatctattacatattatgttcatcaaagaacactgtttcttatgcttgctaatagtctgaatctggatggcatacccctttcaattattcatttcatccctttacattgtgcacgcgttcttttctagcactatgttatatgtcaaccatcgaaatgtagatcataatattgttttaatatagctgcattgaccatgaattcttcaaaat

SEQ ID NO: 24459 - DNA, 451 bp, Oryza sativa
  unsure (1)..(451): unsure at all n locations
tcccggaccttaagncacctgccgcatgcagcttagtggaatctaccatttctattcatattgtttcattatgatgctatctgcgtctgcagataacaaaagtgacaaggaggtaaaaagccatggcttttgtttggttctgtttaccaccagattatatttcattgctaagcgacaagtttaagcgtgtactcaagaatttctttggtgaatgctgatggagcacatggccttcttcttcgctgaattggcacttgatgcaatacgggctggtggcatatgcctctgctgtctatgcagccaggcccaatcctcgtcatttctatatatgaaaaaattgctggatccatcctctccgctaactaggacgctgttccactagatctccattatatctagtgcaagttcgtcactttgccccaatcgagctattctctttcaatcattatgg

SEQ ID NO: 24460 - DNA, 390 bp, Oryza sativa
agcttctcaaacgctccggaccgtttatctggtcggaggaagctgaaaatgccctcacccagttgaaggcgtatctaagctctcccccagttctggtcgccccggagccagacgagcccttgctactctacttagcggcgaccccgcaagtagttagtgtggcattggttgtggagcgcgatgaggacaattctcatttcgcgcttccccaccctgtgccgacttggcccgggagagagcaaggaggagaggcccccgagccgaacggtggcccaaggcccccgacgattggagttggccctctgcccgcttgtcagaccgtgctaggagcccccgacccccaggaaggccctgaggccactgtgggaaggccgcacctatcgccctttg

SEQ ID NO: 24461 - DNA, 461 bp, Oryza sativa
agcttctcttactgaagaggggatatatttatctttaatgagttcaaccacagttctcagcaagccacaccggagatgcataattaatgcaagggggtacaaggggataataatataggggttaagttttgcagtaaacagcatttaaaagtcacttaattgcccaaagccattttataaagacgatcctatagctacacaaaattattaatcaaggccgtgaaccctcacgaacctgccttaacccaaggcctacgatgattcagaccgaactggcaacccgaccctatgtcccagctcgtcccaagccaacccaggccaaccattccacattttagttgttgagcaaaatttaagaattataacactgacttgggtacattgcttggcttgcccataaccgagggcgcggctattcgaatagattatactctgatcagaagtgtacatctttacccaca

SEQ ID NO: 24462 - DNA, 461 bp, Oryza sativa
  unsure (1)..(461): unsure at all n locations
ctatgggttattatttgagttgttttatatcaatacatcaaccttataatatttttaagctctgaaataattggtatacacccggttcatctatagtccatcatcaatcgaaacttaaacgctccaggagcatcgtcaatcgaaacttaaatactggaggagaataaggttatagtatgatatgcaaaatagaatatttgatgaaaatcgagataactctgaaaaaatcctggtaattttcatattctaaacacaccctggaaaaattacatgcgttatctagcgcgtcatatggcgcgctaattttctagtttcctcgatttcaggagcatatttttcaaaatattaaatgatagacttcgtaaaanaaatatgtatagaagttattttaaaaatgctatatanatattttntaatttgtaaataactattacttaaaataaatttttatcatggttctc

SEQ ID NO: 24463 - DNA, 458 bp, Oryza sativa
  unsure (1)..(458): unsure at all n locations
agctttgtggcatggggtgccatacaattttntcccctctnttcttgctaatagatggaaacataattgatcatgcagactggcgcgaacgaaaaaaattccggaagtcttgcgtattttttaagtagggttaaagatagatatagattataaaaaatgtccgtgtattgcaacgggaaaaaaattatcgagcacataattgatcatattaaaatctacttgtttagtgctaacccttaatttgtgggcctcaaacaggagaggaattacttgaactacatatatgaaccaccaatattactccaatcctatcatgatctagatggaggcttttggaataagattctgaaatagctttcagttaatgccttctcaacacagttagcagctaaaatccagcaagcacttggaacacctagcctgcagccaactaatgagaacatnattgtacttacaaa

SEQ ID NO: 24464 - DNA, 467 bp, Oryza sativa
agcttagtaaatggggtttcacttatttataatttatcatttaattcttagcctttgattaaatgtcttgtactgaatcacataattttaatgtctgtaagttttgcaagaatctctccaacaccttaaatgatgttgtttgaaaatcatatgatcttcaaagtcaacattcctagagtaacttgggagagtacgattgtgaactattagcataccattcttttgaatcaatattcctacttctagaggcgagaaaaggagaaagcatgtctattgcacttgtacatgtgaatgaccctgtaaattatgtttggtctccactcctgttgcatatgttgctattatcttttagagaacctttctgaaagctcaagtgaagctgatcatgcaattgagtttatgtgttagtaagttttgtgtgtaaacaatatgttgtgaggaacaagtatacttattctagataatgg

SEQ ID NO: 24465 - DNA, 404 bp, Oryza sativa
atgcccggcatatagtaatattcctaaataaaaaacatccgatatataataatatctatgggtataacttagaattagaagtcggggaaaagatgcattgatgaccattacgacatggatggcatcccattttcttcttaggtcataccaggttaaagctttgtccttaaaaaaataagataccaatatgagctgtcctttctcattaatgagatttttaattagatataccttcctatctctgatttgataaagatgttatctacactagcaagaccaaatattaaccccacaacacatctatctatctattatatactactaaaagtaaattaaactttctataaacgctcccaaaccgccatgtggcaccctacaaacactcctacaccgccatgtgtcgc

SEQ ID NO: 24466 - DNA, 462 bp, Oryza sativa
gcttaagggttgtaagctgagatattttctttgatcactggccctcatcatattacccgcaatgttaaaactttctagcgcggtcaaattgcccagccatgatgggatttgtccatgaacatagttatcagcaatactgaacatggtgagggcagtaagatttgcaaatgtagatggtacataacccgagatattgttatggcgaatattcagaacctcaagctttgacagctgaccaatggatggagggatcacaccagacaagaaattgacactcaagttgagcctctgcagtgccaagcatcttgcaaggctaggagggatctcaccttcaagcttgttgtctgacagatcgagctctcggagtccggtgaggttgccaacaagaggtgagatggtgccaacgaggccaagaccctgcacgcgcatagagacgacacgacgatggcgcgcaccactgga

SEQ ID NO: 24467 - DNA, 415 bp, Oryza sativa
  unsure (1)..(415): unsure at all n locations
attcatctttcacaaggctgaagtgctctaaatgaatgttaataatgttaagtctggtgactatgtaagagcttcacgctcttctgctttggttatgtttccagttcacatgagtcaaaagtccaaactaaataactcttagcacatactcacgacattaatccacatattgtgacaggtaatctatattttgtaacagataaattagctataggttaacaacaggtacagcacagaaaagagctggttaatagctaacctgctggaattcgaaccatcctgatgattattactangtgatgctaactgtgattggcggccacccgttgcctcttgagttaatttctacagttctatggttgggtgagggaacacgacaatattgcaaataacatgatataataaaataatcttg

SEQ ID NO: 24468 - DNA, 456 bp, Oryza sativa
  unsure (1)..(456): unsure at all n locations
agcttcagctggctgggtcgaaacatgtttcataatccgtattctatgccgacaaaaacgcgacagcggttgcaatgaccccatgacccattttcatgcaaagagggaatcaaaatattaaatccttgaagagtttcatacttcatagcaggtatctactaacagttttaaaggagtatcttaaaaacctacccaagttttttgagggaaaaaaatcagatataactagaatataattgtgcaattacattgtagatatactgtgaaattttctttatagtatttttcccccttcatgcacaaatctcaaggtgatcctatggtcacaaatctaaaagttttgggagcaaaaaacttacgaaagagttttctagcaattccgttaaataacacgaagaacatngagatttcaactttcacgaattcaggtagggtcggcctgatcacagacacact

SEQ ID NO: 24469 - DNA, 451 bp, Oryza sativa
agcttccaacaggcgctcaagtactgcattcctgcgtgcccctgatccagccgctactccaaagctgcctaccccaactgtgcaacacacagaagtggagctgcttgagcctctagaagctgtctccgacaatcttcgtcgacacattttgcatgctcgacgggcaaacagtcctcatcccctgcgcaactacaggaggaagtatcgcaaggtgcagcgtctacaccaactcgttagctcgcgcatcgcccagagctccgtcccagaggaagactggtctcttgacacatctgtcctcatcaagaaggtgttcaagttctcaagcattctagagccaccttacgacttgttccctgacgaatgggcatgtgagccaactaagatcaaggagaaagtcagacgagccatcatgaaggagtattggaagcggcgtgatagggagcacctcgtc

SEQ ID NO: 24470 - DNA, 428 bp, Oryza sativa
  unsure (1)..(428): unsure at all n locations
agcttctccagctntggcatagcttctttcttatacgtaaggtatgctccaccattgtgatcgctacaagcaaggacaaactccttaagaaataggaatcctgtgctttggactgtaagctgttcttttgggtcaggttccagccatatttctagactgagtaaggctggcaggtctccaagtgtttccatatcttccttctttatctcacgtaaatttatgctaaggtatgccattttggtgagatacggtttaacccactttggaagttgcaggagatagtagtcagtgatcatgtgaaacaatcggaggaaacaagggatagggaaccaacgttctaagaaatcatcggtactgtgatctataatgtgcaatgattggagtttgtagctgcttagtttacaaagtgaggcgagtaacatctcttc

SEQ ID NO: 24471 - DNA, 426 bp, Oryza sativa
  unsure (1)..(426): unsure at all n locations
agcttcgttattgttgcctgcacattatttgtttgataccacgaattataacaggaagcagctgtgtcataagcacgtgacagtcatgagactttatgtttgtgaacttcttatccttcgtgcttattattctctttacattcgaggagtatccggacggtaccttgatgctctctaggcattgaaacatactctccttctcttccttgcttagggtgtagctcgccggacttaagtaatggcttcctttctcgttcgggtccggatgaaggccctcgcgttgttccatatgcttgagatcattgcgtgcttcgagtgtatctttggacttgccatatacacctaagaagcccagcaggtttacgcanaggttcttagtgaggtgcatcacgtcgattgcgtggcgaacgtccaagacctcccaat

SEQ ID NO: 24472 - DNA, 447 bp, Oryza sativa
agctcggctgaggaggagaaccgttactatctgttgaaattagcagcgttgcagagacaactctcaaagggttgcttctcttgagtctctgttatttaaggtcctgttaattgacaacagcatgctcctcgcagttctcccttcaacacctaacactttgttatctagattcgattcagttggatgctgatattgccgaattggagtcttcattgaagaaaattgattcacaggttgttcttgaatgcttaaccctgtaatcctcattattttcttatctctatcacttctgagcttgctaaatattttttaagttgcttcacccaaatgaatgggaagtacaggattgttccctagatggaatgtacacgtcaactgtttgactcctgtcatataattgtgttactttcttgcttcactcacttccattgaatctcatttgtagct

SEQ ID NO: 24473 - DNA, 430 bp, Oryza sativa
  unsure (1)..(430): unsure at all n locations
agcttagntgctggtcaagccggattatcagatactctgcgtctcctcccgaagtgttgttggggatggaaccttgccacctaccgctgcactgcgggtttggtgtgctacctgcagtccggtcaccatttcgtcacatctccatagaccggttgctagcttggagtagctaggaactactacgctgcatcttcccgtcagtagaatttgctttcgttggataatggcgtaacgctctttgacggtgtatatccatttgcgaatagagaccaaactaaaaaaaaaaatattggcataatgctctgctcgggctggtgggtggtatggcagccactttcctatgcacagtgtgcatgtagccgtgagagtatacctaatgatgattgctttatgcttggtgaatataccaacttaatacctactggaaatg

SEQ ID NO: 24474 - DNA, 282 bp, Oryza sativa
agcttacaaaagaggaaatgaaagctgctatagccatacgcgaactcttccggactcctgattcctattctatttctattccaccagctagatactactaaactaaacttgagaggaatgagagagctcttgcttaaggtgtgtgagtgaagtgagaatggcaacttcttttttatagccccccaatgatggttgtggcggttggagtggtcggaaatgcccttcaactgtcattgggggctaatccacaccgtccaggtgaagccctggatcggatggcgc

SEQ ID NO: 24475 - DNA, 234 bp, Oryza sativa
  unsure (1)..(234): unsure at all n locations
gatntagaatttaggatatgggtggttngaaataaaattttttttntaaaatagttaaattaangatattaatatatanaatgtaantataagtaataaaatagaataaattattaaaaanttatgatgatatattaanaaaagatnttagaatatataaaagtagtaattaagtaaaattttgatttaaagaagnttggangggtatgaaagnttaaagaaaattannatatt

SEQ ID NO: 24476 - DNA, 359 bp, Oryza sativa
gctttgtagtgcttgtcaagtcggcaatcatgtttctactaagagtatcatgtccacatctagaccattggagctcgtgcatatggatttggttggcccaacaacctataagagcattggtggtaataatcattgtcttgtgattggtgatgattattctcgctatacttgggggatctttttgtatgataagtctattgttgccgagcttttcaaaaagtttgcaaaaagggcccaaaatgaatttagttgcactcttgtgaaaattagaagtgacaatggttcccgagttaagaataccaatatcgaggactattgtgatgatcttggcattaaacacgaactttccgctacctact

SEQ ID NO: 24477 - DNA, 430 bp, Oryza sativa
acctttctggcacatagctgcttctgcttctctgttcccgttggtattacaggacttcgatggtatattacccttttctacagggaccttacatgaaaaaatatgtgaatgggtgcagcagtagtttaccttccttagatgtgaatcatgttggtggatgggcctgcctgtcggttgattatatgccaaatcctgttggcttttcattactggcttctccccttattttgcctggataaccttgagcaatgtatggggtccatgtgttgttctatacttctatataatacaaatagctcccaggagttgaactgaaatgctgaatagttgtaggatgagacacactgtgatctaattgtggctcgtgcaattgagcctagctggctgaattttggaattggtattcctgttgctgttcacaacttggact

SEQ ID NO: 24478 - DNA, 426 bp, Oryza sativa
  unsure (1)..(426): unsure at all n locations
agcttntcactcgagaagctcatcttggttaatgtcagtataaactcacgtaccgtgagagggcctcatgnnccatggaanngtcctgcaaaccaagacnnatttgtttgcannagccaattgcattctgacgttcgcttgaacacacaattannattccagaggggcgtttactaaagaagccctttcaagaaaaccagcactacncnngctttccaggaatgctcattgagggaattctggaagttccaaagaatttgaagaatctcttcacttcagcagttgatcaaccatttttagcacgttcaagcaatttggcgctgatgcaaaattcagggacggtgaccataaaggctagctttaaggaagacattgtcaggttccgcttcccatgttccggtagcgttactgcattgaaagatgaag

SEQ ID NO: 24479 - DNA, 463 bp, Oryza sativa
  unsure (1)..(463): unsure at all n locations
agcttaaacttcattaaactaaaatagttctctatgattacatttcagatcagaaaatataaatcaggacaggagttatatattacctgtttttcactccctcgatgaaatctggaatattctccacacttccaatttcatttaacattttaagtaccgcctggcatgttagaaaatggcattagtgcttctgcatcataataattgagtaatgccttaattacttctaaaaataacagatgtagagtcaaggttaaagcgaaacaaaggttttagaactaaattttcaattatataaaaaaatccaagaaaataaaaacctctctatcaaggaggtgacttatttacattgttaacagaacacaattatagagtacatagactgtatgtctttgttacttgtgagctngatccttagattctgatgatgaatgtgtatataaactattagcagtccaatgca

SEQ ID NO: 24480 - DNA, 421 bp, Oryza sativa
  unsure (1)..(421): unsure at all n locations
agcttagttataaggtaattatgcttcttctcgtttgtgtggntaacctgcaagcgaaacaaatccttaaagaacatgcaacagcaaccccaagaggaaatttacagacatggataattaggatttctggtcagcttccctgccactagaaatatgcatgaaactgaatcataactggagaagatataggcatatttatttgaatatactaatgtggccagaaaagaataaggaaccatttataattagtgatccatccaatgcaatgaaaatcaacgagtcgcatcaacataaaaatgctacgcaaaaaggaggaaatataatcaatactcaagcaaaacacacaaccacactaatagtaaattagtgatccacttgcacttgctttttaagaagcaatgctcgacaattgtggaaaaaa

SEQ ID NO: 24481 - DNA, 345 bp, Oryza sativa
agcatgcaagcctatctatcggctataaacaatattatactctttaagatacacaactgattataccacctagataaactgtgctgatgcatgggacaaattaataatcctacactaaaccagctggtggcgctctgctttgtgtatgatacagctatatgagatatatgccattcttaaccaatcaatggagcatgatcaagtcaccctttctgcctgaaaaaagaacaaaagctctcatactcttatgggacatatgcagctatagtacatatcatatcaagagcatgaatgtatatccgcattcacgtatgcgcaagaaggcacaatttatatcttcattgc

SEQ ID NO: 24482 - DNA, 376 bp, Oryza sativa
atgccaaaacaggcaaatgccaatttcgtgcaatgtgtaagttcaatcattccaaggatattgaaataccttcaagtcaaaatgaacccgaaagtgcagtgactgttgaaggagaaacggatattggttcagcagctgattcagtttcagcgaagatgcaaactccagttgctgctgcgcaagagtttaactctaaagggcttgctatgaaaccagtatgtccttatcaagtgcctgataactttgtttcattcgtaaaccattttgagaagacctgtgaattatgtaatgcaagataacgatgttgaggatgctctatgcttagatttcgacatctgtattttgtactcaaattctggacatggtgttggtacat

SEQ ID NO: 24483 - DNA, 433 bp, Oryza sativa
  unsure (1)..(433): unsure at all n locations
agctattatattatgtgtcctttccatcttaaacggtaatgctgagaataaactacgatgaaaaaaatcataattaactttaaaattgagttttaaaatataaattttggttatgtgcgctccataagctaaaaaagaaacgatagagagcaaattagaaagaagatatggctccaatatctactaatagtaatttttcgagaacttttcataagtttttttattaagtggtgatgtatatctcactactaacaataattntcataggcgggtggcacaaccgccaacaagctaaggtcagtgaaaatcaacaatctttgctggcaggtgcggtgcgctgtgaaaatngattnttcgcaggctgacccttaagaggaacaactgcgaanattggatttttgatgtggcactactaagaagaaaaaaatgtttt

SEQ ID NO: 24484 - DNA, 392 bp, Oryza sativa
  unsure (1)..(392): unsure at all n locations
agcttcagcctagcttgtttaatattattataaaatcgaatgtgtatattttttccaggtcaacagctgagtgtcaaagagttggagctggtgtttttaccagatgagaaattcccatgacatatcagaatatttgataggaggaattttataactccaatagctggattttgggtgaggggtatntaaacccctccacacccacaagctaaagttgttggttctattgtaaacattgttcatttgggttgagatatttgagcttcactttgagatttaccttntatcctctccctatgaggtctttgtgaataaaccttgtgtgagtggagntcgtttggatattgctcatgcctgtgacttctttcttgatccttgagcactagctttta

SEQ ID NO: 24485 - DNA, 455 bp, Oryza sativa
  unsure (1)..(455): unsure at all n locations
agcttaagctgtagattgacaggcagtggcgaaaatggatgaatggataattntacagtcttctccgtattaacatctcgtagtgtacatatgattctgattaaatcctttgtcactacaactctctgttttgtcgatcaatcctttcatagctagctagctactgtgtagttcctccactaatcaaaacatcacagttgtatacatcggactaatgaacctgcatgcctttattatttcacatggataaataaatctcaatcaacagtaaataatcaaatatcaatcaggttccttataagcacacgtttcttctcactagctagctactgcagcaacatgcaagcatgttctgtacgaaccactagctttaattgagattatcacaccatgtgtaccctgcgtggttaantgcagaaggattagtagcttggccatggaagcatgtgtcattt

SEQ ID NO: 24486 - DNA, 394 bp, Oryza sativa
tttggtcaatttctgtctgttactactaaatatttattgttacacttccatgttttatagaactatgatcgagaacatgataaaggagggaaagattgttccatctgaggtaactataaaactcttgcaggaagccatgattaaaagtggaaatgataagctccttattgatggatttccaaggaacgaagagaatcgtgctgcatttgagaacgttgtaagcacatcttctccttgtacttcaaaattttagatcacttcactcttgggtagcaaacagtcatgactccttagtagaacgttcttcaggggccactcgcagcctgtgtacacacacacacaatgacaatgcactaatagcattaatgtgtcaaatgtttcagacaaaaataac

SEQ ID NO: 24487 - DNA, 386 bp, Oryza sativa
  unsure (1)..(386): unsure at all n locations
agcttagcagntcggggatgctcnntctctcttcntgattntcctcttcnttttacatggctcataattaacatttgctctcttcgcctgctcctatcttgcacctagattcttgcggctcactgttcgacagagcgaaccgtgcgggcccgtcttgacggatttaagaaccgtcttcgggccaaggatgacgaaatacgccgcaagaacttggagatggaagccctcgccaacaccctgaaagaggcaaaagccgaaaacaagcagctccaatccgagttggagaaaggaaaagaggcgagggccgaggttgatcgcctcaacgccgagcgggagaaagaaaaggctcattccgccatgcctgaccgatattataacctcactga

SEQ ID NO: 24488 - DNA, 375 bp, Oryza sativa
  unsure (1)..(375): unsure at all n locations
agcttatgccattntcaatccaatcgtggattttatgcctgtcatacctgtactcttttttctattagcctttgtttggcaagctgctgtaagttttcgatgaaatctttactactctgtctgccaaattgaatcatgtattcattctaaaaaaattcgaaaaatggataagagccgagaagtcttatattatgaaccttcgattctaaaattcaaattcttctacattgaatgtatagctgcagcaataaatttggatcagcctttctactccctgcatctacgttgagcaggtatctttaggtaaccgcacaatacctaacctaatttattgataagagtgcttattataaatcaattcttggcaattttttc

SEQ ID NO: 24489 - DNA, 441 bp, Oryza sativa
  unsure (1)..(441): unsure at all n locations
agcttgcaagaaagaaatattagtccatggtactttaccgatttggacttctgcttgactgccactagggccatatggtttattttcttgctatagattaataccaacaagtatntaatatagtgcacattctatgtctatttggattgatgtcaattcttaccctatcaattatttagtagtcttaaacagtactccactccacttgctagctacttgggctgtgtttagattcaaagtttggatccaaacttcagtacttttccatcacatcaacctgtcataaacacataacttttcagtcacatcatcttcaatttcaaccaaaatctaaactttgcgctgaactaaacacagccttggaatgaagccaaatcttaccaattcaataaagttaagagagtactacccctactaaaagttgatanggtaaaacttacc

SEQ ID NO: 24490 - DNA, 330 bp, Oryza sativa
  unsure (1)..(330): unsure at all n locations
agcttcaactctagaagttggtttttctctagatggagaaagtagcacagtaagaaggctaagaatcacaagtgtacctatcacaccttttgttttgtagggagaagagtaaccaagcccaaggaattaataaatacttcatccgttccaaaatatagttatttctagcataatagcatatcctaaaatgaagctattttttcacatatcctctcctctcaactaatcacaatcactctatttagggggtgtttagatggggctaaaacttttagcccatgtcacatcggatgtttggacgctaantnanagttttgacatctactaata

SEQ ID NO: 24491 - DNA, 249 bp, Oryza sativa
agcttggcatatatctgaccgggaccaacgtgccatttccaggagctaacacgccggttccggctagggacgagtgcttggaggctctcatcctgacgggatggggcgaggcgtgcgtcaaaccgcctgtcgccacctaacccacgatctgatcggtctgtgaccagtcacagaccggataaacgagcgcgctgcaccgcgttacatgcggcgtgacgcgctcgtctaaaccgcaataaatgcggttag

SEQ ID NO: 24492 - DNA, 465 bp, Oryza sativa
  unsure (1)..(465): unsure at all n locations
agcttgagtgcttgcctccttattagtctatgatgcaacggtacgagcctatagaacagatcctgttcaagtaaggtcgtgcttagcggtcaaaggttatgcattttaagctagattcatttcttgaagacttccgaggtggtactatgtttggcaaatgacgccctcccatgttttgttttgtattgtctcaaactctangtctgtgcacatggttgtcatgtactgggctgctgggcctttcttcctaaaatgaacccaggccttcggctacaccatggagccgtagaaagtggaaacatggntagtggtaaaaacaggtacagaaaatcttaaccaacccaaataaactagttatttgccatgctaacgctacggcgatatctagcagatgttctacttataattattctactatttcgaggtccacatttatttaaatattattatcactaaccggagtag

SEQ ID NO: 24493 - DNA, 448 bp, Oryza sativa
  unsure (1)..(448): unsure at all n locations
ccaatatgaagattccttttctctcttatacatcttgtgttcttgccaatatagcatgaacttttcaatcgttcccatcttttaacatctcttcttattcgctgacaatagtggtttctcgtagaatattttctcaaagagagttgcatcatacccttttcattgatctctaattaatgactacatatgttgacagtaaaaatattgcagctataactggtgtgaattaaactcacaaaattcagagtatagtgtcaccgagttcccttattccatgacttatcatatttcttccatgtnctactacatatggtgcgatgccaacgaaatctaataacaaacacatggagttaatgtgaagcaagtgaagtcattaatttttcttgcaggaaatagtatagcacacacacatcctacctgagtagtatgttttgctatttatactctc

SEQ ID NO: 24494 - DNA, 308 bp, Oryza sativa
ctggcccccctgttgatcaagacacgcttcaacttatatttgtataccgtcggggagactaagaaggtcaacttcccttcacaggcgaacaccgtcaggtggtcactctggtcggaagtgaacttcacctctgaccaccgcttccgtcatgccggctcgtgggttgggacggcagccaaaagctcacccctcaaggccttgaaactaccacgagaggtgtgagtgcaagcccctccgtcgagcgtggcgacggtcccctgaggttgctggaactctaattcctcgctatcgcaagcgtcatcgtcatc

SEQ ID NO: 24495 - DNA, 307 bp, Oryza sativa
caccatatgccgacgagaggggtcccagaccaacaacaggttaggtcccagaccatactgtgccaagaagcccatgggtcctccccgacaccaccccggcgaatacacatgtctctcggcatcaaggctcccctgataagctaattactcagccaggggtgtcccattccacccatgtggtcgcacttgtcttatgttcggatgaaagtccaaggaaacggcccttaagtgcaagagcgggaaaccgtacacccggtacgttctctggtccgcggttttggaaattcatttagttcgcaagcaccga

SEQ ID NO: 24496 - DNA, 451 bp, Oryza sativa
  unsure (1)..(451): unsure at all n locations
agctntcagaggtcagcatctatcgatttgctgtctttcatgtctggaattgctcagttgttcatcactgacatgagcttcgaattgaaaattttctacctctggttcagattctccggccaggaaagctgctgcaccggcggcggcggctcgtcttcgagttcgccgacgtatggcgggaggacgcgttgcacgagagcgacacggtcaagtacaggttcgtgtgtgtttcttgcagaatttgcattgagctgagtttgagagagagaacaaatggcggattgatatgaagctgatgctgatgtgacgcanggtgttcgccggcacgtggaacgtcgccggcgtggcgccgccggacgacctggacctcggtgactggctggacgccaggccgactcctaaacatctacgtcttgggtaacctgacggttcttgacgcatcacatggaat

SEQ ID NO: 24497 - DNA, 464 bp, Oryza sativa
  unsure (1)..(464): unsure at all n locations
tctaagtcacctgcagctgcagcttggctggaatgaaaacattatgttatttgccatttctttagtaataaggactggataaaattacaatgtgaattatctaaaaaaaaattacaatgtgatgttttgaactcacatttgagagaccaccagtgaacagtgcaaaggagaagtcctgcctctgattgatcaactgaaacttgagagtgccttttcctgtcttgccataatctgaagaataatttgcaagctgatactgaaaccagacatacaaaaaaaatcagtttaggagttcatttgcagaacttttacaaacatgatgctattattcctacaaacctttattggtgcagagcatataacaggtcctgagtctgatccagaaggaccggggcatgtggacgcgctgcangaaagtgcaagattcatcagatcatggtcatttgtgatgaatctacaactca

SEQ ID NO: 24498 - DNA, 249 bp, Oryza sativa
aactcagctacatagcttcatcatgtgggagataacggacgttatattggactgagccgatcacatcagatgatacgagcggacaactgagagacactttaacatgaactcagaacatcagcatgcgaagatcccgcatcgaacttgttgagacatgttcgcagatcatatcacacgaaggatgggtggattagccaaaggaggcgatacagactaacagcgcggagttcatgccgtaatggcaatcat

SEQ ID NO: 24499 - DNA, 287 bp, Oryza sativa
  unsure (1)..(287): unsure at all n locations
tgacttcttgaccctgncacctccgaaggtgtccttatcggcttgtgacacttatctgaaggacaagatttgaccgctccatgatcctcctcgggcttggatgttgtcgaccgttcattcttcacttttgcgggaggatccttccgacatggagtcgtccggggttgtagccacagcgttctcgcttccggtcattgatggaccactcgagatcggctccgcggtattaaccggtgagactactctgtctacgggggaaaccngcataccggatatatagggtattg

SEQ ID NO: 24500 - DNA, 470 bp, Oryza sativa
tgtatattgtgaataaagaaatttccaaagtattgggcatacgtcatgcgcacactgctttaacagatgtgcttaagtccctagaagacacatggtttcaccacacctggaaatatatggcatatgtggtgtaaaatccgagtaaataaactcataaaggatttaccaaccgcctagaaaatgaccacaatatataatcagcctaagccataatattggtcaataaaaatgcacacttacgtggcgaaaagcaatgatattgtatctaatcaattgcttaaaaacccaaacagcaccttgacttatatataaaaaagtcagcgggacagctatataaagctttactgtttgacaccttttaagatgcattgtaccaactcctaacaagttaaagtactgccgtataaaaggatattaaggtattgggcacttgatcacgcgcactttggcctaagcaaaaagtgcctaag

SEQ ID NO: 24501 - DNA, 376 bp, Oryza sativa
  unsure (1)..(376): unsure at all n locations
agcttctncatggtaagctgaagctctgcttgtctttttattgatgggccttaattcccgcccatccatgtgggtgggctgagatattgatccaaatcatggcctgcttacttggatgggctccgatcgaggcccatatgaacaatgctacttatgcccattttggtctgtctctaaatctctaattggctcacctgcttcttaatttagaccattcgctattatgcctactgatgtagaataataaactcaaacatctttttcagcattaaaaagaaaattatagtaatttataagagcacttgagatatgtgctacttttatgaaagcattttctttggatgttcgatntaagaatggggaactagtcattatg

SEQ ID NO: 24502 - DNA, 464 bp, Oryza sativa
  unsure (1)..(464): unsure at all n locations
tcccttttgctgctcgattgatggggttggatgaatactgtattgaatgaagcaaacaagagtctttaatattgctggattagcaggctccttttgcctaaactagacacatcgatatttcatgtgcattccttttttctaaaatgtgtacacatatcgatctatgtgcaatggacttaattagcaaactttgaaatcaagcgctgaggtagagtatgaaaggggtgcccaaagacctagtcaagaaatctttttagctatatctcatcgantttcaccatgtgtgtatcctctaaatacaaacttagacgtctgtattagcttaaacttaatttaaattagagtgaaataagcgaaagctaccctaatatatnttgttctagctccgtccctgtttgaaatattgaagatctctcacgtcattgcagattgtgtatcactgtatcattcaatccgaatatgca

SEQ ID NO: 24503 - DNA, 479 bp, Oryza sativa
  unsure (1)..(479): unsure at all n locations
tcagagtcacctgaggcatgcaagcttatctttatgtcaccagataaccttgttaacctgttatctaagaatttaatatgccaatgattcttatatgtttccattgaaacatacatatataaagcaaaattatatgtgtgtgtgagctaattgggtcatatactangaatggaaaggaaacacattttgacgtggttttatagtttctagtacataataactccaaaaccctagtgtgattaaataggtatgtgcggctatagttggtacatacagggacctgaagttacatccactgtctaaaacaaatttaggaagggaagcttgaaaatattgtttcttcagcaaaagcaacataagaactatgcaaaaaatatctcaacatgaagtaactcattgtatattgcatcactatattcattttttaaaatttataaataagtgttaccaaaataagagggtctagtcaagaattttta

SEQ ID NO: 24504 - DNA, 459 bp, Oryza sativa
  unsure (1)..(459): unsure at all n locations
cttgcanagttcggtctggtccagttggacagaagggcattctctatctgaacacctatgatggacgcaccatccgctacccggaccctttgattaaggctaacgacacaatcaagattgatcttgagaccaacaagattgttgacttcatcaagtttgatgtgggcaatgtcgttatggtcacaggagggaggaacactggtcgtgttggagtaattaagaacagggagaagcacaagggcagttttgagaccatccatgtggaggacgcattgggccatgccttcgccacccgtctgggcaatgtgttcaccatcggcaagggcaacaagccatgggtgtctctccctaagggcaagggtatcaagctcagcatcatcgaggaacagaggaagcgagatgctgctgctcangctgctgcanatgcttaaatacatttctatcttcaaaatttgagtt

SEQ ID NO: 24505 - DNA, 465 bp, Oryza sativa
  unsure (1)..(465): unsure at all n locations
agctnttctgggcattaggcctcattncttcttgtttcgccgaatcttcttcctcaagccctagccaaacaagagcaaaccatgcgttgttgggggcactggtttccaactcaggggaacactaagccaaaaatacttctccatgcccttcaagacctcaaacaaaggctggcacgccaactggttctacgttcaaaatcctgaacctgcccttcccgagtactcttgtctccctccggtctaccaagacacatggaattcattgcctataggagatgaggctgctcaagcagtggaactgatggagcgcatgataaagctgaaggagcagggtttgcagggagaacaaatcactcggcacttcattaaaagccggttagctccaatcaaagagagatcccgcacagcttttgaagttgacggcaaacatgatccaaatcgtgcagatccagactctcttgactt

SEQ ID NO: 24506 - DNA, 433 bp, Oryza sativa
  unsure (1)..(433): unsure at all n locations
tctttatagctattttgctatatcattcatcatattgtactatatttntggtatatcacccggatcatgttatttggaggattcacaccgcatatgctatatattgatatcaagtcacttggttgattacgattatcaaaaccactcggttggttggattatttattccttgactatatgcttggtttgttcaattaaccacattgtcgggggctacacctattangngcatctagtctgtgcacctgactttattttccagccctccacagtcttctgacttggaaaaagtactcgggagatcatggcgaagatgattgaagcactcggctttgagtaatctagttcgagagaagattatttttccgactgtgaaggtctcaggggctactgtggaattatgggtacccctaccccacggcatgttatcgac

SEQ ID NO: 24507 - DNA, 458 bp, Oryza sativa
agctctccatgagagaatttgtttgcccaatacggaattcatatgaagtcgtggcgggcatcacaagttggtactgtcttgcagtccgaatccagcccgtgtatttcttaacaacattactagaaatataattcccagcaatggcgcataaattcttctggtatattatggttacagagtttatccgcaagagcacagatatagcattgtagcatttcagccgagagtattccaagggtatcgtatatatttaatcccgtgggaatattataatagatagaaccacactaataatttatatgttagttgtaataaccaaagtctaggcaggggttaatataatccagagggtagagtgacactaagcagaaggattaatactctcatacatttttatctaagctaagtggaaagaaagtagaaagaacctattcctatacttctagtatacatacata

SEQ ID NO: 24508 - DNA, 436 bp, Oryza sativa
  unsure (1)..(436): unsure at all n locations
agcttgattacaataatctctaaatctctatataacagcattaaacctcggatgatcatatcttggtcatacgaactctgaatcgacccgttcaagtctcctaatgtttgttataacctaaagaaccctgtgctttctttttatgtgttgctattgcttctttataggcttgtagctttgcttgtgtgcttcgcgtagcttctgtcgttccggaggttcccgaagcgtggttcgcggtcgtcgccgaaggttcggagggccngtctctctgacaaggcangtcacatcatncttgagcatattgaatcccagtttacaaaattattttttaattaaattatgcatatcgctttattaaattcccgcgttatactgtttattagcctacctattacctttgtatgaaacttatatattgtatgtataatacctgtca

SEQ ID NO: 24509 - DNA, 415 bp, Oryza sativa
  unsure (1)..(415): unsure at all n locations
gctgactttattatatagacatggtgttgtttgggctttaagcaattgattggatacaatatcatagctttattccacgtaagtgtgcatttntattgaccaatattatggcttaggctgattatatattgtggtcattttccaagcggttggtaaatcctttatgagtttatttactcagattatatacctcatatgccatatatttccaggtgtggtggaaccatgtgtcttctatggacttaagcacatctgttaaagcagtgtgcgcatggcgtatgcccaatactatggaaatatctttattcacaacatacaagcctctttatagctattatgctatgtgaatttcaatgatgtaccaactctacgttacactatcatattttaaaaagcagcgggtatcacttggatc

SEQ ID NO: 24510 - DNA, 453 bp, Oryza sativa
  unsure (1)..(453): unsure at all n locations
ncaagctttaatgaagtctatttttcactgtgaacttaaatttcatcataagctttcaaaaattaggtagtactagcactccaagtaaataaatttatccaaatttgaaagttaggagaataaaataaggtgagttgtatcatttgggatagaaggcggtggtagtctgcaggatcgtggagatggcgagcagagtatacacgacgagcgcaaggattttgacaggggtgtccatgtacttcttcgcttccgcccaatctcggtataattggtactggctacataccctgagctgatcgagcaccttgccgatgggtgtgtcctccttgctccgctgattccaccggcatangttcttgaagtaattgatgatctgcggtaattaacaacgacatcagatagatatgtatgtcctgtctaaacggcatgnttttgtacganggaatgagtacg

SEQ ID NO: 24511 - DNA, 456 bp, Oryza sativa
  unsure (1)..(456): unsure at all n locations
tgtccggcatcctcaagtgtaaaaaaccaatgcttgaagtttaaaatacacattttctcatttcagtttctatattatcagctctcgctctccattgtgtaaattcctttttatttaccgccttccagtcataaattaaataatggtgttttgcataccaaagtcttagaagtataaattttgatcattaattaattttatatcgtaatatatttgtgtaaagtctgataaaactgtaatattattatgacagtgcttttcaaaaatgttggtcgagccatatatattatattttttcactaatgtatcagacataaacacttaaatatattgataattaaaaatttgaaaagttggctgaattccacatatatatgtacaaattatatttgtaagtatttnntattgaatatctataataactttcccaaatgcaacacctgatgtataaatacc

SEQ ID NO: 24512 - DNA, 381 bp, Oryza sativa
gcagctattcaaagtgctttacggattatctcacagggtattggtccaaataaaaagttcttcttggatgctttggaggcatttggcaacactgacaagaaaccccggacggtacccagcaaaaactctgcaagcaagccagatgtggagtccgcaaacaattctggaactgacactttaagcaagccaaatttaagcgtttggcaagttgctgcgtgatggggcggtcagttagttcttacaagctcatactctgcgttgcctgacagcacggagaatgcaattaatttatctctaaaactgtctatagcagtatctttggagataccagcgattgattggctcataacgcacgtttctttatgtgaatgctgagatctt

SEQ ID NO: 24513 - DNA, 434 bp, Oryza sativa
tagaatttctgggccgccgctatcgggagtgatagtgttctcttattgggaagaagaaaggggaattaatgataagctaagagatggcaaaacatcgtcgcataaaaagatcgagaccgcttatcgcgtccctcctaagcatgcattctttacttcctctcttccttttgcctttttctttgtgtgattatgcaaagtgccttttgtcactaataaatcacctcaaattgccgcctcgtttccttaacagccataacatatctataatgtttcagatcaaataaagtatggaagagcaccaaattggacttgatgtgttcaaggttaagacagactcaatattttatacagttcataattacctacactatgagattactccatctattataagttattatatcatttgtagcgattcattctggtacaatact

SEQ ID NO: 24514 - DNA, 399 bp, Oryza sativa
  unsure (1)..(399): unsure at all n locations
agctngatagcgcgcacattatcacacattatactgtatgncnggcctacaagcagttagatacaacaaagatccaatcatacttctatattccttttgatcaacagcttcaccatcttcatcaggatccaacacaactgtagaaccaattggtgttgaaatttgcttgcaattctccatcttgaaccgccgcaaaagatcctttgtatactctcgttgatgcacaaaggtaccttgaggtgtttgcttaatttgcaatcccaaaaagtacgataactcacccatcatgctcatctcaaattccctgcgcatagtctcagcaaaatctacaaccaaagcgtgagtcgaacaaccaaagataatatcattcacataaatctgaacgagaaagtgattatc

SEQ ID NO: 24515 - DNA, 464 bp, Oryza sativa
  unsure (1)..(464): unsure at all n locations
tcgtagaacgatgagaatttngattgagtacatgatatgttctttttatgaaactaatgagacttaataatttgtgcagaaaagtttaacataaattttgaaaataaaacaaatgccataaatttaaatttttatttgaaaatttaatatgataatagattntttaattgggagtgttcatatttcataaataatgtatcctgtataaaattcataactaanaaagtctcatgcgataaatttttgcagtttcaataatgtaattcataaatatctatgttcatctaataaaatggtcatttttataaaaattagatggtcaactaacgggaggggcatggaagggatcaaaattaaattttggggtatacaaggaagtaagcaaaattcaaggtcatagaaaggattaactaatatttcagtggtaacaatgganttttcatgaatttcacctatatatataa

SEQ ID NO: 24516 - DNA, 368 bp, Oryza sativa
atggggcgctgactaaagtataccaactatgaggcgcgccacaatgaactaaaggtcttcttggaggcatatgctaaggcctaaggggcctaatgggactcatggtcaaagaactcagcgtgacaatagcatccgaggatggcaacaacccaacccacaagatgccatttgcttcacttgtgtatccccttgcgctgttgtaaaaccaacaatcaattgtcgatgaaaccacaaagcatggtaaccgccaagtatgacgatatcgagcctgttggaaagaagaagagagaggatagagtcttctatgtgaaggaagaaataagggtggcaattccacatgggtcctttgccattttcacatgggtcat

SEQ ID NO: 24517 - DNA, 399 bp, Oryza sativa
taagctatactgggactctagctcagggatctgtgatcttcttcttctaactacctttcagactcctcatcttgatcatctcttcttttcttctctgaagcatatgccattattatgtggttttgcagtggtgctactactaccaccacagtaccactacaatgtgagggtgttcaagagggtttatgatgtgtgttaagaggcgaggaattaatacaatcatctgtgctatcaacacccatggtcctcacctgagctcacatggacgtgtgagactctattgagagaattggcccaacgtgtacttgctagtgtaccacctggatcaagcttaactggcttcaattcaacctacctcatacttcttctcctgcctcttgaaatttttgggaggagatg

SEQ ID NO: 24518 - DNA, 374 bp, Oryza sativa
  unsure (1)..(374): unsure at all n locations
gctttgcatgctctctttggagtaagattatacctttactaccatggctgagaaggcgttaatgggtgagggcacataaaaagaatgattttggtgatgaaaggtttagaattttgaattgattttttttaagaataaaggttttatgattttgaaatgaaagttgtagatttctaaattgatttttttgtgaatttgaagggaaagaaccatatctttcaattggaggttttatgattttgagatggaagtnttatacatgtaatgaaaattatgtgattttagatgaaagatttattttaataggtttttagttgaaagtttaacgggttgagatgaaagttctttttatattattaaaatgtgagtttgag

SEQ ID NO: 24519 - DNA, 475 bp, Oryza sativa
  unsure (1)..(475): unsure at all n locations
ntaatagatgatgtaggatggttctataggacatttaatgggccttaaaatggtttacaattctatatatcctatagattagccgttgatattttttgtttactgctaggatcaatgctcttgagtttttctattgtttaaattcttatagaagctctttatcattattgtgaacatgtatgtttttgcgttagctttaaattaaataatgtttgtattcaactacgtatatttataaagtgatataagataatataatctacaatataatgtcactttatctttattatatgatgttacgcacactcataatagggacggatgcttcgctaccatttttaaggaacatcgatcactcatagttaggtttattttatttcttatggcgtcgtagatataatntagttatatgtatatgttgacttctatacaataatataatcaccattatcatgtntnntagaatttatgatgg

SEQ ID NO: 24520 - DNA, 357 bp, Oryza sativa
agcttatctctgctgattgaactttgcattcttgatctatcacccatggaaacttgagaattgcacaccagcgcggaataaaatcccttcaatcccttccttacagggattaaccgaacaagccctgaggccttgttcgtttaatccccaagagagagggaatggaggggattgaaggggaataattacacaccaggtgtggaacaaatccgctccaaatctctcccaatcccctcgtggaagggattaaccgtatatccaacctataaggaagggagccaaggtcgactttttccaaggcaaagtatgcagaaacgagacaacttcgttccagacttccaggcccataaaacaaaa

SEQ ID NO: 24521 - DNA, 446 bp, Oryza sativa
  unsure (1)..(446): unsure at all n locations
tagatgaatgcgaagaagctattttattgaggttnttacgtgggctaaacaaagaaattcacgacatgcttgattgtcaaagatatacatctctttctcatttgttacaacttgcttgcaatgctgaaagtaaaatataggagagagacatgaaagagccgccaatcccattgttcacactcaaagtcgaggcacctccatcatctgaagaggacatcaaaggtaaactaaatggtactgaaattaatcatggtgagtgcattgttaatgaagtaaatttgtccacttttcatactaaagtagagcaaccgttagtggaatcaaatgctggaattcctttgtcacaagttgatttactcgatgttccttgtgataaagaagagttgtgtgataatgcttcacttatatccatgccacaactagtgaatgaacatgctatatttagt

SEQ ID NO: 24522 - DNA, 396 bp, Oryza sativa
  unsure (1)..(396): unsure at all n locations
agcttcataacgnggctgatcatacttctcacgaagctgcttgataggaatgaagtccccagcagtgtcctcgccaaaaaacagaaattcaatataggggtgatcaaatctttccttgtaataaagggggacaggcggacagcattagttcaatttgaccaaaaatgaaaaccaccaagcaaatgaagaactcaaactcactttctctggtatttcagcctctgcaagattttcttctgcaactgaaattatacagacataacatgtctcaaaatggcacatcatagacataaaacagtaagtgaagatggattngatcatttgactactgaattagcctactatcttgccttcttctgccattttacacaaaacaagattgctcattaaaagtta

SEQ ID NO: 24523 - DNA, 355 bp, Oryza sativa
acacacacttatcgggttcagctttatgctggcggagcggaggttctcaaaagtttccgctagatctgaaagtaaagtttcttggttgcgcgttttcacaaccaagtcatcgacataagcctcaacattacgtcctatttggctacccaaagaaattcgagtagtacgttgaaaagtaagacctgcattctttaacccgaagggcattgatgtataacaataggttcctacggtggtaatgaacgcagttttttccttatccttcctaaccatgccaatctgatggtaaccagagtatgcatctagaaaacacaataggtcgcaccccgcagtggagtcgacgatctgatctatg

SEQ ID NO: 24524 - DNA, 462 bp, Oryza sativa
  unsure (1)..(462): unsure at all n locations
agcttgagatgacgagggtcctgatccgtcggataacgcacttcgttcgggtctatcaccccacagccgaagtcgtcaagtagtttgttgttggggaatatatctcttgaacccatcccatcgaaaaccttgaagcaccaaaatcccctacctggcacgccactgtcgatgtttgaggtcacgactagattatttgcatggtatggggatcattggtaccagggtatatacgagattgagttaaaagagatggagaaggattttatacaggttcggacccctttttataggtaatagcattacttctgttgggcgaagccggtgttcctctatactcatcanaatcacacaagtacaatatttgggataacgtatctaatcgtcgttgacttggtggcatagataaccaacacgtagtcgacgacaggatagtctgcctcctcgaatataaactcgtcgaca

SEQ ID NO: 24525 - DNA, 460 bp, Oryza sativa
  unsure (1)..(460): unsure at all n locations
tattgccacctagatctaagtttgtaaacgtggacaaggatcttaatgagggataacatcagtgaaagagtttatgcaaaaaaatctctctgagattcaaagcattggctaaagaaacatgaattggtccttcaaatttgttccctcctagtatcaaatttgtgagtctgggaagggtatagccaatgttagtgggtgttgtcccaacaaattggttggcaccaaagttaacataggtaagatttgaaattgtttaaagtccttgtggaacgacgcctaataagttgttataactcaggtatagtatttttttttctaatcaccatgttgcacgttntgcttggctatgtgtcttctttgcctttaatgtcctccctccccgcaatgcaaaagatattntggataattggctaaggggagcgccttggcccaccaaaatattgattttatttggagttag

SEQ ID NO: 24526 - DNA, 397 bp, Oryza sativa
  unsure (1)..(397): unsure at all n locations
agctttnttttggctgtgtcgagaaggatataggcttgtggttttatatactgccatggatcaaacgtgcggacatgtagatggccgaagcccgaagtggtggccatgtttgtcctggaaaatgtcttggttttgattaagattacgttttattatacattattgtaaaattgtgacaatattatacgtacaatgattgacctgtcgaaatgaaaagaaagacaatatgtaatgattggtcaccatgggcatttttaagagaagaaatcgcatgcttgtaatctgtttggcgattggtcagtctgacatagataacgaatgttcagaaggatgatatgcagatttgtcagagaacgtgctgcccgcgtgtgtcctcaagacttcaactgcaatatct

SEQ ID NO: 24527 - DNA, 466 bp, Oryza sativa
taggaccttaaaactaactttcagggcgtttttttcgggggaagggccttcttttatatttaaggggataccacatgcaccgccttacacaatccatcattgggtgggggcccacatgtcttgggtcaagccggtgtccttgccttcaaccagaaacaaggtggttgctcatcctcaggtgggcccaacgccgtcccccgcctgacacgggggacacgcccgtcattcgcccttaattcgttggcgactttggtggactccatacaggagcagcacgctcaccgacgtgccgatgggacaggtcttatctgcccccactccgcctgacaccgggcgggacgtgggtacgctgctatccgtcccgcctgctgtggccggcacagaccgatcagcccgatgaccacataatcggaggcgcctacgtcgccacccacataatgggcgggacggtggcgagctattaagg

SEQ ID NO: 24528 - DNA, 359 bp, Oryza sativa
tgatatattatgtgcaatctgaaaaatcacttccacagatcatttggaattatattatccaagcaagccctgtttctgattttccagatactccacaaaatagcagctattcctattgaaagcaggctcctattctttttagagaacttgcttaaccatccacccattacttcttttaaccccccaggtatagaacatgcaaaaacacaatgcatggtatgccacacaaaacgtgctaaactgcactaaaaaaaacaagtgatttatgctttcatggttgctgcagaactgacattttgcagtacccttcctccatcctctttttataagaatgtcttttgtcaaaatactatttttta

SEQ ID NO: 24529 - DNA, 375 bp, Oryza sativa
  unsure (1)..(375): unsure at all n locations
taatttatattgatacttatttataagtgatggcgaaaactgagtaaaaaggtactcaagtgaatattttaacacttatgtccaatgtatatgtcacatagtcagactcatccaacttattgcacattatatgaaaaaagactatggattgtatgaacaaaattttaaagttcgagaagttggatgtccggttcgaagtttagtgtgttagataaacttcaagggagtatttagactttctagaaaatattgttcagcttagatatcaaaccatcggatctaatctctaactgaatccatcgtaacactgatgagtttctcgattgtgtgcttgatgtgctcgtcggcgatttgcctgaacccacattntattaa

SEQ ID NO: 24530 - DNA, 403 bp, Oryza sativa
  unsure (1)..(403): unsure at all n locations
agcttaatgaggcaacaactgtatagattcttggacatttcaantgtacaattctcggtaaaatgcaggtaactgaaacgggatctgactccaatatttgatatcaaaccgaacagagttcatgccattgtcaacaaacaagccttccacgatcttggccaggggttcatcatcctccatgcatatgatctcaacaatcttaagatgctcacatgtaaacgatctttctgtaagctcatcaccaatgatatgttcatatggatgcggataatactgcatcagataaaaaagaacttgtaagttgtatcccgaaaagacgtactcgtgaggaaatggtttaaaataaataggatcagcatacatttgaagaaaatcatttacctttcgagttcagagtagcttt

SEQ ID NO: 24531 - DNA, 477 bp, Oryza sativa
acctatgaaactcaagcttaatgaatggctgtgctcattatccttctgaacgagcgtcttttgaagcaactcaacttctttggttatctcttctaagctctctctttcttttgataacactgcttccagagactcaaccttctccttttcctgaagtaacagtgattcaagttcatgacagcgagactgtgcagcattgagctcctttgccttgccttgaatctccaaccgagcagcttccaagttctggttgaaagatgaaagcaatagcctttgaccagagagttcttgaacttgtttctgcatctgcactgcttgatcttctatctgttttcgagaggaggagaaagcctcttttgaagcgattagttcagaccgtacagcatccagcagagacctcacacgtttgaagtcactgactggatccttgataccatccatatccttgcatgctagttgcgccacttcctataactc

SEQ ID NO: 24532 - DNA, 438 bp, Oryza sativa
  unsure (1)..(438): unsure at all n locations
agcttattcaaaagagactcttttcaatgttgatgtggcatggcagtttatctattaattaagaagagtgtgttagtttccttttatctttaggaaagtgtgtttagtgtccgataaggactctatgctttttcttttatctttaagaaagtttgtatcgtgtacccatgggtataaatatgtactcccaaggtccctgtgaactatttcatgatcagtacaactactctcggcgcatcgtcaccctctttttcgaggtttttacttatcaattggcgaaacttggcacctaacgcagggctgcatcggcttccgatatctggcgaaggggtaagttctacgtttcgatggccctaagcaattgtgtcngctacattgctgggtgtcaaggctacattgcttccatctcttggatcgctcttggtttggtgatatatt

SEQ ID NO: 24533 - DNA, 464 bp, Oryza sativa
  unsure (1)..(464): unsure at all n locations
ttcccagacttgatctatactgatgcacttgtcgattcctgtgatcctggtacaatggcttgcaaattgacagtagcagaaccaccttgatgtgttgcaactcttgttgttgcattgaccctaacaacttggagtgcctacaatatttcagaattaggtaaatgaataaatggtttattgtgctatgaatgtaaaattgactgacacttgactacacctttggttgctangaatttttgtctttgacatgcttgcagcactgatggtggcagatgcaactgatttcctcttcctgcttngagttgagctctgtggtgtgttcatagcactatatgttgatctgggtttagaacttgctgaggccttgaagtgtgactaccttcaccattatgcttatcacaagtagatctgttgtggcctacttacttgcatttcctacatctgatgttgttccaatcttgctt

SEQ ID NO: 24534 - DNA, 296 bp, Oryza sativa
agcttgcccgacagtacttttaacgtgttcttctctggaacgagcatgacgccgactcttctgatgttgtcgaaccttttctccacatcgtcaatcaagagtcacttgtcttgggctcgacaacgatgcccccgacgcatgcctcgacattgtcgccgagctggtctctaactgcaccctggaccgcgcgccggaaggcattccctgcggtcatcattccgaacggcttcttaacatatcaaaataccccgaacggcgtgaagaatgctgccttctcttcggtctcttttgccatg

SEQ ID NO: 24535 - DNA, 415 bp, Oryza sativa
tggcggcgatgggcggcttgatgacggttgacgagctctgtctcttcggcggaggcaatggcttcgacggtggccgatggcggtagcggtgggtgcgacggtggcatcatcaatgaaggtcggcgagccccacggcaacgacttctacgacggtggcaatgtccagtggtactgggaagcgggcagtgtgggcttcgatgacggtcggtgagcccgccagcaacggtgattggtgagcgttgctgggaagcgggaaccggtagtggatattacatagggctgagggcaattttgtcagtttgaaatttctctctcctccttttatcagaaatgataatatattgtctcagatgagggcaagttacactaattttggggtgttcatgagtagcgacgcgattgtacagcgtctcct

SEQ ID NO: 24536 - DNA, 424 bp, Oryza sativa
  unsure (1)..(424): unsure at all n locations
agcttgctcggttagctctttattatctttttcgctgcatatgtgatcttgtgtattattggaagacgtggatccggatgtcaacaattatcttgtgtgtaccctggctggtgctggacagggattcaatgcacattccgcttagacaatctggtttgagaatttctgggcgtgacaaaattggatcagagccgaccttgaccgcttgacaagccaactggaaaccctaagagccctctgaacccctttctcatatgcatatgccttcttgctcctggaagtggttgggaaaacttggaggttgcctcttaggttgcgggaaaaatcttggtcgntcattcagatccgactgtttttttaaagaacaattcctcacgctagggctataaaaaatattattggagttattcacagacaacggaat

SEQ ID NO: 24537 - DNA, 351 bp, Oryza sativa
ctctatagtctgtcgtaagaatatctggggctaatctctatgtcatacacctataaatattgcgcaaaggagagacaccatgcattaattattgggcagtccacaggtgatgtaacatattgcaccacgtgtgtagagatcacactctctccaaaaggcagagacaatatgattttcctttttctttacgacaagacagatgctatgtgaagatcaaacaatggtggggctacatattagatggtgtgtgcgcgacggcaccaaactgctgaacactttactgcatacatggcaggcagcctcaattatgcggctcctgatgctcgtgcacatgacgtaaaccaattaggg

SEQ ID NO: 24538 - DNA, 432 bp, Oryza sativa
  unsure (1)..(432): unsure at all n locations
tacactcnactgcctgcaatgagttaatggaaattctttctttactagcatgattgcacaagaggaattcaaatactgagtattacaaaactaaggctcctttcattcttgccatgccataagttttcacaagcatgcacattgttcaacttctggacgaaaatagctcacatcatcttgtcttggagaaataacagcagaaacgttgatgaaaatatggaattagtaaaaactccataaatctaactaaataaaagtagttagctagttaaataatggtttcagaggagagagagaaagaggattactaataacaaccctacttcctccaccccacaatgttacgtagcatttttttaggtgggcaccggtattaatgaagtatgtagaaatgattgaatgaagtttgtgaatggttgataagataaagta

SEQ ID NO: 24539 - DNA, 458 bp, Oryza sativa
  unsure (1)..(458): unsure at all n locations
tggcatgccattttagccatagtgcttggccaaagaagtctatatccagagttgatctgttatagagtgagcgataattaattgagcaagaaagagcctgcagagaatttactacagagttcatcagtgtatgctaagaaattaacttctcagaaaactactgattgtggtgaaaggataacaatatgatttgttaacgaccaaatttggtaatatcagcatcggaaaggaggattagattgaagtggagtcgaagacggagatcgattcgagaacagagcaagaatcggctggagtctggatcggctacgattggatcggctaagtctgagtcagactgngttaagtgatacagccgattccgacaatatgacttggtgtacaacatcacgttgagttgatatgnttcaagatgatcgccgcacatggatagagtcctgagaaggcaattgtatcta

SEQ ID NO: 24540 - DNA, 455 bp, Oryza sativa
  unsure (1)..(455): unsure at all n locations
agctntactggttgacaccttttaagatgtattgtaccaactcctaaaaagttaagtaactgcggtataaaaggattttaaggtattggggtattgggcacttgatcacgcgcactttggcctaagcaaaaagtgcctaagtccctaaaagaacgtgacaggccacacctgaaaacatgggttgcagacatattaagcctaggccaaaaaatatgccttcgacaccctttaaaggatgacgcatgtaacatgctcccgagtaataaatcttctgggtaatatagaccaagtgtagctcatatgaatagcttctgatctgaatgattatcccttatgggatactccaaaataaatataataattgaatcccgactggcgcaagtattcggttgatagcccttacggggaaataataatggtccagtcttttagcatagaaaatagactcatgacta

SEQ ID NO: 24541 - DNA, 473 bp, Oryza sativa
  unsure (1)..(473): unsure at all n locations
ggcgcgcggaggatgaggaggagggggtagagaaccgccatattcagtcgccgaaaacgccaccactatcgcctccgccggatctgcccgtcggaaacgccaccgccgccaactccgcaagatccgctagcgggagctaccgacgccactgccattgccttcaccagatccaccacccaccggaaatgccaccaccacggacggatctgcgggagggggttgagcaacaccggatccggcccacgggaacgctgccgaaggagaagcttgggcgcggtggatgaggaggagggggtagacgaccgccagattcactcgtcgaaaacgccaccactgtcgcctccgccggatcaacctgccgaaaacgccaccgccaccaactccgcaagatccgctagcgggagccgncgacaccactgctactggcttcactggatccacccatcggaaatgccacccgcaccgatggatct

SEQ ID NO: 24542 - DNA, 385 bp, Oryza sativa
  unsure (1)..(385): unsure at all n locations
gcttgcaaccatgaagcacgatttttgttttctcacttattgngacggtgttgccattgcgctattgatcattcaatgcatatttgcagttggatcatcaatatttttttcttgttttttctgcacttaatttaaattttccatttccatatctttgaattgtgtgtatagataaaagctgcctttatattgntattataactattctctttggatgaaacagtatcaagggtcgtctaattcttttaagcttggagactattgaaagtcctcgtgagagcggttcgtttactgcagcttctaatttgaattcatctcatgctggttctccattcccggaatttgttggatatgcagcagaggagctgtctaataacagcatgtg

SEQ ID NO: 24543 - DNA, 468 bp, Oryza sativa
  unsure (1)..(468): unsure at all n locations
tagatgtgaataagaaaaaaaattcaaagtgtttcacatgtatattttactatcccgtttaaattaattgtcattttaccttttcaatacttggccatcagtaataagaaatcaacttataataatatacatattttttaagaaacacagtacaaacgtaggaacacgtaacgcgcacaacacccatccctatgaacacacaacttcccctataagcatatcagaagactagaccaacatattntgaaattaacgaagtcaccacgagtgccttacggtcgaaaggtatgtcacctaccactgaaaaaataattgactgtaaatacgagcacacgtgtcaagtctagaacttatacccgggtaggctagttccaccacaaggaacctaatcattgagctacgctcacttcacanaataatatacatattggaagtttgagggaagtgtatatatcgaatgaataaatt

SEQ ID NO: 24544 - DNA, 392 bp, Oryza sativa
catgcagcttggatgcctcaaaatggcaccatattaaaagcttgatcagcaaacttgaaaacgcacaccacggctagcacagtggaaagacaatttaaatgacactatttccatctaaaacataaatatcgtcaagcatcactcttgaaaatgtaacctgtgccttaattcaccggtaaattttaggccaactctatcaaatcgacattaaaaaattcaaagagcatacggaattttacccattttaaacagaattggaacccaagacattacagcacctccaaatggaaatgtagtacaatacatgtaactaaatgacccaagtaaactgcagaagagatgaattcttttacacaaactacacacagaactcaacccaacaccatctatct

SEQ ID NO: 24545 - DNA, 362 bp, Oryza sativa
  unsure (1)..(362): unsure at all n locations
tgcaagcttcctccctctctctctctctctctcttctctctttatttccccttgcaaaaatggagaaagggaatgggaaggggaggagagagacaccggccacggcgactagttgtttttggaggggtgggtgaaacatgcgtctgtgaggctggcccgtggggccgcggggatctgggcccacctgtcagtggcagcgggggaggggcggntggtgaggccggcccacctggcagtggataggggtgaatcggcagcatatgcctccgacatatacgggtctcgcgaggcggacttctgtttatccggagaccggagtggatagaaataataattaatttagcgtgcgagattcacgatga

SEQ ID NO: 24546 - DNA, 475 bp, Oryza sativa
tcacttgtccacgcatccgctatcgcgaaggccctacatcgttttctgctatatggggattcgcccggtgaggcagttcgccgttgtaaacccggttcgcccgcccagctgcttgtcgtgttagcagctggctatactcgacgaccgaaacgtcgccgatcattctgcgggctttggcttcagcctggtcgagggtcgacactgcaaaagtaaagggtgtagctgcgttaaaggtcagacaaggcaaaataacaaagcacaggagtgtatagcaaaagaacggtcttactgttcgtcccctcaggaagaaccaagttcggcaaaccgttagcctcttcgcattgctcgaccgtgacttgccatgactgggagaggggaaagatgcgaagcatacagaactcctccaccaagtcacggcagctaaggcgggagcaaaccttgcgcagcaggacgaaccgcgccttcatagccccgt

SEQ ID NO: 24547 - DNA, 392 bp, Oryza sativa
  unsure (1)..(392): unsure at all n locations
tanatagttagtatagttagtgggggataactctatagtaatataggaaaagggagatntttatttttttttcctttgacggatcccgctcgagcgaaatcctaattgagccgttcgccttccttcgtcacggcgatcgaccaccgcgtgcccacatgccacaggcaccctgcgccaccgcaatgtactagtaagatggtattttagccagaggaattaatgaacttcacatgccatattgaaaagcaagaataagattactgtgcccatggcggagattgagaaacagcatttttcatcaccaacagaagaattcatttggtggacacagtatatacaccaggtagagtataacagatccaacagaatcatctatcaattttatggatcat

SEQ ID NO: 24548 - DNA, 243 bp, Oryza sativa
ctgttaactgactgcgtcgaggatcgaatcctactcggggagatatgattcattctttaatgtgagaataaagaattgaaatatagggcttgctttgacccttatgagtatgtaacccgctcgctatccttgtttctattgcattttatctcatcatatcacattctgttctacgaatccacttcgacaaaaggaaagagcatacccaagttcaatagctctacgtccgctatctcgaacatg

SEQ ID NO: 24549 - DNA, 481 bp, Oryza sativa
  unsure (1)..(481): unsure at all n locations
cacaagaaactcagcttcctgatctggaagatctctttacggtattgtgtatcttttgatcgacttccttgatcgctacttatgggcgtgcgctcaaaggatacaaacacggattcgcaaacaaaaaggggaattcgtagtcactttatcctgtcgcgtaaaaaaaaggctttacgcgagagcaatagaggttgggatacatctatctcttctgagcaacctcttttggattcttaagaccacccttgcagtatgataccgtctgctatgggttctttattatattatctccttcgagggatttttaggatcgttcaggctatatttagtctatnttggctcttactggctccttttctcacggcaagtggtaaggacctcagaagatagaggagagcgccaggcgcagatttccggaatacttctactgngaatgctcattgaatgcgcattctccgtattatgccttgaagaggactct

SEQ ID NO: 24550 - DNA, 383 bp, Oryza sativa
agcttaacaacactaaaacttggaggaaatatcttaaatggttcaatacctgactctcttggccgtctttcaaaactccaaaatctgtaagtcaaactctgtgtctttctaagaatacaagtaagattatgagtcaatagtgtagtagttgatcataataaccgtaataatgggacatcttcgacagggacatgagcaaaaatcttttaatcgggaatattccaacttctttgtctaatctctcatcattgaatgatatgtaagtctttctgtgttgataacattgtgaccttgccaaatatcaccgcttggattacagttacattatatgatgtatcacatctcactgtgatttgcagcaatctagcagacaacaatctgag

SEQ ID NO: 24551 - DNA, 468 bp, Oryza sativa
  unsure (1)..(468): unsure at all n locations
tagtagtccccatacggnacctacgactaccggcatgactgatctatcgctatctttgatctcgccggacatggattccaggaggaagactaccctgttgtcgattacgtgttagcacttcagaccgccatattgataacagatagataggctaccccaaatattgtactggtgtgattataatgaataagagcaatgaccggcttctgccaacaagagtagggntattacctgacaatttaagagctcgaacctgtataagaatcctcgtccccatctcttttacctcagtctcgcatataccttggtgccaactatccccatactacgcaaaaccgtagtcgtgacatcaaacgtcgacagtagcgcgccatgtagagggatattggtgcttcaggattntgacgagatgagttcaagagatggattcttcaacagcaaactactcaacgacttcgtatgttgagt

SEQ ID NO: 24552 - DNA, 413 bp, Oryza sativa
  unsure (1)..(413): unsure at all n locations
agcttgtagttntagagaaatatcacttgttatacacccttgtggggcacttgaccccttgtactgatgtgaaatattttgtgaaagatattgatgaatgctaggaaaggactgcatgccactgcaaggaatgctaatgcaagaacacatggggaagctatgaatgccgttgcagtggcggcttgctttatatgaaggagcatgatacatgcataagtatgtccctcccggctcctcatgcatatgttgctctttttttatatcaaacagtccactacttgtgcattcatatactgntgcgggctgtctgatctatttgacggacccacattaatcatgatcagcattctgcaaccattgaaagtgttgaatgtcagtgtatagattatagaaaaaattttacttatgtgagt

SEQ ID NO: 24553 - DNA, 429 bp, Oryza sativa
  unsure (1)..(429): unsure at all n locations
tgaaaggctcacagccaatatttatattgcagctcaatttcttataaaattactctcgacagactccatctaaattgggcataaattgcctaaacatcaactctccaaatacaattgcatacattgtctcaacatgaactctccagatacaaaaacatagatgctaaaaagaacacaggcaagacaaataaattcatttgagctaaaacctaatgaatttgaggagcggaaactaaatgcttgagacatcaaaatctactcttgcgactgctgctattcatctccatgctaggccaagacaatgtccttcagagctggccggatgccctcctccagtagctgtcggtactccaatgaatcgccacttgtttgtttcatctctatgatatgataggaagtggtaacctcanatatctctatgtcaaactg

SEQ ID NO: 24554 - DNA, 405 bp, Oryza sativa
  unsure (1)..(405): unsure at all n locations
agcttgctcggatatgttcggtgagtnttcttttggtttgttctgctctaatggtgttagatgttcttaggaagntggatagctaaagaaaataggagaaattggctggcaatgtaggagatttaagtagttcggcgtggaatcttgaccgaggagcaaaacccaatcttgctaatttcacatagggcgtcatgaataaacgagtttaaacgattttatgtagcaaacatgaattataatttcaactgattgctttagttctatcctgttcatccttcttcctccaaggagtattttntctttctcagtttgtcactactagcagacctgtagtccatcctcttgtattccccatgcacttagtcttaccagttaataccctttatattagtaacatgagcatta

SEQ ID NO: 24555 - DNA, 405 bp, Oryza sativa
  unsure (1)..(405): unsure at all n locations
tatggtatntaagctatcttatacaatatgttggcttattgttattatatgtaacccgcagcactcgcagcaatgcgcaagatttcacatagttattaataaaatttactgcctgcattctaaaagactccatttttaacatatttcacacatgccaatacgaaacaaaactttcactatctcaaactacataaggatgcatttagtgcccttcgtttgcattctcaaactccaaatgaatttttcatccgctttctcaaaaacttaatgcattgactgtctcaaagataaagcttgtgttgatcaaactaaaatgctaaaataaaatatcttgaaacagggaaagatcaacacctattaccattaaaaaaaatcttctgctcaatgactaggtgacatgcctga

SEQ ID NO: 24556 - DNA, 455 bp, Oryza sativa
tgcggcatgcgagctatagtgaacttacttattagtacatatgctccaatgagaattctgtccgagtagccgacctaaagcccacaatgaccgatggaccatggctctgatattaagcccaccgagcttcattttccttggcccactgcacgcgagacaaatgacgatgcaagacttgctgtgcatctgagtatctgggaagatgctaattagcgcgtacgtacgcgctatcaacgttgtatatatgcaactctcattaacaccgagattaacggcacaaattacgtaggtacgtacgccgtacggtaggagcgatttttttttacatgcatacggcaagagcgtttgtgccgtatacaggaggacaatattcttttaataaaagatataatctgatggtgtacaataacgggtccactattttaagtgaagatacaacgatgagagtatacagt

SEQ ID NO: 24557 - DNA, 387 bp, Oryza sativa
  unsure (1)..(387): unsure at all n locations
catgcaagctntatatagctgtcccgctgactttttatatagtcatggcgctgtttgggtttatcaagcaattgattggatacaacatcattgctttttgccacgtaagtgtgcatttttattgaccaatattatggcttatgctgattatatattttggtcattttccagacgattgataaatccttatgagtttatttactcggattttataccacatatgccatatatttccaggtgtggtgaaaccatgtgtcttttatggactaaagcacgtctgttaaagcagtgtgcgcatggcgtatgcccaatactttggaaatttatttattcacaacatacaagcttctttatagcttgttngctatgtgaaatttcaataatgta

SEQ ID NO: 24558 - DNA, 361 bp, Oryza sativa
  unsure (1)..(361): unsure at all n locations
atgtataaatgggacagatatgggaattgaacctgaaataatttgatttcttaagcaagggtaccatatcttgaacacattttctttcagtagtagtttaaaatgaaggcacaaccaccacaaaatttatttatttttgattacacaagcacaaacttaaatagtagttctctaaatttattcattcctgccaacaactagatatatattctttttggctaacctgaacattaattttaattttttttgaggaaatcattaattctaaattggtcctgacagttaagctaacttgggtcagagctagacatgctgagaccaaatgggtgcatgtgcatattatatatgttangagcatttt

SEQ ID NO: 24559 - DNA, 420 bp, Oryza sativa
tgcagcatgcaagcttagtctttccgaagcaattgtttgtgaaaaaaggtggcctaacaggatattccatgctgatcgcaatctgcaatgaaaaatccacagtgagaaagtattgtgcatggacatactttaaggaaggctcacaccaaaagagtaactgaagaatttaccttggcttccagcattacttttggaccattcttcagagttttactcaagaccagggtaaactccctggaagcatagtcctcccaggatttgtctgtagcaaggttgactttttccacttcttggtcaacaaatgtctgttcctctaactcactgtcactatacatcaagagatcaagatcgtcctcatttctaccaaaactgtgtgagatgcttagtttagatggtgtggcgctctttgatatcaaggat

SEQ ID NO: 24560 - DNA, 470 bp, Oryza sativa
tatgggttatcagctatatacacaacgattaacctgtatttgttatgcacagctatatgacagccgacgaaactttcgtttaggtaaaataatagtagtatatggaattctggagaaagctctgttctgtttgctggtgatgggccgtagtgtgcgcggccggtttgcttcaggacgttggaattacctggacgctgcatactagatctagcagaaaatgtgccgattgacgtcattgatgtattctgtcaaaattaagctaataaaattggtgaatggctcctctcttcagccattgacaaattttgacatgataatttaatgcaccgaccaaaaaccattgatttgttcacaaacgagtaaacaacaacgtgtcagcagaatatactgttcttataaaaagggcgctacacacgttccattcatttagaatcaatactctaataattcctcaagaagaatcttctggt

SEQ ID NO: 24561 - DNA, 378 bp, Oryza sativa
acctgaggcatgcaagctctcatgatattctctccgtctcaatttattagaagcttgtattggatacaatattttattacactacgaggcgaatatgtacagacgatatatgagttcttttataagtatgcgttcatgatacacactcaatttgggttgtttgcaatttagcttggcgtactattagctatagtgctgtaccgctggcatgtttaaagcatcacgtactttgacgtcttaatttggtgtgtgtgagtgcgcgcgtgtgcgagtgcgtgagcgtgtgtgcgtgtatatatatatatatatatatgagagactaatatgtacagacgatatatgacgttctttacaagtatgcgtgcatgatacacactt

SEQ ID NO: 24562 - DNA, 344 bp, Oryza sativa
ggaatatacatgctctttatactggtatccgaacgaaccagtgcagattcttactgtgtaaacacacacctcatgctctctgatgctgcaactgagagcctgggactgccatacctcagggcgaacctgaactcgataggaagttacttcacacaaggcgctaactttgcaacggtcgggtttgcaatcagaaggcataacacatctttgatcctctctggtctcagacccattatcttggacgagcagtactgcgagtttgaacatgacatcaacagaagccgagtatgctataacaacaaaggtgacaataaaaccataaaatccatttctgtcagtaattc

SEQ ID NO: 24563 - DNA, 443 bp, Oryza sativa
  unsure (1)..(443): unsure at all n locations
agcttcaatcttcattgtacaaaactacttatgacagatccacattattagctacttgaatgctataaatggagaatggtgcaatgattagtcatctacaaggtcccagtgaatttgaaaaagcttgatcagtaacattacgtgttaaacatcaaagttccagaaaatctaagccaattcctacaaacattgaagcaatacattaaagtccagaatcatagtcattgaaaattcaataatcaaagcaacataatatgtacatgacatgacaaaccacaaagtcatcgactcttagtctaagcaacaaccactcaaaagcacaaactatagcatcagctaagaagtcctagcacaactatgctaataaccaggagctcttctagccatcacactaatacccttcagagcacggntgcgaggtatgccgatcttgtgtcaatata

SEQ ID NO: 24564 - DNA, 464 bp, Oryza sativa
actaagctgagaaattcctggtcagtcaaggtcctttatcttggatcaagcatcctccagttgcagaacaagtacatgttccccctaagaagtctggtaaattactgcagaaaggagcaaacattcaatctgtgatatacgcaaattttgcttaaaattttaagcattttaccttgggtcaactgcttctagtattgtactaagataattggtccctaaaacctaacatgaaggatataagtgagaaaaaaatattcaatctatttgtccaacaataagtagcacatgaagaaagggcatgcagacatgcagtacctgaatctttgctaaagttcttgcctccatgcatgcttttaatactttccacagtgctctaaatccagcaccagcattgattatgtataattgatttaatgtctgtatcagaagcaagaccacataaatagagagtggaactactgact

SEQ ID NO: 24565 - DNA, 463 bp, Oryza sativa
  unsure (1)..(463): unsure at all n locations
agcttggtgcttagtgagaatgcaaaagcacacggctccagtctatgacaatttaattgacacgggttttgcatcactaaacatgttctttgcagagcagtttaagcaagacaaaatcacacagctttcatccgtcggtgccagtgccaagacaggcattgactctgcactcttttgtgcanggaccatggagaaaaaagaagtaaccatttcctcaattctcagtgcagagctctccttggtgtccctgtttctcctcctcatccgacctttcggctggatgtataaagcattgctgaaagctactaatgcttcaggagcagagcagctctctctatcgtcttggtcctacgcgtcatagtattgaatctatttctcttgtattgtcgccataatccattaattgtaggtagtacgatatctattcttctctattacaaaagaccacacgcaaaatttatac

SEQ ID NO: 24566 - DNA, 472 bp, Oryza sativa
  unsure (1)..(472): unsure at all n locations
ctaagcttattggttccanacccatattcaacaatataaaacaaactatattttgtatacgtatgtatcacaagctgcaatgaagaagacggctactcatactcaaaattttactccacaactctatatatgttgacaacacaacggaaaataagaagataatgaacatatggcgtcgaagaacacgaaagggtgacaactcacagatgagtgacgataatgtcaaataatagagaataagatgattatagttgtgcgaatgggcgactttacaagctagtcgcaaacctgaggttgcttgttgaatataaagcccacatgttaatctaatgagttatcctactttgccctgttttcattatatgttgtcagntgtcgcacaaatgaaagaccccagtcatctttccaagaataatcattggggtaccaaagtcatatcctccgtatctcaatcaatttcatcaccttttct

SEQ ID NO: 24567 - DNA, 414 bp, Oryza sativa
agctttacccccttgcgaccttaatcagattggtggccagggaaagaaattcaaatccattttacttggtatagttggtgctgctggcatgtctattgtgtttatcatgtcactagtggcatggcaatgcaaaaggaagaaatatggggaacaaagcgaaaatggagttggagacgcaaaagtgttttcagtctggaactttgagggaggagaagcatgcaggcagatttttgaaacaacaaaatatttcaacgaaactcactgcattggaactgggggaaatggatctgtctacagagctcagttaccaacaggtgagatatttgcagtaaagaaaattcatatgatggaatatgacgagctaatatttaagcgagaaatagatgctttgacgagaattccgcatcgaaatat

SEQ ID NO: 24568 - DNA, 381 bp, Oryza sativa
tcctttcttctttctatctcttccgttataggacagattcataatcaataaactcattaattaccattgtacacaccctaacgccccaaccattggaatatgcccaagggaatacttcggcgactaagggaatttccgcattatgtaacgtacaaattcacaaagaatgtgtaggaatttttataatccaatattgttccatttgaacgaactgctgggcaaatgcttcatacgacgagcactctgtagtgaaaatcgccactttattctgggaccaaagatttctactgactacgtatatcgccccgcctgttgggatactcctctatcaaaaccatttaaaacacacatgactatttaaataatttctgcaaactaaat

SEQ ID NO: 24569 - DNA, 393 bp, Oryza sativa
  unsure (1)..(393): unsure at all n locations
agcttattaactnttgctcttaaactttgtgcaaagtacatttttcaccctggcctacaaattaaatgattgtttctcatcctaactttcacaaccggataaataacactttgaaacatggcgttttattggttttggttgaaatacgaggttatttttctaatttatattcttactatatatgtttaaggtccaaaactatgaaacatacctaattgaagtttgtattagcaaaaccaaaaaaccactaccgtattgatcaaagccactgtgagaagtggttcggggcgtcatatgtctggttttcatattttacaatgaanaactacatgttttgtagttcagaaacgttaccctatttggtcttttaaagttcaaggtagacaaacatac

SEQ ID NO: 24570 - DNA, 314 bp, Oryza sativa
tttggtataaatcaaatacaggacctgatgtcacgataatggtttatatttaccagtaatttaacacatgatctgcgaatggtgaaagaaataaaggtggtttatattttcaatcaatgaaaccccctggtgaagatatttacaacatttctttctcacaatggttttattgaaactttttgcaggtatcactttctagcgagaggactattatattcatatatgacttgcgatagatgaaagaagcattatatcaggtattcaggtgcatgactatgaattggtgatatcacgttaatataccggttagttaa

SEQ ID NO: 24571 - DNA, 471 bp, Oryza sativa
  unsure (1)..(471): unsure at all n locations
actcagcttaggcttcaactcacactcttcggatatcatcaaatgctactagattactgctacttgaacgatcaaatgcagattcttactgggtaaacacacactcttgctctctgatgctgcagctgaaagcctgggactgccttacctcagtgcgtacctcaactcgataggaagtaacttcacacaaggggctaactttgcaacgggcgggtcgtcaatcagaaggcanaacacatctttgttcctctctggtttcagccccatttccttggacgtgcagtcctgngagtttgaacacgtcatcaacagaagccagttcgtctataacaacaaaggtgacaagataaccaaaaaatccatttctgtcagtaattcagtaccacgttgaacccaacaatcacgttctgtttcgctccatttcttcacataagtggaatctacanggagctcctacccaaggctgaatac

SEQ ID NO: 24572 - DNA, 455 bp, Oryza sativa
  unsure (1)..(455): unsure at all n locations
agctntctcgatgacatgcaatctacttgtgctgcgtttgagagaagctcaaagagaagaaaaaaaatcatttcttttgcgcacacacttcctgaaccactaaacaatatctttaaaaaccatattaatccatattttaagtttcaaataattaatacttacttaattaggcatcaatagattatctcgttttatgtatattctctatttgtgtcttcttaaacacagacgtagtgaaagttttctaaatagaaagccttgttataggttttttcaccgggcctaaaatcttatatggcgtagcagctatttcctcaatttcaaaatataaggatttttaacatttaaatattgttgatgtttagtgcatcatttgttctatcaatcacctttcatttgtttttccnccattntaccttcacgtactctctcatcntcactcatncttttatttt

SEQ ID NO: 24573 - DNA, 327 bp, Oryza sativa
ccgataaataacagaatttaaacaaactccggttaaactacagatattaagcataacaagcggttcgttcttgtagagtagataatcggattttgattgagctatttttctaaaggaaacaagaaaaggaggattctaaatccttttttcttcggactttcccaaacacaaaataccttcttgtattcgcactctcaaatgagagtggaagaaattcgactttcatataatatcttaatagaattccatgtaatgatcaatgccatttttggattctatattattcgcatgtctagaatcctaccaagagaatacctcccattttta

SEQ ID NO: 24574 - DNA, 433 bp, Oryza sativa
  unsure (1)..(433): unsure at all n locations
tatgccatattcaatccaatcgcggagtttatgcctgttatacctgtactctnttntctattancctcttgttggcaagctgctgtaagttttctatgaaatctttactactctgtctgcccaattgaatcatgtattcattctaaaaaaattcgaaaaatggataagagccgagaagtcttatattatgaaccttcgattctanaattcaaatacttctacattgaatgtatagctgcagcaataaatttggatcagcctttctactccctgcatctacgttgagcaggtatctttaggtaaccgcacaatacctaacctaatttattgataagagtgcttattataaatcaattcttgcaatctttttcaaaaattgatttttgcatttttaggtgtcaacataaacaacacccatcctaatggatttgtg

SEQ ID NO: 24575 - DNA, 436 bp, Oryza sativa
agcttatactgagttcatggtaaagcacatagtggccgaggggggctcctgagtatttactccgtacaggaaatgacatccatctatctatgactagacctacagagattgatcgaaatttttacacattccatgtagtagtgcattcaattcatcccaatcctttgaattagcacatctaattaatgtcagattgctaatagtatggaaaaaagaaagaactaatcaagaattatgaactattttctccatatgtttgtaacattatgaactcttttcagccaatgaattaatcaagaacacactagagtatccaatattcaggctcatgtaatatgcagggtgcagagtttttgagacaactctttacagaacattatctgacatcaagaaccaattaatttcttttgctagtcaaatcaagggcacatatgat

SEQ ID NO: 24576 - DNA, 330 bp, Oryza sativa
gttggtggcgcacggcgttctccctgcccaggagatcattgggtggcgaccaacgcaccgtgaggctttcccgtctccggatactcatgagaatgtgggcttctcgcatttcttctacggcgggtttgctctttcgacctcaaaatttttccgcgggatcttgaatttctatggaatcagcttgcattacctaaacccgaattccgtagtgcatatcgccaatttcgtccatgcttgtgaagcctttttggggatcaaaccccacttcgccctattccgtcggatcttcttcctcaagccccaaccaaacaagaacagaccatgtgtagt

SEQ ID NO: 24577 - DNA, 395 bp, Oryza sativa
  unsure (1)..(395): unsure at all n locations
agcttgtacgttgcgtgcctagctntgcttttttgcgtgcctcgcgtgctgatgattggtgttttgtattctggaatggaaacagttgttagtttgatacgggtgttttcatggcaaattaacatgcaagttgttcattctaacttgctccggggcagtatacagacgttatatgtatgtctcatgcttatcctggaactaattcttagcgcactaaacctttgtgtgattgctgttgttgagtcgtgccttgtgcgacatgtattggtccttattattggggattccgagaagtccctataacacacaattcacctacatgttgaactacactgaaatccacaatttcattttgagacgtgcaatgcagagtctatacttggttggccgcgtga

SEQ ID NO: 24578 - DNA, 421 bp, Oryza sativa
ctggacttataggtttacaagaagaattgaaacaactgatttatgtttagacacgcacacgtacaaagggctgatagcctgatattgtctgcgatttgtggactgcgtttcatcaggaacacattctcagtgtcagctatacctggatggactgctgcatgagcgcttatacctaacgcattggcacaaaggcccactgagggagagagcggctcgcgcacatcttctaacgtggacaaagaatattcccaatataatgagagagagagagaaataaaaatataccaatatgcggcttaagagaatgttgtggtgataaggatgtccctaatgccgacacctcaacaaccacagcaacaaataaagcaggcttagcattcttaactagagctctccaatcaacagcttaccagtgtactct

SEQ ID NO: 24579 - DNA, 438 bp, Oryza sativa
  unsure (1)..(438): unsure at all n locations
agcttgatggaacaaagaccgattgattcttcatcggtcacttgtgaaactatttcggttacatctatacctaagaccggaattgttagtgattctctccctgttagtcctattgatgttgacaaaaagaaagggaaaagtgttattattggggatcctcggcccagaaataggataaaaaatgcgaaggccgaagatcataaagttacaaaggatgagtcatctagtatccaaaggaccaaaaagccgcagctcacttttgagatgcttatggctaaatacaagaaaggattagctggtcaacgatttgataaccaaattagtgattcgaaaagaccaagatcatctcgtaggaagagatttggtcaacataaagcaatcggagctataaccataccactncggttgtgatgccatggatcatatccatgcactatt

SEQ ID NO: 24580 - DNA, 469 bp, Oryza sativa
  unsure (1)..(469): unsure at all n locations
tgaaggagcaagagacgaagacgccaatgtcgctacaccactcgtccaagctatgttccttaataacagtggtccgagtgcacttgacgcaaccgaaatctttgacaagctgagagttgcaccggatgtatatttcaagaatatcaagaaagctggaagtatgggagctagtatggcattggcgatgaccaaatccttgtacccgaggattgaaattgataccattgatggctatgcagacgggacaagtgaagaagctgctcttgatcttatcagtaatgctcaaagtgcggctgacaagattgcaagtgatgttgtagagcaattccgcaacaacgaccttcagccaagcaataataactctgatgatgaaaggactgattctgactgagtgtaaatgtagcaaatggaggcataatttgtactatactggtggtattatgctgtgctnngatagtctagccaagtc

SEQ ID NO: 24581 - DNA, 445 bp, Oryza sativa
agctttgggagctgctggttggcgaatactagctgcaaaagggtgtcaagggagagatcgaagaacttgagaaagagttgaaaggtatgaacgcagcactccacaaggtggctgagacacctgtggatcaacttgaccagcaggtcaagatctgggccagcgaggtgagagagctatcttacgacatcgaggatgccatcgacaccttcatgttaaagtgcaaggggcatgaacctgccacgagcttcaagaaggtcaccaatttgttcaacaagttcaaaaccaaccatcagatccacggtgtcatgaaagacatcatggaccaggtcaagaaggtcagcgagcgtcgtgataggtacatagtcgacgacaatgctgccaagccaactggtgtggatgttgatcctcgcctagaagctatgtaccgaaaggcaacataactcat

SEQ ID NO: 24582 - DNA, 420 bp, Oryza sativa
gatgaacagaggggggagaccaacagggtgacactgtatttatttatgttatgaacttaaaactgcctctgtgatcaagccagcggctgggagtagttcccgcgcgcgattcccgcgtagcctccattcttcggccattcagaattcactcgtttttaccgattaatcatattcttgtttgtgcctggtcaacaacttgttgaatcacatacacagataaagtgaaatatttctcactaataaaatcacaattccagatcaatagaacttgcaatatcttgacgatgcatatgtgtaatagacatgaaatatttttcgcatgaatattaacacgcactggtctaagatatcaaacataaattatttaccttctcgatccaggatccacgatgtagaaggatatacagtgcatgctatatg

SEQ ID NO: 24583 - DNA, 459 bp, Oryza sativa
  unsure (1)..(459): unsure at all n locations
agctngcagtagatggatcttggaatgcacagattcatggagtacatgcaaatatagctggtattactgtgttacattcctgaaaagcattatgccatctgtatttgacatgttgatttttctagtttcattaaatcataattaatgagtgctcaaatttgttgaaaagcatgatgccgtattcggggcattaatgccgtttactcttttgcaggcgagccttcaactatcgttagacctgcagtgtcctcggaaagaagcttagcgcctacacttcaatggcaaccaaatatgacgcattttctgaatcatgcattgtgttaccagaacacagtatttagcgggtcacttcttgatgcaacaggcccagcccaagccattcctcgaactactccatatgtagactacaggtccgggaacttggacctctatcagcattcatgttctagagaggatgta

SEQ ID NO: 24584 - DNA, 446 bp, Oryza sativa
  unsure (1)..(446): unsure at all n locations
agcttagcctaattctatctaaactcgttatgcaagagtggcattatttctttttagagaatccattatatgccactaagtttgtcacacactacgatttgccactgattttgtcatgttctataatatgccatcaatttttgcataacttctactatttaccatcatcatctgttagcctccgttagtacggtataattttgaccaaataaccaaaatacccctggcacaaaaacttctaaaatttggacaaaaattctgaagtatcattagaatgtttatccaaaatttggaagttttatcaaggggtattttggtcatttggataaaattgtacacgtcgacggtatattgtagaacgtgatataatcattctcgcngttgatacttcattttattcggagcatatttctcgactattaatccatttgaaattatatagtact

SEQ ID NO: 24585 - DNA, 479 bp, Oryza sativa
  unsure (1)..(479): unsure at all n locations
tggcatcaatcttgcctaaaatgaaataatatcaacctgataggtgtatctagntagcctgctgataggctgagcactagagcgctacacctatcaagtaaattcaaattttatttgaaagaaaagtaatttcaaatctaatataaaaatgacacaagataatactgccagcatatagttaacaagtgagtataatactccataatttcttttgcacggatatataaaaagtacatggaattaaatgacaatgattatgattggctgatatcaagaagtacaggggggaattaaatagagaattgttgttattgttgtgattagaacgtaagttaagaaattaatatattagaagacaaaattttgctttaattattgaagcaattgtgtgacgtattttcttttgtcgatacttcatacaatagcatggcatttagccagtgtgagtatatagtagatcaaccatgcgattacatgct

SEQ ID NO: 24586 - DNA, 381 bp, Oryza sativa
  unsure (1)..(381): unsure at all n locations
gcagcttatgcctggctggcctctatattctttttttggcnagcacggngntattccctccgcgccataatataatggattttgagttttgcttgcactgtctaaccactcgccttattaaaaaaattgtgcacatataaaatatgaaaagttgtgcttaaagtactttggataataaagtcagtccaaaaacataaagaataactctaaaatttttttaataagacgagtactccaacagggccaatagaaactcaaaatctcttacgtatgggacggaggaagtacttactagctacttgctagcgcacattttaaattaagggtcacatcctgttcgggatcactcgacgaaaaaaaaaggcaaaccgaatgttttcg

SEQ ID NO: 24587 - DNA, 230 bp, Oryza sativa
cctccccgccccccctcttttacgcgagggcccctcaagcctctattgtggaatataaaggggctgcaaattttatttaattgcgcgccagccaggattcaaactcgagacctctggctctgaaccaaattgagctgcatgcactgaccagttcaactcaaaaacttaaactgatgaagaaagaccggcaattcactttatatttcaacagcgaatgatagtcatgcatg

SEQ ID NO: 24588 - DNA, 414 bp, Oryza sativa
  unsure (1)..(414): unsure at all n locations
ctttcaagggtacggatgaagcggctctctctttggcctaggtggagggatctcaatcgcattataggaaccgggctcacgcaccacctgctaaataaagcccccgcattagaaacgtttgagcatgccatttcaagtttactgttaccaattctgctttacaagcacatgtaatatatatatagagaaaaatatagcatcggcagtgtagtaataaatcaatcagattgatcaattggtacatgaaggattattatatcacctttgagaaaaacttctgggcatggctccgaatttggacagcagtctntgtgccaatgtgctctagagaacagctnggacaaatcagacatactactcactgaactngtgtaaagcctaatgtaatgcacaaatatgaagagagagagagag

SEQ ID NO: 24589 - DNA, 328 bp, Oryza sativa
ggcttaatttttgtctgaatatttttgcaagggggagcaagggatattgggtgttcacattaagctcaacacagccccaagaattcttctctaccgagatcgttgggtctctgcagtgggatctattgataagtgagggtctaatatgcagaagctatattttttccgaaccttttttaagccttctatttgagcttctttgtcaaacttatatatacagaagagtgccaatgacatccaaccttaattaatacaagtagcgatgaatattgttccacacatgttacattgtgagcaataattgatcagtacagaaaggctgaaaaaa

SEQ ID NO: 24590 - DNA, 302 bp, Oryza sativa
tactcccatgagaagatcaacatcccccatgctgtaagcggtggccgtgaacagcgcgccactcagtggcttggctaaaactacgaaggaaaggtgctgtctgctgatgtacactggtgggaggcccctcaacggaagaaacttgtagaaactcgatgattatttcacaacgaccgcatttattttgagatagtgtgtacatcaacatggggtgtgaatatgtgacatataccgatgatgcaattgcttggaatattgatggcaagaatgcgaattatactttgatgatatagctgggcagc

SEQ ID NO: 24591 - DNA, 339 bp, Oryza sativa
  unsure (1)..(339): unsure at all n locations
ctgtcgacaaaatttcaatacaaacgtcaacctaaccaattcacttctgaacaatatattacaaccgagtggtacactggtggccattcattgccttctccatcaatcatcatcaggatcacgtatggcagatttcaggaacacggggatcggcatggagctttgcctgctgctccgaccagaaggcctgtgcggcgagcacacggttcangagtttctgtggaactggagctccgcttcattgatgccgcgctatgctcgacgtgtgcaccagggtcttccacttgtgctggntcatcaaatattgattacatgttctaagagaggcatcctgatcct

SEQ ID NO: 24592 - DNA, 306 bp, Oryza sativa
  unsure (1)..(306): unsure at all n locations
cacaacaaaccagaaaagggtaattatgggtcctgctttatatgctaaagtcgttatgttaaatatattatggttacagattatcccctcatattattttactatgaataattctcattcacaggtgaacttatattattattatataagggcgagatttacaactacgtatttatctaatatacatgtctggcatacactccctcctaaatanatacatgcaacaccgcaattaatactataccggaccactataatgcgatgtatagtatatgtgtaagcaacaatatcttattattggatcat

SEQ ID NO: 24593 - DNA, 464 bp, Oryza sativa
  unsure (1)..(464): unsure at all n locations
atgaactaagatactgcctgaagatgggtgatatgttttatcatacataatatgtgctctcaattaccttcatcatgttctacagtagtcctactttcagcataatagtaacaaacatataggcgctggacaacacaccatcatcccttttctgccttgcattctatttaacaaatattaatgcattcttgccaggaaatctggttaaaaaggataacatgagacactattggcgttaacctccaagttcacttactcagctagtcagaggaattcttttgctataagcctagcattatatattatagagtattatctaagtttggacagattgactcattgctgctgcagtaatagaatttgcgcaccanacaacanaattaacgtaccttttctatagctatccaagacaggttattccgtttgtgacgtctggagaacacgtcatgagtgaattgccacaa

SEQ ID NO: 24594 - DNA, 442 bp, Oryza sativa
  unsure (1)..(442): unsure at all n locations
agcctattattatcttcatatatggnttttattatgctcttgccttgctaacgtaagtcgactttcttgtactgatgggttcctattggttattgactattaaaataaattctaacattataaactgatttgtataatatacgtcactggatctggttattcctatatgcaaatgcacaacttcaactagaagcagctgtgtttacgttaatggtactgactgatggttatatatgaacttgtctgaagttatttatgaaccgctctgaactttgcatgcttcctcagatgtctgacttctttgtaatgcacttttatttttctgtaataatgcttgcgattacgactcagatagagtgctaactcgttttcacatgtgcagaacaagtgaaactagccggtggagtgcttctttaagtagaacccgcataatggagaatat

SEQ ID NO: 24595 - DNA, 445 bp, Oryza sativa
  unsure (1)..(445): unsure at all n locations
agcttatgggtgagcgctcttactaactataattatggattaccagagcgacacttaccaagtttctaaatgtttctaaatggtagtgcttcttttacaattattactttctacatcagaacttcttaaattaatctcctaatatttaatctttttcggttgtgctctccaataactattctaaacttagtttcatccatcatccacccccagaatgtaacttgacgataaaatcaggaacaatggaacaaacaatatatcattatatagcagattcgtatcaagcactccatatcagccttgtaagaaaaagcgagatgatgtttcccatgtctgagaaacacatttatgtgtcgaatctatacatctactattaaagatatacgatgtttatgtaactttgtncatctcccgctcccatcgcgcctctacgtaggacacaaca

SEQ ID NO: 24596 - DNA, 392 bp, Oryza sativa
  unsure (1)..(392): unsure at all n locations
aacncagcttacccacttgtgaaaggaggccaatgtctttgtcttaccgacggtctttttttattaattaaaaagatattttcagtctaggatgatgttcataccatcatacaagtncggttctacattgaccacaagtcgattcacggcgatgcaacatgagtggcatcaatgaatgcgttgttttcttacctaaataaaaaaaactactggatactattttttctgactgttgaaaatagtacactctctgcccggccaattnttcactctcgaggcgagaagaacacgggcattctcttcatttaaaattaaagatatagtttctattaacaataagtgaatatgcccctatcacgaggtacccaacaaggcaacaacagaccgtaatg

SEQ ID NO: 24597 - DNA, 328 bp, Oryza sativa
gcttcacaaaagacatttccaattcggttgggctcctgtggggcgtgggaaggtgctgtagttctgtgtgaggcttgacgtgcccatgtcataatcgatatgtcacatgaagactgcagctgtttgatctgaatcatgtcccaagttcagtttgtgggcccaaagcaggtcttatttttcacctttagctgactttacacattggtaaaaaaaattcttgtcgttacttgtgaaaaaaaataatgattgaacatctgatgctggacctaagattaattgaacatttataatggaaaaccatgttttcgtctgcagaaatggaccaatg

SEQ ID NO: 24598 - DNA, 233 bp, Oryza sativa
ggtgatcctaactaaaatttaattctttttggccgacacctaggggaggctttttctcctacttggataaatactactcaattttagcagcgagaaagaacaaaagagtgttttttggattttgagtaattggacccacggataacaggttgacatggggtgcctatatattagaatttggaattgaacgttgaatacacaacttgacagtgggtgctgtcgtgacatgggac

SEQ ID NO: 24599 - DNA, 449 bp, Oryza sativa
  unsure (1)..(449): unsure at all n locations
agcttaggttctgccataggtgcttaattcttctctattctacctttgaacttcgggcttctcaactgactcatcttcacgggaatcgaccttccatgagaaaaataattccagtgcagagacgcttgacaacatgaataggcttcacatcttcataatcatctttcatccaatgaaggttctacattcaacttccacggtgcatcttctaattcgaagattctcttctggcaaagaacgagcttacgattggtgtctttgcgatactgggcaaaacaagcttctgtatatttcaacatcttggcggtgtcactatcttcaggttgagacatgtcttccatttgttcaaccatcttctatagctttggcaatttctcctattgggcatgcttctgatttatgactngagtctttgtattagtgtggaggtcatcaacagcatccaacat

SEQ ID NO: 24600 - DNA, 454 bp, Oryza sativa
  unsure (1)..(454): unsure at all n locations
ggacttagcacaggaataaagatgtctctcacaggagaagattgctttcacgcagttcctaaaacaaaaactgctggaccacactgccttggacaaagtccgcttatgtcaatgatccagacaaagttagattagagcacgggatgcaaatacctggttcttccaaataaaagctagtgcaacgaaaagaaaaaaaacttcattcagcatcttctgaccgacaatggcttggttcataaacaagaggacaaagaaaaggaaccactcaacttctaccgacagcatttaggtgaacatagggagcacacctctacgattaacttcggcttcttacaggaactagtacaggacctttcagaactcgatgaacctttcacaaaggatgaagacaaaatagcagtcttccaatctatgtcagacaatgccccangatcagatggctntacaggcactt

SEQ ID NO: 24601 - DNA, 436 bp, Oryza sativa
agctgccgttcgccttgggaacgaccatctggttcgtcagccactccggatggatgacctcgcggatgaatccggcctccagaagtcgcgccacctcctcgcggatgaaggcttgacgttccggggcctgccgccgcactttctgccggaccggccttgcgcccggccgtacggcgagacggtgctcaatcgcctccctggggaccccgggcatatccgccggtctccatgcgaagacgtcagcgtttgcccgcaggaaagagacgagcgtgtcttcctatttgccgtccagaagaccaccgatccgtgtggtcttggacgggccgtcgcccagggcaacctccttgaccgggacctcatcgcacgtgactatccgcttgctcggggcggggggggcggatgtgccaagcctctcgtcgcacccttcggcttgaca

SEQ ID NO: 24602 - DNA, 473 bp, Oryza sativa
  unsure (1)..(473): unsure at all n locations
tatagctataaacgtttaactatntcttgcattaataaaagaattgtangtacantttcctggctgctaaatgcctatttgatttggcataaatatgttagcatttcagcttgtattctatttttgagttccactttgcattttatattttccagacattgaagccagggggattctcgaatgcacaacctacacaaaatcttcccagcgcgagcattccgtctgggcctcctctcccacaacaattatctgtacatccgtaccctcagccaactctgccccttggacctttttccaatctggttggctatccatatttgcctcaaaactactatctaccatcagcagcctttcagcaatctttctcaagtaatggacctttccatcaatctgctgctaccactggngtgcctggtgtcaggatgaaatattcgatgccacaatacaagggcagccttcctgctacaagccca

SEQ ID NO: 24603 - DNA, 458 bp, Oryza sativa
  unsure (1)..(458): unsure at all n locations
gctgcaaatgtattgtccaccaaggcattaactggtcatgctctggtccatacatctcatctgttttggagtctgatgaagcaaccttttttaaggcagtaactttctacagttgtgttctttcaatttcatgtccatgctttttcatggtgaaactgtgcttcctagccagctttagtgtgtagttgctgagtgggggcatgtagtgtatgcagttattatcttccaaggtaatgatggttgtctctctagtgtcattttaaaagggttccatctcaaccatcattcaggttggatattatattatcatttctagagagatggcaatggcttatgatcccttagaatcaggcttttctttgccttggtgtgtatcttcctccttagagatgatgctccactctgcttaactttngctgcctttttctccttactaagagtctgtaattggtatgcat

SEQ ID NO: 24604 - DNA, 465 bp, Oryza sativa
tatgccacggcaatatcaagattggtggatcacattattgttctctacacatgccctctatgatcaacaaagagaactacattattggggcaaatggttactgaagtgtataatgatgctacgatttctttcaaaaggataatgttgctacatttattagaggaggtgcacaaggctgtactgatggtggagttgaatacaatcggtgcaaactttcaaaattcactatagtttgttcacttgaattcgattcagccaaggacattgatctattgttgatgtaattggtagaagcatggatggtcatggtctacaaagtctggttatctgaaactaatacacaaaatggtatagctgctatacttgaggccatcctggagggtgtaacacccaggtattctcttacctagggcctgtatggtgcagctaccactcctagattcgcctcagatctgactggtgcac

SEQ ID NO: 24605 - DNA, 416 bp, Oryza sativa
  unsure (1)..(416): unsure at all n locations
catgcaagctnggatgtatgaccatttttccttttttgaacttatttaacctcacactgaggacggccaaacaatcacctgaattttggggtacttaagctaaagtttattgatagaaaaaaaacttaaattatcaataagatgctcacttttcctggatgttatagaaacaatagtacagaaaggttgaaaaattcctttgaagccagcattctttactagagatgatgagatggccatgctttcctcattcacaggaatattattatacaatatatcttgacatcatgccagctggtaattagcataacctatgcctaatataccaaccaattaacaattaatagcacacatagagaacccatacgacttcgcaagcgtgctccattaaacaagtgtaagagcatgcatttttg

SEQ ID NO: 24606 - DNA, 473 bp, Oryza sativa
  unsure (1)..(473): unsure at all n locations
ggtgcgcgtgccaccatgtgaaaacgctcttgcttcctctgtatattggaggatgacggactctgtcaatgtcatcgcgatcaaggcgaccgagtctgatgtgagttaccctatcagcatatttggcactgtgttggccagggatgtgtacgactacaggtggatctatttgttcaggcgtggcaaggacgatgcccagaacatcacctcaccggtctgtcgcttaaccaattccttccttcctcctcgctagattaatcaatactaccattccttcggtcaaataaaaatgacatgggcttacccttacaatccactntcagatattctccaagtaaatcacgtcaatcgccatattgcaaccaactgtttgatcctttgtactaaataagtatgtctgcatcattttctaataatattacactcacattatgaagtgaaatatatacagttactgaattgtattatactta

SEQ ID NO: 24607 - DNA, 322 bp, Oryza sativa
  unsure (1)..(322): unsure at all n locations
ttgcattgctctantccagctatgagttctatcttccatttatttagctgatcaatggtggtttgagttgcacttggaccagcctccaactcatccagcttagctttttcttcattgatggacgttctgttggcttggatggttgcttcaagatctctcctttcacgctgatcggcaattctcttttgggctttttcaaatttaagccaatgttgcttaagatatgccgctggtgctcatctaggatcttgtcatgganttcattgagtctgtccgtgatggatccgcagctttgaaccaaagtctccagggagccttcaag

SEQ ID NO: 24608 - DNA, 438 bp, Oryza sativa
  unsure (1)..(438): unsure at all n locations
attctatcatgtaccagtgctattgttgcttagtacattgactttaccgaaaaatggccagtttgatgataattccatctaaaacaatcagtagaatcatccaactggatatgagcaatggaagcacacaaattatacccaagtgttagattctgcccaactaaagctctcctaaaagaaacatttagcggaacagaacccattacactagcaatagaggcactctttcttctgacaatagcatataaagatggatacttatctntgaaggctatattacctagccatttatcatcccagaatcttatctgttaaccatcattcacaatccaagagcccatacttaagaagatgttttttaccttcataagctctgaccaanaataagaatcaccttggttcctatccacttgggttatagatatattatgaagatac

SEQ ID NO: 24609 - DNA, 464 bp, Oryza sativa
  unsure (1)..(464): unsure at all n locations
tgaggcatgcaagcttctccttttcttcgtagcgcagctttatgcacctaattctcagctgcagatntcctctccttctcctacttctncttttctctctccttcctaccgcacgggcctcctgccgcaactcagccagcaagtgcacgcccggtgccctcagcacttccaccacgtcggctttctctgccgtcgctgcctctgctgcagctgcagcagccgtctccttcctcccttcgagctctggcgacccctgtcgtcgacgccgccgccgccgctccttcggtcacagcgccgcagccggatcctacgccgacgatccacgcccagctcatctcccttgccaccacctggctcctcggcggcagacgatccgtgccgcctcgccgtgccacgctggtacgcgccgccgccaacttgggttcactgtcggcgaggtcacccgcgacctgctctgataccat

SEQ ID NO: 24610 - DNA, 435 bp, Oryza sativa
  unsure (1)..(435): unsure at all n locations
gatcgcangtggcaggcaatatgtggatcccatgatctgtttcatgataaacagaggtggtggttacaggatggcaacaaaataaaatatacaattgaaccagaaataatttataattgaatgggaactctggttagagctacatttccgtatgataaccaaacaattctaccatttccaatggagaaagccttgtgaagaaaatattaatatggctcctgtgtcaaccaaattcactcgtcttcacgaagacgtcaaaagttaaaacctcatctcactccttggtcggaaccatcttctttttcaaaatatgatctttcatattcaattactccctgcacatgaatatatatcttagagcaagcgaattntacgttgaaaggtgtangatggaagatggtangtaactttagcacgcacagaatattaaccttc

SEQ ID NO: 24611 - DNA, 147 bp, Oryza sativa
acctgcggcatgcagctttggacagcgctttttgaattttataaatctggaggacgagggttccgctgttcaatagcatggcaactgtgtcggtagttgtgatatttattccggtagaccaaacgaaggatctggtggatcgaatct

SEQ ID NO: 24612 - DNA, 469 bp, Oryza sativa
  unsure (1)..(469): unsure at all n locations
cgcttcngnttgccgaggagatccagctgctgacgaattttgccaacctcgtcgtgcaaatcctgaatcgccgattccacttgaggccgccatcctccgactcctgcatccagcttcgccacggttgctgcgtctccgcttgcttgtcgttcaacgacttcagcgaatcctggatgtcgccgagaattttgccgaagtcgaggttctgcttctccatggcctcaacctgcgattgcaaatgggacgtgtaccttggcttctccaggatcgatgctctgataccaaatgtcacgaactcagatttgagtcacaacgaactttctcctgtgactcgaattggaagggaaaagaagctggcttgatgaagaagaagaacagagacacgagaagcagatgagcatgagggagactggaattgagtttgaggttttcagttgaatacaatatatcatatcccgctctctcgcac

SEQ ID NO: 24613 - DNA, 443 bp, Oryza sativa
agcttgtgcgcgcgcgcaatgaaagcattgggatggacattggcccaagatgctacagatcggaactatcgcagcaccgtcctcatcggcgcatccttcctaaatttatcaccatataataaaatttaaaacttcttaaattaatcatcataagcatgatgttttaatcgatacgtgcatcgcagcaccatcctcatcgccgcatccttcccaaatttataatcatataataaaatttaaaatttcttaaattaatcatcataattagcatgatgttttaatcgatacgtgcattgtgagagaatttatgcatggtgtattgattgatgtgacttaaattatcattggtcttggtgcataaatatatatatgatgaatattttgagaataagagagtagttgggaactaacgtgcagtgcacgtaaacggagcgactcatagt

SEQ ID NO: 24614 - DNA, 464 bp, Oryza sativa
tatgtcaccacatccgcgaacgctgcgaacagtggctggttctgtggacgtaacagcggaggaaaccgtggtcgcggtggctttggtcgcggtggtcgcggtggaggacgcggcaatcctgccggcaacaaccagggacgcgggcgcggcaatgacagccgccccttgtgccaagtctgccacaagcgcgggcatgttgctagcgattgttggcatcgctatgacgattcatatgtccctgatgaaaaacttggaggtgccgcaacctagacctatggcgtggacacaaattggtatgttgacaccggagcaacagatcatatcactggccaactagataagctgacaaccaaggagcagatcagatccacactggaagtggtgaaaggattgatattaaacatattggtcatgccaatggttctactcctagccgtgccttgcatcttagaaatatacttcat

SEQ ID NO: 24615 - DNA, 413 bp, Oryza sativa
  unsure (1)..(413): unsure at all n locations
accttctcgggttcttggtctcttacctttgtatcgaggccaaccccgagaagataccagctatagagcggatgcgcccccccagcaagcttanggatgtgcagagcgtcaccggctgcatggccgccctaagtcggttaatatcgaggctgggagagaaagcgctacccctatttaagcttcttaaacgctccaggccgtttacctggacagaggaggctgagcgggccttcactcagttgagagcgtaccttagttcttcccagtcctagtcgccccggagccagatgagccggtgctactctacctggcggaaccccgcagtggtcaccgcggcgttggtcgtggagcgcgacaaagacaaccctcgcccccacaatccagttctgtgtcgactctaaccgggagagagc

SEQ ID NO: 24616 - DNA, 433 bp, Oryza sativa
gtatatattcttatgtaaagctccagcctattcttaaaaaaaatggaaaaaaaagagattctatgacacgtaacatgcaaatgcagctttacaggagaattcttttctggcagaagccaacgggactgcgacaacctatacggatctatatattatattattaagacagctcgaaaagaagacatcacgttcatcgtggaggctagatattcccacattaatcgaagaaaaaaagaaatatctacaccgctagatcgtaatgggtctagattataatggttcaggctgagctatgaatatatagaaatattactgtctttctacaaacggataaagagttagagaaataatcatacacagcagatatcctcacacttttgctgtagaatgaatcggataaaacaagccgaagcagagttggattgcatatatg

SEQ ID NO: 24617 - DNA, 469 bp, Oryza sativa
ccaaaaactcagcttaggcgtcttgccgacaggtattgaacgggcactatttattgaacaggattataggcgactgaggggtaataatcttacaccataatacgtatagaataaatcccctctaatccctgtctcatgagaattaaccgaacaagcccttaccccgctacacccaaaaatgattccgctggggtgcaatactgctatcgatggcttcttacgcacgaattcccatttctctaattgttttcattaaaaattgtacaaatatgacatatctctcttatataacaagggctttatagagactatgcgagcacctcaggtcacatatacacgtatttcattcttatgactaattattattatctaccacaccgacaaactccgtaatacgccgtatttatctatcacacagtccgtatacttccataggagcctactacatcaatggcttcttgccccacta

SEQ ID NO: 24618 - DNA, 338 bp, Oryza sativa
cagctgagaggtcgcacccttccggctgctacttccaccgctggtacaagtcgtcccgccggccgttgcgcatgcacatcacctgctccgtcaagaaccctcactccgactccctgtacagcggcgcctccctccccgccgcgtcgtacacccaccgccccttgtatagctcgcaccctctcagattcttctactcctgctgctgctgctgctcaaattgaatctccacgccgctgctgcttgtgctgttaccccccaactccaagtccaagtcggaggacatggggatgttgatgacgcggaggtgttggtcggatgaacacctgttggtgttggtg

SEQ ID NO: 24619 - DNA, 369 bp, Oryza sativa
  unsure (1)..(369): unsure at all n locations
gaataagactcttcattcaattcccaaccaggaagattatctttctcgcttatgtgaggaaaataacaaaggagcaccatccctcacggtttgtctatgctaaatccttatatcttgataggatgtttcagatccttaagcacagtaattagcgctcgactatcaacattatattttctcctattatgctcactacaaattttgtgcagagttaaataccaaaatgctgacgcagaggttggacgagatatgtaacgaatcgtgaaagcttaatgctgactagcatgacagtgagtgtgatgcttgattntcatgaacagctatgagtctaaggcggctattccctggagtcatggcgtgacataactt

SEQ ID NO: 24620 - DNA, 452 bp, Oryza sativa
  unsure (1)..(452): unsure at all n locations
agcttgcataaggcgtggtgccactcgttgctntgctgtatgtttttgagtttcattcgatttattttcactgttgagtttgtgggtatatttctctacgagaaaatgcttgggaagtgagaaccgtgtatggcattgaagttgaagtgggaatttttgttcaatacaaacggcaataaaaataagaggaatttaaagataagcttcggcttgtcaaaatgttgagttagtgaaacgagtccacattaatcacgggcgaaccgagagagtcttcatcgatcggattttcatccatgcatcccacgattgcatcaatctttcctactcctctctctcagcttcatgttacgagacattntagtcaaactattttagttcgactacagttatagaanaatataataatttttataatactaaattatgtttctcaaatcaattattaaatatat

SEQ ID NO: 24621 - DNA, 353 bp, Oryza sativa
  unsure (1)..(353): unsure at all n locations
tcagcgtaaaatgtgtaaaatttcccagacagctttgttatctccaacaaaaccaataaaaatagccacaactacactcgttaatagctccaaaatgacccaacatatcattagtcagtactcagtagtagcagctgggagattagaggatgacctgaaggttgcgaggctaatctgcaggtacttcaccgccttggtcctggtgatgtacttcgccgcgttcccctccttcttcttgccctagagcattcaccaaagcagcggtgagaggctccgcgtacaacaaggagaggggtattccgcgggaggaggcgggatgaatacagggttaattaccgcangccggtaatgct

SEQ ID NO: 24622 - DNA, 442 bp, Oryza sativa
  unsure (1)..(442): unsure at all n locations
agcttctccatttcaatgtatcttatctttactccttgcaaggcttcggagacgaaataaactggtttctggcctgactctgtctcttggacaagggcagcactgactaccactggcgaagctgccaggtatagtagcagttcgcttcctggcgccgggctgatcaaagcgagcagactttgcagatattgctttagcgcatcgaacgctgcttggcattcgggtgtccaggtgaattttcccgtgccccggagggtcttgaagaagggcaaacctcattcggctgcctttgagaggaatcgattgagtgccgcaattcggcctgcgagcttttgtacttcacgtactgtcacgcccggaatttctaatccaaattcccaacgcttacatgtgtgtgaaccctcgtccaggaatcagncgaggcacacaataacaaattgat

SEQ ID NO: 24623 - DNA, 468 bp, Oryza sativa
  unsure (1)..(468): unsure at all n locations
tgcactatgacagtttgtaatattgtgcagttggtttaattacgataagactgctagctactatcataaacatgaatgtcacaaaatctggtactgttgtataaattgcgttcaacagcttggttgtcacaaaatgacttctaaaacagagaaatagaggatttaatttgtgttaggtgctttcaagcatgtgcaaattntaaagttgagaacttttcatatacctttgatgagttggagacattttacttgtttttatgcctatattcttgtgcaattagctatgtaaatcgcgtggtttactcacgtttgtttttttctttattacatgaagatgagatgttaatataatgatgcgtccaattctctgctttgtgatgcatggtgtccaatatttactcgagtctgaagtagatctacacgatcttgttcagagatcttccaggatatgatgctaggctgatatta

SEQ ID NO: 24624 - DNA, 445 bp, Oryza sativa
  unsure (1)..(445): unsure at all n locations
agcttgcgagcttttgccaagctcggtgtttgttcaatnggagctcgagccgagcttgaattgagcatagaacgagccaagctcaagctacttgtgaccttcgagctttttttgacagctctaaacatatcccagtgcaagcactagaagataatgagatcgaactagagcagcaagatgatggctccttgaatatgtcaggtatgactaccatgaagatagctaaaaccagtaggacgaactaaatgtttatattgaaaaattgggctcagctactattgttcttgtttaattttataggtgagagtgctaaagaagacaaactttaacacatccactactagagaaagcggttttgctcccggttttgtaacccctatactcctaattntacaatcgggagtacgaatccgggactaaagattgatatctntagtctcgggcg

SEQ ID NO: 24625 - DNA, 445 bp, Oryza sativa
  unsure (1)..(445): unsure at all n locations
agcttggcgcacacgaaagagtgcgagagtttagaagattacacgcagaacccnctacctggcgcgccagatgacagagtgtggggctcctcaccgggagaccgtgcaggcccccctttgccggttcggccgggggccctgggtgagattctaagctcctggtctgtggaaagctcgcgagagtggaaacacaagacacgggcgatgtatacaggttcgggccgctgagaagcgtaataccctactcctgtgttttggtggatctgtgtatgaagaagctacaaagtgcgagccatcccccgatcgttctgggatccgaaaaaattnttcttctaagtgggcaagggcctccttttatacctcaaggggataccacatgcaccatctctctctttnttgtgggacttatcctatctattcataaacagacggagacttgtatggg

SEQ ID NO: 24626 - DNA, 198 bp, Oryza sativa
ctttgtccgattggcccattggaagacactttccctcttcctggtgatgaactatggaggattatggtattaaaataaaaggaaaatgccattagaaattcgggcaccacattaaccatgtctgaatctccaagcaccatcaggtcatgcgttcacacccttttccaactgtcattcaaatcatcagagttgaatact

SEQ ID NO: 24627 - DNA, 350 bp, Oryza sativa
gagttcattttgtcctcagaaacactgcgagttggagattctcagcaccatacggtgcttgcaacgccttgcaagttattataagatgtgaaaggaagattatacggagattgagctataaaactcaaaagaaaagaggcgcttgagaaaaaaaaaaactttgttgacccgaagaatatgacaccttcaattcgggcctctataaggtggccttttcgctttacaggcactcactacctaaagaaaataaaaatggaagtccattcttgtcagcaccgtttgggttcattgctgctactctcgtttggatgctgttcatcagagcgcatggatcacgcaaggttagcaac

SEQ ID NO: 24628 - DNA, 387 bp, Oryza sativa
  unsure (1)..(387): unsure at all n locations
actgcangtttcgaagatttgttctatgctgtgtggtgtcccgcttaccagagctagtttaattacctaatagtagtaaaactagcatatactccctcatactggcaatactctgtaaataaagtctgttagtacagcgacacggcctctaaactcatctttgctttttattctattacaaatttattgaaagcatatatggtacttttatgatagatttttcaaacaaatctaacatataattttacattctaaactctcaaacttaaaaacttaagattattcatatttattatttcacgttcgactacacattattcttactactttatagtatggagaaattcctccttttctcacaaactctagactataatctgacatttt

SEQ ID NO: 24629 - DNA, 466 bp, Oryza sativa
  unsure (1)..(466): unsure at all n locations
agcttccacanagtaacagggagcaatgtagtcatccttcttgttagtcctaaagtggatgcatgaaatagcatgagagctgccagtatctatagtatctataggagcattcctttttttccaggttgaatgtgaacctatgatcatggtgcttaacctcaaagctgtcatctccattgcaaattgcatgacagaaagctgattcattgatgtacatattaagttttttaagtattcctaggcacacaacagttgcacacttccagaatttcttctgcaattgcttgtcaggaaagtgtttttttcaattggcatatatatgcctagcacagtttctgtgttcagcctcaggtgctcatttccgcacagcattaatgataccctgtaattgaagaatatttttaagtcagtaacatgtattcaggtctcaatagcagaatggtcgaaactcaagagtagtaaacat

SEQ ID NO: 24630 - DNA, 466 bp, Oryza sativa
  unsure (1)..(466): unsure at all n locations
caaccggcattgacctattctaatatatgtatgctaactaaatagntatttcatttttatttgttaaattagttactttgctttaattttaaatgtaaaattaatgtgagtgtgtttttaggagcttctccatccgctttgttgtcaacctatctccttgatactccatcttaaatatctaacatcaattgtggtgatagtatatcatttgagtttttttcttgattatttgtggttgatgatgttagagtttaaagacacggcgcacatgttgaaaatnttggacagatgagttccataacaattatttttccaatgttaatttgatgtgtatattggcttgtgtagggaacttgtacatatttttgtctaatatgtgatatgaatcttaacaggtaaatntgttgatctatactgaaacatatccatanatttctacatgcgtagagcttggatgctactaaat

SEQ ID NO: 24631 - DNA, 291 bp, Oryza sativa
  unsure (1)..(291): unsure at all n locations
agcttagtcctacaatttgactntatatattttgcaatgttatttgatttggcatcaaacaggggattagctgagcctttggacctcgaagtccccaaaaccatcaaattagtcccctaggaaggacagacaacggcgaccatggacgccgccgcggccgatctctaagcgcggcagctgcggattctccgccgcgtcgcggacctcgagctcgccgcgcagcaacaccgcctgggggcgctatctatctccgcggcgccctcggggggcgaggcggagaccggcgccacg

SEQ ID NO: 24632 - DNA, 444 bp, Oryza sativa
  unsure (1)..(444): unsure at all n locations
ntatgttggttcaagtggaagctttatgttggttcaagtgatatattctgtggttggtacttgaggtttaaatataagcataataaaagaaattagtgggcaaagtgtgcattggataccatgtcaatgtccagaaaaggcaagttaaatagaacagaacaagcaataacacatattccagctgaaagttgatgcatgcaaacataaaggagatttacctgtgctctgcatgcaaaatttcaaaatgggctctttcggatggcctttcacgaatagacattgatgatgaaatcaacatggcgacatcgctgtagaatttgctgccaacaaagtacatatagtacgatttctcaataaatgaaataacttcacattnttattattagaaccacgccaaataaaagtgcttattagatcagttaagttttcaatataatatttcat

SEQ ID NO: 24633 - DNA, 435 bp, Oryza sativa
agcttgttgcgacttgccttatatgccttatctatgaccttcaatgcaaagtaactcctagtaccactcaattctgagagatacaccctgccaatatcttccgaacctaacttcttaagcaatctagaatggtttaaaccaagaatgccatccttggttttgaccgtctggatcgctttccaccttgaatcattccctttgtgcggctttggggtggcgctgctcatgctgctgcgtgagctctcatcacttatgtcgctgctcgtgctcgcgcgacacatgctgctctttccactctcagtgaaattagccctgtcacttgtcttatcactaccactggtcttccttaaactattcgtcccatcactcactttagcagaagcaaaactatcgctcgactaactttctgtgacgcttctttcctgattccattac

SEQ ID NO: 24634 - DNA, 279 bp, Oryza sativa
cctgcaggcgggaaaagatgactactcaccttaaaccgctatgatgagcccacaccacactagctgcgggaaccgctttggctgacactgaagacctacaatatactgaatccctaaaccaaagacgctgggccttactctggtcagagcacgcctcaacatgcaggtgagccaccacaattttagtgacagccatgaggctagcattgaacatgatcttggggaggaccaacgtgctcaacacataaaaggtgccagcacggtacttacagttatgaa

SEQ ID NO: 24635 - DNA, 464 bp, Oryza sativa
  unsure (1)..(464): unsure at all n locations
cggatcttaagcacctcggctgcagcttggaaggaggtcagcgaaagcctttctagcggcggtagacgtggtcatcgccgcagagtcggcgagggtgggatcgctgggagcgccgtgcatgtggagagtgttgtggaccgtgttggcgatggcctangaggcgtcgtcgagggtggatgattgtggagacgagggctcagactgtgcagccgtcatgacagtgaacatgggagagagggatggagttttatggcttggtggcggaagcaaaaacaactgatacgatattagaatgagagaattgaacgcgataattctattgatcacaaagcgtgtttacatatagaccgataaccactcaaccgatttataaaaacagaatcgggagaatacggaaagcgtatcaaccacagaattaacaaaatggaaagtatatctctaacnaaacggacaccttacctaca

SEQ ID NO: 24636 - DNA, 488 bp, Oryza sativa
acacttaaaactcagctctcgtacctcaggagtctcatcctggtgaggggtgacatacttctccttaaacttcttctcccccagtaccagatgggatgtcttgatgtccctgttgaatatgcccctcgatgccaacaagttcagcaccgtgcaccttggcaagattcgcttatcgtagctgaaggagagaaccatcgggctccttgcgacataatcggtggtccacctgagcttcttcgcgagaaactgccagatgagcttcaccttgtcattcgacacggacatgcagtacgggtgcctcacaaacgcctcaatcacttgctcctttgtccatcccaagctcaagaaattgtccatcctgcccttccatttccttggatgcaatctggcaaagagcccgaaggaatacgggaacattccacaggaaggtctgaccccgagctccttcatggcagacaagctcttctcgaagctggaggccctatgca

SEQ ID NO: 24637 - DNA, 424 bp, Oryza sativa
  unsure (1)..(424): unsure at all n locations
agcatggagcagnntgtagttgatctggtttgtctcgcaagcagcgacaacacactgcatgttccgagattttgctctatgctggntggtgtcccgtttacgagagcaagtttaattacgtaatagtagtaaaactagcatatactccctcatactggcaatactcgtaaaaaaaagtcgtttagtacagcgacacggtctctaaaacacaactctgactttttatttctataaaaatatttattgaaaagctatatatgtatacttttatgaaagtatttttcacaacaaatctatacatataattgttacattttcaaactcaacaaacttaagaaacttaagagttattcataatttatatttccagggtcgacttnacatcattctaaacgatntatgagtatggaggaaataccctcca

SEQ ID NO: 24638 - DNA, 464 bp, Oryza sativa
  unsure (1)..(464): unsure at all n locations
cttgctcngtgatggcttgatcagccacgaatgagcctattatgccaagtgatgagtaaaggacgaggacagagatgggccgtagtgggtttctagcatgacgaattggaccgtagtggtaccgcttcaggctgcttctctctctcccatcgctattgttcgtcttccccagagctccagccgcgccagtatggaaattcttttggaaaaattggagggtaggctagagcataacgaagctacctgctggattcgccactgtagaagatcgactcacggcgtatactggtcaagaaattctggaatgtcggctcaatacgaaaatacatacgggcacggtagctgaattgtagtttcatccatctaattacctcgaaaatacatatgggcacgcggtagctgaattgtagtttcatccatctaattacctagcttaagtagatanattagctcacaagctgtta

SEQ ID NO: 24639 - DNA, 349 bp, Oryza sativa
aacttactaaaggcgcgttgtaatacatattcttattaacagaccctcatgaaatacagctgaacattcattcacaattccaaatagctaatataaggaaattgattaccttatacagcatcccatatccgcctttcccaagaatattttgagaactgaaattgtctgtagctagccttagctcagtggtactgaagacatcatgcccgccaaatatgttgtacagttctgcattcttccagacagatgagagaataaatcatttggaaatttcatgtctaaaatactgttactaataaacataccttttttctgttgtgccattggtcttctcttcttaaccatcata

SEQ ID NO: 24640 - DNA, 454 bp, Oryza sativa
  unsure (1)..(454): unsure at all n locations
tcatctcagactngancgccagaagagataatgtgttttttttcaacagataacatgatgacaagactgggtgtcattcagtttcttaaatattatgcttactgaccaattgtagtttgcactcagtgatgattgctggctcggagaataataatacggaacagaagtaagaattntcattggcatcaacctaatacttggtaggacacgacagcgaagggtgacaaagcaggtcgaagaagatgaggataactaggaagaaaacatatcttctttttcagaggaagaaaggtaccctacatnaaaaagctgtgtttaggcttccactattgagttaacctcggttcttttgaagttggactataaacagaatgcttaacagaagtgatcagccacaattgggtccagcctaccagtgacaacgttggccatatgacaacagactactgtttac

SEQ ID NO: 24641 - DNA, 457 bp, Oryza sativa
  unsure (1)..(457): unsure at all n locations
agctngaagncctgtcatggaagctcgatatacttgggcaactagatattcgattttgtgaaaagctgaaactagtggagtcatacgaaggatccttctcatcattggaaactgtctccattgtcggctgcgagaacatggcatcgttaccaaataaacattcaaatactccctgtacaaaaggtagtgcatgattgaatcctttctgtattcaagtcaagaggaatttcataatgtctatggcggccgaaaacaacttatttttgcatcagtaatttgtatcagggattgttctcttcagaggtacaaatatatggagatatctactcggtactgtctcaattttcattttccctccaaatgtggaccatgatgtggactatggaaaaccaagaacataatctntcttctgctgaattcttcacatttgtctaggtaaatgacgttgacatatgtg

SEQ ID NO: 24642 - DNA, 474 bp, Oryza sativa
  unsure (1)..(474): unsure at all n locations
aactcagctctattgatacttgtaagaagatgttccgttcttaataaatactttaaagaacaacaacaggattaatgtttcttagttgaacagagcatgagtcacataataaatttaaaggagagttacatcaaaatacgagctctacttcaagcccttaaaataaatgccaagcttcttttaaacatctaaataagtagtattaaatttcttatcagatgaaaaataactgtgctagtatttcatgttcaaatagctaaatgaggaaggagacaatcaaatctgagcgttccttactagctggatggttgcattagttgctactgctaaagatgtagttactgtagtgactgcacctgattccaatccgtgcaatggattggacggacgggtcacacatctgcgtactacaaggttngttctgatttgctcacatcaaataagcgacagttgagttcaagctaatgcatcttg

SEQ ID NO: 24643 - DNA, 447 bp, Oryza sativa
  unsure (1)..(447): unsure at all n locations
agcttagccaaactgttatgactcttccttagcagcaaagcaccaagtcctccccctccattgaactggcccgcgctttatgacctcttccatgtgttgtttactctgaatccatctagagttaaatgcactaattgaggatatcttcgcctgttactctctatcatgcagggaaccatctgatattgatccgactagcaagtcagaggacctctacagcgacggtgacagggacgcctattccaaccttcggtggacgcagaacacgagttcgcctcaagccttcaaagttcaacctcaccggcatgcagtggtacaacacactcagctntctttcttctttntcttaaacatcacacttcgctttgattngtacaatatcactgcatgggattctaattcacatactatacnatctanatggttggaggcgagctggtctttgga

SEQ ID NO: 24644 - DNA, 373 bp, Oryza sativa
ctatgatactcagcttgcttcaagtgtcaaacgactgctcctgtgtctttttccaatggaagaccacccctttctttgtcaactcgttcaatggtgcagcaaaagtactgaaatcttttacgaaacggcggtagaatcctgcaagaccaagaaagctcctcacctgtgtgatggtttggggaaccggccaactccttatggcttcaattatcgactcatccacctcaattccctgtggagtaacaacatattcaagaaaagagactctgtccgtgcaaaagatgcactttttaaggttagcaaacaaaagtgcatctcgtatagcattaaaaacaacacgtaaatgatccatgtgttcatccaaagacttgct

SEQ ID NO: 24645 - DNA, 177 bp, Oryza sativa
agcttcgcgtcgtctgcgcgtgcctgttctttctcgtgctcgttcgaagctgtcttcctcggcgacagcgctggcgccggcttgtgagcagccgccatgttcgtcttcttggcgtgatcagacgcggaggcggtcttggactgtgtcggcactgttgtttgagtctctttctttcta

SEQ ID NO: 24646 - DNA, 465 bp, Oryza sativa
  unsure (1)..(465): unsure at all n locations
tctagcggctngantggctagatatcattcttctttttatacttaatgttgnatcagttgagtttgatctattaagtcgtgcttagattatcgatctctagcctgccttctagttgccgattaggatagcatcggagtttcagccgatcttatctgatataactatatttgttctatatgctttattgacatgttaaatctgccctttatatcaagatgttgctgtaactaagtatgctagaccttcgcttgatatattgtacctgctctaatatcctgatatagagtagtatcggagtattagccgatacatgctagatcaatctgatcggctacgctataaacatatatagtcctgttattgatatatatttcggtctaagtggtttatactgtctncggcatggcgaccgatctatcccaatcacttgatttanatatatatcgatataaggagtatatatc

SEQ ID NO: 24647 - DNA, 456 bp, Oryza sativa
gcttgtccatctgttccattattgggctttccttctgtattcaggcaaattggtgggccgctattgatggtttctttgggccgacattgaagtttcctttgggctttcaaatgggccgcaatttatggtttctttgggccgacatgacgttctctttgggctttagaatggcctcagttgatggtttaattgggccaaagttgacgtttattcgggctttcaaatgggccgctcttgaccgttctctttgggcttcgtgataggccgcgtattttcaccggaagcccgtatagatggcttcaggcccagttcgtcaaacacacaggccccagttgtactggccatcatggcctttcactgcacaccacatatatcctattaaagtacagtagtacagtgcattagcatgcggatcatcatattgccatcaagcaaaaggtcattcacctgcccctc

SEQ ID NO: 24648 - DNA, 382 bp, Oryza sativa
  unsure (1)..(382): unsure at all n locations
cgcagctgcagcttataaaaagaaatctcagtattttcactttataaccaaanacgaaaaaatgcttctatttattttctgtcacactatttattccctatgaatcacacatgaatgttgttntggacatattcacaatcaaactttacaaacattaggtatcaatatcttttaaaatattggataaaatagatggaattcatatgaatataattatttncatacgaatattcaaaatatgatttgttcaaacagaaacttatggcaaaggttgcattatcggagactgtgttgatgtgccctgaatctcaacaatttgtgatctacacgctccaagcatcataagaaatcaacatacaagtgcgcgaaatttatagaaatt

SEQ ID NO: 24649 - DNA, 447 bp, Oryza sativa
  unsure (1)..(447): unsure at all n locations
agcttaccatgaagctttccatcgncctgttctgcttcctcttcttcctcgcggcggcgaccaccgcctccgcgcagtgcacgttcgagatcctcgtcaagaccgacggtcggaggaacgccggcaccgacgcccgcgtttcgctgcaggtgcgcgccgccagcgggccgacgctgacgatcaccaacctggagtcgtggggccagatggccgccggccacgactacttcgagaaggggaacctcgaccggttcaggggcgccggcgcctgcatgccgtcggagccctgcaacatggtgctcacctccgacgggtccggcaacaagcccgggtggtacgtgagctacgtgatggtgacgcagctcgggcaggggagccttccgtcgatgacgcaccggtgggcggtggatcagtggctggtcattgacgaggcaccgcacatgctca

SEQ ID NO: 24650 - DNA, 431 bp, Oryza sativa
  unsure (1)..(431): unsure at all n locations
tcatgttattgggtattggatgtggtatatgtgatgaattgttgagtgagnttggtgtggtattgcatgcctccacaatgtnaccgtttataggaggcagaggaggggtaagggcaattgcactacccaatggtttgattaataataattctgtgacttgtgggatgcgctactgtgagctctgactgggtgtgtatattttacgagggatatgtggaaattaaaatggtctggccacgcgccttatcttctcgtaaaattagatcggtggccgccattctcaattgactaaacgcaccgacacacatgtgtacccatcccctctctccctctgtcttcgtcgtggcgaacagtgaaatgcatgttacataatgaagagaactgttttaacataattagattttttttctctgatatcattactcaatata

SEQ ID NO: 24651 - DNA, 458 bp, Oryza sativa
  unsure (1)..(458): unsure at all n locations
agcttgtaagtagggaagagtcttgagactacttccctaaaatatacttgacagattcaccgtcccttctaccttcgtaatccaggcacgcatgctccatcaagggcacagaggaaagaaccattgatatgcatggccctctgtatgtaaattgctgcaacttaggtgcaaaaagctccatgtgtgtaatctgaaggcaactctttaccatgatttctctgagctgcaaatgaggcgatgcaatcttgagatgtctagcaccactgcaaagtctaagacggaagcattccagatttgggcaattntcaataagtgtctgaatcatgtcttcagaaatatgcatttcagtaaacgatagctcaaccagagatntgaacccagcaaagccgacaggaatactganggtgcactcggcaagtatgagtttccgtacagataatcccttaccatcagcgaac

SEQ ID NO: 24652 - DNA, 406 bp, Oryza sativa
  unsure (1)..(406): unsure at all n locations
gataaaaggctaaggtagggtttgaagtggatggcgcaaagggaaagacaacaagctggcatggcatggcatggcgacggtcatacggccaagcgtcactgggcaaattgcaccactcaaaaacagccgctctatagtgtcccttgtatgagccgcgttataagctcgtttgtttttagaaatacagatccgtatttgagtcggattntaagtccattctcttatgtaaatacacaaggagtcgtataataaatctcttaaaaaaacccgcatgctaattngagatgatcggacttctaactacaactcantaatttatagaagaatatatattcaagcaaaatcttatatgtgaattcaccttaactaaaccgtataataataataagaattaaataatcttaat

SEQ ID NO: 24653 - DNA, 388 bp, Oryza sativa
agcttaaaagagaagatctaagttttatttgctaaatctcaatataaacatgggctagataaaattttattaaatactttgcttgctcctctattttctagaatattctgggaattgtttgagcaagggaagtatttttaataattgaaacaacatttcaccatttattttaattaaaaagttccaaaacccctccctaaagttgttgggccgtttccggcccaactcttctcttcccgcgcgcggccaagccggcccaagtcggtccagccgagccgccccgcccccttcttctctagccaccgacatgtggggcccacatgtcggggtcattcctaaccttcagccggccggccgcctagccgagcctgagcttgcgcctctctcc

SEQ ID NO: 24654 - DNA, 448 bp, Oryza sativa
  unsure (1)..(448): unsure at all n locations
tnctcgacgcttactctggctaccaccaaatcagcatggttaaggaggacgaggagaaaacagcgttcatcaccccgttcggagtattttgctacgttaaaatgcccttcggattgataacagctggcaatactttccaacgcacggtccagggcgcacttagcaatcagcttggcaacaatgtcgaagcatacgtcgacgacatcgttgtcaaaaccaagacaagcaactcattgattgatgacctccgggaaacgttcgacaacgtccgacgatatcgtctcatgctcaatccagagaagtgcacgtttggagtaccgtcgggaagctactcggattccttggttctggcagaggaatagaggcaaatcccgagaagatcaaagcaatcaagaacatgaagtctgccacaagactcaaggaagtacagaagctaaccggatgcatg

SEQ ID NO: 24655 - DNA, 431 bp, Oryza sativa
agctttccaaggcgcataattctgcacgcattaatgcccaacttcgggaggagcttaaagaagagcttagagaagagctcactgccgagccgttaggtatggaggctcggatggaggcacgcatcatggataggtcgaccgatgccactcccggtcccgtagtacaagtgagccccacgcagaggcgtagcagctgcgcatcaactgagactccggcagaacagcctgaaggccccgccgcggtggaccacataacggttaaaacaacttaataacacatatattatattagcaccacaatacattgcaacatatactaaggacactaatgaatcaatcgcaggaacccacatcgtgtaccctagtcgttagggtgacaccaggaattgcaattcctaccgcagagggtcaagcattcaagcctaccccga

SEQ ID NO: 24656 - DNA, 392 bp, Oryza sativa
  unsure (1)..(392): unsure at all n locations
tgccatgtataagatcaatctntatgtcagacaaagtattattgaaccaaatgccgatgaaaacaggtagaaagttaaaagtgcagatgaacaggtgataaaacatgcatcttggatacctagcacaagcaatttggattaaagtttgagaaagaatcttaatatattgtccacagtataccctcttttggtgatttactcttctacaaattacaacatatacagaaatacgggaaagcatctgtacatttcacttctctattcaatcttattacaatgcaagaacttgaatggataaacaaatactaagtaaacatggatatgaataccaaccggacatctgcacatncacctagctggtgtatattgagtttatgcttcaaagtacagca

SEQ ID NO: 24657 - DNA, 454 bp, Oryza sativa
  unsure (1)..(454): unsure at all n locations
agcttatccgggaattatgagatgctgcattgctctgtcctattttatcgtcctgcgaaggtttgcccaaaggtagtgaaattgaagggaagagtccaagaaaaatttacaggcattctgcctccctgagagagactgataccaaaagtttgagatgcaacatactaaatttatactgtactaactagtttttgactacggcatgtaaaaaacattttagctggacagaagtcatcaaattgctttagttttgccctcggtacagaggtagaatagagttcttaaactgcagtatttctgaagcacaaagagtacggaattcagaactgatgttgccctttcaatgagtatactccctccgtactcataaaagaagtcgtttaggacaatgtntaagttaaaccttacatatatanatcattaataantttgaaatataaaaattacatgaata

SEQ ID NO: 24658 - DNA, 452 bp, Oryza sativa
  unsure (1)..(452): unsure at all n locations
tcatctttagttccggttggtaacgacttagccacgtggctggcacaaccatctttagtcccggntaccaaccgggactaaagatatttgtttattttttttaatttggatgtgctgcctactgtagaaatgtatagtatagaaatgtatatattacacatatgtacactatatgtatctatacatatctatacatatatatatagtgtacacatatatatgcaatgtcaatatatacatatgtagaaattcatatgtatatacaaatattatacacttaagaggccatatacatatattaacaaaatatgagtttgcaagtaagtaaatatacacatatattaccaaaataagtacacaaaagtaaatgcatgtgtgcatatataaatatatacatgtattacgaattcttcggactttgtaatcttgttctgtactacgacttctggcat

SEQ ID NO: 24659 - DNA, 426 bp, Oryza sativa
agcttattagttctcatacttcaatgctttatgagtatgctttgaaaactgctaaggaatcattatatgttaaaaaggtagtccaacttactttcaggaatgcgctcaaatgagcttgacattggattccacacagatcatgacttgcgtcactgaaagaaccatgaaaatggtcacatggaagattatgtggagcaaagttaacactcagcatcgctagttgaattgaacttacacaatttatccatcagctgggtcaagctcttgcaatcctcccataaagtacagaaattaggtactcacgagatcagcaacaaaagagactgcgtgggcacatatcgtaatatattgtgatgtcgctgggacaatctttattctcaagaatgaaatctttgatattgtagtcgctatcaaattgatgaatca

SEQ ID NO: 24660 - DNA, 399 bp, Oryza sativa
agttagcacaaggcaagtgcattatgcttgtgctaacattgaacataatgaatatgtgcagtccaatgtgcattactacttaaatgctggcagtaaatgtgcacattggtaccaagttatcaaatattatcaggagtacatgttacaatgggccacacatctgacagaatgaaagaaagatagtttgaacattgtaaacataagataaactgcatatattatattcttttgagatgaacacatttttgttcattctctctatatacatcacaaagaaggtgtgtacagctagttgaatatgtattaacatgttcataaatgaccctagtatgcgcagaccttaggatttggtcagaataacagatgtagagagattttctgaggactagttactggcct

SEQ ID NO: 24661 - DNA, 433 bp, Oryza sativa
agcttgaacagacaatattttatcctctattatcatcatccagcaagaaacaaacatacgagagaattacttaaacttcaggtgacacaaggcgcttgcgccatggagttgatggtaaaaccttacgagggcacgaggcccatgagaaaacattatgagggccagtaagaaatagtgtttcatggatcaatgtaatcaataaaataacatgataatggtcttaggcagaagagatatatagctaataggtaagttcattctcagctactcaaagaggaagatggttaacatgttgcccttcagaaaactgcaaggcaccatcgttcctttcacaaaactgtgacttcatgccaaagctcatctggtatggcacaatgctctccttgtacatgatggactcttcattaaagcacatcgtactcttgtgcagacg

SEQ ID NO: 24662 - DNA, 441 bp, Oryza sativa
  unsure (1)..(441): unsure at all n locations
gcatgccaagctaagagagattattttatcaatagannaatcatctaatgacttaaacaattgatgctacataaactaagtgaaaatgaactatataaatatatacgatattataaaagatgatggagagatatattgaaatattatatgaattaattatgtgtgatgatttaacatgcttacattttaaatctttaaactttaataaattattaaattatagataatatagtatatttgcatgatgattaaatgtaaaaattattatggaatgatgatgtggcatctctgtatgttactaatatttaataattggtgggctatactttacactttacagtaagagagtaagagaggatatgtggggaacacaaaccatataagagccaaactagtttccaagacggtaataccgtatttaaagnttagcaccacacaatt

SEQ ID NO: 24663 - DNA, 438 bp, Oryza sativa
  unsure (1)..(438): unsure at all n locations
agctgtatcactgcaaaaattttaatatggtacctcgggtaaggaaaaatttggtttggaaccaaattgtaccaatatgataagagagaacatgtgggcaatgcaaaagatctagcacattggtcttgtttagcacacatcaaacttgaatgttctcttgcctggtttttctttctagcttcagtaattattagagttacagatgctggtagattaagggtattacgttgaaacatttgtgttcatattttggaccaaaataaggggattaataaagctactttagtttactatatgaaattaatttctaaaagaattcaggagttggagccatactagatagggcctctaatgtgatatcggctaaaatgctgccttactcttgattaattttcaatctcctatttcaacatcatctnctcattaccttctttctct

SEQ ID NO: 24664 - DNA, 471 bp, Oryza sativa
tagcttggctagactcattagactacgactgtgatcttatttttcaccccatcgttgagtgcacctcttatcacactcaaagaaataaatccaatcaacaaatctatggttttactatcctattaaaaagagcaattttaccatccaatatttggtatttcgaggtaccacattttacacataaaagtttggtatcttgagataccaaactttacactagaggtaccaaaatttacactagaaaatatgccgatgtaccaaatatttgtggtacactatgatttgtggcacctcttatgcactcaagcatacataatatttgtgcacactatgattcaaatctggtgggtctgtgggtggaattatgggatgcttccccgttcaaaggaatatttttgttatgaaaggtttaatcattaattgattacatgaaaaagaatctctatgttatatagtactacgagtatatgt

SEQ ID NO: 24665 - DNA, 441 bp, Oryza sativa
  unsure (1)..(441): unsure at all n locations
agcttcgcccgacccttgcctggtctggttctgtcaccccttcgccatgtggtcaggtttgcgcgtctccttccttatcctcccttgttcgtgagttaaacattggtagaaaaattgaatataatttagtttgactccaaatgaaaattgaaaacattaactctcaacaaatagaattttcctatgattgatcatgtatgctttttattcttgctagcactcgtcacttgtgaacaaccatctatcataaggaaccttgctcatctaagtaattgatatatgtgatatggttatgataaaagaaattcctgtccagctgtcatgatacttgggaattttgtttgtgaaaattaaaactttntcgagcaatacttctnagtgactatattactacctaccatggctatatatgattatcactgcacaaaccttgatatgtat

SEQ ID NO: 24666 - DNA, 377 bp, Oryza sativa
  unsure (1)..(377): unsure at all n locations
ctcagcttatactctgnccgcttgagataagagctactgtggttggttctagtgtgctcccgggtgtgaaaaaaatatcaaaaaaaaagttgtgcctctctcctcagcactagagagagcacgccaaaaaaaaaagaggatccagcgagcacaccacaccattccccctttgtcaccaccttctaccaccgggtcttgttttcgttgctgtttgggtatgtgttttgtggcgtcctttgtgggtaggctcgcgtttctacttcgactagcctaggaccagcactgtacactatacccttgagcgataatcaatttgcttggctaacgaggctctaggttctcttgagcattgtttcagccaccaacagcttcccaca

SEQ ID NO: 24667 - DNA, 442 bp, Oryza sativa
tgcaagctggcaacattatgtttcttttttccaacaccagaccgagatggtgctgaggggcttcctctgattgtgagtatatcacaatgtcatcgatgaagaccaccacaaacttatccaagtattccatgaacactttgttcattaaattcatgaagaatgcaggtgcattggttaaaccgaacgacatcaccgtgaattcatacagcccgtatcgcgtggtgaatgcggtcttccgaatatcttcttcaccaatacgtaattggtgatatccggaacgaagatcaatcttggagaatacagtggcacctataagctgatcgaacagaacatctatccggtgaagagggtacttgttttgatggttacttcattgagagctctgtagtcgacgcacatcctcttcgtcttgtctttcttctctacaaaaattacaggagca

SEQ ID NO: 24668 - DNA, 363 bp, Oryza sativa
ccggcattaatagtagaaaccgcacaaatctgcaggaagctgctcttgagtcaatcatcagtatggaaaccataataacttgtgaaaatgaagctccgaagcacccaaaaagacccaaggttctggtcttcaaaagggttggcacacccaacactgggcgtacggtaaaggatactgcgaccgagaggcctataacacctgagagcacgaggcccggtgaatccatggaaaaagaatataaaagacccctacggctctgactgatcgagctgctaaatgctcgccatgttcttcaacgacagtaatataactcttatcatcgagcattattagtcctgatgattagtgcgctctacatacatc

SEQ ID NO: 24669 - DNA, 256 bp, Oryza sativa
  unsure (1)..(256): unsure at all n locations
agcttagggttcannaaatatatatatatataattttatatctaataaacataacttatttttgtagatgtncgtatatttttctataaactagcaaaaatacatgtgagttgcaacaggtgaagacaattttcataattgataaaaacgtttacaatttaaatgacaaactgaaacaaaacattataaaaagaaagtcataaatcacatatatgattgaacctggtgtgctcgcttcatgtgtcatgtcatcaca

SEQ ID NO: 24670 - DNA, 297 bp, Oryza sativa
  unsure (1)..(297): unsure at all n locations
ggtcaagttcttctctatgatacctaaccaatcttctgcctcatangctcgtctgccgtaacgaacgtgggtggcttggtcctcataaactcttcaaagctcgatccgccgcggttgccttggttatttgcaatggcttgcagaaattggtgttgagtggccataactacggccagngtggttaggtcaagtgtctgagtttcttcattgctggttgacgcccgacgtcggcttgccatctgtgtangccgattaagtaatatcctaattttctaactagctctaatgtttatccat

SEQ ID NO: 24671 - DNA, 240 bp, Oryza sativa
  unsure (1)..(240): unsure at all n locations
ggaccctaagcaccgcagctgcagcttcatcatgtatgactaatcgtgatctggtttctatgtcggctctatgtagtatgggtttacgagcttggctctgctccctgttctgaccaaccccgctttgtactgaattgtctccgtgacttaaatgtaactcgaattngtctccggtgacttaataatctttgaagttctcaaaaaaaaaaagaagccaatcttgaatgggtctcttatgta

SEQ ID NO: 24672 - DNA, 482 bp, Oryza sativa
  unsure (1)..(482): unsure at all n locations
agcttaagcctatgcaaatagcagattatattgttatcctctgatataacataaatgatgtcatattatgtttgaatgaacttggattgcctctgcaataaattgggaatgtatttaggaggatgaaaaaaaaagataaattgaagtggaggaagaaaaaatctattatttgggaggatggaaaataagataagaactgaagtgaaaaagaaaattgatgaaggagcagtattttgggaggagaaaatgatataattgaagtgcaaatgagaaaaaaaaagtttgagggaggtgaaagcccgttattcatgtatctatatttcattcacacttgaactaaattcgtcggaatgcattaatctctgcaacgtctggattgaactacgcatattgctgccttacatacattgtaatgttngcatgccggttgtgaactgaacaaatctagatgttattataactattccagcgctataaaatga

SEQ ID NO: 24673 - DNA, 260 bp, Oryza sativa
agcttgcgtacaccgggcggctataacgaaattctgtggtttttgatcggttttcgtcagaactgcgaaccatgctcccgagtccggagcgcccaatgcgttccacggcgctgtccattctcctcgtgtttgatctgctgccggcgccgatggacgacggtcgcgtccacaggtttgtaccgtctcttgaatcgatcatgtctttggtgccgtcttcccgagttcaatcttctgtcgaccgtcgcgtgcctgtgatttct

SEQ ID NO: 24674 - DNA, 417 bp, Oryza sativa
  unsure (1)..(417): unsure at all n locations
gcttccgactgtctgatgttggtcgtttacatgcttttctacatgtgagcacttaacttgttatgagatatgtgatgactcacttaactggatttccgtattggttaatctcctaaaaagtgttttcttgtattctggaaactaattatagctttgttcaaatggcggccaatggcctcgcaacaaaaagggagaatacaaggacaaaaaaatcttcccttgcaatccagatgctggagagattctactctggtaagtatatgctaacggttcaagctctgcctctgattattatgctaatatatcattgntggtgtngacaaatatctcttgatccagatgtacaataccctcagtcggatgacattgcagagtatgcaacatctngtggtttgacttacaatcangtcagaatat

SEQ ID NO: 24675 - DNA, 198 bp, Oryza sativa
  unsure (1)..(198): unsure at all n locations
agcttgngaaagatggggaaacggaggaggggatcccgtggtgtcgttttatagcctcgagagtcgacggtggggccggttggcgacggatttgaagggggaaaggggcgccggcgacgtgggtgattgggggcagtttggcgccggttttggaggggagaagtgggggaaatggtggaggaaggggatgacgtgggg

SEQ ID NO: 24676 - DNA, 401 bp, Oryza sativa
tgtacttccatgcagaaataagatgccatataatattatcacctattttcatattttcacatatacagcatgcatgcaatcatcctatctagtacatctccataaggtttgtgtgcatgtacagtcttatatgccaacgtgttctagaaaatgttacatatacaaatgttgcattcaaattcttgtgattgtctcggatacttatttatctatggagtaatacatgtcaatcttcatttgaattggacaagctcgtagcaggtttcatcccaaccgcatgattattatttcctgatcaataaaggaatagatagtccagtaatttctttcctttgattaacagtgtagatgacatagctcatgcactgacgtggtcgctcatcacgttggtgataattttg

SEQ ID NO: 24677 - DNA, 473 bp, Oryza sativa
  unsure (1)..(473): unsure at all n locations
gcagcttcgaatctacgttactctgtttcattatcttatctacaagcataccgtgttacactgtcgggattacaagaaaatgaatataaagtgactagtcacaccctaagcattaaccctaaacctctgagctgatgcataaagggatggaaaaaaacataattcacaagctgcctataaagaacatgaacgatcaatattttacaaggtaagactgaatctcgagcataagatttcacataggctcaaatccttgtgctattcacttgtgctgaacactaccttgttttcttgatgattgttgaagtgcgcatctcagcgtcttccttggcaatntccaccagagatatgtgatgggaatagaaatagcaacacaaaatacacggccatcaacatatccccaacgtggtggtatgtcataggtttccaagactattgagaatacgtttccaataatgacaaacaagatctta

SEQ ID NO: 24678 - DNA, 370 bp, Oryza sativa
ggatttcgttggtacctggcaataccagtacctaagggtatctatgctataccagagcatacctcttgaatgataatgtcttgggtgacggcctttcgaaaaagaaatgaaaatgggagtaggaaaaaatacatttgtatgaagaagtgtatttgaacacatattattgaaacaaatcaacgtatgaattaatatagacgtagcacatcatacatcatcttggtagaatagccacttcccacttggcaactgcgacggtacatggcgaagatacacggtgcggcaatacgaactgatgaacatagttgcagatacaagacgatgtacagtcatatgaactgcgataatgtggatgcacacgacaatctat

SEQ ID NO: 24679 - DNA, 468 bp, Oryza sativa
  unsure (1)..(468): unsure at all n locations
agctngcctttccgatatattcgcatgtaaattcggtgttacacgaagtggaaggaccaagggcgaagcgaaagagggcatttgcgttccggggagggcgtcgcgtatgcatagttccaatggtaagctgattccaggtacgcccattcctctacatcgtttgactatcaaagtcaggtcaaatgtaggtgagtgttgcgactcagtagccgtacctgttccacttgcttattatgggaatagttgattcattgtaaggttcaatcaggctgcctggctctacctatagtctaagtccgtccctccttcctacttagctctcctcacacgagaagcatatgccgcatgttgacaatgcgctaccgatgaaagaaagtaagtcaagccacccacggatccttctactaaggaaagagttaaagccgaagacaatcaatatacatcttcaaccaatccaatacatatact

SEQ ID NO: 24680 - DNA, 447 bp, Oryza sativa
agcttcactgtgttcttactataaaccataaattcttattcaattattatacttaaacgcccgatggtggacaacaaggggaaacggcactggcagatatgccccatatgtcagcatctcaaggagccgacctaccgtggttcgggacaacgtgtgcggtccaacgccgatccacgaaaccggtggctcgggtcggtcacgaaaccgaccaagcaacgctagggtttgtcggctcggctgccgagctgatgcaaacacggcgttggcacggcaagcagaacggacgggcgacacggcaagtggccggcacggtgcggcacgcgcggcaagcggctggcatgcaccggcacggcgcggcaatatgcggcaagacttgcatggtagcggtgcacgggaatggccagcatgcacgccgcaagggaccgacatgcacgcgcacaaacggga

SEQ ID NO: 24681 - DNA, 483 bp, Oryza sativa
  unsure (1)..(483): unsure at all n locations
atctaaaaaaaaaactttagaacacatttgtcacactgtctggtatgtgattatctattccatggaacttacttacacttcaatatccatcttagaactaacctataaaagccagtaatagggaatggaagtagaaggtgaaattcaagaaaaaactgtatgcagcaggaaaataatagtggtactggaatgtatcatttctgtactacttatatgagttggtggtgatgggttgtgctctacacccccaatccttcaatcaacctttggtgaaacaatcagcatagacgtgtgtcattntactcatttgtacttctattgaaccaataaatagatgatttaattctgttcatatgtatgtggttgtcagttgatccaagttaaatatcttaaatgtgaggatttctttttggcatttgagtaagccaacttatgcgtgtttatctgagattngttacaagagatgggcaaatatgctagttc

SEQ ID NO: 24682 - DNA, 436 bp, Oryza sativa
  unsure (1)..(436): unsure at all n locations
agcttgtttcagtgganaacaaccagcctagactgatatgtctgcactacgagatcctatgggaaagagagattgactcagcacaggtgattaaagattcttggtccagttcgagcgagaaatcagacttgggggacataaatcggtctctcgcaaaagtcatggcggctttgcgttcctggagcaaaacaaaagtgaaaaatgtaggtagagaacttgaaaaggcaaggaagaagctggtggacttgattgcttcagatgctgataattcccaaattcgttttgccactaaccaaatgaatgaactgttatacaaagaggaaatgctttggcttcagcggtccagagtgaattggctcaaggaaggagataagaataccaaattnttttaatagtagggcggtatggagagcaaataagaatagaatcacaaaac

SEQ ID NO: 24683 - DNA, 482 bp, Oryza sativa
ctacctgtgttgtcctgcgttgataccctgcaacgattcacctatcatctaccagcattaatatatatcgatctccaccgcaatcagagaaatgacaatgatcacaatcataactcacctggtggattgacgggtcttgtggaccccaatcttcagggtcctggtcaggccatgggatgctacctttgcagtcgcatactctgccttatcatccctggatgcggtagtcgccgtcctcgtcgtcgcttgatgagtcccgggtgaaccccctaagcccgtcgggttcttctttcgggaacttggatcatatgtcaccaaaacgtccttcacctcgccggatgtcttggaagcctccgggatccgtgtggcggtcgtggaccttgtgaccaccggatggcttcttggatgagctggccctatgctcatctgtggtagcgcgcttatttgggcgaccactcggcagtggatcgtcgacacgcctc

SEQ ID NO: 24684 - DNA, 478 bp, Oryza sativa
  unsure (1)..(478): unsure at all n locations
tctggcccagtatgtccatataactcactcggataagctgtattattgaaccagacaaaacaacaagcgattataccaaagacagattaagcgcctaaactataagacaagttagcttctccagaccatacaaatgcacggcgagcccatgcgaagggtttggttaagatatgccaaattccgccaaatacacatatgatacccaaccatacatgtcccccaattatatcttctatatcatccacactaacaatccaaccctctcccccaaaaggggattttagtaaataaccaaatataacaccggngctaagggtcaaattggtaatttttcttacatctcctcccccatgagcccaggtatcatatataccgccaaaataaagagctgtgagtactagaagaaaagcacctatacctaacaaaattaggtgaatacccanaattgtagtcattgtatttctatctttccacacat

SEQ ID NO: 24685 - DNA, 334 bp, Oryza sativa
  unsure (1)..(334): unsure at all n locations
tctgttctttgccacaaggaaccaacataattacagagtatttgcacgatgtcaaccggctcgggcgctacgctccttaagacgtgtacaccgatgccgagaagcatgagatagtcatgtcaagtcctgatgatgaattgaccattagatgatctccagagactctgangactttgagatgcttgtggacaatgctattcggnatgaggagcagcacaacacaatggaccgaaaatgaagactagtcagttatggtttccccgggaacatcaaagcctcgctcatgactgacagaagttcatcttcacatgatatctgcagaccttcctcacag

SEQ ID NO: 24686 - DNA, 451 bp, Oryza sativa
tagcaagtgtgagttctggttgtccgaagtcaaattcttatgtctcgtgatatctgctaaaggagtcgctgtggaccccgaaatagtgaccgccgtcactgattggaagcaacccaagacagtcactcaaattcgcagcttcttatgtttggcaggatactaccagaggttcatcgataacttctccaaaatcgctcgacccatgacacagttgttgaagaaagaagagaaatttgtgtggagcccgcaatgcgagaaggcgttccaaactctcaaggaaaggctggtttcctcgccggttttaatcttaccggatactcataaggacttcatggtgtattgtgacgcttcgcgccaaggattgtggtgcgtgctcatgcatgaaggtcatgtggtagcctatgcctcacgccagctacgggcccatgaatgcaactaccctacccatgat

SEQ ID NO: 24687 - DNA, 431 bp, Oryza sativa
  unsure (1)..(431): unsure at all n locations
agcttgtattaagccgtcacatcgagagttgtttgtataaaacgatgactatggtcaagctgcattaagtttctagtcaaccaaccacaatactacatgagtccagcaaagatcacaacgagccaccaacacatgacaacaatggaatcccttgacaactaatttgtgatgactaaacctcttttgaactctgcatatctatatattattattagtatcatctttatttgataagggccgaggagctccatatctagttaaaattattggaattgatattaatgttatgaacaaccaattaggtaccactatcagccatgagacatgcgctagtcgctaaagaanacattgaaaaaacaaanttcacataataattagtttgtattatctaagatctcaattntagtaggatatattaaacttgatgcatg

SEQ ID NO: 24688 - DNA, 319 bp, Oryza sativa
actcagcttgcattgcagcgggtcatgcccacacgctaccttctcttcgtcatggctacagtggccgctgccaccaccacatagacggtgccaccttctctaccacctctctcgccggtgtggccagctggctctctcgacaatacttctctcccacaggtgcgctaccaacccccctcccgccagctgcctgggaagaataagagagatgttgatggggctgatatgtgggccccacatctcttttattttattttgctaactaggatgccacgtcagcgaaaccaggtatctatactgccatatgacctaaattgga

SEQ ID NO: 24689 - DNA, 352 bp, Oryza sativa
cagcgccttgatggttcggataaactaatggtatcctgatctactgctactgcctttggctgataaaatgatgatgaatcaaaaattatggacgataccttcagcagagtttgtgcaaatgctgcatctgcatgccccttctctgcacacctgaagtggaagaagcaagctcaatgagtggaagaagcaagctcaatgattagaagaacaatttatatgacgagatgcacaatccatatcaccaccatgagatgtagttatctcacgaatgtgattaaacgttgcatgtaatagcagtattaattgcgaagagatggatattacagccgtacatgtatcaatttttaacata

SEQ ID NO: 24690 - DNA, 368 bp, Oryza sativa
agcttatgggacgaacgggatcagcgaggcctattaatattatatgagcaaacttcacaaaactacagatactatgaccaaattatcataaaactacagatgtaactcggtgtatcacaaaactacacattgtacaccagatttgtcacatgacttcacatttgagatgaagtgccacacaactgcatgttagtaactaaggtatcacggaacttacttgttagaagtaattcaatgacgaagcacatgatgtttatagctccaccataacaatggtgctagggattcaaactacaaaagtggtatttttgtgacaagctcaatattatatatgcagttttatgatacttaatcctaaatctggagtt

SEQ ID NO: 24691 - DNA, 291 bp, Oryza sativa
  unsure (1)..(291): unsure at all n locations
atgttgttacactgcacaagagggttttactagtctgcttacatgtgactgatgatacttgtttttggagagcagtgtcctatccacaaggcaggcaggtctaccaantgctgctcatgtagggaacattacttctactgaatatagccatgctgaacactgtctcactgatgaacaaatctgtcctgtatcttgatatggtcccggtatcgataatcttctgtccacctatgaacatgtgatatatatgtgactcagagaaagatcttcaacaccactaaatgttttaaa

SEQ ID NO: 24692 - DNA, 484 bp, Oryza sativa
  unsure (1)..(484): unsure at all n locations
atgcttcgcctccatggcgacgaacacgccgtgctgcatcagctagcgcgcgctagagccacaggttgaaccgaccgacggacatcagccgcacctcgagctccaccagccgagcgcagaccgtagcacccacacatccgcatccggcatccgcattgtctctatcggaccgcagggcacgccacgttctcccggttgatccacgcctggggtctcgccggcgacaccgccagccacgcgcgcgatccctctcctcgctctgcaccatctccacctccctcgtaagcacccacaaacccacgaacactaactacaaggagctgcaaaaccgagcagtgatttaccatcgacgatgccgtcatgcatgggagcaaacagaccctgcggtgcacgggcggcggtgatatgatgaagccgtgccggcaaaaccgaatcgacaacgagagcacaccaatccacgcaagcatncgacgcacaagcgcgt

SEQ ID NO: 24693 - DNA, 406 bp, Oryza sativa
ttcttcgcgaagaaagctgtctgctggcagccaagtgacccctaactcatccaagacttaacaactggaaagaagcagctgagctgaataattgtgcagcatgaaaattgcttcagcttcacactaaccgcttcatttccagcatgagagaatttcaattgtgagtcgacagcgacagacagcctgcattctcagttgtagctagtgtggtgactactgaactagtctgaattaacagcaaataagactaaataaactgtagtaacatttaaccatgtaattaccatcaagtgtaacaagtagtgaacatatatctctttctagtttacatgaacaagagaggtatctttcataagtacaaatcctgccaaactcgaactctatcttgtcacatacttaactctga

SEQ ID NO: 24694 - DNA, 418 bp, Oryza sativa
  unsure (1)..(418): unsure at all n locations
tacactttttcttgatctgaaagatcatcacaaaggtacttggctgtgcatatctatcgcattatcaactgacgagcccacttaagccttggagttaagacataaattttttttattctaatttggctaaggagaatgaacctctaagttcatccataagacgtgagaaatattcttttaagtgtatggttcaacactaactgcaaagtttgttgcgcaaaaaaaacacactttaaatttgttaaagtacaaacatgtcatttgtagaaggacaatagtggaatttcattntctggaagaatagtggaaattcaccagtgataaagcataactcacaggatgtatcgtaggaggatagtcctcgcanacaggcgataatgaaggatgttcaatttcggcacaggatatttttcgtgac

SEQ ID NO: 24695 - DNA, 386 bp, Oryza sativa
attaggacacttgatactaagctgcgcaaaatgagatccttcagggagggctggttagagaagttaccgttattggtacctccttgataatatgggcgtggttggttccaccccttgacctcttgtggacggtacccgttggtgttgcccatgtacatcgccttctcacgggtttccgggcagtcattcccagaatgacccgtgccgccgcatacctcacacgtgacgtgtgagtccaatggccttgacggtgccttgtggccttttctcatggtcgtccaagcgtttcatgaagatgtccagcttggcagcatgtaactctgtcttcctgacggtgtgtatgcctcgctgacgggtctggagtcgttcctcgctccaaccatatt

SEQ ID NO: 24696 - DNA, 458 bp, Oryza sativa
agcttcacgtgaacgccaaagcctcgatccagattgtaccaatttatcttctactattagatcataatgttcatctattgttttttttggatctgcaacaattaatttccatatgtgtgccatagaatcctagaatgaaatacaaagtgtcagttagctaggaagaaccatctttgaaatagttaagggatcaaaatcagataatctgagctgtctgatgcactgtagtacttcctgactgccttggattctatatgaacaagaagaccgcattatacttttatatctatacactattggaaaaaacaaaccaataattctctatgttagattacaaacatgcatacgacctcagctgtggagttgctgaaattttgcaggccatagctaacaagattcatactcactctggtgcaatgaaggatcataatggtatagcatacaaacactttaagaac

SEQ ID NO: 24697 - DNA, 436 bp, Oryza sativa
tactgctaaactataaatgatcagtacactctggtgctttaagttgataattaataacgcttgtcttatcatgttcgatcaataattgtcatcgtaagatcctaatgatatcttctgatcagtgtagtgtatatatactataaaatgggcaagataatgcatcttgctaatagctaatccactcatcaatgtcatagtaaaatacgacgcgttatgttgccaatcatattttgtcatagattactatgtccaagattatatatgtttcactaacttagcaactactccattcgtttcatcttatcaatcgttttgacattttatcaaatctatctataaaaataattagcaataatactaaattagcttcattaaatataacactgaatgtattttgaatacatcgttctcacgattgtatcaatcatatacaatg

SEQ ID NO: 24698 - DNA, 367 bp, Oryza sativa
  unsure (1)..(367): unsure at all n locations
gctgttgtatagccccggcaagatgtacatttattatgtcaatcacttatcctatcactgtccttttcaacagatcatgtccatgcacgctgaacatagacaccaatgattttgtacattgcaggtactcctcaacatgtattttcccgtcacaagacacgggacttctctttcctccttggtaggagtacaggactgtactactcttactcngtacagtacaaacagtactgccgtattttctcgtcacacggttttctttcttcgggtgtgtttagttcacgctaaaattaaaagtttgattgaaattaaaataatgtgacggataagctggaacgttatgtgtataagaaagttctgatgtgat

SEQ ID NO: 24699 - DNA, 191 bp, Oryza sativa
catcaatactggtagcaatcttttttactttatgtgataccccatatagtctatacgctataatatgattggtatgcacataacttgcatgatatgagcatacattctagctggaaccatttcttcagtgttatcaacattgttacatatcatgtcgagataaaactaaaaatgaatcctgaaaacataat

SEQ ID NO: 24700 - DNA, 421 bp, Oryza sativa
  unsure (1)..(421): unsure at all n locations
tgagctatcgagctgcatgcatgcgtgcgtggagaatagtaattttggcaaagtgccaaagcggaataggtagattggtagcagggaagaagagactagtatgaactgtaagaaggaaaggaatatggtactccataaagttagaaatatttcgccaaagtgagggaagaaagaaagggagaatggttgtttcttgttaaaggaactagcaggagggtggcccgcgcaattacgcggctagtatctagaataaaatttttaatctttttacacataattntctttaagaactattaaataataatatcattgtctgaggactnntataaagttgaaccccataatcaacgagtttttggtgtcttgcaggttttgatttataattttaaaagtcaataaatgtcgcaccatgctctttact

SEQ ID NO: 24701 - DNA, 422 bp, Oryza sativa
  unsure (1)..(422): unsure at all n locations
gttctattggctatgtgtgtgttggagctctctagttattagaattaatatatattatgttggctttttaatattattttatcttttttttgtcaagccgatggaatatcgacttaactatattatggaaagaaatgcacaaataataatacaaagattaacaacatacatggttgttgcacttgactctatggctttacaccatggttacacaatgagaaaggggaactatatggcagagcctgaactcttacacacagtcgagtagcagtagatagttctagtacaatctctaagtccaccattcttccatgattacctgagctactntgcaacgccgctttgcatataccctgagtgtggcaccatctccacaccatccatgatattangataagtgttgataaaatgcatgatgactg

SEQ ID NO: 24702 - DNA, 431 bp, Oryza sativa
  unsure (1)..(431): unsure at all n locations
agcttgatggtcggcacatcataactgtattgcttgaagatggacgtcctagtgccccggccgaagccgccaataactatgtacgtcacagcggttgggttgtgcgggataacgtgcctgtcagtacggtgtactggcgaagaacaagggcacgcggagatcatgagagctctgtcccagattcggagaaagagatgctgtggaccacaatgctcgagacattcacccttcctgcgggtacagaggacatagtgaaaaggtggactctgaagataatggcagaacagtttcagagcttcaatggagatctgtaccagaagtatatactgaaggggcagacaccgaacttcgacacattcccaaagctaagggatcactgngacgagttcgttgcatataagacatgtgaacaagggcacgcgatgatggaa

SEQ ID NO: 24703 - DNA, 443 bp, Oryza sativa
gacgatctggccttacggcggcggcgaatgctactcccgctgtggctaatgcatctttcgtgcgtcaaccatctcgatcggcatgccggaccactccggtttacgaacaccactatgccgattgtgtgcgcgtggacaattatgcggcgagcgtgtgctgtgtcaacccttctccggccgcagctagcgccggcgagcacgttcgtcgcagctgacttcgtggcgtgcggttcgctaccgagtccctgtacgctgtctcgctcgccgcgcccatggtcgtcacatgctcaccggcggcgagcttcacgctcttcgtgctgctgttggcaggtctcaccatggtttacctatgctcgtgattacaagtcatctacttggttcatggatgcgtcatgatcatgatcaatgctgcaagacgtctgagtgtctgacatacggacatg

SEQ ID NO: 24704 - DNA, 493 bp, Oryza sativa
  unsure (1)..(493): unsure at all n locations
atactcttagtcacctgcngcatgcagcttgacctgtgtcataaagagatgatctattagtgtatttctgggtctgatggcaaggatgggattgctaaagcagccagcttactttgctcaacttgtgtgaacggcgataggaatacttgtggaaatggtgaaatagtatttacagaagctgacatgtccggtgcattgaaagcaataggtatgcttggaaaaccttccatttttaatgcactgttgaatttataatactcatttatcagttatatcattataaatctatatgaccaattgttcctgctgcgttcattatgttgtggtggaccagaacctgatcttcttcttgtgtatggccctgctagatgccatttatgttctcctgcatggagattgcggtatactgagataatgtatgtgtttctttttgacaatttagttcttctgttcacattctgcattgatcctgtgataatgaactcaaactaca

SEQ ID NO: 24705 - DNA, 482 bp, Oryza sativa
tcgtttgcgtttcgaatggaacattgtattactcgagaatacaatcctctcatctgattaatatataaatctattttcattagaaaaatccattcgtctctgtcagataatcaagcattaaagtccattcgagtatagcatgcatcatccctctaaaatatccatataagtcaacgtgacgggcagctgtttagttgtgatgatcctcttctttagactctctgcaccgcctacactagattcatcgaacctggacgcattttgactttacgtacgtctctatccttgttccactgctcatcttcttcttcctctatcttttataaatggtgaaggaactgtcacctcctgagtcctgacccacaattgcgtccacattccataccactctgccgcacccaatctggaagatatagtagtgccacattggtgggcccatacaatcaaaaaagaatagccaacagataaagttctcaagctga

SEQ ID NO: 24706 - DNA, 469 bp, Oryza sativa
  unsure (1)..(469): unsure at all n locations
gaccggatccttaagtcacctgctgcatgcaagctntgccacgggcggcgattgctcttatgatcactactagaggcctacatggtcccttggaagataacacattatacacacaccactacaaccaccaaacttaaggctgcagaaaggtatgcctgaagcaagcaagaatccaccaccccaaggcttccccttttgtttgctctctctttcgccttactcaactccccacaaaaaaagcagcaatggcgtccacaccctaatactcagctgaatcatgcatggcgatggtgcataagtagttgcaggacctatccaaaatgacagctgcaaacccaaataaacacacctttcattagcaaaaacaaaaagacacttgctttatcactggtttaaactccggaataactaatttagatagccacgtatgcatgtgagctggtcttcataagactgatggcgatgagac

SEQ ID NO: 24707 - DNA, 487 bp, Oryza sativa
  unsure (1)..(487): unsure at all n locations
ntctgaacatatacgtttggcagaggcttaaacaccatcttgtttgtcattatgcatttcttcttctgtttgtaacattgtgagatcaatctttatgctgtcaatctttctaatagacctggtcaaaattctccaaaaagttaactcctttgaatttttcaggaagagaaaaatgtcttgttaaatcattaaagaaaaacaaaaagaaactatttattcatctagttcatgtcatctgatgaaaatggctaacgtttctccttgatatgttgttagatattgcgagctaaagaaatatgaaatggactgactggacatgctaagatgccagatttgaatctcataaagctcatccaaatgttgtatgtctgaatctacttccgataaaacttcgaggtgaaatacattgctntaaatcattntatcgtatgactatcgagtggccttagctccttattaaatgctccatattgtttatcgtctataa

SEQ ID NO: 24708 - DNA, 475 bp, Oryza sativa
  unsure (1)..(475): unsure at all n locations
agcttaatggtcagaagaacgacccacacacagtgataaagaaacatagtggattagcatgatcctaaaaaaattctactgtctgaggttgtgtctataaagagaaaggagataacaatcgactaactgatctccaaacacgttaataatcaagacatattttaagtactccagcagcttgcaagggcatcaagtttcttgtcagagaactcccggtgctgtttgcactgagggaaaatcacatataaacctaattttaaatgttgaacctgcaataaattaatccatttgatttgaccatctgcacatctattgtgtgttaaggctacctacaaagacaggattatcacaaactcctcacaagtttgcatcanattgaaagtcttaccctaatgtagcaaattcgtgcaaacacaaaatcgttaaatatattacatatcaagccactaatcaacttatcaacctgtctagtact

SEQ ID NO: 24709 - DNA, 396 bp, Oryza sativa
  unsure (1)..(396): unsure at all n locations
atattcacatgtttgtacttacatattgcttgatctctcaattctatattccctctgacaactacatgaccatagctacatgttgctcaatgtttngatttgctgcgagctaattaaagttatgaattcttatagctcaagtactgaaattttacaaattcaccaatggatgtaagggttgtctgagtttaatgtctgaccttggcccttgcatgttgtgtaaacaatatactcctgttaccatttaaggttacaatntattctctgacaatcatactaaattcatattatacaagttcatgcttaacaatngatctggatttctaggtatttataaaatccagattattttgtgaacgtgaacatggaatgtatctaaattcagcgtgtggacac

SEQ ID NO: 24710 - DNA, 471 bp, Oryza sativa
  unsure (1)..(471): unsure at all n locations
gcttcacgcatgggccatctnctccacgcgctgacccttcttncaatgggccagcaaatcaccaagcaggccgtcgctcgtctgggcctnctcctgggtcggttgttccagcacaagccgacgccaacacaacagtatagcacacgcaagtacgcagcacatgcatgcaacgagacatgcatatgcaccacgctacagtaccatgagtactgtagcaaccatatactccgaatttcctcaaccaatttccttcgcgaacaccgacacttgcatgcacacctcgtgaagcctattacgaagatttctcccacacgatgtccatccaccgtatactatatcgtatccaacttcgttattcggtatccttgaccgtctggacctcaactcctnccttgagttagtcctgatccccaccgttgaccnaagttgatcgacctctaagaaatctgactctagtcaccttctcatatg

SEQ ID NO: 24711 - DNA, 379 bp, Oryza sativa
  unsure (1)..(379): unsure at all n locations
tcctgaatgttttccagcttcagcttgcttatggtgaacactgccattcatcttcatgcaactgcattcttcttcttaacgtccctgtactacattaactctcctcacctcttatgaccctaacataattctagttgccatatttgataaagcacatgcgctctgccacgatgaatcatgagcattatcatgctngatgatacaagctaagatggtccatccttaactcacttctgcaaaaaaggaacttcgctcagagaacangagaataatctgggatgtgttatttaaactgataaacatggaacaatgggtgcacaataactgaagtataagctgttgctggttgcgatttagccaatacagtgtaatgtgcata

SEQ ID NO: 24712 - DNA, 81 bp, Oryza sativa
gtgaccgacccttgggcgcttaatatacttcataatgttgctcacagttatatcgagattcgacttcatgttattctcggc

SEQ ID NO: 24713 - DNA, 470 bp, Oryza sativa
  unsure (1)..(470): unsure at all n locations
agctttactaacataaatctgctatagntgaataacaatgtgatgtccaaagaaatcatatgcacgaattttacaatatacagtaccttcttttggggagttnttgctggttcatcactttccatgtcactatcttcttcagaagattcatcggagctgctactctcttgtgctactggtgctngctacaatttcagacaacaacaacatagaagtaaagagtaaccacatacataaatgagaaaaacctaggcgtcttaagtctgcagaccaccttcttagcttgagtttgtttttgcttaacatcctcatcagagctttcatcagaactgtcatcttcatcactttcgtcatcactgctgatttctttcttggtagccttaagggaaggcttggtagtaccagaaagtgtagaatcctggagtccgaagagatagcaattggtatcatgaataananaacattaaaat

SEQ ID NO: 24714 - DNA, 392 bp, Oryza sativa
taattatgaaaaattgcacatttatttctttagttataaattaacttgaattatttgaagttattattttgattaaaaatattagtatatttctctatagtttaactgagaaaaagttaaataacttattatatgaaacatactatgtattactccgtgttagaaatgttcaaatacaaaaggatcattatatcacgaacgcacacactgtgatcgggtgcgtgaaccttttgctggcaccgaattcccggcagtggcaacaccatccaataaacctgcggctctgcaaatctcggcctgtacggactgatagcccatccaggcctggcccatcacgcaacgtgcgctattatcatccatgccttcaccttgggccctactggtagtactac

SEQ ID NO: 24715 - DNA, 471 bp, Oryza sativa
  unsure (1)..(471): unsure at all n locations
agcttctagctagtattnttgcttcttcttgtgtattgtattctgagaacaatangtcatttgcaatttgcttcctcatgtttgggatatattctggtctgatcatatctttcaagtgcatccctgggttccaccattccatacacttcatagcgtagattccgcaatcatgccttgatgagacaaaaaccaaaataaatcatttaaaaaaaacaaaatcatgggaaaaaaagggaggagttttggacaaaaaagaaaatgatatgtaatttggggatgtttggtggggttgataggtagttacccattgttntggcgagtaatttgtgggtattggatatcaaatatactaaagtctttctccacatctgagaattcttcccacattgcaatgaatcctggtatctgtgtataaacaagaagagcatgaaaaanaaacccagaaantaatcagtggatgcgtctataaat

SEQ ID NO: 24716 - DNA, 170 bp, Oryza sativa
  unsure (1)..(170): unsure at all n locations
ctaagcttatctcttacgctncaggaatggatcagtcagaacatcaccaccggctcttcgtcgtcaccgacgactggtgtcttcgcctataccgatggttggtcacaacaccgttgtcaagcgtctacatttttaacaatggtttgctttcgccaccgcttattggtgtc

SEQ ID NO: 24717 - DNA, 454 bp, Oryza sativa
  unsure (1)..(454): unsure at all n locations
agcttcactaaatttatattataacatacttggttattgttgtatgtatcaagatataaaccccaaaatcttttatccctagctaaactattcaataggccaatcctagaacttcatagggccacaggagccttatttttctttcactatttttctagagaattttgaaaactacagcttattatatgtcacaaaacaattatcattatgcgataacattaataactaacatttgctactcatcacgtgaccctacctactctagccattagattgagaccagtgaaagagagtctncttccacctctagccagctaagagataatngatgtggcacaacagcgtacggaagtacttatcaattatgggattcatacatggtgtgatagtggatcattggtgctttacatacacctaanataaggatattttacaatntcatttagtactacat

SEQ ID NO: 24718 - DNA, 350 bp, Oryza sativa
  unsure (1)..(350): unsure at all n locations
tactaagcttccacactgaaagtgaaagagaagctatccaactgcaacaatcatctgtttctgttatctgtgacagccacagtaagttggaatcggntatggagaaaattcagggtcaaaatcctcaagaatcaattggcttggttgcagagggttccactgatgataacattcacaagttccatcataatacttaaatggccatgacacaaatcactcacagtgacaaaatggacttaccaacacaatctgtatctgcatgcaatgaaaaaacactaactcagatagagatgcagattgcagatgctgagagaactgaagcattcaagagtgatgatgccccatcacaa

SEQ ID NO: 24719 - DNA, 470 bp, Oryza sativa
  unsure (1)..(470): unsure at all n locations
agcttgagtgcttagctgctgttatttcacggttgtctgtcaccctcgggatgacgtggatgccgccacgtcggatcccgcttctccgtcgttgtctcgtctcctgccgatgagatccaccggcaaaacatgtgacctcgcaattgaagacaaaaatggtgtttttgtttttgttttttagtgttcctttggaaagctaggatcttactctacgtgatgaaacccatggaacttcttcttttgtttacatggtaccggtctaagtaacggttttacgtgcatggatttacttntcctttttttcttttcgttacaaaaaaaatgcacgtaccagtaactagtgcgtctttttcattccgtcaaaatatgtcttcttctgaatgggattgtgccgtaacattgatttatncaattataatgagttcaataggtattnttctaacatatgaatacgctattcaacattatta

SEQ ID NO: 24720 - DNA, 470 bp, Oryza sativa
  unsure (1)..(470): unsure at all n locations
aagcttcagcatgctgttacaattagtaagatgcgccaagatcctctgttccagctacataaaaaaggaagaccttgtatcatgtggaactgctaagtgaagtaaaaaaaataaaaaacttactattgagaaccacgaagcatacttggccataatcagcaacaataagagtgttccctggagctgcgacaaaagcttggcgaatcttgtacctatccttttcaagagcaagttgattctgcaaggaagataacttatttcaaaaaaaaataaaatttacataaacgatatagcaccactctaacaataaaaactgatgcatttgtcagaagtaataacaaatttagcaagggtccaaatacccttgatgatgaagcatggtaataatcaaatatcctgaaatagcagacagcttattgactaaatgaataattcanatgtgcgtcctgaagcctgagggttgctacaca

SEQ ID NO: 24721 - DNA, 472 bp, Oryza sativa
  unsure (1)..(472): unsure at all n locations
agcttctcaaagtcctcataaactcctgagattatctggttggtcaattcatcgtcgagcccaaacaaaaacttctcctgcttctcagcatcggtgcgcacgtcctcatgggcgtagcgcgcaaggcggttgaactcatgcaagtactctgtaactgacatggttccttgctggagcgcacggaactctctcttctgttgtgccataatcccttcaggaatctgtgccttcctgaagctntgacaaaactctgcccaagtaacctccgttgcatctagacgggtcgccacgtagttatcccaccaggcagaagcgggaccttgcaactggtgtgtagcaaaagcaactntctcttggtcgttgcattgcagtatgttcagcttcttctcaatagcacggagccagtcgttggcctccattgggttggtggtgcttgagatagtgggtggctggatacgaagaaagtctaaca

SEQ ID NO: 24722 - DNA, 475 bp, Oryza sativa
  unsure (1)..(475): unsure at all n locations
tcgagacagtggtacttgaagttngatgggacaataaagaaatttgggtttcaagagaatgtcgaggacaactgtatttattcaaagtttaagaatgggagatttattttcctaattctgtatgtggatgacattctactggctagtagtgatgtcagtctactgcaggaaacaaagaaattcttgtcctcaaactttgacatgaaagacctcggtgaggcttcatatgttttgggcatagagattcaccgagatagaacatagtatgcattgtgactttctcaaaagacatatatagaaaaggtgttgaagaaattcaacatgtacagatgcagtgctacacctgctcctataatgaaaggcgataagtatggtgcatcgcaatgtcccagatatcagtatgagctcaatgaaatgaaaacaaagccatatgcgtcagctgtatgaagcctacagtacgcgcatgtgtgcacac

SEQ ID NO: 24723 - DNA, 247 bp, Oryza sativa
  unsure (1)..(247): unsure at all n locations
accaagcagnntctattaaaaaaaaaaggggttgatggctcaacncannaanacgcgcgcacaaaagacaaagtttttttaaaaaaaaggggagccagagtgaggagaaacacaacaacgccacccggccccagcggagacaacgagacggcaagagggaaaagcaaccacaggacagaaacctaaaacgaaaaaaacggaggcaaaaacccatcaaaacccagagggtcaaacaaaacaatgagaa

SEQ ID NO: 24724 - DNA, 393 bp, Oryza sativa
tacagcactgtatcacctttgtgcataagaggagatggatccttcttaacaaacacataggatgagtagaagctgatgtaaatataatactccgagaacaaatcaagtatgtgtaaatatgtagaaagatgcaattctcctctagcaaatttgatttccctaaactgaagaactcgatcggttaaacacctctgtccgacaagtcatagcccccaagcattgggagtcagcctaagcacgttccagacatacatatgagtgacatgagtttcgcattaacggaataaagtatcacgaatcataacttactactcgggtacttttgcaattgtaaagagcagaaaacaaatcgatcctatctctatgctgttgatatattctgaataatactta

SEQ ID NO: 24725 - DNA, 468 bp, Oryza sativa
  unsure (1)..(468): unsure at all n locations
agcttgtagaatactgcacgggacattcttaattgttgagtgcacgtcctatctgaaatgttgatcagcctgattagttcacttgttctccatacatccctgtggactaggggcccatattttacccctttgcgactactcctcctacgatatttgttcctcaaccatatgatgatcaaaagacaaagtaccactacagccttcttcgttagcaagaagtgatgcatatattgttgtcgagtgttctccatctggatgagattacatacgcagcttcaaattacttaaggaaatgtgtcggttcagtgaaaaacaaattaatttactgaataaatattgtgcccagccaacatgtagatttgtcgactaanaataacattactgaggtgtaaatggacacctgtatatttttttgagcaaagaaatcaacactaagacagtaagatntattcaacctactggttttta

SEQ ID NO: 24726 - DNA, 491 bp, Oryza sativa
  unsure (1)..(491): unsure at all n locations
gctttatgtcctatttttttctaattataaaaatttgtgtatattattagtggtcccttattgttgtagtatgtntttccatactaatgtatacatgtttatttggtttatagctgtacttagaatctgtgcaagatttacttgctccatagaagactaatattccgattgttgaggatccaaaaactggtgaagtttctttgcctggtgctgcaaaagttgaaatcagagatcttgaacatgtttttcaacttctccaaattggtgagatgaatcgtcatgctgctaatactaagatgaacacagaatcatctcgtagtcatgctattctcattgtatgctccttcttccttgctgtgggtattctgttttaagtccaaagtaaatacatgcccatgcgaatttgatattctnttcagattcatatacagaggagttcaagaatagaagatggaagtaatacctctcttcctaatggtactgacaacctt

SEQ ID NO: 24727 - DNA, 462 bp, Oryza sativa
  unsure (1)..(462): unsure at all n locations
tgcttctagatatcggagctgttttactatatgacgaaatggtcgatcatatggtttatgacatcggcaccttcgctatgcataacgggatctttgacctgtccaaatttcatttataagcatgcgttaatctcagcgctatgtcaacaaacagaaactggttgctaagttaaaagaaaactacgaagtaataatatcgactctgtttgtacacagcatataaaagaacaaggcttatacgggcaaagagatacctgaatcacactatgtgctgcagatcttactntgctgttgtggaagctgacatccaccttttcccacgacacaagcttcagacctcttaaaagcccgtctggaaatttcagaagaagttatgctcatatggacataacacatggcatatgaaataagagcaggtcaggtcataatatggcttatatgatcacttggacagaacacttc

SEQ ID NO: 24728 - DNA, 386 bp, Oryza sativa
ggccctgctgtcatcgacacgttgtcgcgagctccgctgccctcgccacgagctagctcgatccggccgccgggtggctagatctgccttcagcgtggacggatccagcgcctctgccgccgtcgccatccccgccgccgtcgacccagccgcgtctctgccgacaccatcgccttttggctgtcaaaccttacaattcgaatttaaaattccaccccctctctcgaactgagctattccgatgataaatcactatgacgacataagacagacacataacctacgtaccacaatttcttcccgccgccgtctccatccctgccgtcagccgccaccccgccagatccggccgatgcggcgcggatctggcggtcaccgtcgacact

SEQ ID NO: 24729 - DNA, 451 bp, Oryza sativa
  unsure (1)..(451): unsure at all n locations
agctnggttgaaattggaatgatgtgactgatatatttgaaagttatgtgtgtagaanaattttgatatgatggaaaagttgtaagttcgaagaataactttagaactaaatacggcgaaagttgtgcaggcacgggctgcagcaccctgacaaatcgtccgatccatgcatgcgtcctcgtgccacggggtacgctcgtagccatggtctccgtcgcgtctgtggcagtggaacgtcctggcccgaacgccgcttttaaacattggcggcggcggcagccggccggccaccaaaaaatcagcacacggtgatctactattacgttattctcacacgtcgctgcctctcgaatatattatgatgatcgtatatcgtatcgagccttgcgttttagaatggatcctattccgtttctcacacaggaacacgaatccttgcgtntaataccga

SEQ ID NO: 24730 - DNA, 445 bp, Oryza sativa
  unsure (1)..(445): unsure at all n locations
tatgcctgacggtactattgaaaagtacaaggctcggcttgttgcttatggctatactcagaaagaaggcgaagatttctttgacacttactcacctgttgctagattgaccacaattcgtgtgctactttccctagcagcctcacatggtcttctcgttcatcaaatggacgttaagacagcttttcttaatggagagctggatgaggagatctatatggatcaacctgatgggtttgtacttgaaggtcaagaaggcaaagtgtgcaaattgttgaagtctttgtatggtctgaaacaagctcctaagcaatggcatgagaaattngacaaaacattgacgtctgcaggctttgcagtcaatgaggcagataaatgtgtgtactatcgccatggtggnggtgagggaagttatttgtgcttgtatgttgacgacatactgata

SEQ ID NO: 24731 - DNA, 394 bp, Oryza sativa
  unsure (1)..(394): unsure at all n locations
tgcagcttgggacaagctatccgcaagaagagcttcgcttcatttatggaccgaaaagaaaggcagctcagatcagctttcctcaggggaacaatcagaagcctcgcttcatgacgggacagctaggtgggccttccaccctgatcgtctgtcagcaccgtccctatcacccgagtaacttcgacaatgactacaacggtggctgtcacaacaacagtaagcagcacaaccacaactcgactccacccccactaatggcaccagctcagtcagattcaccagctgtgtcagctcagtcagaacagcccaagaagggggctgtaagaaagctaggaccctgcttcaactgtggcaagcacggncactttgctggcaagtgtccgaagctgaatcg

SEQ ID NO: 24732 - DNA, 132 bp, Oryza sativa
gaatatttcagtttgagtcaaagtgtgaaccatggaaaaatcttgctttgcgtaggagaaaggaagacatattactggagaggggtttgcgagaatacttcaagatgaggaggggctattactagctgcggt

SEQ ID NO: 24733 - DNA, 471 bp, Oryza sativa
  unsure (1)..(471): unsure at all n locations
agcttaagaacaacacacatcctctgttttgttgaattattgggttccattntcacaatcttagtttcatcacgctntgccttaaaatttccaccaagtgacaatgcaaattccaacaaagctgtctctgttggggtacctagaatctgatatttcccatcttggtcaatcacaacctcaccaccagtattggtaaaaatagactccagaaaggttttgacaacagtttctggaagctcagaacacaaatcagatgcattcttangattgttaacttcctttatgtttccacaaatgcaggccttgacaacagtcatatgattggtcgtcagtgttcctgtcttgtcactgcagatggtcgtagctgagcccattgtttcacatgcggctaagtgacgaaccaatgccttgtcattcatcattttcttcattgcgaatgccagactcaaagtaactgctaatggtaacccc

SEQ ID NO: 24734 - DNA, 408 bp, Oryza sativa
tgatgagctagagctatcctggtgtatgtcactgaattgttgctgttgtcggactcccggtgcaatggtagttcgttgagagcttggaacaccatgatcctggtcctgagtagcatgagtgaagtcgccctcacctgcaaatcaaataaatgcaagaaaattatccagtactgaattggaagatgaaggttgaaattgcaactgaattatatcacaccagtgaattgaacggggctgtggtgatctgattgttgggtgtgacccctatgaggcacattagtagtgccttggcctccttaaccatcgtcgtcgccgtcatctgtttcagttcttgagctactatcattggactcttggtactctgggcttccttgggtctcttcatcgctatcaacactagtcgatcgt

SEQ ID NO: 24735 - DNA, 443 bp, Oryza sativa
  unsure (1)..(443): unsure at all n locations
agctntggttcttctcctccaacagcgcgcgctttttgtgtctcacgagagtgacagccggcgtcgtcgtcaccatgtgcaactccggcaccagctcctcgccgtcggcgcctgcgccgccgacgtcgtcgctcaccttgttcaagcacttctcccacctactccgctcgatgacgaatgacccnacaaccgtcatgcgctgctgctctccaaagtaaaacacgctgtacatatgcttgagtaatacttacccgcggcttggtaatattgatggcgtgaacagaacatgtaagccattatatcaaagagcgtatgcaagaagcacgcctagcgacatagctggctggctggctggttggtaatgcttattactagtagctcgcatcactggcagtacagtacgagataaaaagaagctcagctgtgggaatggcgagctgatc

SEQ ID NO: 24736 - DNA, 443 bp, Oryza sativa
  unsure (1)..(443): unsure at all n locations
actcatataatcaattcatgatgtacaggtctctgcttactgtaagtagtacaaaaantgaagcttgtaacttttctttctttatgtaaacttgctattagctgcatattcttatcatgtaattacactcggaaaagaacatggagattggtgcttaaaaaatgataagcatatcaatgttctgattgagatataccttacctgacactgtgaaatgtaaacacactctttatatctcttagagatggcaacacttgctctcgatgtgcactgtattacttgtagtctgtaactcacgcctcaaaacaaacttgcgctattgcgcaagagtatcagtggtctttgtcacaaggtatagcataacatcttgacatttacattgtcacatgccaacttgcgtggtatagatcacgtgacgagtatatgggaagcatttccctgat

SEQ ID NO: 24737 - DNA, 479 bp, Oryza sativa
  unsure (1)..(479): unsure at all n locations
agcttctgagtatcacttgtgaagcttgtgcttctatgctcagctcctgctcatcggtagcatgcattatggcatcatgattgattcactctttctcatagaaaaaaaagatggacatcagcactaaatcactttgattgaatcgaagcaaacagatcctcaaaagataatccaaaaccagaaacaaaaatgcctatactgattattagaaatcttatacgaaacctgatcgagtaccaggacctagtatcaaatggatggtggctagtgataaagcatacttgttaataatttacagaaacaaccgaaaatttcctcgcattcatttaattggatcaaacaaataaatcaaacattgatcttatagcaaagtgaaaggaataagattattctctctaaaagactggtctccaatgcagcctgtcaaaaacaatgaataaacanaacagattagaactgaccattgctaagtctaccca

SEQ ID NO: 24738 - DNA, 151 bp, Oryza sativa
tcagctttgaatcaattgatcaccctcgtcttaccccttacacaacctatttgtccaccactgtcacgagcttggggcgcttatatttggccaccctatcctcatccacgtgttgatgcaaaaaaacacatactggcccgtgagatatatt

SEQ ID NO: 24739 - DNA, 479 bp, Oryza sativa
  unsure (1)..(479): unsure at all n locations
agctntacatgtcctggcgccgctggatgcagctgctgaaaccacagagaggctggtgatcgattccacgaggccaccgtatacgatagctttcaagatgtcccaatcattcctttgctctggtgcaagagtatcaatcaatggcatgctcgcatcaagccctatttgcactgatgaatgctcaagtcgagtttgtgactcaactgcttcaggaggaatcacaatgcctcgacttggtttatctaccattggcctcaccacatctgcaagtcatatatgcaatgcgacaatcaatatatgtaaagctggctcctcaataatggtgtaaccacaccacaccttggataaatntagctggatttgcatctgggatcttgactcccggtgtaggaaatgtgtggctggctggtggagtttcttcaaaatttgcaagagaccagaataaanaaatgagagactatcatcngcatgattcatct

SEQ ID NO: 24740 - DNA, 374 bp, Oryza sativa
  unsure (1)..(374): unsure at all n locations
gatttcctatatgattgaatcctatgaaattcatataanaatccttngattcaaaggggccctcaaagaggatcattgtaagttatgttgatgcactgttccatatccgacaaaatcctggtgcagacctgtcaaaaagaaaatgtattgcaagtgctacaaatggtactgtaatcacctcggctctcatgattattcagccaagttgggaaagacatgtactgngatggatgaaacttaacatcgatggttcctttgattgcaacattgtggggaggggggagtgtattttatttattattaagaattaaaatatttattgatttattattttataattatatattaaaatattataatatttttttattata

SEQ ID NO: 24741 - DNA, 484 bp, Oryza sativa
tcttaagcactgagctgcagcttatgtgctaaccagattttgctattcttgtttgatctcgctgttagttctggtggcaaccgatattcttcgatgaaaaaaatgactctacttatggaagaattacaaatctggccccaagacatacctttatccaaggaagattaccatatcatcatgcgatatctggttgaatgtgatggtagattgctgttggtcaggcgtaggatgcaaatacgcccatttgcaaaatgtgatgatctcttggagactgcatgcacttgctggtttgatgtctttgaggcagacttcactgtgcaaccttgtcagtggagaaggctcaacacattgggccgcagagcgcttttcattggcaaatattgctctaagtctgtctcttcagaagaatgtgaggaagtcaaagatgacagcatctatttcatgtgtgactatgtgaagtcagaatcaatctgtgatcctcttc

SEQ ID NO: 24742 - DNA, 380 bp, Oryza sativa
ttacatagccgaagatatgatatatgtctatctcgatcatgtccacattaaacacctataggtttaaattctaagctgatggtcacaaagtgagtgagtatgtcaactcaacaaactacaacctaatactcctacataaccaacagtatatgccatgccaccaaagcttaactactaaattcacgaacgctatttttctttaattgagatgcgtatgctagcacttgtttataatctctgtcacataagcgtttacaattcgcccaatgaaaacttttgtttctacgggttatagccgatcaggtacgaatatttaatgatgcaccatatttatttttccgtctgctgatgtatcacgacatcactattatttgtattgc

SEQ ID NO: 24743 - DNA, 477 bp, Oryza sativa
  unsure (1)..(477): unsure at all n locations
agcttaaagccatgaatccattgtattcatatctgtgattggatcctgcagaacaaacatataggatgagtagtatctgatgttaatataatactcgagaaaaattcaagcagtttataaatacgtatttcttctcttggtaattttgatttccccgagcagatgactcattacgtttaaacactctgcccgactagtcatagccacctatcactgggagtcggcctaagcacttcccaaacatgcatatgagtgacatgagttcgtcattaatggaacaaagtttcacggatcggagtttactactcgggtacttttgcaattattaagagcacgaaaataaattatctcatctctatgtttttgattcattccgaataatacttagcaccttgcgttactcggtccatccaacgagcccncgggtgctaggaatcggcccatatgcaaccatccattggcaaaccaaacggaaag

SEQ ID NO: 24744 - DNA, 471 bp, Oryza sativa
cgataagtgtgcctataatccataagctacttaaagagcttgtttaacacatatcactaattatacactcaccaatttatcttatggatgttagcaaacggcgtatcccataaatctactaaagagcatattctgtctctagaaatacagattcagctccaaatctccaatgcatgcatctgctggtctttcaccgtgggaccaccaaaatgtagtagtattcgagaagctagtatatgcattgaataccgttgagacaaacaaaacaacagcaatgtcaatattatgtattgaaattttgagtatcaatatcttaattcacattggatgtattaaaaatacaccttcaacgacatccatgtaaagaatgctgtcatggcattaaaatttggtggaatgtgcaaacaaaccaccacatatgtattagaagtccaaatggcattacaaacgcatcgaatgaacattctcatc

SEQ ID NO: 24745 - DNA, 282 bp, Oryza sativa
  unsure (1)..(282): unsure at all n locations
agcttatggcagagtggcagcaacaagtggctctagactatcaggatttggaggaaggcatangtaggttagagggcactcttctccttttctttgcaggcctccctccccatttgccccttcttttaaagctggtggttgtgggagctttcttccctttgttctcttaagcgtgtgcgtgcgtgggctcctgtcttatcatccccctaagaatctttgtccgttacaaaacgtcggtgggggtgtacctccacttgtctctttacattctaactaacatga

SEQ ID NO: 24746 - DNA, 353 bp, Oryza sativa
  unsure (1)..(353): unsure at all n locations
tggatgtctcccgacgtggctgatacacacgggctgggtgattcttgttagtaatgccgcgtgggtaaagtgtaccccctctgcacaggttatcaaactgttcgaacagccgtgcccacggtcattggcagatgtgaggtgattccttagcgtagttttcgttttaccctgctatgtgaaaaggtgttaatgtctgggaaacctgatttttggaaagcaagtggctgtcatggagacagcgggacagggagtccttgaaagtgattggtntgttggagacgacctaactctgataggttgaaaattggtttggcttgggaaaccagcttcgaggccaactctgtgagttgtgc

SEQ ID NO: 24747 - DNA, 288 bp, Oryza sativa
  unsure (1)..(288): unsure at all n locations
ggagccaaacccacgccgtcgatctcgtactccaccgccccctccacgccaaagtcctatgcgggaaaaggcgctcgagatggccgaatgatccgcgacttcgacacccacangatgtggataatggcggcgagatggggagcgtcgcctcctcgtctacggcgacggcagcacgccccatggcgcgctccaagctgcgggcgcgctcctacgtcacccgcccgtcgcccatgacccggagtctccagcccaacgttggctggacgatgtggccaaattggtcatgac

SEQ ID NO: 24748 - DNA, 426 bp, Oryza sativa
  unsure (1)..(426): unsure at all n locations
tgtgaaaatttgaaaccaanatattggttcagacaaaacatgtactttagcgaacgttgaggttntcttttaaatttcttttcgggagtagctatataacatgcgataattgtttattaaaaaaatcaaatgtaactaaaataattaaagtataattatattgtaactactctacaacttatatgtagtaactggcctagatttatcacaaaatatatatgttgcggtggtagtggagggagcgaagttgagccccatcaaccatcccgcaccctgtgtatattcggctactatatgcaaccatcatgctgcggcaactacaaatacaagacattgtgcctgttggctgcactacagtaaaaaaaaaaggtgcaactgaatagagctctagttttttttcttcatcttgctaacatgaatgttcat

SEQ ID NO: 24749 - DNA, 436 bp, Oryza sativa
gtcacctgctgcatgcaagcttgaaatgtgaagagagctgcttgttacattattagagctgagagaacaagatcctctaacttcacatggtgaagctagagaaacacattgccatgactgttggatatttctagtcgtttgatttactggttcgcactattgttacagtaaacaactgcatatcattgttttatattgtagcacaagactaatgttattgtgcttctatgcctttagcacctaatgacagatgatccgcttccaatgttgagtgttaccgtatcttgaaaacaagagctagtagaggatataaaggccctgtttggggagcttgtcccagctgcagcttttctcaatagctgcttctgctagaagctaccccaaacagttcacagcttctgagaatatgtagttacagattctgaaaaatgaacta

SEQ ID NO: 24750 - DNA, 350 bp, Oryza sativa
gattaccacatgaactgtacaggataccccagaatccagtttaacgcgtggttgtttctttcctaacaagttcatgtagaatatcagtcttgcaaacaaagccttataagttagaagcacactctcgttttcctacttgatctgattaacgcaaacttgcaacatgtattgaacggccgatttatctatgtcgacattgcgaaggccaaaatgaatcgtactacagatttcatgccaagagcgacaggtcctcctaagccacctgaccgatgttgatagcatgcgtgtcatcttcatactttacttattatctgctgcacgagtattctatcgatagattgggagtacct

SEQ ID NO: 24751 - DNA, 478 bp, Oryza sativa
  unsure (1)..(478): unsure at all n locations
agcttctatcttgtntctttaagttaagaaatccatcacattgcgtgatggctggatggcggcaggaccaatggaacgaataagctagtaagggcgatatcgccggccatgacttccttcgccacctcttgtgccaccatccctccggtcaccccgacgcggtgggggcggaggatggattccacctggttgttgcctgtcaagacattacaaacagaactggtangaaatgaagatgtatgggaagactcgtntgtgagttgtgactctaggacagcattatcttacagaacatatcccagacgaccgtcagggagcaccattggtaccatcctcattccagctggtgctggtcctctaccatatatcataggctgtaacaaaaatgttgatagagacaatgactaaattgtcaatatgcagtggtggatgcangatntctagcatgggtattcagagttacttaaagcatatttca

SEQ ID NO: 24752 - DNA, 381 bp, Oryza sativa
tcagaaccccccccacatcaactgatcaaacttttgttagatgcctcggcttgcccattaacttgtgcataatacggtgaagaattcaacaactttatacccatactatcggcaaactgaacaaacttatcagacacaaagattgaaccttgatcaatcgtaatagtctgaggagtaccatatcggtagattatatgttcttggacaaactgtattgcatccacagaatcagccttcttcaaaggaatcgcctctacccatttgatgaaataatcaggtgccaccaatataaacttatgtcctttactcgatggtggattaatcatgccgatcatatcaattccccatcctctgaatggccatggtttaatgatgggattc

SEQ ID NO: 24753 - DNA, 407 bp, Oryza sativa
  unsure (1)..(407): unsure at all n locations
agctngcggtggtcgtcgacgacgacgacggctttgctactttgatggtggcacatgggcatcgaccgatcgatcgctttcacggcggcgccggcgactattcaacgcggaattgaaacataataatgcatcggagcagatgagatcagaacgagatcgcagcaatagcaacaatctgacggcgtccttgatggctctgttcccccgatcgatttgctcctcctttctggttttttttgcccaatcgttggatcgatcgatcgatcctcatcaatgacgatatgctcatgcatggaccacgacatgggcctagctaccctagctatagctatagctacttgtntattgagcggaattcgcaatcagtaaaagctagcagcggagatagctcaatgcgattattggat

SEQ ID NO: 24754 - DNA, 312 bp, Oryza sativa
tacactacatggtatggctggcactggcatatgcatattggttccttttcacaactgtttctcaattacatccatgccaattatcaaatagaataaatattaatgcaccctttggagaagtttttcctgtactttgacattcacttcgattaattctatataccaaataaataacatacataagagttatttatttggactaactcgtttttactacttctcctacaataatattcaatccaaaggagccttattagtggtggcataccgctatgagccgttaaatctataatctcgttaaatctataatct

SEQ ID NO: 24755 - DNA, 455 bp, Oryza sativa
  unsure (1)..(455): unsure at all n locations
agcttggctcatttagagctcaagtctggtccatgacgagcctagctggagctgttcgtaagtcaaaaggctatttaacagccctatcctagagtgagaaacagtctttacattgcatgctatatactcctactcatatatactactactactatacagtcatacatactccctccgtccaaaaaaaacaaaccctgggtttccgtatcaaactttgactggccgtcttatatgaatttttttataattcgtatttttattgttgttagatgataaaacatgattaatattntatacgtgacttgtctttntattttttttaataatttntaaataagacggacgggcaaacgttagacacggaaaccagagtttgtcttttttttttggacgaagggagtacaagatgcatgctggcgactagctatactagctctagacattagtagtgatac

SEQ ID NO: 24756 - DNA, 471 bp, Oryza sativa
  unsure (1)..(471): unsure at all n locations
agcttcagaaatagccatatactctgcttcagttgtatattatgcaacagtggcttgaaacttgccttccaactaacggcacatcctccaatagtgaaaatataacctgttagcgatcttctcctatccaaatctccagcaaaatctgaatccacataaccaacaagtccatctgtagatatcccaaactggcaacaagcactagatgtaccacgtatgtatctgaaccatttgacaactttccaatgctctttgccaggattagccatgtatctactgacaacactcaatgcatatgataagccaggacgagaacataccatggcatacataagtgaaccaactgcactngaatatggaactctagacatgtactcaacatcataatctgaccttggcataaatctgaagataatctgaaatgtgcagctaaaggagtactcactgtgtttgcatcatgcatattgaaat

SEQ ID NO: 24757 - DNA, 420 bp, Oryza sativa
  unsure (1)..(420): unsure at all n locations
cttcacaagaatatatacgatntaggattgttcatggaagatgtgntataaaacttgtcgtgcacttttttttccacgcaatctcaatgttctctagcccttcaatattatatattatcaattcgcttttctaaaatttaagttggcaatataatgagaatgggtggctctaggaagaacttgagctccatccaagtcatcagctgcacctagtatgatgttcaatcttgtgactgaattcttggatgcaccacaccttattactttngtttatttagtggccacaatgtgctagaaaccaatataaggcttagatttgtctacttaagaataaatatgtttatgcantaattgtctcctatgatgtgtcgcacagataagcatgatttttgttgcataatattcagagaatatataggc

SEQ ID NO: 24758 - DNA, 471 bp, Oryza sativa
  unsure (1)..(471): unsure at all n locations
gatcttaagtcacctgcggcatgcaagcttncttgagattgtgctgcctagttactgtttttctnaactgcacatatggtctggatgagcgtatagcatcttgtaatttatgtgagcccctcgatgcactagtgntgtagacttgttgtattacgcttgtatcttgggtgactgagagacttgagtatcgcgttcattcgaacgatgtggagacgtggagttatcgtactttagcccgtgctgatttttttcccttcacatatagatctgttgcgaaacattttattacagaaatgggcggcttacttttaacatacagaacatatgtactgtggatgcgttgcgtttacagtataatgtcatggactgtatggatgtgggagctctatgactgatattgatgtgattgctcttggaaacattattgtatttacaaacccagtctctattatctctcacagaataatgcac

SEQ ID NO: 24759 - DNA, 431 bp, Oryza sativa
  unsure (1)..(431): unsure at all n locations
ctaatgaaactaaattattagtgtataaaatttcggcataaaccctgcaaataaaaaatataataaattataatgtttatttgaaattctaataggacaatggatttttttacgggagcattcataaaaaagttattgtgagcattggtagtcctatctttgtatgaatgctccttatcttttatgactttttgaaaaaattaaatacatatttttatttcattatctaaaataacttttgcgagaaataatgcatcgcacaacaaactcataataatagtctcatgcgaacacactttatatttntaataatgtaattcataagattctatgttcatcgaaagggtaaaactgtcattattatagagaatagacggtcaactaacgttcaactgacgggaggggtatggaanggatcaaaatcatgggca

SEQ ID NO: 24760 - DNA, 277 bp, Oryza sativa
agcttgatcacgtcaaacagtagtctgtctagatgttgactaactgagataatcattaactgtacttacacaatgattattctgtccggactgttattacggccggctatatacagctcttgctaactctaatattagcgctccaatacccattctgactgtacgactatgtggctgatcatgatactgagaacaatatgctgactgacgtctcaatgttgatagcgtgtgctgtatacggattatagacatgccgctattccgatggagcttatag

SEQ ID NO: 24761 - DNA, 198 bp, Oryza sativa
ccgtatttgatggtcatggatactcatatcggccgcttaaactaataatattaatgtatcaaaacactggtataccatactccataatgaaaccgtacttgacggatagattataactctatctatccatccagaagcgagattgaagatctgcactgtatggagatagagtccaatttataagtgctgcatcatctg

SEQ ID NO: 24762 - DNA, 472 bp, Oryza sativa
  unsure (1)..(472): unsure at all n locations
agcttcagctcatagtgcagtagtcattctatattaagattagctgaaataatcatagtctgaacttccacattgcatattctgcttgcactgctatcatggtaaacgagttaatgttaatgcaagctctaattagtgatttaccaagacctttctcggactgtaggaatatatggaagaacttgaaagagagaacgaaatgcagacgacggtcgaaaagtcgtgatcatgtgctgtagacccaagctgtccatgctgctataccagtgtagcatcttgtctcctcaaccataatgtgtactagttcccacttccagagatgctccagctgctgcaatccatcatgactaaactgtgtgacatgtgaacctaaggctgttcagctntgggtcctaattgacttcatttctatngnaaagatatcanagttagtcggatggtagccatgcttgatngaatatatggtgacatg

SEQ ID NO: 24763 - DNA, 418 bp, Oryza sativa
tactcagctagtcactctacaatgtgccttgatttataggaatatgtcttcttaatctcaccatgcgattgtgtcaagggacatggtttaatctaaaagccgctgagttatttttctatcctgaagccatgtatgtcactcccttacaggaagaatatgccatttaggacagatagtttcaaatatgttcgcataaccttctcccttacaggaagaatatgccatttaggacagaaagtttcatagatgtttgcacaaccttctgatgattaactagattcaatactaaggtgaaaagcctctcgacaagatggctatgttgaagataagtagcagtagtttatctccttctgaaaaatgtggatgttatgtcaggctcttcccttctgtacagaataaggtacctttggagtataca

SEQ ID NO: 24764 - DNA, 444 bp, Oryza sativa
  unsure (1)..(444): unsure at all n locations
agcttaacaagtcaggcatttcttttgcacagatgatggagcaacananaaaattgatgtcttacatcagcgtgatgctccaataaaatcttcatcgtgctatattggccattcatcgcagctgtcagcaatggggtcccagtgatagaatctaaatccacatcaactcctcttgaaagaaacaactctactatttcgcagtgtcctgcaaaagaagaatttctaaataattaataagaacaaaaggttcagctcaatcaggaacaccctataaacagtgttaacagtgattcctggacaggaacagagtttccttcaacagcagtctggtggaaaacaattaaatttggatntaagttntcatannattaatatctaaagcttggcttgagcaaaattcaacatattaacagcanatatgctataataaaggacaataataat

SEQ ID NO: 24765 - DNA, 471 bp, Oryza sativa
  unsure (1)..(471): unsure at all n locations
ctcagcttctttcgttttatgggccctttcacgtattggccaatgtgttttctatggcttaccgncttgcattgctagattacagtttaattcatacggtggttcacgtctcccatctcatgaaggctttggctccagtggaacgggtgcagcctcatttgacctgttttgccgaatgatgaaagtgtcgatatttcgccttgtcatgtgttgcatcacacgcttgttcgcaaaggagctaagatggtggaacaagttcatgtatgttggtcccgccaagatccttgtgccgtcacctgtgagaatcttcatgaactacgacaacgctgtccacaggccgaagcttggggacaagcttcgtttcaaggggggaagaatgtcacgacggctacctcatctgatctacccacaggcatggatgatcaatgcaataaaccaatctcacacaacgagcagagaatgaagtctgtg

SEQ ID NO: 24766 - DNA, 495 bp, Oryza sativa
  unsure (1)..(495): unsure at all n locations
ctcgtacccgngatccttatagncacctgcngcatgcaagctngtgcaatggatggttcattacgctancnntttttnntatgtttacagatggtcaaaataattatttatatctttacggatggtcattatgtatgtttcagtttcaagacataaaattcacatgtaatttggggtgattattagtgctatgtgcgacactagtaaatgagcatgctctcaattagcaaactgtgcaaatttggggacctagttganncngaactaaagtttgggtaccaatagttagacttgctcattggatgattctcaatatggttggtgaatgcatagatgctactcttccagcananagcatatggtgtttgacttctttcaagttaaacttttgaaactntacttccacttaatttaagatacttcaatacttggtttgaaaacataaaagatggtgtgtgtagatttgccttggaaagtactttcatgatattataa

SEQ ID NO: 24767 - DNA, 469 bp, Oryza sativa
  unsure (1)..(469): unsure at all n locations
gggcacacggagagagggcagagaggataatgatgacggaagagaggagatcggcttggcgtatatgtggctcggtgtttttttccacatatgtgttggtttaattaaaaaccgagacgaatggtaattttataggattcaacatgcttagattatgatatgactttccatgctcaacgatacggattgccaagacttctatgacggatttgaactgcacaacagaaacatttgaaactactgcacctacatgaacaagataacaagctacaactgaatataaagacaacatttaagttataacatatattgagcaacttatacgggccaatttggagctcgtatggctgagatactacaatccanaattatatgcaattcangtgaatatttctgaactacttaattatgattataccattaaattatgtccaatgcatcatcgctcgaggaaaggaatgatcaagcg

SEQ ID NO: 24768 - DNA, 422 bp, Oryza sativa
  unsure (1)..(422): unsure at all n locations
agctacatggacaagtgagaagaaagcatctctcttttaaatagntcatgttacagntaacgtaagttacaaattaacatatggtctagctagtaggtaactctaattcacacgtaatataatgaacgtgcactgaaatggagtgaatttcacttcaatttgcattatgtaaaacacaatgcaaattgttccacttgttgcattgggctatatcaaaatacttttttctttgtacaaggtgttagatcagtgttcttgaaattaatatatgaaacttcgtgaattttgactatgtttgaacttaactaaaagggtaatttatgtattttgagattattataggctaagtttaatgatgcccttcggtgcaaagtggatattattagtacanaacatagtgaaaagtgagagtgggtgaaaca

SEQ ID NO: 24769 - DNA, 430 bp, Oryza sativa
  unsure (1)..(430): unsure at all n locations
acttgcgagtctaggactatcgattnggctaggaagtctactttctcaattctaaggttaacttccgggcatattntagttgcccttatttcccttccacgggaatgtactatcattggtactcgcaaattttgggttttccaaccatttcttttcacaaaagcttgcgatatgaaagaatgggaagctcctgaatcaaacagaactattgcgggtacggagttgacgagaacatacccatcacaacgtctggagcatcctgagcggtctcagcttgaatgtggttcacccggcctcgaccgaagttgttggaagcacgataaacttgtccacttgcctgagagttatgacgagactgagctgctgctggagtatgagttctggcagtgctgccattatcatgccctgagttggtgttggtaggattctg

SEQ ID NO: 24770 - DNA, 456 bp, Oryza sativa
  unsure (1)..(456): unsure at all n locations
agcttgtacgatggcattntcatgaagttgtgtttgtcgatggcatttctgggatcaaggtggttgtcgatggcattttatggattttctcataaaagtttgataacgtcacatgaaagaaaaatactaataacttaagtgcacgataaacatgtcgattccgacgaattgactggtttgctttgtttacctaatttacttttatatatcattgttcgttagtcccgcattcatatttgttatttctcgacttgatgatcttatattctgtgttcaatattcttaactgttatactggttaaataattcaacgctcgatctagagaataaagcacttacatccggaaggagagttctccattgaactggcaacaggaggaacggtgctggccgtgctgccgacgataacaagcaggacgatgaccagcgacaggcgggatgacatatagcaatctt

SEQ ID NO: 24771 - DNA, 461 bp, Oryza sativa
tcggatgtgcatcgactacaccgaccttaacaaggcatgttctttgacccttaccccctgcctcgcatagatcagattgtcgactccactgcggagtgcgaccttttgtgttttttagatgcatactctggttaccatcagattcgcatggctagggaggatgatgaataaactgcgttcattacccccatatgaacttattgttatacgacaatgcccttcgggttaaataatgcaggtcctacttttcagcgtactactcgaatttctttgggtaaccaaataggacgtaatgttgaggcttatgtcgatgacttggttgtaaagacgcgcaaccaagagaccttactctcggatctagcggaaacttttgagagtctccgctccgcccgcatgatactgaatcccgattagtgcgtgttctgtgtacctgcgggcaagcttctcgggttcttggtctc

SEQ ID NO: 24772 - DNA, 471 bp, Oryza sativa
  unsure (1)..(471): unsure at all n locations
agctngaatcaacaatcaaaattcatgaatttatatgatttataatgcaacatcttaacaagtacataggttgaagaataaacactaaacacatatacctattgcatttatcactctttctcaaataacgttttagcacaaaaaaacaaagagaatttttgaaccttttcttttcttgagcctttttgctcatatttttctcttttttttattccgggtacgtccctgtcatcaagactgtttccagggattcggcatccattattttgctcacatcgaatacatcattgtcgtcaagactgtttccaaggattcggtattcatttttttcatattnttttattctcttttcacaatgagcaattaaagctatttgaggaataacaattcaacaaagcatatatatatagagcatttataaatcaaaccatatgctagcatcaacattgcatattntcttaattcaagtat

SEQ ID NO: 24773 - DNA, 402 bp, Oryza sativa
cttgcgccatccacaactggttccaccacgcacgaaccacggtcttcgtccgaacgcagcgtgtgtcatgctcactatgcacacaatcaggatgaacagatcatgtgcatgactcaacgtagaaacagagggatacttactactctgagcagctagacttattactaacgaatcacccccttatgtctgactgctctggtcaagagaacagacactgatctttgaacgaagctcctgatacctggttctgcccagagatttggtgaatatatcaccgagctgctccgcagtgccacgaacatcatttcgatcagtttcttgtctgcacactcactgatataatgatatgtgacatctatatgcttactccggtcatgatgcactggatgtttatcaatgata

SEQ ID NO: 24774 - DNA, 394 bp, Oryza sativa
  unsure (1)..(394): unsure at all n locations
agcttgatcgattccccctctgaaacaagaagttctggatctgtaggtataagatcaatcacttggcgtccatccgatgcatcgactatggatatttcatatccccccttttctttacgcagtatttntcttactacacctgttgacgttgcattatagaccgtattggtactcttgctaccatcaggatagatctgtccccttcctcggnttcccnccacatatatgggatattttaagaaatgaacgtctntcttcatagcanggtcgggggaaagaatgggaaagacgatttcactatatttcttaccgggaacagggcctatcacaagatatatttttttattgggacgataactctgaaaagagagatttcctatcttttctttcaact

SEQ ID NO: 24775 - DNA, 408 bp, Oryza sativa
  unsure (1)..(408): unsure at all n locations
gtcacaattcttgaagctcgatcttccccccaagatgaaccatatttcccagagaaaccatgaaccataatagaagaagctggcccacccatgagtaaatatttcatagtagccctattagaccgtagatctctcttggtatatccagacaatatgtaggaacataaactgatacattctggagctacaatgatagttattaaatcggtagcaccacataaaaacattcccnctagagtagctggtaatacgaataacagaaactctgttatagccatttctggtctttcaatgtactctacggatagaggaatacataaagttgaacataatataataagaaattggaagatttcgttgaaattgttcgttgggaaattcccgaatagctaattatatgttcttctc

SEQ ID NO: 24776 - DNA, 125 bp, Oryza sativa
gatctcttttttctcctattatgagtccggttactattcactggcgcgtcggtttacaacggcgtgaacgggaaaaaccttgcgtttcccagattaatctgccttgcagacattcccctttcggc

SEQ ID NO: 24777 - DNA, 286 bp, Oryza sativa
  unsure (1)..(286): unsure at all n locations
agctntangatgataatcttttagaaaatttaattgtgttaaccttcggtattctatcttcacctgtgcactgtttacaaatctggtcattggttcttatttcaaaatgttgtagangcccgancacgacactacccgctgcttcaacttggtcagatctgtggtggaacttcgtgccttggccgctcatgcctgtaccctctcacttcctagtaccgcgtgggtgnacacttcgtagaccaggtagtacttgaagcactttggtaccccaccgcggtcaacatct

SEQ ID NO: 24778 - DNA, 453 bp, Oryza sativa
  unsure (1)..(453): unsure at all n locations
agctngatggagcanagaccgaatgatacttcatcggtctcttgtgaaactatntcggttacacctatgcctaataccggaattgttaataattctctccctactaatcctattgatgttgacaaaaggaaagagaaaagtgttgttattggggatcttcggcccaagaataggataaataatgcaaaggacgaagatcgtaaggttacaaaagatgagtcatctagttcccacaagaccaaaaagccgaagctcactcttgagatgcttatggctaagtacaagaaaggattagccagtcaacgtattgataaccaaactagtgattcanaaagaccanaatcatctcgtatgaagagatttggtcaaacaccaaagcaatcggagccatcaactataccaactccatacaaacctgcggttgtgatgccatggtatccacattcaatgtca

SEQ ID NO: 24779 - DNA, 383 bp, Oryza sativa
atcattacatggatggaattgaccatatctttcagaaatgcttttatacctacagctgtgatcaagatgaaaaagaatgaatttcgaggattaagacaaggttttatgacagtacaaaaatatttgaataaatttacacagctttctcgatatgtgatatgttgcttcagacattcaagatgagaaagagaggattgaaaggtttatagaaggattacgtgatgaacttcgaggaccaatgattattcaagatcatgaaagttttcaaagcctagtcaataaagtggttaggctagaaaatgatcgtagaatggtggaaggattccgtaagagaagaatgaatttacaacgactatcaccaactataaagtcactacaagttc

SEQ ID NO: 24780 - DNA, 458 bp, Oryza sativa
  unsure (1)..(458): unsure at all n locations
gctgatgggcatctaatacatctgtctaattatttcgtcatgcttctgtgatgtagtatgcggcagagcccatacactggctcaacatgtgtgtcgaactttagcntccgccgtgtatctaccacaaaattaagcatatctccgctgctgtgctctaccaaacaaaattgacaaaattattagtaacacaacttatctaagatttagtactacaaaaattttggtatggtttcaaattcaaatagagcattgataatatatactttgtgcatgcttgcgcacaagttgtaatgtatcatggtggacgcacggcatagataattcagctactggttaaaacagttctccggtatattatagtgcgggtgcgtataattaaatgtataggaaaaatagcacgagtgatgatgttttatgtcctgttgtcctatcatgtaaaactacaacacaatattaat

SEQ ID NO: 24781 - DNA, 459 bp, Oryza sativa
  unsure (1)..(459): unsure at all n locations
tgtcgatttctaccattttcccatcaagttttctctttattgtcagtactctgatctcctcgtggtttaagtgggctggtcctgttcccattngcatgactatattggagttgttgggtctacagacgaacctatatgtggagatgttttctatttttctgtccttaagcacatgccttgcaacaacatggttactgatcactgttattatattatattatacgcgctaccctctaacgcatgacatataattgtaagagttagccaaccaagatatggagggcatatgtgtctgtttttatccagagtctcccattctactgcaatcctaccttaaattacaagtgtgaattattgtttgtctcatgggtgccttcaaaattgaacactgagcgctcgtgggtgaaaagtggtgtaggattactactcngcccactcctaggatggcaacttgcacac

SEQ ID NO: 24782 - DNA, 474 bp, Oryza sativa
  unsure (1)..(474): unsure at all n locations
agcttgacgacgacggacaatggcgaatgtggctgttgtgctgatgttcttggtgcagatcatgatgagcgtcctcngcggcggcggcgcggcggcgatgccgctgctggaggtagcagcagacggcggcgccgtcggcatggtgacggagatgatgctcggcggcgtgaaatcgaacggcaacccatgcacgcacttcccctagagggagggagcagagatcaaaatcaataattccgacgaactgtaaattcctgaacattgttggttcagatttgggatcgagcagccttgattccttgaagcatcggcagagatcgaggactcgatcgccactgcacctagttccggagcataattcgctcttggatcaatntagtagtttactttgtactttagggganaaaggacatagttctttccaactttttaggaagaaaaaaatgtacataattcactttgtttcatttacac

SEQ ID NO: 24783 - DNA, 471 bp, Oryza sativa
  unsure (1)..(471): unsure at all n locations
taacacaactctatatctaatatttttcataactggctctatatatctatagatatggatatgtgaatggttgtgtctaataatattaaatgaatcattttgttcctatttctaaaataaactatgaaaatttaagcattgcaatttaacttacatactttgaatccaatgtgaatccaacttgtgcaaatatagcaaaaataaaagtttacatttggcacaaaatattttactataagagatatagtgtgtgtttggataatgggaaatgaggggtgggattgggattgggattggaaaatgaatgaaaggttacgattagatggatgagagagaatgaatggctgagatttaaagaggggtggaaaatcatttcctttatacatntgccaaacactgccataggtaatgatgaattttttaatagcgcagaattaaatttctaattgtctttataaataaatgtgactg

SEQ ID NO: 24784 - DNA, 476 bp, Oryza sativa
  unsure (1)..(476): unsure at all n locations
agctngcgagcgagaccattcagtatctgatgttatgcatctcctgcctgagcaggctgtgggaacagcatggcctgcttcatcgacgggttcgcgagaagcctctgcttcctcaggataacatctgttggtatggatgtcangatactgtccagcttcggaacatcctcctcggcgacaaacacgccaatctcctcccaggggatagcatcagcaaaggggaggacaatgtcatctgcaatgatcaccggaatacaaccgaaaaccacagcttccaccagtctggggctccatggagcccagcccaatgggcacaagcagaacacagatctctgcatatcttcgtagtacgtgggtgggtgaatcggtgagatgtcaaacagcgggttgttcttgaaattcttccaaaccgacgcgcgggcacctctgataggacatacagaaacatcagactccacatgctacgagccaatgag

SEQ ID NO: 24785 - DNA, 473 bp, Oryza sativa
  unsure (1)..(473): unsure at all n locations
actcggcctaagctaatgcattgtcttgaagcctaccctatctgtgatttatcaagtgtataatcaaggagatatttaaccatttactatatttagatgtggcaattaacttttttatcactgggcccacatgtcatatacatatgtggacccatatgtcattgagatagggatggtaaatagttatttgtcaaatctaaaagtgtcaaatagttaaaagccccataatcaagtgatccttggctgtagcttgtactgcgtgcacgtacgttgccaatcataattattttgctagctccatctcatcgatcaccagcttcgccagctgggttattatntggaagtgaatgccaagccaagcaacgcatggacttatccctcctttttataaaaagtttctaaacattttaatatataatcttaacagaataacttgtttctaagcaatacaatatttgttttgtgaaaatata

SEQ ID NO: 24786 - DNA, 476 bp, Oryza sativa
  unsure (1)..(476): unsure at all n locations
agctggttcattatactaagatgatgtatacatgtttgtacagaaaccatgcaatatgtaattgttcgagttaacatgttcacctcaaatacaagttatgtatatcaattcatagtaacaacccttcatctaactggtcggttgcatttaaggaaacataagctttatgcgctatgagagttaacggcacaagtggtccaaatcatcaatgatcctcacaacattcaacttattccctttctagaaccaaaaatctagctagaaaggtttaccaaaatcgtattgtccaggtgtgataaataccatcccttagaacaaacctaaacatgagctataacccaccactgtcctctcaagagggtttgtgcctagccttccttcaccccataatgccccaagtcatccttttgccatcagaacccncatcactagattcattttaacactgcgaaactcatcttctccacccatggtgc

SEQ ID NO: 24787 - DNA, 474 bp, Oryza sativa
  unsure (1)..(474): unsure at all n locations
tatcttattggtgggagtgtgttatattatccacagttgtcttcgattagttcttatcagctgtatgtggaggttagtatgcaggcaatacaccgagctctcaatgctatgcaccttttttgtgtttttatgaccttttcaccttccaggtagtttgcgaagagctcgagtggcttccattntacagtggtgatgtgccagctgcaacaattgaaggtagagaggatgtgcataaaggagaaataatatcaagagtgctaaatgtgtgctcttattggatgactagttntataaagtacagctcatggcttgagaacccttcaaatgtaaaggcagccagatttctgtccaatgtgtacatccaaattcagtcatgctctctcacattttgccgcagatatggatgcgaaccaacgtttctaatatatggtcaaatntttgaggcattccatgttgagtgattgcatgaagact

SEQ ID NO: 24788 - DNA, 468 bp, Oryza sativa
agcttaagctgatgaagaaaggtaggcaattcactttatattccaacactaatagctgcggcggcggctgatggaccagggcaaccatgacccctgcatcttctactgccagcatatgcaggaccttcttcttccatgcccacagtgcacactacttcaagaacaggacaagagcagagttactaatcagacagtggcgaagtcgaaaattgagaattgagacaccgaatcagtaagaatggggatggagaggcaagaaattccaagatacataccgctgcctcctcgtcgtcgacaaccctctcgccaagttaccggatccaggagcaactgaatgccaccctctacaggaggagcaccgccgccaggagcccgaggggcagggatggctaatgcgctgatgacgtggactctacgagggagcagctgagccaccgcggccacctgtatgacgagcgccaccgtgat

SEQ ID NO: 24789 - DNA, 449 bp, Oryza sativa
  unsure (1)..(449): unsure at all n locations
ccttgctcgtcccgagtgaaagacgaaaggaaacaaatactgggttgttgatcacgagttgctactatgctgcatatctcaaagatacagccgcaaggtatatgtactctctctcagattaaataatctgtggcacggtggcttacccttacccctgattcccacgagacactgcttttctttgccttgggcggttgaaagacagaacagcaattagagtaccaaccacccggtctttattcaactctagttccggaagttttcaaatgattgtacaaaagaaaccaagttcctcaattgatccactcagtctctctaagtgtatcatttttaattcctcaccaaaagatgtctttttgattcctactctaagggtntgatatgtggagctcggtagagatcaaacatggcattcgcatctgttactatagtcaaaacttggactatag

SEQ ID NO: 24790 - DNA, 440 bp, Oryza sativa
agcttctgacctgtagtagcacacatatgctgttctaaactgaaacaaactgtgcaagacaaaacacttcagtgaacatacagtaattactagcaacaacagtcaacggcagcactcaattggcagcactcaattgtttagttcacaccaaaattggaagtttggttgaaattagaacgatgtgacggaaaaattgaaagtttatgtgtgtaggaaagttttgatgtgatggaaaagttagaagtttgaagaaaaagtttggaactaaacaagagcatattggcatacaaaacttttatgcattcacgaaaaaacactggcgcgccatcaggctatgacgacgttgtagagttctaggcacacgaatctttggttagggcgtttcaagttggtacaagcgccacagcttaatttcatgagatgcttctgcataatatgga

SEQ ID NO: 24791 - DNA, 456 bp, Oryza sativa
  unsure (1)..(456): unsure at all n locations
ctaagcttcaatgtgccatcctatctaatgagcgtgtgttggctctccangcctttgcatagcttatggtgtacttgaatttgttctcgatgtgcctaataattgattttggttcaaagccaatgttaccaacaacactgctgtacatctcacttgccacaaaagctgaagtgatgtttcggtgatacttctccaccccttgtaagtagcacttgtgctcggtcacaatgctaactttccaataatcattccatttacccttatatgcatggacacgccacggacattctttcttcatgcacctcacttcatacacataatttgttgacttgaccaccctaaactctctctgcaatgaaactggccaatgcttcaccgcctgcttcatctcatacttatgagcataccttgcaccctcaattacctcgttctccttatactcccatngtacatgat

SEQ ID NO: 24792 - DNA, 466 bp, Oryza sativa
  unsure (1)..(466): unsure at all n locations
agcttggacatgctgcacagtgcaatgttattttcattaaaactaaaggatgtagataatggcaatgactggaaaagaaagcacagtgatatttcaccacatagcatagggaacacagatgggcgctggttgccaaactccttagtaaatacatacatttcataactaagtgcatgtcaacaaaaagatacatgaagtagtggaaaatagaagacaaatgagaatcataatcaaaaatagcaaaataaaaggccaaaagtacatgttttgcttatctntgtagtccatgttttttattccacaaatatattatgctntacaattaactagtaaacatacaaattgtaatcctagccatagaggctcagaaagatgagcttccaaaattattgcacaggaaacaatttaggtaatcaataacataaatgactatgattctagaaaccaatagagagtgaccaatata

SEQ ID NO: 24793 - DNA, 437 bp, Oryza sativa
  unsure (1)..(437): unsure at all n locations
ggtgtgtaccgttctcttctctcagaagctactccaagaagaccttgttgccggcggcaagcacttgcaacagctccttgtcgagccacagtatttgaggcccgaattccacggttgctgctgaagctgccgccatgattgattataaagtccactctgcactctgaactttgcagtgctatttatactggtctgggtgaatctttgggccgctcgctagttgtcgatatacgtacctactacgtactatatgcattcggcagagtcgttcgaaatcacgtagaactaaatatagaataatagagtgcatgttccgttttgcagattcactcttactactttcttttattcatcttcaaacttcaactttttcgtttgtcattaacacgctcttcaaattattaaatgatatgttntctacaaaatgctctatatag

SEQ ID NO: 24794 - DNA, 465 bp, Oryza sativa
  unsure (1)..(465): unsure at all n locations
ctagacatgctggaagctatctctcatttaacaaccggcaatccggcatggacttggagactagcgagtccctctgggacctcagaatcaattcctagcctgaatcggggaatttcttcttcttttttaaaatagaaaggcctgacagccttccccttttctcatatcagaaaagcagacagatttaaacttgcaaaatggaaaaggaagaaataaaaacatccagggaaacttcgcacacagctcatgatcaagtccatgccggtttagatccaaagtttggatccaaacttcagtacttntccatcacatcaacctgtcatacacacaacttttcagtcacatcatctctaatttcaactaaaatccaaactttgcgctgaactaaacacctaagcattatatggcacgctagctgaaatggtgaataatcctgcgtgtcaatggcgcacaccgacatattac

SEQ ID NO: 24795 - DNA, 370 bp, Oryza sativa
  unsure (1)..(370): unsure at all n locations
atcttcaccagccaccgattacactcggatcatttcacccaacttacatggaaccgatgcatcgacgctacacatatacacgacacctgccttgtcataacacgctctgataccaaacgcgttcccgatgcnattcgtctcacacccacactgaactcatgatcaccatgcgcagaatctgaatgccgccgctcaaaaaccgaaggaaaacgcggttgtgatggaanacacacgctcaccggttcgtactcgcaactgagcagttagtccggcggatcgcgatgcctctacaagctgtcactgttgttgcggatgatgatgaacccatcgcggcgcgattgataccaatggaatccatccataatgggga

SEQ ID NO: 24796 - DNA, 467 bp, Oryza sativa
  unsure (1)..(467): unsure at all n locations
ttgcgggaacatagatgcattactcagctatattcttttcttaccaagtgcgatataaaattaccaggatcatctggccaaaaggcgttatgattctcgacaacctctggttgctatagcacgactgacgctggtctgattaccaattgattttgtcagtacaaacctctcttgtcctgaacaagaaacaacttaatctctcttattataaacctcaaattcatatctcgcctttttcccttatatatccttattggtcactggattggacaacataacactgggacacatatacaaattcaatagtatagtgatgtgtaattcgcgtgccttctctgtgtctataatatgccaaattttctattgcttacacccgtttcttattatgttacgggatgttggtgatttttgagaactggangatgatcgtggattttgattgtaaaagcataaaaaacagccaccac

SEQ ID NO: 24797 - DNA, 483 bp, Oryza sativa
  unsure (1)..(483): unsure at all n locations
catgcatgcttctccgatggtgggtattttcttctttattaacggtatttaatatctcggcttatgcgtaacgagctataactattaattacagagtagtgcacaataaaaactttatcacaccaataagaaaagacacccgtgtgtttttttctacacgggtgaagaatataaattcttggtttggattactatcctctgaacttataagtcaatactacactatatatatcgctttattctgtgatcgagaaatatcactgttgattattctgggtacattgaaagatgggaaaattagggcgctcgcagccgggtgcttaacaaaaacgcattatttcgtgtggaggtaccgcctgtctgcacccagngagctacgaatatccatattttcgcgtgcgggcagcctaaccacacggtataatacattatcctgtgcgcgcatcgtataccgaccgcacgatataatggattatcccgtgt

SEQ ID NO: 24798 - DNA, 210 bp, Oryza sativa
  unsure (1)..(210): unsure at all n locations
aggggtcccatgcggtgggatgcatgatgtttgatggcggtaccctatangtggccctctatcctggactgctggaatgagtaactcattagatgaatctcatttggatatattctgctcaattttacacactggaaaggtcaatactctacatagtgatgtatatttagctatcagctgacgataatggaatatggcgcacattgtact

SEQ ID NO: 24799 - DNA, 478 bp, Oryza sativa
  unsure (1)..(478): unsure at all n locations
agctntnntatttttaaggttccccattatccaattagactgtcggaaggtgctttataaaatagatgttgatggttaattgatatctttttacagaagtaaagaaacatatataattgttgtatatatacttggactcagactctcagagtgatgggtgaacagtttgaaattcggtaagaaataacggttatcgacaaaagggctttggttatattagatgatgtcagtgatttcactcggcttctaacaagagttgaagctctttgcttattagtggctgacgactaccttggcgccttgcatagtcctttactcttttagaacaattntacattcatagcagttgccgttacatccggggctagtgttttgtcgataaaccacttaatttgctttagtttctcctgtgaccatttttgccttagtatccnctagaaaccttttggaatcttcttgggtgtcccttggttggttc

SEQ ID NO: 24800 - DNA, 452 bp, Oryza sativa
  unsure (1)..(452): unsure at all n locations
agcttgtggatgatcangacaactgcacacatgtgtatgttctctagatccgaatccaaatattattgaactcaccagagaaggcagattggactgtaaacttgacttttaaatagttcataactcacttaatgccttgctcaagccaaggtgtgataaaccgccggtaaccgcgcggttaccgcggntaccgtccgtaccgcgggggtactgttacccgtaccgcgcggtactgtttaataaaatttgtccaaattcaaatatttaaataaaaagataaagatcaaaataaatagtgaaggtagcgcttgatttatagtcgtttatggtgaagaaatttctccaaaaagagtaatatttattcaaattngagagcacaacggagaataaattggataatgggaattagaaaaatatatgggccggcccgttactgtgcaacccattacaca

SEQ ID NO: 24801 - DNA, 418 bp, Oryza sativa
  unsure (1)..(418): unsure at all n locations
ctcatcgaaacaatgaaaagtagaaaaggtggcgatgcgctgaaagtgttatagaactaattgttaatgtttacaaagtctcgggcacatatttattaccaaaatacataatattgtgacattggacacgactccacttttattacaactctaaaatacgaacaattcccttatgctgaactctaccgaaaatatgtataaactactagaaatcctaattattagatacaattgcctgcttcggactcaatccatgcctggtgttggatntcttaatgacattactagatatataattcgcagcgatggcgcataaatacttctggtatattatggttacagggttcatccgcatgcacacggatatactattgtagcattcacctgagtgtattcaagggtatcgtattatttatcc

SEQ ID NO: 24802 - DNA, 464 bp, Oryza sativa
  unsure (1)..(464): unsure at all n locations
agcttgcgcacatatgaatccaacatttttcttctntttagctccctcctccgagcattgctcttggagtgttgggtccaatatatccatcaaggcgcctatattgtagtgcttccatatctgaagaatgcacgaagcagtagagcaacttcattagggttttcgggaatgctacagngctaatactttgcaataggatggaaatttagcaaaattaccagtgacatgagggaatgcccttctgctgatgaagcaaccgagttgaggctcttccgaccggtgatgatctcgaggactagcacaccgtagctgtagatgtcagccttctctgtcagttgcccatggacattgtattcaggagccatatatccactgtacaaatatatatgcatggtcagtaccagtttttcagacaaattgcacaatttgatgacagagnaatcttggtccatccaattaaatac

SEQ ID NO: 24803 - DNA, 486 bp, Oryza sativa
  unsure (1)..(486): unsure at all n locations
ttcatcgacgacatacttatctattcaaagttcgtttataaacatgagcaacatctccgtctggtactctagaagttgaatgagcactaactatacgccaagttcagcaagtgtgacttctggttaacggaagtcaaatttctgggccatgtcattacagctcaatgtgtggcagttgatccatcgaacgtggagtcagttaccaaatggaccccaccgaagaccgtgtcgcatattcaaagatttcttggacttgcgggatattaccgccgattcatcgaaaacttctccatgatcgcccgacccatgactcagttgcttaagaaagatgagaagtttaaatggacagctgagtgcgataagagntntgaggagctcataaagaaattattatccgcaccagtgttgattctgcccgatcagatgatagactttcaagtctattgcgatgcatncctgcacggacttggatgtgtactaatgcaa

SEQ ID NO: 24804 - DNA, 460 bp, Oryza sativa
  unsure (1)..(460): unsure at all n locations
agcttgcttgagaggagtatcgaacctgncaccgcttaatggccggatcgatcgaagttctgttactatgctcacggtggaacgttcaacccagtggatggctccctggtctttagcgatcagatacgcgagggtgcgagtcgactaacggacgcagtggaagcctcttctcaaggcacgttccgacccgacagagagaaggacgagctgtcactcgccctgcagactcccgagcatccatgacgaacacgagggataggggtgattccttggaagattggattcaaggaggacatccacacgtacaggagtcagatgaggagcaagagagatatcgaggcgaagattgcagatcttgagtacagggtatcgagctatgagctcagcatgcaagaggaggtggcaaggaaggtggatgaacgcatggccgcacatcggtcccaggatccccagccgtaca

SEQ ID NO: 24805 - DNA, 410 bp, Oryza sativa
  unsure (1)..(410): unsure at all n locations
cactttcgtggttgattcttcgattggagcttgaatttcctgggtctttgaacagaattcgaagtgattatggtggagagttaaaaatgcttcatttgaacaatnttgcaatgaaagaggtcttgaacatgnaatttcttctccttgtgttcatcaacaaaacggtgttgttgaaaggaaaaatcgtgttttggttgagatggctagaacgatgttggatgaatacaacactcctataaaattttgggctgatgcgattaacactgcttgttatatttcaaatcgagttttcttgcgatctaaacttggaaaaacttcttatgaacttcgatttggacatcaacccacagtttcacatttgcgtgtttttggttgcnaatgctttgtcttgaaatctggaaattaggata

SEQ ID NO: 24806 - DNA, 95 bp, Oryza sativa
atgacgaacggaaataactgtgataacggtgctatacaaagtattatgcgatgagctctgactatcatagctcatccactgtacacatctgaaat

SEQ ID NO: 24807 - DNA, 466 bp, Oryza sativa
  unsure (1)..(466): unsure at all n locations
agctngaggtagttcccgatggtgctgaagttgtgccaccagagcgcgtacgtcctctccccgtacttggcggtgcctaccacggacatcatgatggcagccaccacgatcatcatcccgttgccggcgatgttcttgtagaggacataccctactccgaggacctgtacgacaagagtcacgaggtgacgcttccagagcttgttgtcctcgagggagtaggcggtgatgttgtctgggccgccaaggtgcagcaggaggaatggtgcccagaacgcaaccaggttgtgctctcgtgcggtgctgctcanggaaagattaccgacggcgtatattgcggtcgagtcggccagctggtacgccagccagaggatgaacctctccaccggcgtagcttcgcgccggcgtaccccggcgaagatgtggaggacaacctgcaacgtgaggctcaagagcaccaggatct

SEQ ID NO: 24808 - DNA, 217 bp, Oryza sativa
  unsure (1)..(217): unsure at all n locations
ataaagagaaagcttggttttgtttatctaaacgatttctgctggtcacgcgcgcggatgaaaatgcagttccaaacacggaaacatangaataagttaaattattgtcaccggactatgtgccatcaacaaaacgaactaacaaatcaagtttatctctattgattgctccttatcggcaggaaaatcggaggaggtcgctccggtatatcgcaat

SEQ ID NO: 24809 - DNA, 476 bp, Oryza sativa
  unsure (1)..(476): unsure at all n locations
tgggaattctttcacattggtatcattgttgcataaataccgaacgttaaatagctccccaactgaatatggaatggtctcgataggcaagccggataattctaacacagcaaggtacttggattctgagaaaatgaaataagaagctgaagataatgccatgctagtgtcaaatgctacgaaagtacgtagcctgtatggatctacagttgatcgaatntcactgttgcattggagcacatagacgcgtcgagagtctgatcccacttgtaccaccccatgagtgtcatcataaactgtagagaaactctctttctttgattggaaaatggctagttctcgcaaaatatcatgcattcgaagacactgaatcctattaatactattccttgtacgactngaatcatgcttcgtcagacaagctctgttaagtaaccttcatcaacatcttctaagctgcatgttcctttctgttc

SEQ ID NO: 24810 - DNA, 438 bp, Oryza sativa
  unsure (1)..(438): unsure at all n locations
agcttcanaatttcttcaaaatagatgggaggtcatgccaaaatttctagtgaatctattgtggtgattatatacaaatcggaggtgcctaaaaggttatcaacttcatcctccaatgttttttttgtcatattacatttggagctatgttttgcacacttttttgtgtccaaaatttagttgtaaagtgatgagagaagaaaattgtgtggggaagaaagaatatatagaaatttagcttatttgctaaagaaggttttataaaatagttgagaatgaaaatatagtgaaagttaatcttacataatagaaaacaaactaaaatgaaaattaatagaagtacacacattaantattagttaaaactttagaaatagtaaataagaaatatttggtgtaatattntataatttttggatgaataatgatatgtcatta

SEQ ID NO: 24811 - DNA, 389 bp, Oryza sativa
ttattggtaagatacagtgtaagttacgaaatttatggtgaaaaaatacatgttaaaaaaacttaactggtgttataatgtcacatcgttaatcctagactaaatttcataaaaccataactggtgaagttttataaaatttactcttaacactaagctaatcgggttgcagttacattgacggggggccctcaatcaactgcacggtcggccgcatggtcgcacggaacagtgaccaaagatgactactctacctatctagctagccccttgttcgcaatcgcacgcacgcgcgatgatggttcgtcgcgccggccatccatccatccaggtagcccatcccaagctccgctgcgtgcacgtctctgtgccctggaccgcttgcggtg

SEQ ID NO: 24812 - DNA, 386 bp, Oryza sativa
  unsure (1)..(386): unsure at all n locations
tgtacgctaatatctacatcgtttcatgtgatcagtcgtactagccaacttgctgttatactaacaaaaaccaccgccgccgacgagcaccagtctatgtgccgtgctgtgttgaacacgcgactacgcgagtagaacccagtgagtcgccgtctgcagctgagagtcgtcgatcacaccgtacacctccaatcagttcttcatttatgcaatgatctgatctctgcgaccggattaaacaatgatttcgagtgatgctntccagaagcacctgtatgatcacctaacaatctgaaactctncaggaactgcacttgttcatatgacggatcggaactgatcatggcctacctgccgggagggattcactgttctactatctatta

SEQ ID NO: 24813 - DNA, 275 bp, Oryza sativa
  unsure (1)..(275): unsure at all n locations
ccacgtgggttccacgctgacttaactgccacgtagaataaaactgtggtcaaaaccaccgaatgacctatagtgaatggttttntgtanaatgattgatttttgtaaaatgattgatgtgctatatctgctcttgtggttggagcacgattttgtaactcgatgacaatntgaaggacctccggtgtactgtttcctataagaatcgatttacttggacggtccaacccatgtatgtggataacgagcccacctatacatacccgcacgttcac

SEQ ID NO: 24814 - DNA, 470 bp, Oryza sativa
  unsure (1)..(470): unsure at all n locations
agcttctccaccatctcgctgctagcaatagtggcagtttcctccatcaatgatcatgcagcaagaacgctctttgatgacgtacattggttggacaatgtgtgtcaatgaatttgctccgccttctccatttgtgcactgaggacacgctgcacaatgaggttctcatagtgctctgcatcattagccctaatatgctcttctggcggctcctcattatntgcatggtcagctgcaagcaaagcaagtgtatcctcatcgaaatcactagtagacaaatattcaccatcattnttgactaccaaaacatgcttgctatggtagtcacgctgcatgtgcccaaagcccttgcaatggtgacactgaacatctcttgtttacccgtggatgcaatngaagaagcactcgcggctagctaaacagcctttgtcgttgaacttgcangatggccacgtggctttgtactggat

SEQ ID NO: 24815 - DNA, 473 bp, Oryza sativa
  unsure (1)..(473): unsure at all n locations
gtcctcatcacctgagcagctacagtccctaccgtcacagacgtaccaattccatgaacggttcatagagatgagcaccagcggtagggagattatcggagcgaggatcaagaacgccgacttcttacaaggagaagatgttctctggatcaattttaaggatatctacgaactataccagctagacgtcgtcgacgtctctcttctgagcgcatggattntgtacgtatncgtgagaagtatatttcttacgttcctttaattagctccatgtatatatgtacaccataaataacaattcctttattgttgtaaaatggagattcaatgggcccgaacggcggggggtttcgatactggattcatcgaccctcggaatgtaaacgtcgaaatggtcaccaagtatccacaggccactgangaanatctcgtccatctcctcaaggagcagcatttcaagacgttcatactac

SEQ ID NO: 24816 - DNA, 478 bp, Oryza sativa
  unsure (1)..(478): unsure at all n locations
agctntggatgactatctatctagggttaacaaaattttgagtgatcttagatatgttggttcttcttatcgtgttaattacacacaatttgagggttctcgccactttttgaatggtcttgacatgtctatntgggagatgaaagttacatctattcaggagtctggtgatatgtctactttgactntagattcgctttacacgaaacttaaaacacatgagatgaatattctttctcgaaaagttgattctaagtctagtgctctggtttcttccttgacttctttggatgatggtgcttcttcatcaaagtcctctattcttgcttgaactaatgccatatccgatgagcaactcgaatagttcgaagaggaggatttggctctggttactaaaaaatnttctcgagctataaataatgttacgtacaggataagaagtggtccaaatcgttgctgtgaatgtaagtttcttgat

SEQ ID NO: 24817 - DNA, 312 bp, Oryza sativa
agcaagtggatcatttaatatgaagagtgtaaataagccagaaatagcttaaaaagtgaaggatatgatgaaatagtttgcgaagaaaacatatttttttcatttttaaatggaagtttaattcaattgttgctataaatataaatgaatatgtattaccacaagttgcattatggaaaaattgaaccatttattttatgagctaatgggacgataatttgtcatggagaatttcccagcaatatatatggcgggatgctcttaagcatgcaccatatcgatcacacattggtgttcgatataattaagtat

SEQ ID NO: 24818 - DNA, 313 bp, Oryza sativa
  unsure (1)..(313): unsure at all n locations
agcttatctcttacgctctatgaatggatcagtcagaacatcaccaccgggccgctcgtncgccgccgactggtgttctcgcctgcacggttggcctattatgccgccgttgntgggcgtctacgtcttcaccgaccggctttgcttcgccgccgccgactggtgtttccgcctgcacggctggccttttatgcccgccgttgtgggcgtctacgtcttcaccgaccgacttgccttcgccgccgccgactggtgtttccgcctgcacggctggcctttatgccgctgttgttgggcgtccacgtcttcaccg

SEQ ID NO: 24819 - DNA, 387 bp, Oryza sativa
tcaacttaattcaatgatgctgagaatcctggtctatcctgtccgtacgttctccatcgaacggatattgtgaacccaaacggagttcggagaattcttcaccgaccccccaaaaatcaagtttcttggacacagattctattctactaacccatactacgtaaaagcgtacgatacttggctaaatttagacaaaggtgtctgtaaagctaagaaaagctcgaaggtgcaatgaaacatgggcgacatgatgagacgaatacgtgtgcaccagcatggcgtggtgctaagcacatgaaagtatgtgagattggcaagaaaacgaccactgattagagagaatgttatgtgccatgcgtgcgtgatgcagaccacgagtacaccgtg

SEQ ID NO: 24820 - DNA, 463 bp, Oryza sativa
  unsure (1)..(463): unsure at all n locations
agcttcgaaacatgccttctgtgtgcctttttcttaatacacgtatccccgtacacatgacaccggtgtaaacaccgctaactcttcctaacaacaggactaacccttttaacaacccgatcaacggtggaaagaagagtgggaacgtgggcttctttcacagtgcgtacctctctttctcttctttctcgctctgttctggaaactaactactnggataagctgctctttcgaaaagagctctaacatcagcagctgggtcccaaactcataacacataacatagcagatttctttgatttctagtgccccaatgcgccgccataagggaggaaaganagctcaagagcagagcggtttggtaaggccatcagcctattgatcatgttggggtggcccctctctgataaggttttaaagttntcanaacgaanatcanatgatccgaanatcgtataaaaat

SEQ ID NO: 24821 - DNA, 435 bp, Oryza sativa
  unsure (1)..(435): unsure at all n locations
tacccgcatgtacaccatacacacacttatcggggttcatttttatgcgggcggagcggagattctcaaaagtttccgctagatctgaaagtaatgtctcttggttgcgccgttttacaaccaagtcatcgacatacgcctcaacattacgtcctatttgactacccaaagaaattcgagtagtacgctgaaaagtatgacctgcattctttaacccgaatggcattgatgtataacaatatgttcctacggtggtaatgaacgcagttttttcctcatcctccctatccatgcgaatctgatggtaaccatagtatgcatctagaatacacataatgtcgcaccccgcagtggagtcgacgatctgatctatgcgaggcatgnggtaatgatccttatgacatgcacttgtaatgtcggtgtattcgatgcaca

SEQ ID NO: 24822 - DNA, 459 bp, Oryza sativa
agctcgacgacgacaagaaccagctcttcgctatttctatactactgctcgtatggccttagctaacacacatgttcgcctcatggttttttgtaaccgtgaatggacgaatcaatcccaagtgtattctactactccactcgatgatgaattcttgatactcagagaactcatcactcatcctctgtgtatactagctcatctcatccgtgtcaaataaaagtacaaaaaaaaaatccattcgagaaagcaatttcatgctgtgaatggcatctgcaattcaagatagtaatttctcattatgcataagatgatgattttcctgagcatattccctgcagtatgatttgaggagggggcaggatgggtcgtcatgaactcgattgatgatgggaaaaccaaaacactgtggatgtaggatggcgaactcgatcgatcattcattcagagcttgcacaa

SEQ ID NO: 24823 - DNA, 487 bp, Oryza sativa
gctcaacacagagatcacttggataaagatcttgtcttgttgcaacccactgaccccacttgttatatgctgtgccagctatttcaagggtactgcgcacaatacgaatccatcttcttctaaatccaacactgaaagtatcagcaaatggagacaatgcagttgcagggaagaacaagattgccatatgcacagctctaataagcaaagtgacaccctcccatattgaccaaactatggatgacagatactggcgagtatcccgcgcatttgtgacaataccttccattgtgggcatgtgtggtgaatctgccatgacaggccgtgacaatgcaaacttgccaaatgctatagccatgaccccatggacaacatggaacctcgtgaatgataagcttatagcacatgctgctcggctgatcaatggaaaccggggttcgctgtacttgtatgtatgactgatccagttcatgccaattggcgtgct

SEQ ID NO: 24824 - DNA, 470 bp, Oryza sativa
  unsure (1)..(470): unsure at all n locations
agcttgtcttactgggcgttgcccctcaacatttcatgtggtttttacatggaaccttcagtaattgctttcattngcttaaatggtgaatatctatcttaaggcaattatagagtggcatgatcaaggcaattttttgcctccctgtaatagatagcctgctttcaggttgaactctgactcatatttatatttatttttctatgctgaataaacttattcttgttcgtcttccttgattgttgagtaatcatggcatagatttagtagcaattatctcaccagcttggtactagtagcctcaaaatcatgcaaaagttccattntaagctcccatgatctttngtgttcaattattcaaattacacatctgtaaagattgaagggaacacttgaacatgtttcagtatttntatggattatgaatntgatcagtatntttttttcagggttgcaccaacaatagatgc

SEQ ID NO: 24825 - DNA, 361 bp, Oryza sativa
tatgctctttgggctgtgataagtgcggttctggatcgaaagccgaaaatcccatcatgcaaagaccctgttatgatccttctgaaaagttggtccctcgtactttgtggatattaggaataggtcaagctgataccacactcgtatattatagggcatgtttcttttggaaatatgaatatatgaatatagttgtgttttagagaaaccgagagatttatattaccataccagtataatcactatgtaccagccgttccataccatgtgggcatgcgggcagtctgcccagtaatacactgtctggagattaaagccatacgcggcaatgctatgcgccaccttatcaatactatatctt

SEQ ID NO: 24826 - DNA, 417 bp, Oryza sativa
  unsure (1)..(417): unsure at all n locations
agcttggtgtagctaaactagcagtgtacagtcttcaacctgaggctaccagtgaaatcactttgaaacttcagcaatcactagattctcttaaaattaaggacaccaaggatagaggaacattacatcttcaggttagcatgagactcttgttttgtcagtttctacatgtgacgtgcattcaacacgtaactccactctaatctaaactattaatacatggaaaacatttactttatttctctactactagtatattgcacgtaccttgcaatgtgagttttaaagaanaatctcaacccgttnttgccgtactttctgcacacctcttatgcctgcatatcttttgagctgaaaagtgggccctttagacttggtactctatttnttttccttaaaaaaagtagggagttggtg

SEQ ID NO: 24827 - DNA, 483 bp, Oryza sativa
  unsure (1)..(483): unsure at all n locations
tctgtggcctgaatgctntccttctcaagagatacatcattctagaatcgggttgtttcatgatgattaacaagaacaacgttatgatggccatatggacaatgcttagacttgatcgatggtgatgaaggtcgttcagtttcatgaagatggtcaataggttcagaagaaatgaacgaagatacaaacatcacctcctcgaatggctcatgcttgggatgagccttgattttgctggaataattcaaggtgttctcataatcttcataaagatcatccctgaattggaatggaatttccggaggatgaatttcttcttcctccggctccaacgactggaatgaggattcgacagttgagtcgggtttcgactccacatgcaaaggttcctcatggataatctcgacatccgggataatcattctctaagatcaaatctaatagttctcttccttcggcagttgtcttgtgtgcgaatgatcc

SEQ ID NO: 24828 - DNA, 396 bp, Oryza sativa
  unsure (1)..(396): unsure at all n locations
agctttctttcttcgtgagattccaacgagctcattatttgctgaattgtgagagtcgacaagtctttcgactcctcaatagcagcaacaatgtactcgtatttttcaggcagactgattaaaattttctccacaaccttctggtcgtttatatcttcaccatagaggcgcatctgattaacgatctcaataactcttgggaaatagtcttttaccttctctgactccttcattagcaaattctgaaattgtcttctcaaggtttgaagcttcaccgcaagtaccttctgagatccttgaaactcctncttcaacttgtcccatgcttccttggatttcttggcgccaataatacgcggaaatagactntccgcaactccttgntggatcaagaac

SEQ ID NO: 24829 - DNA, 358 bp, Oryza sativa
tggacttctcttcgtgcataatctgccgattgtgctggattgtatcttcgatgattttgcgttcccggcgatcggcttatctctacttggacttctacagcttgaattggtgttgctcaatgttaacggctggagtaagggcatcggcttattcatacgggaatagagcttggatatctgtgaacctggcctgtatcgagccacagttggtcactaagatgtctaatgatgcttctagccgatgagagatatcctcgagcattctcttcacatcatcagacagatgagctacagctttactggtggtgtcttcctctatttcatcgagataatacttgatgtcgaaagaaaacatatc

SEQ ID NO: 24830 - DNA, 437 bp, Oryza sativa
  unsure (1)..(437): unsure at all n locations
agcttagcttcttattctcataatatattatctaagctaaagggaaagaaaggagaaagaaaatctattcctatacttctaatatacatagtatatatacgttctagttaaccgatatactagctaataccctctatccgatgctctcctggtacttcgagaagccatccctgactgccgagttccttacgacagcccgtcatgaccatacaaccggggctaaatacggagtaataccctccccagggaattaacttatgattatataccggcgcggaggaatacccgtactgagctgtctccatcagcgggccacctctcatccgcaatatataaccncaaataatgatatcccgtaatctagacaccacgtctaaactaccagatactactctaatatnatnnnnatgacatanagtaattgcatatgcnaacat

SEQ ID NO: 24831 - DNA, 342 bp, Oryza sativa
  unsure (1)..(342): unsure at all n locations
gatgggagccatctctccactctgtcataccagagggcaaagtcaataatctttggttttgtggtccccattagtaaacctatataagtgaatggcatcttcccacttgtgcatccaaaggttctagcaagaacattccatttttgactgtcaacatttatcattcccatttcggaggctattctgatttatttctanggatggaactttctgagacaaaccgatatcgatgtgccatttcagaagttaataaaataacagaacattatcattattacattgcaattgtgtgcatataatattccaatgactataatccttctttatataagtatgacacac

SEQ ID NO: 24832 - DNA, 465 bp, Oryza sativa
  unsure (1)..(465): unsure at all n locations
agcttgagcttgagagaattgtggttntaccttctgcgtcgagaccgaccatgaggatcctcatctccttcttggagaagaggcggctgaaaagcttcgtgaaagtgaggcccatcttgccgcagttgtgcaagaccttaaacaatcaagaatcaatatgagatatgatacaaaagcacatgcagcaaagttcttaaatctcagctcagataatgtaagaccaaaaccaaaatgggctccatagttcagttagttaaatcacaattcattcaaacgaaccagatcttttgcaaacgagataagtatataaggatatcgacattaagaagtactcccgtcatgccgttgtcttttaacatgacgtttgacatcttactaaaaanattatataaataccataatnttgttgaacttgtttatcatnaaaaacataatattactagtactttacatattatactaaat

SEQ ID NO: 24833 - DNA, 460 bp, Oryza sativa
atgggacttcttcataatggcttacttaagtgccatatggtgttttatgccctataagagtacctatgctatcaaatggacaacttcaaccatgaatgtcttgggtatgttcctccacctaaatgaatggtggacaaagagtgtgatgatcaagaagccccaatgtcttatcaactttgttaaggccaaatgtatccttcctaatgataatgcttctcattgttttgatgcatcttatgttcttatgaagaacgctagtggtcgcgttgctgctaaatatgttggcccaaggggttaaaatatttctatcaagagagtgacttgggtgcctaaggcactttgtactaacatgagatgacacaatctagtatgggtacctaaaactagaaattgatctctcgtatgaatatgtctccggtggaagaagttgggtgatcgatagtggttgtactaatcatat

SEQ ID NO: 24834 - DNA, 406 bp, Oryza sativa
  unsure (1)..(406): unsure at all n locations
attcaagataatgagacatgcacctttagaaccacaattaaataacaaagataaagaaagttacaatggataaactagtcacttcatgcaaaagaccctcataagttttntttccaaaataagttatatcctagtgttacttgcgaacacatggcacatgaagccaacagaactataggaatacatgatgtatacttgactaattggtagggcatctactaaactatctatcaaactgtgtcagaattatggagaaaaaactaccattcttagctaagtattggggatatagaacccgcttctagtggacacatntgaagatgtctaagcattgagctgctacacagactaattcagtagatcaataactaaggggataaaaataattgtatagtcatagacatgc

SEQ ID NO: 24835 - DNA, 454 bp, Oryza sativa
  unsure (1)..(454): unsure at all n locations
actaagctatgggatacagctttgttatcatcatagtacgaaacatccatcccaagctaagaataggaacatgcaactatatattattaaccataagaacagaagcaggttaatccggtcttgagaaatttattatcctaacaaggcacggagaaatcccataattacactgctccacgtcccattcgtttcccgggtctagcattcggggtattgactacacgctgaatttattgagcatgtcatcccgtcaagagagccttgctgatgacatatagcaaaagaacatagattatntcatccataatggtgccccagcagacatcatagctgattcagtgatagagctggcccagatcatacttgaattnggtctttatctgctccctcttcagtttaagtgcagctgtcaccagcccatactctggagtcatggttatgcagcaacacaatc

SEQ ID NO: 24836 - DNA, 320 bp, Oryza sativa
  unsure (1)..(320): unsure at all n locations
accccccccgaggtnnatgaactgaacccactaacacccgcgcaccacgagccaaaaacatttatacccaaccccagcggttaaacaaggaaacagacggaaactcccaggaaaaaacaaaatgacagacactcctcgtcactaataagttgaaagaccgcacaaaaaccgaccatctcataaacgaaaaaaaaacggcactcacaagcgcatgcaaaacaaaaaaacgccatcctaacaaatccagcaaagacaaggataaacggacaactgcaacacatataaaccgagaagaacactactaacgaaaaacataacct

SEQ ID NO: 24837 - DNA, 482 bp, Oryza sativa
  unsure (1)..(482): unsure at all n locations
agcttcatattatttcgtacattaagtgcgtgtggatgtgagaaggctattcttattgttgcgtgaggggaaagtactgcttatgagctagaccttggtgcatattttggatgtgttggtgttgacgaacagtgattagcccgctctggattcatgcctcgatcatttaagattgctcttgaccaagattttggatttacaggggtataagcggctggaaagcttggtcaaacaagtactggcctcacttctaccttgtgagaccttacgtgtttgccatatccatgatctattgatttggttcaagctcatggtttcgaaaatggaagaggcacttatatatgttagagatcttttttttttggccttcttagttcatataactgactagcttcttctatgntacgtatagtgcctttttcttcatgaacggattcgctgcgccatataatcctgtangaagtaatctttcttaaatagat

SEQ ID NO: 24838 - DNA, 393 bp, Oryza sativa
  unsure (1)..(393): unsure at all n locations
tactaagctctctcttgtgagaatctgtctgcccagtcggattgggagtttttattgtgagtctgacctgaattttggtcctccactcctctgaccggtctgatgacgacgagatcggcgttgagcgattgtggggtcagactttatcatagcaaattcctgaatgaaatgcctccacggtcagttaattcaacaagaagacaaaattatgtcttgatcacggttagaagagttctgatacataccancggacgtggatagaatgcattgtatggcacgactggcagcagatgcgaataactgacgacaatgtgcgttgagaatatcttgtacatcctctccttcatgatcttaaagtacagagaatctgggtcttcacgggttggatcatgc

SEQ ID NO: 24839 - DNA, 487 bp, Oryza sativa
  unsure (1)..(487): unsure at all n locations
gctttagaanacatactctctctccgtgcgaaaataagttctttcactgtccaaaaacaaatataagcaccaaaactttggggcgaagagagagtatcatcatttaatactttaaaaaacataacgaggaaaatattttnttcagttgaaaaaagaacgcagacttattagctatggcattctggttctgtctgttagggaaaaaaaaaagaagaagaaatgaaaacagggcaactggcaaaaattcatggactaaagagcanatccgacgctctacaacttgtacaggggcctaacagcataaatcgcacataaacgaataaacaaaggaagccgcttggaagaatcaacgacccgcgcacacggcggcgcggcgcataatccccacaccaaaagaatactaccctcacccatcgccccaatatacnncacatcctgacatgtgggtcccacacgaacaccctgccccgcacgtcagtgacgtgat

SEQ ID NO: 24840 - DNA, 429 bp, Oryza sativa
  unsure (1)..(429): unsure at all n locations
gcttatcgctaggccattgctactacatagctatctaccaactacatgttggggacacgctgttttgcatgcagctgcgttacttcaaattaaacctactgcatacaatgttgtatcccctatgcagcttacacgtggatatgcaccaaatatttcccatctgcgcaaatttggatgtgctgtatacgtccctataccgccacctaagcgtacgtcaatgggtcctcatagaaanatgggaatctatgtangatttgaatctccgtctatcaattaaattttagaaccattgacaggagacctacatacgggtcgataccgctgatgtatatntaatgaagaatcatttccggcattatggggaggaaagtacctacagaaagtcgaatgccgcgaaattgagtgggaaactaaaaaatctctacattt

SEQ ID NO: 24841 - DNA, 168 bp, Oryza sativa
gtacacaaatcacgacggccctcttagcaaacacataaaaacataataatgtgcaaagaaaattcatggtatgactaaatgccaatcgtatcaataatcgaagacacgacctttatcgcgcgccgactgactgtctatggcgctgatggccccgtcgcacaccggcgc

SEQ ID NO: 24842 - DNA, 373 bp, Oryza sativa
agctctgtactataggtacagattaaatctcattctaaaattcttcaccatggccaagtgtgaacaccctgctcaagtattaactatatactaacaaataaccaattacgtagattgcaactaatttacaagacgaatcttttaagcctaattgctccatgatttaacaatatggctctacagcaaatatttgctaatgataaaataaataggcttaataaattattctcgcagtttactgacagaatctttaatctgttttggtattagcctaccttttatacttcaaatgtgtgtccatatatcccgaagtgacacggtaaaaaattctacccctacatctaaaggggtggatctaaacaaagccataact

SEQ ID NO: 24843 - DNA, 488 bp, Oryza sativa
  unsure (1)..(488): unsure at all n locations
atgagcctaacaatatatggntntattggttatttttcttactangagatcaaatatgctatttntatgtatccacaccataagtagcttctattggcatcatatatttatcttattctttntctcctctttctttattgtgataaactagaaattaattactttcctagataattatccttgaaatatacatatatagttctatttacatgttgagctcatcagtagtcaagctcanaccaggcctgtctagtagtagctcgatgcatggttacacaagcttggctcaaccttatgtcgagcttgagcctangccagcaagatcgcttgagctcggctcatcgacagccctacacacgatgtttaatgcanatctatgttatgttgatatacgatatctgtctaatcgataatcagatctgttctgttaatgtgaatgctcatagcaagtgcccatataacatnattatatnatagattattgatat

SEQ ID NO: 24844 - DNA, 163 bp, Oryza sativa
agcttccaagtccaaaatgacactggtggagatttcttttgtgtcccgggtcgtaaccctcctttagtcccggttttcaaaccgggagtaccaatccggtactaaagatcgctatctttagtcccgggtgaaataaccgggagtaaagatcgatctttagtcc

SEQ ID NO: 24845 - DNA, 486 bp, Oryza sativa
  unsure (1)..(486): unsure at all n locations
tatttcgaaatatctaatatgttgcactttacctttattttattatctatatgatcaccatagcgtgcctttaatatatctgaaaagataaagaaattccaaaaatattgtctggggagaaaggcatattagcatgaaaagcacaagcaagtgattgtggattagtgggccactattctggccaccaactctgtcatagtagctgatgttatagagttttactggttcgttagtgtcctaaaattatactacggagtagaacgtatgcactgtcaccttgtgatatatgacaaggtgatatatgcactgtcaccttgtgaacgtatgcactgtcaccttgtgaacgtatgcactgtcaccttgtgatatatgacaacaaaattatattgaaccagagctccagctntaactactcttgacctttctgcttggaccatagatttgtctcttttgttgaccaaataaacatatactgatggtagtacg

SEQ ID NO: 24846 - DNA, 334 bp, Oryza sativa
agcttgacaaatgctcaagtcaagcctatgtattttatgcatctttgtacaagggtgccggaaagatcaaaccaatagaactgctcatatcacagttgtcatagtatctattgaagacctctaatatgaaggcctataaattcccccatgcaccccaattccttggggagaacccacatttgcctgatgcatctggaaaagctcttgaacacgttggcgtgtgagcccagctatcttgacgaacaggctcctttctattttttgctatctttcggatttagctcgttccttctttgccaccccgacttttgtaattgttaaagagatacccatg

SEQ ID NO: 24847 - DNA, 474 bp, Oryza sativa
  unsure (1)..(474): unsure at all n locations
gagttngntgcttattcaaagtcatggaaccaacagtgttttaaatcatgattggtgatagatgagatccattcatgcatgtaagaagatacaagtatacacatattgacatatatatgacagtcaagtcattatcatgttgtgtgatctccttgtaatggagctgtctaactcaacatcataggcactgtataccgtatatatatgcaacaaaactaacaagtccgtttcatgaacatgaaacacgaacttatttgtgtgtacttagtgatggcttgttaaatgtctatatgtaagaaaacaacataagntgcaattgtggcagaatattgttcatgccatcaaaggggcagattatgcagagccatcaaacacaaagtcatcaactntttttttttgaggactatgaaacaacaggaaacattagagccatcaaacacanagctatgatatatatatatgggtagtggattg

SEQ ID NO: 24848 - DNA, 328 bp, Oryza sativa
aagtatgccgctcgcggcacataaaatactcagccagagctgctcccgtataaagagcgaggtattgtaatgtagcacgggaatccgccatttcagctactacaatagggtattccatggccccctcttcatggaaagtagttactacttgagctactgaggatgctctttgaccgatagctacataaacacatattacatcttgccctttttgattgagaattgtatctgtagctactgcttgtttgccggtttgtctgccccaataattaactctcgctgaccgcgcccaataagaatcatcgaatcgatagcaataaagccccgt

SEQ ID NO: 24849 - DNA, 429 bp, Oryza sativa
  unsure (1)..(429): unsure at all n locations
ttatgttcggcgcagtactaatactggaacttatgagcaagaattgctctatcaatcaccatctactttagacatatcttctgaaacttttttcaaatccaaaagtccagtatcttcctacaaattagtgaattaggaggagctctttgtgccgaanaagaaagagcagggcaatatttcaaacttgcattcgaactgcgaaatatttatacaaaggaggagagatcaagataatgcagcagggttgggtatctaattggctagtcaaacatgaaggtggtcatagatctttgggcttcgatcatcgaggaatagagactttgcaaataanagcagacgattgggattccattgctgtcattttatatgtatatggttacaattatttacgttcccaatgtgcttatgacgttgcacccggtggatctt

SEQ ID NO: 24850 - DNA, 436 bp, Oryza sativa
gagcttcataattacttcaaaaaagaggggatgttatgctctaattcctattgaactcatcttggcgattacatacaaatcggaggagcctaaaaagattgcaacttcatcctccaatgcttctttgtgtcatactacatttgcacctatgttttgcacacttttttttggctcctaaatttagtcgtaagttgatgagagataaaatgtgtgtggtgaagaaagaatatatagaaatttagttcatctgctaaacaacgttctataaaatatgtgagaatgaaaactctagtgaaagtcaatcttaaataatataaaacaaactagaatgaagattaaaacaagtaaaacacattaaaactagtttacaactctacaaatactatttaagaactatttggtgaatcacttatgaattttgtatgaataaacatat

SEQ ID NO: 24851 - DNA, 446 bp, Oryza sativa
tagtcatcttagtaaaaaatgtgtaacaatattaatcctcaacttaacatgcctctagccatgcatccatcagctgagggatggacttttagagaagaaatggaaagaaaggctgatacatggttgattcgtttataggaaatagttaaatatatagattgctcaaaattgtcataagacttttagtaaaaaaatacagtacaatttgtgtgtaactataatataactatattataattgtaattatattaaaactacgtatattgtagcttatatataactcatgtatgagaagttacctgtaatttttaatacttatataccagttacataacaattataatatatctcaagtacaattatactatacattatattttgaaagtatttcactaaacaaactaatggccttcttagaggccgtcaatattatatgtcataaatat

SEQ ID NO: 24852 - DNA, 478 bp, Oryza sativa
  unsure (1)..(478): unsure at all n locations
tatgacttagctanggggcatcatgatacaagccgatggtgtatgatgttgatgtggaggtaaccgcaatcatagccgatggttggaggtatgatgtttatcagtatttacagaatccatctcaatcggcttcacgaaaattgtgctataaggccttgaagtataccttattggatgatgagctgtattatcggacgattgatggagtattgtttaaatgtttgagtgccgatcaagctaacgttgtgatgggcgaagtacatgaagggatttgtggtactcaataatnggctcacaagatgaagtgtgtgctctggtgcacaaggtatttttggccgaacatgctagaggattgctnttaatattacaaatgatgtcaagaatgccataatntggagcaattcagagagcacccacatcggctatgaatcatatcatcatactatggctcgtcataggatggngaattgatatgatc

SEQ ID NO: 24853 - DNA, 340 bp, Oryza sativa
  unsure (1)..(340): unsure at all n locations
ttttagcctatcgggggccaaacaggcgggccangcccacagcacgacagtgatgagagatcatctatgagaacataagttgctctaccttcctcaactatctccctttggcgaatcacatcccttaaccgcaaaagatagaggctccttcactatgaacaccgaatcaatttaacttctcacgtcggttgaacggaggtttcatcttacgagacatgtcgaccggaaccttatcctatgggcgcctactggcattacaatcatgaataacggcaggactacgtgtaagccctatcttcgcttcatatctcctcatatgttttctctttgcgccgcacgt

SEQ ID NO: 24854 - DNA, 414 bp, Oryza sativa
cacttgcccttactgctactgattgatatttaagctcagcttcacatatttagcttcctttgcaagcatctatctgaattgccattatctcaacttgaacatctgtgtgacccaagccacagagatatgaaatgtattgtgcatcatcaatgtcatagatcacaccggggtcaatggcttcagaaggactaacatgttcagcaccaactgcgaaatgccctgcaatattgtatttttcattcaagattagcttcttctggttatcaacaacataagctgttgtcatgattgccgacttgatcgctgcggatgaccaatctgggtgtgttccctttgatagagcagcaatgccactaaagtgaagagtgacattgatgttccaaatagcagttgaatgcctgtgttatcattgtt

SEQ ID NO: 24855 - DNA, 394 bp, Oryza sativa
  unsure (1)..(394): unsure at all n locations
taggcacggaagactcgaagaccttcntccttacacatggagatatgtctatttaactctagtattggttataaatttgagaataggtgaattattgcttgacggacgtcgtgactaaactntattttttctttcatactgtctatgactaccagatgctcatgaatcagttcacgctgttataaagcattcgctgtaacttatgtgaaattttagaagattagtattactagccgccacaccgtgcgttgcacgggctattgttangatattacaaataatatatttcaattatgtattaagcctgtagttagactaagtctatagacaaatatagtaatatttacaacaccatattagttttattaaaactttaattgaatatattcctata

SEQ ID NO: 24856 - DNA, 399 bp, Oryza sativa
agcttatcaactcaaacccgatgtcgtacacaagtcgtattgtcggaatcggctgtatcacttaacccagtcagactcggacttagccgatcccagtcgtagccgatccggactccagccgattcttactctgtttccgcgacaatccttatcttcggttccgcttcgatttaatcttcatatccgatattgatattaccaaatttggtcgttaacacatgccccccaagtccgggatatttggtaatgtttcggatttgccgcgtatcgacttcgagtaagtttcgcactctgccattttctgaccgttatcctcagtgctttaaatactaaccgccgccctggaaaatctttaccccattacttccgttttcaccaccgaagccaattttggttctc

SEQ ID NO: 24857 - DNA, 507 bp, Oryza sativa
  unsure (1)..(507): unsure at all n locations
gacctatgatactcagcttggcatacagtgatgtttccgcaactttcccaacaccagactgttatgctgctgatggtcttnctctgattgtgagtacaccaggatgtcgtcgatgaagaccacaacaaacttatccaagtattccatgaacactntgntcattaagttcatgaagaatgcaggagcattagtcagaccgaacgacatcaccgtgaattcatacagcccgtatcgcgtggtgaacgcggtctttcggatatcttcttcacgaatacgcaactggtgatatccggagcgaagatcgcattttgaatagacagtggcacctttaagctgatcgaagcagatcatcgatccgggaagagggtacttatntttgatagtaacttcattgagagctctgtagtcaacacacatnctctgttgcttgtccttcttttccacaaataacacgggagcaccctagggggaagtgctcggncgtatatactccttttcttcaactct

SEQ ID NO: 24858 - DNA, 444 bp, Oryza sativa
agcttgcgtgactctctggaaaagttcttcggttattatctacttcttcctaccagtatctgccgcttgctcatattctacattttacattaaaaacaaggcaccggaatgatcagaataatagcaagaacacacaaaaaagccattttaataataaggggaaacctacctggaccgtctttgtgaggagcaacattcatttttgttggctgaccaacatcattatcggctggtacatttgtgccatcatcagcatcgtggaaatcagagagatcaacttcacttgattccacgctgcacaattaataagaatttcgtagcacatcatcatgcaaatgatggatggatgtcttgagcaaatttcagaaactcgcctgatgatggatgtcttgagcaatttaactgccatagcaaacatggcttgggggaacctgtgaaattaat

SEQ ID NO: 24859 - DNA, 350 bp, Oryza sativa
accggcccttgagagcatcgctgcgtttcactttttttccttacccgtgtgttatagataaatattcggaaattcataacttagttattcattgtaactcagtttaatgcggctcaaggtgctaaagttgtgtaaataaagatctcatattaaaattattcataaattgaattaaatttattttacttctttttaactggccttgattagatttaatcttgtagaactcataatatattcatttgagttagaatgaggccgctaagtctcatattcatctaaaatatgatcacatgttagttactcttatgattgctattggttttattatcttttcttgtttagcggta

SEQ ID NO: 24860 - DNA, 428 bp, Oryza sativa
  unsure (1)..(428): unsure at all n locations
acttatcaaaagataattgtgggccacaactgattctttgctggcaacatggaccagtactcatatatacatagctcttctctcaaaaaaacaagtatatggcgtgctacccgtcgcctggcgagttggactgttgcttcatcctccctacacgtactgtgcacctcttgcaccttctcttccaagtactctaactagtaaaacgtactctatagtctacttcgtatgtactacgaacatntctttgagaaaataattagtagccgtcgatcgagaagaaaacatcatgttcgatctagtatcaactaaactctccagtgtatntcngcggctaggaaattccatgtgttttgtcggagtaaagaactgtccaagtccatatgtccagaaataaataaaaatggaccacaatttaactgcaccggttt

SEQ ID NO: 24861 - DNA, 398 bp, Oryza sativa
  unsure (1)..(398): unsure at all n locations
gcttatacgttatgggtgtagcaatgactcttctagtagatctaatctaatggtgtaaaataataggcccaccaatttaagtgaaacttaacggttagattgaaaattgccatgtggcgatttaagagcgtttgtagggagattaatggacttttagtatataatagatagatgggattatgggaacattgatatgtttataaatcccttattgtatgagggaaggcacacaaacagtatgagaagatatgagtcttctagtttagactagtgctgcctatataaactttctatggcatattcagacaatntgtgcataactcatacaatctatctaaatctaaagtagtgacctttctcaaaacaataataagccacgttatcaactaaacatggac

SEQ ID NO: 24862 - DNA, 451 bp, Oryza sativa
tggcagggcccaccatataccgagtcttatgcgaaatcatattctcgtatataaaaaggagttccagataagaaagaatgagtagagttccatatggatatgacaaggactactcgggttgtacccatacttatctccctagttctacttggaaaagggatatttatgggtataaatacaataccccctaggaggagggagatacagacacacaagacaagacaagctagacaccgaaatcagatattagcctagacagacccaatcatgttcctgcggaggccgacaagagggatctagcgcaatctctgatctcgacgagttcatattcgaggaggaagactaccctatcgtcgactacatgttggtgtccgtgtcgccatatcgatgacagctagatatgttatcccaaatattatacttatgtgattcagatgaataaagagcaaca

SEQ ID NO: 24863 - DNA, 449 bp, Oryza sativa
  unsure (1)..(449): unsure at all n locations
agcttgcgtgactgggcgctatcttgccataatatatgcatgcttggcaaaattattgatccacatctccatggagaaatcagtcctccctgccttaagatgtttgctgattgtgcaaaacaatgtgttgctgatcgcagcatcgacaggccgctgatgaatgatgttctttggagtctggaagctgcactgaagctgcaagagaatgcagagaataacaaaaaattcagtgaagcaacaacatcgtcaaagagaacaccagacttgataactatcatgggtactgacaaaccatcgacctactcaacaatgagcatcaccggacaaaagatcatcttctctgatatgatgcacccacagggccgatgaaagacaacangtgaggatttcaattaatttctgatccagagttcatgtattgatgatctttngatcgcaatactagaata

SEQ ID NO: 24864 - DNA, 455 bp, Oryza sativa
  unsure (1)..(455): unsure at all n locations
tcgccctctctttctagaananagaataactatntagtgccttattttactaactcaattgattntgtatttctntaattttcactgaacatgaacacacaccaatcgtaaagatatgtggccgccgttgcccgcgttgcgacctgagaatcgatcgaggcgagctgcatatcgatcacttagctagaacattcgttcggaattcggatacgaaaacgacatcgacatccatttcatgatgatacacatatatgtgcgtacacactatacagtatacgcaacatgtattgcatggatttatatataatattgtagctttcagccgttggtcatgccttgaagccatgtattgcatacgttgtacgcctgcgcgcgagtgctgcggctgcaagttgccgaattgggcacgccgcgccgttatccttcgcggacaggcccagcagtggctacctaca

SEQ ID NO: 24865 - DNA, 288 bp, Oryza sativa
  unsure (1)..(288): unsure at all n locations
agcttgaccaccgagacatcatgctgcataattatttgccctaataaaaaccacattctgtagcatttatgataaacataatcattcacaaccactggtggcggccgttaaatgccaattctatgctgtcaatacattcataacacatcataactgacacatccaacatagtggtagggtttaattctaacatattccataagtgttggtgtnaatttggatgctaggtactacatcatgacagttgggatgaaaatcagacttctgtgaaagaatacttttatctat

SEQ ID NO: 24866 - DNA, 455 bp, Oryza sativa
  unsure (1)..(455): unsure at all n locations
tcctttaatataaactcgccgtcctctaatataaacttgtttgtaatggagatatcctatatcactatgactttngtgacgctatgggtttatctcatcttgtgttgacatgtcccatcttctcctanagggtccattgggtatccttgatccaattaggactagggaggaaacgatccaagtacatcttgctgcgttcaagagtaattctattgctatttccttatctagaacattctccgacttgagatttaatcttgatataggatctggatatggtccctgctaaccttatacacaagtatgatgtatctatatccaattttatcttatctaatttacattttatgaaatataaaaaattttttaacaatcctaatggtgaacaattatacacaaactttaactatgtattttcatatagacncatgatcaagtatgtcaactcaaatcac

SEQ ID NO: 24867 - DNA, 323 bp, Oryza sativa
ctgtctatctccttctatcattcgcgtgactcttgtctttgttgtgagggatctcaaacgcgcacagagacctctctcgctgacatggtggcgacaccaccatctgtgcccacccgcataatgtggttcgctcgtgggtaggaacatacggtgtaactattagcgcgcacgggattgtctgctcggggaagcgatggctcgcgcgtgaatagacagaagactttcgcaccgaagctagcatgtgggggcaaatattcggtgggccccacgtgtcaacgaaccctgcgactggcgtggccttcgtattatcctgagcggacctg

SEQ ID NO: 24868 - DNA, 374 bp, Oryza sativa
  unsure (1)..(374): unsure at all n locations
tttgcataactgatggcgtacttgaatttgctctcgatgcgcctaataattgattttgggtcaaagcccatgttaccaacaacactgctgtacatctcacttgccacaaaaagctgaatgatggtttcgtgatacttcttcaccccttagaagtagcacttatgctcggtcacaatgctaactttccaataatcattccatttacccttatatgcatggacactccacggacaatattncttcatgcacctcacttcatacacataattttgttgacttgaccaccctaaactctctctgcaaagaaactagccaatgcttcaccgccttcttaattcatcttatgagcatacctgcacgctaattacttattc

SEQ ID NO: 24869 - DNA, 337 bp, Oryza sativa
  unsure (1)..(337): unsure at all n locations
cntcttatatagcaagagcacgcgtacacatgtctgtgtatcttttaagagccataataatattgagattgctataccaacgaccaacaatccgtgggtccatacgtatgtgacgcatcccattttatcaaacattaaaaaataggtgaagcttctatctctgatgctactttgcacggagtaccaagaacagagcaccttactctgacaattaataaatccgttaacgacctagaagtggtggcaaccacacaatgaacaacccgctcttaaatgatactccctgcgcatttntaattaatattagtatctgtattagacggagtaggaaacataa

SEQ ID NO: 24870 - DNA, 448 bp, Oryza sativa
gatccttaagtcacctgcagcatcaagcttataatcaaacactgttggaacattagtattttaacaacacttgaataggcatcattaaaaaaaaaactaacctgttaatctgtaattatcctctaaattatcatcaccatttatattactagtaactcattcatgcagtgttttatctctcatgaattaaaatttctttttatgtagttcatgttatccttgcaagcatgccacacgaatgtgattactgattagctaacttgttcattatccataactgtagcatcatatttatttgaaaattgacaggtaaatgtttcaacatatacaacaaagttttcaaaacatgcgcagagataaacaaagtgatacacacagacaaacatagcatgacaaacaggtacgccaacaatttggaggggttgaaattaaaaaaaaaatgagaatg

SEQ ID NO: 24871 - DNA, 490 bp, Oryza sativa
  unsure (1)..(490): unsure at all n locations
tgtatccttngaggcactcaaaactgtattacattacacactttttatttgcaaattatcatttgacttgttccccttaaacaacactcagacatcactgcagcaattgggttgtgtttggagaagatgtcaaaaagagaattagaaacaactaaagatgtattgaacaatattcttgaaggtgtaagctgtgagtatcccccccccaccccccctgcattagcttatcatattattattatggtaatactgaatgctcttttgctgtaggtaggttagagagtccaattgatttaatccggaagatggccagtgctattgcattgacattttctaaagttgttgatccaaacaatcctctataccttgatgataactgttgtgagaatgttgagtgggactttggngtttatcttcgaaggaatcacagccccttcaaggatgtagaacttatagcaaactgaaccatctttgctgagacaaaaacatg

SEQ ID NO: 24872 - DNA, 309 bp, Oryza sativa
agcttatctcttacgctccaagaatggatcagtcttaacatcaccaaccggccggcttgtctgccgccgactggtgcttccgcctgcacaggtgacttattatgccgcccgttgttgggcgtctacctcttcaacgaccggcttgccttcaccggttgcgactggtgcttccgcctgcacggctgacttattatgccgccgttggtgggcgtctacgtcttcaccgaccggcttgccttcgccgccgacgactggtgcttccgcctgcacggctgacttattatgccgccagtgttgggcgtctacgtc

SEQ ID NO: 24873 - DNA, 495 bp, Oryza sativa
  unsure (1)..(495): unsure at all n locations
ctntggtggagcaatacaggcctccaatgtaaacaacgggttttcagtttctgatctatcagnggccagtatatccattgtcgaaaatgatatcgaatctatatgcacccacaatagtgacataaactttggacctaaggaccagcctagttaccttttgaaaagtcatcataaataagaaaaatactatgataacaataagtaaaaataatgtgtacagtagctagacgacaatggcggatgtaggaagaaataacaggagggtctgaagaaactagacaaggttgtagcccccttcctatcaacttatagcacaaaaatttagtggggcttcgtggggctcccatggtcctcatactagtagtggaggctcgagaccccgcccccatgctacatcagcccctactagatgatattactttacataagttgatgtggtttacgataaattaaatagcatatagaatgatgattcaaatggtaaagtaacataat

SEQ ID NO: 24874 - DNA, 450 bp, Oryza sativa
  unsure (1)..(450): unsure at all n locations
gcttgactgttctctggtctgcggtcaacaattagttctctgttcgtacagaaagacaaaacaatggctcatgattaaccttatttggacaaatatttctggcttgattttttttcaaaaaaatagctttgaaaagaaaatactggaaaaaaacacccaataggtttaagtaaatttacagtagagaaatatagtactgttttttgaataacagaactatgcattgattcgtgaactagaatcagtaatactccactggcatccgatgttcagctcattacatatttctggcattttatcgaaagaggaaataatagcagtccttttctagttgctgagtcactcttgcactangtacacncgtcctgaatgtttgctacttgatcactatacagataaacttacatgctagagatctatatatttaaccgaaaacatataaccattggg

SEQ ID NO: 24875 - DNA, 491 bp, Oryza sativa
  unsure (1)..(491): unsure at all n locations
tcgcacctctggggttgtctgtggctctgtctcattctcgatttgttattgtgcccctgtggtacccgataacaacatgctaccaaacccgaaaaccgtgcaccaccatganttgtgtgaggtttcgaacgtgaaagtaccggtcaaccgcaagtagtggcatagaaacaagtgctcccaagattttaacagggatcgccaggatttcgaatataaaaaattgagaatgttgcacttgtgttcaagcctttcatacttaatatcaagtttagaaggttgttaacgagagttcgatcatcgtcaagtttcaacgcaggtttaatcgttaacctacaaccagtttcttatatgatctatggggattatccgtaccccacaataagacggttatcacgggtacactttggttacngctaaagaccatgtaattttatctttataaattaaatatcaaagttacatctatgacatatcgcgatactggggtattg

SEQ ID NO: 24876 - DNA, 228 bp, Oryza sativa
tccgctgctggttatttttgattgtcaggccctaaatgcccttgtaataatggtaatattatcgatttaataaaaaggtgtcttttatattatggttgtatggtgtaacccggctttttctgggaccgggattaatacactaagcgtcgggaaaagggcaattttccgggcgcgaaacccccttggcacaatctgcataatcgagaggtactggacgggggtgaaatg

SEQ ID NO: 24877 - DNA, 426 bp, Oryza sativa
  unsure (1)..(426): unsure at all n locations
tatctaagatcactggtgtgaactgtcaatggtccttcgatatattttcttactagctatctcaatgcacatgaaacagcaactgggatggcagcagccactntacatgctgtgtgtctgaatactctgcttacagactagctatctcaatttacaagacacatcagctgggatggcagcagccactttacaagctcgaggtgcatctctgaatctgtatctcaagttccaatctttgcttccaatgtctcattatagcatgcataattcccacgcatattacatcactgacagtactaagcactaatcatctgatcaaatacacaacaatcagtccctagcgaacacgaccagaatttcccacaaacagaaaaatttccccttcgatgaacatcagatagccaagcaaatgcaatgtgcattctc

SEQ ID NO: 24878 - DNA, 80 bp, Oryza sativa
ctgattattgtctttctctgagaggaactagtacatattgagaacttaagatacttacgttaatggcttttacctgatgg

SEQ ID NO: 24879 - DNA, 421 bp, Oryza sativa
  unsure (1)..(421): unsure at all n locations
taagaaaacaatcattcttctcctgctgtatcggtattatgctttactgtctacagatcattctgtctaaggcacagctcatagcatgtgccacggctaggttatgcaaacaacatccagccagganaaccaaataacattatgatttatgtccagatctatagctntaggaaatgtctcatccgtccaaaattccttatattttgaaacggaggtagtatgaattatgaacgcatcaatgaaaaatccacattagtacttgaatagattctgcatacatcaaccatcatgtctctgtctgcatacaccatcatgcannataattggcatgcaaccatgcataacctanagtctctacatggcattcatactttcactgttactgctgtgtacaattacaaacttattgaaaatcagcaca

SEQ ID NO: 24880 - DNA, 468 bp, Oryza sativa
  unsure (1)..(468): unsure at all n locations
atctcgatagaccaagttgtcgatgtcgttttattttccgatctcatcggagcatgtactctggtcgggttagatctccacagccgaagtcggcgagtagcttggagaatccatatcttaaacccatctcgtcaaaatccagaagcaccaaaatctccctacctggtgcgccactgtcgacgtttgatgtcacgattccggtatttgcatantatggggatcgttggtactangatatacgcgggactgaggtaaaagagacggacacagggattnttatataggttcgggcccctgaattgtcaggcaataaccctacatcctgttggccaaagccggtattgctcttattcaccataatcacaccagtacaatattngggatagcctatctaactgttgtcgacatggcggtctgaatgtttgactcgtagtcgacaacanggtagtcttcctccttcgagtcatg

SEQ ID NO: 24881 - DNA, 329 bp, Oryza sativa
  unsure (1)..(329): unsure at all n locations
aaaatgttggacaaacgacttgtcttcttcggtttgttgcattagagaatagctaagtcgatccgagagctgacagctagaagctagtaaatcatgcataaccataagcttcatgtttactaccttttgattntgggatgcccaaaacttcatttcatctctccttaaatntatttctgaaacctcccagtcccatatatgtaaccacacatatgttaagcattggatctcttattgataaatacttatgggagagtattttcttgtnctcttttgaactctctgttctctagtaacttacatatgtagaagtgaaaaaactctcatgt

SEQ ID NO: 24882 - DNA, 505 bp, Oryza sativa
  unsure (1)..(505): unsure at all n locations
gctgggaggatcttcaaagagtagcatgggctggcttattcccttattttgtggtctcgtagatgggaggaattcttgtttttcgatgtcgattggtccatgtcttcacgtcctgtggtaggtttctcttgttagaagttagtaagttgaaagttagtaaactactatactagtcatcaatagtagcatgacaatgctgaattgttgtttttcttcttcatttgttcaatccttcgttccttaatatttattatgaatcttgccgacgagagttaaggtcacaccctntgcagttttactatccaatgatacttcaaattccctgtacaagggcaaatataccttgatatatagtattccttgtccatattttcccacaagttattgatctcctcgaggtttctccatcataggctaccccccttaaaataagatnatttgaaagcaatttaaaaggagatatgctnttgcgttcacaaagaagacntttttttttcaaatgatt

SEQ ID NO: 24883 - DNA, 394 bp, Oryza sativa
agcttctcacgctgtaagcgtgcaaagctctgttgatttttgattgcatccagcatcctgtcgaagaattgaaagaactggcgatcttcatgatcaacctgaggatctgaaaacctatcgtagcgaaactgatcctggacggtccattacaacgcataagcttcaaaaaacagaagaactcccgcactaagcaatatatacatcgcggggatatcatatactacataagtacctcttagatcacatgtatgtgcacacagaatgtcagtaaacttgtggaatatatgtacctcaagtctagttgtatgatgattatgattactagtttactacaattgtggaatttatttgcactgtacatgacaagctgaacaactacacatctacttgtcta

SEQ ID NO: 24884 - DNA, 455 bp, Oryza sativa
  unsure (1)..(455): unsure at all n locations
ggcccggaagagtccgtgctacgttgttctgagtcgctattttcttcgccacaggggaggggagccgatcacggcgaacacggtggcctggtagcgtggctgggctgatgagcgcacgtgttcctggctcggttcctcatttcggcgactaagccagccctagcgcatcacctgngcttgacgggaaatgacaccgggccgatcggtgtgggtagaaatgcgctgaggcaagagatgtgttnttctataagagatgtgtgagattaatattgaggtcccatacaacgagcggatctagaagaagatttaagagggactcatctcctttttccttcttcaatctccttactctgtattgtcttcctattctttccctattatctcccccttctagcaatggtgatccagcggtgtaggagggacttcacccacgctgagatccgctctggtcccat

SEQ ID NO: 24885 - DNA, 275 bp, Oryza sativa
ctcgagccgagccggttgatggctcataccatgatgtcgagtgaaaagtcctggcattcgcaattgcagcccgacgtgcattccgagaaggaatgaagaaagctggtccacaactcctgtaacctataatgaaacctgaagggataacccctgacgagcagctgggagaagttattggcgatttgaactccataagaggacaaggtaataccttctgtgataaacctggcggcctgaaagcaccacaaaatatatccttttcctttatgacccat

SEQ ID NO: 24886 - DNA, 506 bp, Oryza sativa
  unsure (1)..(506): unsure at all n locations
tattacccataatggacgggctagaaatgtagcccatgatgtttattagtaaactattatcaccgcactatggcgtgtaatcaactagttagattnttttcaactcgaagacttctagaaaatgcattaattagaatagagatatagcagatagttagacagagatatctacatcagtgaaaaggggatcccaagatcccaccaggatgagccacatcatcaaataaatatgaaccgttggatgcatgatttgaatgatgagaaacgttggatctaagagagaaaaataagctaaacaaaaaaccaaattgtgtcttgcgatgttctagtcccttcaagcacattccataaaatgtgtgataacatatatatgagaatgataaatatctncaaaattatccttaataaccaccaatgagtattcaaagtaattctactgtatcaataataaaagtttccgagaaatatagatacctacataatctgatactatcgattacttcact

SEQ ID NO: 24887 - DNA, 93 bp, Oryza sativa
cttagatcgactgccgcatgcaagcttctaaatcatacaactaactctcttttcttctgtaatctctacactatttataactaaatttacagt

SEQ ID NO: 24888 - DNA, 432 bp, Oryza sativa
  unsure (1)..(432): unsure at all n locations
cgctttaattctgaggaagcgagcgagtgatgttattcatgttcagagagttggtctgcgtagcccagccctggctctggctgccgttgccctgtgcctgtctgcctgcctgctagctaacctcaccggtgaaagctaagctagcacggatgtggattttcatccctcgaggacacatccnctcgttntttcatgtcatctaaatagttactaaaaaatttgaaaaaaatggacaacatagattaatactaaatatatcactccacanacatgcaaggccaaattcaacttctacaagttgctacaataataacaaattaaactgaaaacagttatcacacattcgactatatttgntatttttgttacaacttgtagaaattgaaattcaaatttcatggttgtggagtaatatatntcatattaatatat

SEQ ID NO: 24889 - DNA, 138 bp, Oryza sativa
tgctactcggcaaaaaatttttttaaaaggtgccaccaaaaagatgatcagaagcataactctaatggaggaaacaaccatcactctgcctagattcacttggtgattaggcgcaaaatctgccaaaccctactagaa

SEQ ID NO: 24890 - DNA, 394 bp, Oryza sativa
  unsure (1)..(394): unsure at all n locations
tatcactgnatatggcttcatgcggtgctctatctaattttttatactttcactcgtaattctatgatggtatatactagctatcaatttatttctgtgtctaggttagcgtagactattgtttaaccttttcaatagtgcaagtaatgggaaaagtgaccaactttttcaaaaacttctaattgatgtctctccaaataatagcgatgcatgcatgttctataatagagataccccaatactggttccttatcaatgaagaagagccaaccatctatgttcccctcaactttgtaatgccctatacttaacctatctccacatcttacatccaacaaataccaccacatgctcaacataatatggtggcaactatgtcatgacagcctctatg

SEQ ID NO: 24891 - DNA, 386 bp, Oryza sativa
  unsure (1)..(386): unsure at all n locations
agctntcagttaaatttgaagacagttacatgcatggatagtgtgctatggcttcattgaacttgagttggctacttgtgtgggtcgcatatgcatttgccaaatatacaacaaccacaaaaatgaatttcacctaaacatgaagatatgcttgtactctggctctctggcctactttagtgtctaaatttacttcgtgtgcaatttcatacaactagctattagtttgaatcttgctgctaaacttgtgcatagttttaatggctaagccaaaagcttaacctctccaatctgcatcagtaggttatgaccaaattgagcattgtatgaatccctcacaaagaggatacaatttatggtaaacagaacagcctttcggcacatat

SEQ ID NO: 24892 - DNA, 490 bp, Oryza sativa
  unsure (1)..(490): unsure at all n locations
tatgacaatgcgaacgaagatgatcaatcgaaccacattctaagcaacgatttggaccacctctgttcctgttcctggcattattcatagctcgagcaatacggttagcaaccaaagccaaatcctcctcctcgatctgttcgagttgatcatcggatgtggcatttaaaacagcaagaaaagaagacttagatgaagaagcatcaacatccaaagacgaggaagaagaaaccaaagcactagacttagaatcagcttttcgagaaagaacattcatctcatgtgttttcaattntgtataaagtgaatccaaagtcaaagtagacatgttaacagactcctgaatagatataactttcatcttccaaatagacatgtcaagaccattcaaaaagtgacgagaaatctcagattgtggataattagcatcataagaagaatccacagatctaagattcaatcaaaatttattaaaccgagaaagatagtc

SEQ ID NO: 24893 - DNA, 459 bp, Oryza sativa
  unsure (1)..(459): unsure at all n locations
tgacagctacgattcgatatgatgtgtttcagagacatttctatattaagacgcaccacgngattgcatgatgtgcacttattagagcaacaaagatctggttgctgctgcatttagatggtttgttcttcctagctagacatgcaaagcctgcatgagccatgagtttgtgtcgcagagatctagtacagagtacagacagagatgcagaattgcagatcaacctttgaaatgaataatcttttcagtgcactgcttcagttcagactatgtatcccccacatattgtcacagccatatgctttgtcgagtaattcatgttactatagcagatgagctgacaaanaaaccacagtgtaactgtggaaagactgtaagtacagaatcagctcagagtgatcaagagcccgtgaatgggcttgagatgggtgagcgctatatatgttactcatgaatatg

SEQ ID NO: 24894 - DNA, 438 bp, Oryza sativa
  unsure (1)..(438): unsure at all n locations
gcttcacttcctaacattagtgaagaggagaatatgaagattcttcactttgtaattattggtggggggcctactgggggtgtaattgctgcaaagatgcctgattttcttgttgaagatctggtgaagctatattctgcaattcaagattttgtgaaaaatacaattattcagtccggtgaacatatattgaacatgtaaggcccttgctactttcaagaaaacgttttatccttctgaagaagaaaaatttgtgtagttgtatcttgtttctgctaaatattatgactnagtttggggcataggaggtttcttttttaggcaagcatttcacacattatgaaaacaacagttccattattttttaacattgataccatcaggtgtagcatcagcagatgaccttttcatccttcctgtgtgatcactatgtgttgt

SEQ ID NO: 24895 - DNA, 457 bp, Oryza sativa
  unsure (1)..(457): unsure at all n locations
taccattactacagccctctcaccttgagacaacgatccaatggttacctcaaganaccagctatctataggtggcaaaacggattaccccgcctgagcacgacgcgtgccccgatggcggcatggttaataggccgtgtcgtactgggccacgtggccttggtcgagaaggctacgggtcattatgtgcaaaccgctagaggtgcatgggttgttgccagcccatccatatatttaaccctataattngaaatattaggctacgaaaaaagataaaagcagaaaatagttaggaaaaacatagcgaaattaggagaaatgaggggaaatatgagaaaatatggacgagattcgctaaaaacgataaagaaaggggccatgccatgccggcccaagcacggcacggctagatgggccgctccgtacctgggcctgcacgggaaggctcggcccatat

SEQ ID NO: 24896 - DNA, 351 bp, Oryza sativa
agctttcctcattggagaagtcccttgtggctgttaacacttctcttgcaagtatcttgaatacgttggagagaatgggccaagatggtcatgatggatcggctaggcgcaaccacaattgccatgatgctaatagcagcatcacagcaagggaagaactggagtacgctgctgacactgagcatgatgaggaggtacttggtcgttcacaaagacaacagcgccggcagcgccatggcatgggcgctccaccacggcgggaggtacgtgataatgatgattctttatgcaagatcaagtttaccattccttgctttgatggaaaatatgaccctgatgcatatcttactt

SEQ ID NO: 24897 - DNA, 424 bp, Oryza sativa
  unsure (1)..(424): unsure at all n locations
ttccatgaagtacttgcacgcncaaatcggagttcgcatgaagtctttgcggccgtcagaagttggcgctgccctgcagtccgaatccaccccgcgcgaatcctcttccctttggatcctctccatcgttcctgagtaaaacacgagtgcacgcgtctccgaggtataaagacgaggaatatgaactcaagaaagaactcacctgataatttagttgacgtgcacgagcgcgggtaataggaccatcatgctgtatatggngggacgtggatgtatcgatggtgttgatgtcctcatcatcctccccttcttgcatttgagtcgtcctcgactcaagctcatcttctcgcaaatacggcttcaaatctgcaacgttaaatgtgggactaaccccgaaatctgcaggcanatcaatcttatatgc

SEQ ID NO: 24898 - DNA, 88 bp, Oryza sativa
aatgcttctgtcaacaagcacagcatcaatagtgcaatgtcagtactgttggtggagagattactgttgttggctagtacaagctaat

SEQ ID NO: 24899 - DNA, 411 bp, Oryza sativa
  unsure (1)..(411): unsure at all n locations
ctatcgatactcaagctttacatatattgtgattaaatctcaacccttgtagtctagatatgttatgttctaacggngtagantttttctttctccccgattaatgtgggaatttctagcctccacagcggacgtggtgcattctttcaaagctgtnttaataatataatagaatagatagatagatagatagattcaaagaatgaatatgatttcaaaaattntataggactttnttttatataggattgagtctaaacttttctatgtttgttctacaaattaaaaggaatagtgctaaacaagtacttactagttacagtagttactagcgtttggactgggatggatggcattatggcaaataangggagtcgagttctcaccgaagatggtgttgaggggattcat

SEQ ID NO: 24900 - DNA, 455 bp, Oryza sativa
  unsure (1)..(455): unsure at all n locations
tgcagcttgtataccaccagagtatgatgcacatttgttgcgattggagcatattgactttgataattcagcaatgcaattacttggtgtatcggcattcacatcgaagaccttcacaggctcaatgcttgtctgaggaaagggtcaggggtaaaaccataacagaatacctttcgttntctggtgatactagctaaaatgcctgtgcatttactatgggagtgaataatctatgtgtctttaaaaacaaacaatgtggttcttgcattaaacatgtccatcacccatttttgttcacaaatgtcaactgtgaaattaacttgtgcatatagatggaaatccaaacatcttacacttagccaggttaatattatgattctaccaacttatagaacacctatatctctactatacttgcaaaatacgcattcaaagcagccataattgcgcatcat

SEQ ID NO: 24901 - DNA, 423 bp, Oryza sativa
  unsure (1)..(423): unsure at all n locations
gtatacttctttaatagaatttaaactgtattattcttatttcattcatctgnacccgcgattaattaccacaaaatctatctatctatctatctatctatgtatctatctatctatctatctacctatctatgtctatactaattggacactttctacgaactctcacgctaaccagaaaaatttaaccattattttagtagatcgtaacaccaacacggtagattctacaatataatatgttttacgcgggctttctttagaacgaaccgatgacatgtgcatgttccgaaagcccacgtacgtgttggcaaccaatccaatcacgtacgtacgtagattaatctgttgtgtggtcctctcgctacgtacataccggtctaagacttgattcgcgtacgtagcttgtgtaatgttagcacg

SEQ ID NO: 24902 - DNA, 295 bp, Oryza sativa
aaatggaccgcaaaagaaaggcagctcacatcagctctcctcaagggaacaaacagaagccttgcttcatgaccggacaactatgtgggccttccaccctgatcgtctgtcagcaccgtccctatcacccgagtaacttcaacaacgattacaacggtggcagtcacaacaacagtaagcagcacaaccacaactcgactccacccccactaatggcaccagctcaatcaaattcgccagctgtgtcagctcattcagaacagcccaagaaaggggctgtaggaaagccaggacc

SEQ ID NO: 24903 - DNA, 438 bp, Oryza sativa
  unsure (1)..(438): unsure at all n locations
gcttctttgtctgagctctgccacatgccatgcactgtattatgtttatggcaatcgaaactaggagcatccctgcaagcagtatcaagtgcatcaagtagaggatacggacactcgttaagagaagcgcatccccacaagaactgggcgagctcttgctccttgaaggtgtacactagttctgctgctctccgggtcaatgctgagataaggtccggtgctgagtggcgcatggaagcgaatgatcctgctacattggcaacattctgtgcattgaagctgtcaaccttggtgatggctacctgngcaatcctatccatctccggcaagtagagcaggtcacccccaatcttggacaaagcccaggagatgttagaaacaccctgcggtgagcattccggcagggccaccattgccagccccacgagcatggacatg

SEQ ID NO: 24904 - DNA, 491 bp, Oryza sativa
  unsure (1)..(491): unsure at all n locations
tacgnaantacgtttcgggttatagatacagaaagttgtatgtcgcctccacccccgccgaccaagtgccagcctgtactataaaaacgcccctccctggaaatttagaaatccattaataattaataaacaataaagctcgtcgccgtcgccgtctccctcgccgccgacgagtcaaagaggcggcggcggtgccagtaccggccgggcgcgccccggccgagtccacgccatgcccgacctcaccaaacacccttaccctcacccccgccggacgcgctgccgcctctgcggcatctgcctcggcaccgcgctactcgccctcctcgtctcctacctcgcccacctcttctccccgccgcagacgcagacgcagctgcagccgccgcagtccatcccctnctccatcgcaccgcgcttcggggtcatcatcgacggcgggagcaccggaagccggcacacgtcttcccacggtgacagcaggcggcgga

SEQ ID NO: 24905 - DNA, 417 bp, Oryza sativa
tgctaaacagctgtggtcattgttgtgatatctgagtactgattccataaatcggggctggccagaccaaatgcttattgcatccagataacatgtgttcagcttgcctcacaatattactaaaaatatcatcccagatttgttaacctccactaagggaacacagaacgcgagcttctctgcgagtttacatcatgcaaagatttggcctgaagttacattccaaagaattacacattttcctgtcacgtctctattgacaatgactatcttaagcatgcaggagtcgttctatcatacctggctactctcaagatctttttctcaaacacctaattggacaaaagtcaaaacgagtgcatcttagtaatgcacgcactcactgtcacccttatctgcaggtttaatgattctggt

SEQ ID NO: 24906 - DNA, 101 bp, Oryza sativa
  unsure (1)..(101): unsure at all n locations
agcttaacacctcttatatgactttntcactatttttaaatacgaaaaagatccccatcccaaatgcacaggtcgtcttattcaaaacctcaatcatcaca

SEQ ID NO: 24907 - DNA, 462 bp, Oryza sativa
  unsure (1)..(462): unsure at all n locations
tatgccattntcaatccaatcgtggagtttatgcctgtcatacctgtactctttnttctattagcctttggttggcaagctgctgtaagttttcgatgaaatctttactactctgtctgccaaattgaatcatgtattcattctaaaaaaattcgaaaaatggataagagccgagaagtcttatattatgaaccttcgattctaaaattcaaattcttctacattgaatgtatagctggcagcaataaattggatcagcctttctactccctgcatctacgttgagcaggtatctttaggtaaccgcacaatacctaacctaatttattgataagagtgcttattataaatcaattcttgcaatttttttcaaaaattgattnnttgcattttaggtgtcaaaataaacaaaacccatcctagtgngattgtgtggtagggaaaacgggtaatctattcctt

SEQ ID NO: 24908 - DNA, 449 bp, Oryza sativa
  unsure (1)..(449): unsure at all n locations
agcttcttaactgnaaataatcctaaccaaaagacaacaccttatgaacaaatcgagggaacaaccatcaatntcaagcctgaggcgagttctactgctgtggtggatgtgcatggtaagctggtagctggaacgcccaacataactaatctaaaacttaagataaataaaattttaacccccttctttcaataatctttcctgcgatagtaaatatgtggataaagctgctctagtttggaaagaaattgtagcactggacctagtaactgtcatgccctgagagctgcttaagtgcttgaatactggattggtactcgtatgcaatcaaattataaagagtagtattcacaacactacagatagtcggtactttaatttaatatcacaaactacctaattaaagtggtgtatcacaaactacggattaagttattacacacggttat

SEQ ID NO: 24909 - DNA, 487 bp, Oryza sativa
  unsure (1)..(487): unsure at all n locations
tgtagcactacacttgcatgtntaagaattaagagctatgctttatttattctctgcatgagctnttgagaactctaagctattcgtttttaataccatattgactgattgggatggtattgttcattacagctctttgctgatgcattggttaagaaggcatatgataattggatgtatgccattgaatatgatggtaaagctctcttgaactctaaaccgaaaaaaaaggctgcacccactggacacgttgagacacatcctcctctgagtcaacctgcttcatacgaacaacgcatctcatcagcgagcatgacaggaccatctncagcaggttagaagcatgagttattatctaccatttctatgttagtacctctttgttattttagttgacagctagaaatatactctctccgtcccccatatagacatcgaatattccattttgtcccgatatacggatntgtagactcctgtccatcaa

SEQ ID NO: 24910 - DNA, 323 bp, Oryza sativa
  unsure (1)..(323): unsure at all n locations
agcttctggtcatccatctatatattgtctatctctctggncactgagctattcacttgtgaactactatattccctatacccagcatttttgttggaagacctcacaacttcaagcttactttatggtggttgtgctacactgcgctgggcttgttattttactgaccgtcgtagtttgttttacaaattaaattacagttatataattgtgttacttaactgtcatgtctcttagtggttttactgtttgcgacatatagaataaaaaaaaatcagtttgccaaacgccaaaaaatctaaaagcgcactagtatagaaata

SEQ ID NO: 24911 - DNA, 450 bp, Oryza sativa
  unsure (1)..(450): unsure at all n locations
cgatggtagatggttcggttcaactctctgtggtgtgatgaatattattgnagatagcgtcactatttatagggatcatcagtctgtagtactatatgggtacataattaagggcaacatatcagattagctcaatttggcgatttgcatgtatctcttcctgattacgaagatggacatcctcccattcctcctacgcgttttttttctctcaaaaatgtactgcaaatggtatatcagaaatcacgtgatttgatcgatcttttcccctccatgtatgactgtatgatgagtggaggaatggaggatgttatacgaagatggattctaatccctatagagagggataatttgtactatgtgaatagtactacaaatactggttaataatatgtgaaattgatattttccacaatctaaaatatcattntataatccgtacatatatat

SEQ ID NO: 24912 - DNA, 376 bp, Oryza sativa
agcttcttcaacttgtgggccatcccgggcttggtcaggcccgcgaaagcgggcccaccgagcaggaagtccggactggtgctcctgtgaaagtcggtgagcactacgcggacgcctgcgttactgcacacctctgcatttctgcatctcatctcttctcgcaaaaaaagaataataaaaaaacagggcgaataaccagtgtgaaaggatcaaaggacaaaaacacaactgaaataaatgccatttatataggaatagtacggcttagccactttaaaaatcaagaaatcttaagaaacaaccaaggctctttcagaaatttttgtacagaggcttcatttggtaaatggagcaaggtagaattaagctcttattt

SEQ ID NO: 24913 - DNA, 187 bp, Oryza sativa
agatcttctcaagctagtgtggtggtgtaaacatacaatcatgtatctatagagtcgtacagcaattaatataattacggttgctgcatgcatctgatctgcttaatgatgaatctgtatatgtctatgagaccttgacgcctgtgtatctgatgatctctgcgatgaactatcccctgtctgatcc

SEQ ID NO: 24914 - DNA, 280 bp, Oryza sativa
gcttagcatttttattaagaggcaactagccttctctttattagtgtaccaagagaatcctatgccgttgagcaatgtgagggcaccattcaacatctgcaaagctggttcactaaaactactagtagattagttagtatccagaaacacattgcatcttgcagaatagtatactagtaatacactaatactacaatctaaaaactgtcactttcaatttcagctaattattctgaagtaacacatgccattctctattactaatgcagacatgtcattc

SEQ ID NO: 24915 - DNA, 479 bp, Oryza sativa
  unsure (1)..(479): unsure at all n locations
cacacatagctaccagcgcaagctctatcttccatccctctcacttggccattctcgtgctaggggctcgacatactcggtccattctcacgaggacagggcggctacagattcctgttcgtggcgatcgacaaattcaccaaatggatcgaggcaacacccacaggagaaatcaaggccgacaacgccatcaagttcattaaggggatattttgccgatatggattgcctcaccgtatcataacggataacggctcccaattcatcagcgccgattttcaagattattgcatcggactaggagtcaagaaatgcttcgcctcggtttctcaccctcagagtaacggacaggtcgaatgggcaaacagcatagtactacaagggatcaagacccgtgtctatgacaggctcatgtcacatgattagaagtgggtcgaagaactcccctcggtactatgggtcgngctcaccacaccgac

SEQ ID NO: 24916 - DNA, 395 bp, Oryza sativa
acatataccaagaatgcgatgccgtgtgggttgcggtttgtctgtcacaaatgaaagtttctgaccaacaatttggttaattagggtgctctttccaacatttggctttcctaatacagcaacataacctgtgcaaacacatggtatatcaatattacaacaacatgaaaaaatattcatctgcagaatagtttcatttggagatcataaactaaaaaggctgttatttcagaatcgaaatgaagaggtgaatttcacagaagctagaagcctcaccgctgcggtggttggcacaatgagaggtgcctagctccttcgactcgtactcgtcgagcagacacaggcttcggtccggcttcttgatgagctccagacgcggcctcgtcgtcaccact

SEQ ID NO: 24917 - DNA, 456 bp, Oryza sativa
  unsure (1)..(456): unsure at all n locations
tcgagaatcagatcacctcctatcatcagnctttnctttatatcttcaacccttggatgctgctcccattcaattcagtgactcacccacagtcataatggcctgccactagcttttctacaccactgtgttcgcaatgctcttactcaccaaggtgcgctaagcatccttccactaagttttccctcaaggccagtggtgacgacatgcttggggatttggctaggcaatttctcatataaattatccatgaaatgtgcacggtataagctctcacaggccgtacggtaatgtgccccatgcaaatatcaataatggatcacacattctgcagaaccagtgctggcctctgccaacctacagacttcacttatcacgcatgtcctgtgaaccatgcagttaccctcanaatattctctctttcatctgagaaatcatgaagttgctactggtaaa

SEQ ID NO: 24918 - DNA, 442 bp, Oryza sativa
  unsure (1)..(442): unsure at all n locations
gcttgtggtgactttgtcattattaagacatacttttataggtggttatacggatagggtatgtatatatgtatgcatttgagaagtgggctcgtatgtaattgaacgtgccgtggtgtattgagttttgtttttttcgaaaaaaagaacttatgaatcttgtactattgtctggcttaattcattaattcattcgtttgacgacaattatgcatatatttgccaacttcgggtggcggttctctaatacaattcaatagttatggcatattnttctttctgtggtgtgtattaggttatggttgcttagctttgtttgtgctatcgagaactttctatgtgaagtttgttctgtgtgagttctgtaataattggctgtaactctttgagtaaagactggaattgtacattccatttatctaaagaattaattcattcgtat

SEQ ID NO: 24919 - DNA, 355 bp, Oryza sativa
  unsure (1)..(355): unsure at all n locations
ntcatgacacggcatatcgaaagccgatgcaggtttaccatattctgtctataggggacccacaccaactacaggttaggttccagaccatactgtgccaggaagcccagcggtcctccccgacaccaccccggcgaatccacatgtctctcggcatcaatgctcccctgattagctagatactcagccaggggtgttccattccacccatgtggtccgacttgtcgtaagttcggatgaaactccaaggaatcggtccttaagtgcgagagcgggaaaccgtacacccggtacgttccccggtcccgcggtttggaaatccattatgtcgcaagcaccgacccaagtgtcgggc

SEQ ID NO: 24920 - DNA, 475 bp, Oryza sativa
  unsure (1)..(475): unsure at all n locations
tattattgannatttttaaatgttacatgatgttccaccaggtatatctgaattgctttactaagtagatcgaagatgtttcaatcgtttaaattgagcgttgtttcacattatataaaaacaatgtttcagcaaatagcgaaaaaatgtttcagttaactgcaacatttgatccatacatagtgaaacattataagtacactatgtgataacattttagtggaacaaaaaaatgaaatgaattcccttaatagatagtttccaaaatatgtgggtgatttgttgcaatggaatatttcagttcactgcaacattagatctatatatagtgaaacattgtgagtgcactagatgaaacatttttggtggaaccaaaaaaccaaattccctaaatagagtatttctaanatatgtgggtgatttgttgcaatggagtatatggtggagacacgtggtgggaacaggatgagtcacg

SEQ ID NO: 24921 - DNA, 462 bp, Oryza sativa
  unsure (1)..(462): unsure at all n locations
actcagcttaactattcaacttctcttcaactgtcgcgaggttattttctaaatatctcttcaaacttccaactttcccatcacatcaaaactgtcgtacaaacataaacttacagttattccgtcacatcgttccaatttcaaccaaactttcaattttgacgtaaactaaacacagcctttctctaacacgtatagacacaacttattgtttgcctttactgctaggactagntgctgtactcagtcggaaacgcggttaccatggtgaaccgtgaaaaaaccaaataaaatctatcagaaaattaattttggttgaatctgtatggttatcgcgcggttactattactgtactccaacggtaaatctagttgcattattagtttcaattgcgcctattaagggcgacagaaacacattaacgttgatggcagctcatcatggtcgctcaagttggatca

SEQ ID NO: 24922 - DNA, 427 bp, Oryza sativa
  unsure (1)..(427): unsure at all n locations
tatgtccagtgctagcacggattgacttaatctaacgttttgtctctgaagttctcaaacgaatacagcagttatcgatgacatgagtaatcaatttcaaccgtcattccgtagaaaggatgactcccaaaacaaccaaactctcccactccaaggctaacattggggaagcctttgaatggctctaggagtccaacatcgattaaaaggcatggagcttgtgtggatcttagatgcgtttcaccggccataagtaaaggacgatgatgattntggcacgacgttacaggcgcacagagttaatgtcttcatggcagccacgaaaactacttgttggtgggtgtcgacggnttccacgaggtgtggcaacaaagggagaggaagaggagtgaggcggcactccataccgtcgctttccctagctgac

SEQ ID NO: 24923 - DNA, 304 bp, Oryza sativa
agcttacttgaaagatcagctagcaagatgtttgttgctggtgagcagagagctgcattcgtttgggtatctcttgaataaagagtgaataagttacttgaaacctggaggttctttattaatacacttattcaaatcaagtgtgctaccagtcgctaacttctctaacaagaatacccactggattaaaagcctaaagaaattacatagaatctaaccagtaattctgtgtgaagaaaagactcccgggggcctttcttcttggggtacttctttcaacaacggctgtggttaacacttatac

SEQ ID NO: 24924 - DNA, 470 bp, Oryza sativa
  unsure (1)..(470): unsure at all n locations
tactcagcttgttggtacacgagagaaggtgaccagtttatacgtatgtattgatgatgagattaagatgggaatttgatttttaatcccaatatcttgtttagtagaggtgatggaaattgatagggagtttagttggagattaaaacggatggctgagatttgtttagacaaaataaaggagaaattctctcctaattacctgccactacccaagtattgaaaatgagggagttccttccttaattcctcatcccaatcttaccaaaattctcatgtctcccaaccaaaccaaacacttaataacctcatccctctgaactaccaatccctcctaaaaactccctccaaccaaacgggccgtaacgcggtagagcctcgcatgagcaagacaacgcgaaatcagacgatagagtcgtactaatcaggatggngattatttccgctatcactcaccacacggagcggat

SEQ ID NO: 24925 - DNA, 350 bp, Oryza sativa
gtcacctgaagctgcaagctgtccgcggccgtcagccctctattttaacctcgtccgcgggcctcgactggtgggcttggaactacttctttgcagctccgtgatggtctgtttccacaataacttccacaatgaatttaacctgggcaaatctgcctaagtgttcatccttgttgaaaaatttggatgagagaaacccaacatctgaagttctcgatattgatatagatatagtatgtatgcatgtttcctgttcaataagccaatttatctatcaactagaaatttcaattattcagaacgttgttttcacccatggctccatcaccagtcttaaaaaaaaaactatg

SEQ ID NO: 24926 - DNA, 471 bp, Oryza sativa
  unsure (1)..(471): unsure at all n locations
tctctctngaaattcaggcanatgggtnttctcacgaatgatataatcaagtaggcgcagagaagttccggtgtttcatatccacacaagattagcaaggagaaaaagtatatggctcacaattcaagatacactaatataaatgaagcatctttgacataactgaaactgcagctgtaactggtttcatgtcatccacgacgcattgccaaaacctggtgaaccttcagtttctgcaaatntggtttcctgcatttatatagcaagatagaaaacaataatcgtttactagatacaaccatgcctagaatagatatgttcgtcgctaaccattaacatatcatcaacgtgatgatgcaaggtgcaatgtactaagtaagaaatcatgaattggcatggtgtgcgcctagatatgacaaggcataaaaataaactctgaccttggtactgctatgtcatctatgatgcaat

SEQ ID NO: 24927 - DNA, 324 bp, Oryza sativa
agcttggcatgatgaccaatcatcgtttgtattaactagacctggaatcagattcccactcatcagattctagtcagaatctaaaaaatggatgtccagggagtggtgatcaccgaactgggaggaaaaggaataattcattatcaaaatctggttagaaatccacccgcatgtttaagaagcagtctcttatgaagcttctgatggacaagatgtgtagcaatgatgatggaagtctacttcttttgaccagagccccagattgagtatagttcaaggatttgctccgttgttttttatttgggacgatgatcctagtcactg

SEQ ID NO: 24928 - DNA, 501 bp, Oryza sativa
  unsure (1)..(501): unsure at all n locations
tatccagttcgctcanatcaggagataacatcgctcaacttttgtgagtacttgatgtgcatttacctgttgatgagttactgcaactaccttcattgatcttatctagctcagtgaaatcatcagacagcattgcgcagttccaacaaaaggctgatgctgatgagatgctgcaatcatctagcttagccagctcagagaaaccagcaactttcaagaatnggtcatctgcttcagacaccattacacagttccagcaaagggctaatgctgatgagtcgctgccgcttccttcatctagcttggccagctcagagaaaccagcaacattcaagagtacttggtcatctgctgcagaatcaaattcagttttcagtggtgatgaagagatngatgatgcttccttccatgacagtattgattnggatgatagctnggaattagttgacgatgaagccatctatatgtgtgctaactagccgtatgaatactacacatatg

SEQ ID NO: 24929 - DNA, 379 bp, Oryza sativa
  unsure (1)..(379): unsure at all n locations
agcttgagcaaagtatcatagtacaagccatctttttaattggttataggctcctgctgtggacagcaaatttctttggccttctgaatgttcggggtggtcacaaccattgcactgccggagcttgacagctgatgcaaagcatttgtgatctccctccactgngatgcataatctttatcatcttcaatgataatcatggtcttttaccacccaagagtgttttgatcttgtcacatantaattggattgtcatctgctccataattttttctgtgagttggttgatcttttgcttggtatttntatagcattgcatatcatcccacctggttatgatgcctgctccccttaacgacctattgcttggaagatggga

SEQ ID NO: 24930 - DNA, 487 bp, Oryza sativa
  unsure (1)..(487): unsure at all n locations
tcagggttcaggcttcatagaatgtgaaaacactgtatatgttattctgatgcagtagtgtaatgctactgtagtatagcacatatgtgcatgcaaatctgaanatataaaactgtcctcaggggagggaggaagctcataattcacactctctaaagttgctcttgtcgattagtaacctacctctaaggacagcaaatttatacgttttcataccggtgtgtgctgttgctcacatgcctggccaatatatacagctgaggaacagcatatacaatgtactacgagatgcacagcgctgctgcagattgtatgatagatcggtctgggttaagattggaccaagtagctgacaaaaatggagaaattacagagatcattatacagcagttaaagtagtagtaatagtacatttgcggagccaatctaattgaaagcatgttattctgacaaatgagacacttgtttgcgattccaagtaatcatg

SEQ ID NO: 24931 - DNA, 460 bp, Oryza sativa
  unsure (1)..(460): unsure at all n locations
actcagctttcgagaattggtgcacctcagctnttgttggctttcttgtgtacttgtggtatcccaggtagatgatagggaataattgaatattgcattgcaactcatcagccaccacctgaagttgttcctgactgcattgaattggagtgatcgcagttttattgtagttggtcattaatccactggctgcaccaaaaatctgtagaattgccttgactaccttggcttcttgttgactaggttngaaagataatactgcatcatcagcatatattgatatacttggaactgggcgtcttggtgctggttcagatagcagtccacttgctttcgcttgagctacaactgcttgtagtgcattcatttgcagaacgaataacagtggcgataaaggtgtctcctgccgcaatcccctatccggcttaaaaggggttgattcatttcccgtgataatgat

SEQ ID NO: 24932 - DNA, 148 bp, Oryza sativa
agcttctcctgtgaaagatagcagtaggcaatcctatttcatcttcacagaaccaatccaagatgcaggcactagaacaatgccagctatatctctccagaatcaaaatgagcagccactgttgtggtttcagctcgctacttatcat

SEQ ID NO: 24933 - DNA, 467 bp, Oryza sativa
  unsure (1)..(467): unsure at all n locations
tctcttagatggagctacttcttcattactcctctatgagaaatctatctgtgctcgacaattcaagttcattgtcatcaaattcatcaagaatgggcacagattcactcctagagttgcacaaccaatccatgattgggttaccttcatcatacatagcaatatcgatcatgatgctaaacagatctccttctctttcctgngcagaatgcataccatcaagaagttgcatgtcattttggaaatgctgaatgcgcaacttcaagttgtagtgcacgtagaccagcttatggatcttctcgtatcccagccgatttctcactttggtatgcaccatagcaaacgtgcttcagttccgctcacagccactggaggacaggcattgngaaacaaggcggcgtgcaagattttgtaagtctttgtgctcttcttcatatgaatcccaccactcagctacaatatacaac

SEQ ID NO: 24934 - DNA, 297 bp, Oryza sativa
  unsure (1)..(297): unsure at all n locations
atttcagtccaactcatatctctactatgtacatgcccaaagtgacataacttttggaagggtaatttggcaaacataaaagtccatattcctgcttgaatatagattacatctatcatatgatgtctggacattacttttattttcaacttatggtcaccgtggcaaatacaaatgcataacaaactagaatgtaaaaatcattaagagaatttattctaaaaataatggttctttgcaggtttgatagtgcgatgtcatcaatggagaaagctangaaaatagattctggaaacg

SEQ ID NO: 24935 - DNA, 453 bp, Oryza sativa
  unsure (1)..(453): unsure at all n locations
ggccgagtccgccgcacgtaaagccatcgccaagtggagccgttcattcactgtcattacccacctcatcttcagcacctattccgggtgcaatgctccaagcgctgacctcaagctggcatcactactcggcctcaacccttcagtctcttgcaccatcctcagcctccacggttgctctggaggcggtagggcactccaacttgccaaggagctcgccgagaacaaccgtgaggcacgcgttcctgtagcctgcgccgagctgacgctaatatgcttctcaaacccagatgaaagataaatcgtcggtcatggactgtttggagatggtgccggagcaatcattgtcggcactggcccattggtcaatgcagagcgtccactattcgagatgatcgttgcctcgcaaacaacgatnaccaggtatgagcaagcacttggcatgcagaccac

SEQ ID NO: 24936 - DNA, 459 bp, Oryza sativa
  unsure (1)..(459): unsure at all n locations
gcttctttatagctattntgctatatcactcatcatattttacaaagcagttggtatatcactcggatcatgtgatttggaggattcacaccgcatatgctatatattgatattaagtcgcttggttgactataattatcaaaaccactcgggtggttggattatctattccttgactatatgtttggnttgttcgattaaccacatagtcgggggttacacctattaggtgcatctagtcgatacacctgactatatttttcaacccttcacagtcttcagatttggtaaaagtactcgggagatcatggcgaagatgattgaagcactcgactttggagtaatctagttcgagagaaggttatctttccgactgtgaaagtctcacgtgctactgtggagattatgggtaccccatacccacacggcatggttattcgactatgtataggggataac

SEQ ID NO: 24937 - DNA, 432 bp, Oryza sativa
tgcattgctaccccacactagagcgaatactcaaagggcgaggtcctacttgggtcatcattgccaaattcgcacctgcacagcagctccaacttccgatttatattgttgccaaactcatcaaccacctcgacgcagcagctccgacttctcaaaggccgtccataacaaagtggagcatgattatgaaattgccaaggattaatatgccttcaggaggcacgacgtcaagctatacgccaccatcatcttgggctaggtttacacccacaaaatccatacacggcatgacgaggagacaaaaaggacgccttcaacgagtaaacgacgatgcccgtagcgtccatgctttcgccttggcctccaccaatgtgctgtgaggacagtttcaccacctgatgtgcgcccgctctcaagtgtgcaagcaagcac

SEQ ID NO: 24938 - DNA, 485 bp, Oryza sativa
  unsure (1)..(485): unsure at all n locations
ngagggtgtaagaacgctgctgctccagagaaatccactgactattgttagcaacatctttacaaggctgctatacctgaaagtcttggaccttactgaaactgcaatggaggtcattccagagactttggggaatctgttatacctgaggttcttgaacctgtcccagacaaggatcaaggcgcttccagaaaccatttgcaatctgtggagcctcaaattcttgctgctaagagagtgcaaggcattgcatgtgttgccaaaagggatagagcatctgaaggggctcagagaccttgatcttacaggtactgtgatcaaagacgcggcattcagagtangccatctcagaaacctcacatcattccgatgcttcaccgtgacgagcaaagaggcgcgtaccgtacaggataccgcacaggataggagtgggtggcctctggatgagctcaagaacttgtgtcagctaanggacactccatgta

SEQ ID NO: 24939 - DNA, 412 bp, Oryza sativa
  unsure (1)..(412): unsure at all n locations
agcttctggcaattcggcgaagaaacaactattctgattaataacagaattaaaacaaatacaggttaaactaagtatattaggcataacaagcgtttcgttcttgtagagtagataaaatggatttgaatgagttatttttctaagggaaaaaggaaaaggaggattcaaaattcttttttcttccgacttttccaaacacaaaatacctccttgtattcgcactctcaaatgagaagtgaaggaaatcgactctcatataatatcttaataaaatccatgtaatgatcaatggcatttttggattctatattattcgcatgtctagactccctacaagagaataccccncatttttatgtaattgaagtaggattgacgaaatagaaataacataatactggttattagt

SEQ ID NO: 24940 - DNA, 488 bp, Oryza sativa
  unsure (1)..(488): unsure at all n locations
tatggactngtcgatattgtaggggatgaaatgcttgacgagcactgcgatactgatccagtgtggtttccagaaatgtttaaggattggtagtggccaaatttcttgtaaatttatttcaaccctaaattcgggttttatgcaatttaatggaaatacttcataatgatcaatcattcaggttaagatcgatctaaaccaatccattttttctatatacatacgacatgccaacggttaaacaacttattagaaacgcaagacagccaatacgaaatgctagaaaatcggccgcgcttaagggatgtcctcagcgtcgaggaacatgtgctanggtgtatgtgcgactcgttctgatcatgggttcaaacaaataagacaatntttgaagtatccatgatcggtaccaatgaataggatagagcttctctatcctagaattctacggtatatggaaattcctggttcctttggtgcaaatccaatca

SEQ ID NO: 24941 - DNA, 319 bp, Oryza sativa
cagcttgccactggccacaagaactactagtgcttatctttgtcggggcattcccatggctgtgcctagctttgctagtgattacacgattgatttggttgttcctctggctgaatttgtgatttaattcctttcttgaatttgggtggatttgaaagaaatgcactattgtagtggttgatttcacacgggtctttgatgattgtggaaagggaatttcttctctgttattttctctccctcaatctctctctctctgctatttctttaagcaagcctgaagaagagagcgccggcgccagcacagctaggcacgggc

SEQ ID NO: 24942 - DNA, 457 bp, Oryza sativa
  unsure (1)..(457): unsure at all n locations
tgggagaggcaagaaggaagatgatgtaagagtcaaagaagatgacttgaacaagaagaagaacatgaaggagaaggagaagaagaagcattgcatgcagtggctaattcaagaattaataaaagtttttgatgaaccggaagatgaagatgagagcaaaggtaagcaagttgttgatctagcttttattgctcgtaatgcaagttctggtgttgatgaatctgatgatgataatgaagaaaagcttagttatgatcaattagaatatgctgcttantaaattgctaagaaacttcaaacatgttctattgtgcttgatgagaaggatcatactattgagattcttaatgctgaaatggctagattaaaatctttgattcctaatgctaataattggcaatcttgtgaagttttattttctgaaattaatgctttgcgagatgtcaattctattagt

SEQ ID NO: 24943 - DNA, 222 bp, Oryza sativa
  unsure (1)..(222): unsure at all n locations
agcttgccaaacatccttccttctcacatgttgtttacaggccaaccagagatagtgcaaagcaagccttnctgagacaactacgcgacaccaagccagtcgacaattcaaaatggcaagggctcggagatttaatataatctacaaggctttaaacaaaaacaacatcaacctcaaccgcaggcaaatgcgaatnttcaaagataccctcaacccttgcaa

SEQ ID NO: 24944 - DNA, 389 bp, Oryza sativa
  unsure (1)..(389): unsure at all n locations
tcagcgagtaaagcaaataaagtcctaaaagtagntcactatctatttaaccatcgttagtagccaagaatacttgcatagctggcttataaatcatcacaaacaaatgtctcaagtctcaacacagtgctccttaccgggaaaaagtctgtcttatatgcagcccagaagaagattactgtcatcattgccaagtatccaccgaggacaactccagttgtaaaaatctcagccagcttccagctgtcaagtagtggagaatggtttacccgatcctttgatatagtcatgatggtacctatcgatcacagtacatagttgaatatctctatatgctcataattcctattgtcaaaaagcaagtgtgaacatgtgcantggttgtgtgc

SEQ ID NO: 24945 - DNA, 458 bp, Oryza sativa
  unsure (1)..(458): unsure at all n locations
agncttggcttcgtctgctgacataaaaacattcctttccatgtcttcggatacaacccacaaaggcttgcctgttcttaaagcataaacccttgtgatcatttcgcgaactttgtgttactcttccacttctaataaaaattctggtgttcttgcccgattataaacactaacacgttggtgaagcataatcctcgcgtggtggaatgctatacgcttggagggttctcctccaagcaaaatgatagacgccatggacgcggctattccgaggcatattgtatatatatctggcgtcaccgttagcatcgtatcaaaaatccgcattcctgagaataaccacccgccgggggagtttataaacaaaaaaatatcgctaatttcatcttctatactgaaatataccatgagacctgtatatgaatcgtgacttcccacgaatctttgacctaaaaaag

SEQ ID NO: 24946 - DNA, 447 bp, Oryza sativa
  unsure (1)..(447): unsure at all n locations
tcttaattgttggtaccaaatatagagcagcggatntagtagcatcagctgcaataagggctcgttgtcattatgttaataaatagtggttcagtggtatgttaacgaattggtcgattactaaaactagactttctcaatttagagacttaagagcagaagataagatggaaaaattccaccatctcccaaaaagagatgtggcaatcttgaagagaaaattatctaccttgcaaagatatctcggcgggatcaaatatatgacgaggttgcctgacattgtgatcgtcctcgatcagcaaaaagagtatatagctcttcgggaatgtgccattttggggattcctactatttctttagccgatacaaattgtgacccagatctcgcgaatatatcgattccagccaacgatgacagctatgacttcattcgattgattcttaaca

SEQ ID NO: 24947 - DNA, 378 bp, Oryza sativa
  unsure (1)..(378): unsure at all n locations
agcttgcattaaacacctaaattcccgtgactttcttagtacgaaagtactcacccttgctctatataaatatatatatatagttcctccgccctgaagagaagataaagtgaagtgaagattaaggtttcgtcctgtgtcccagccgtcgcctgtggtgttgggtgttaaaccgttggttccgctgctgctgctgctgctgttggagtttcctcatccgcgtcgtccggtgtattctcgggctgtctgagctgcaacctaagttaaagtaaataagtcctctatttattttaaagattgctatgattcatatttgtcaccgtgggtaccaccactatgtcctgngactggtaccgagatcgcggtttcgtaagaagc

SEQ ID NO: 24948 - DNA, 409 bp, Oryza sativa
tgccaatacatggtcagcagcactattagaagcagcacatatgaggtcatttgccctcctcttggctgtataaagctgcaaaatagactccacaagggtcatggtcttcccagttcctggaggtccgtatatcacgtatggcgcaacccctcggcagccaagtattgttgcaactgcatcagcttgctcagtgtttatatgtggatttagaggtttaaacgggcccttcttcacacttccggaggatgatcgacagggaaatagaatgtcaggtcccaaaagttctgcttcatggatagccttgtaaagccttctcatgttcagtctattatatgtgaaactaacatcgtactgattcctgtcacggtgagcaaggtggaactgattatcaaatttcaaaaatatctca

SEQ ID NO: 24949 - DNA, 469 bp, Oryza sativa
  unsure (1)..(469): unsure at all n locations
tccctaatagatntatntccttaaccgaatatatcatgtattcgactattagcgacttgataattctcgtcggccgattccaggacaatgaagccaatactgactctaggtcgatgataacttcgggacttaccaaatttccctgttaacaggaaagtggtgttggagcaacaactgtcgttggttgcgatggagctgggtggtgacagtcgttaagtaccactttcgactgccaactagcacaattaataaagggaaattataatttcctacatgtatactaataaaaaataatgtagttgtattgcaattggagaattaacctggatgcaagaattctatatcaaagtgaaggagaaaatgcggctagcattgtggtattttttacgatcacagatatatccgcaagcgtacagaataccattgtagcacttcacccatgagtattcccaaagatatcgtattaata

SEQ ID NO: 24950 - DNA, 417 bp, Oryza sativa
  unsure (1)..(417): unsure at all n locations
tgaaacttgngatgaatacaaaacaatgatgagggaaaaatttgtgtttncatattataaacgtactctccttgagaaattagaacatataaaacaaggtgacaaaaccgtgcgggagtactttcacaactttaaaatttgtatcacttatagtggtttaaaagaaagcaatgagaacacaatgactagattttttagagggcttaattccgatgttcaggctgggcttattaatgtgacatataatcatataggccacttgttcatgcttgcttgcagtgttgagagcaatattttaaagaacccaagggagaaacaagctatgcttgtgcctcctattactgacatttngcanggagctcagaacattcacgaagagaagagcaataggatcgaggtgccatctncatcactcac

SEQ ID NO: 24951 - DNA, 462 bp, Oryza sativa
  unsure (1)..(462): unsure at all n locations
gctttgtactttatatagaatactcttctttatacatttctggtattggaatactctccgagtatatgaatgccaactttacattatggtcatcttatattgattatactgcatagttaacgggtataacgtttgcctatgccattactctatgtcatgacgatgatattaaagtagtatgtggtagctttggcgtggtgtctagattatgggatatcactatttggggttatatgctgcggatgagaagtgggccgctgatggtgacaactcagtacgggtattcctccacgcgtgtatatagtcctatgttaatttcctaaggagggtactccttcgtatttacctcggntatatggtcatgacaagctgtcgtaaggaaaatcgacagtcaggggtggcgttctgaagtaccaggagggcctcataaagaaggtattagctagttaatcgtataactag

SEQ ID NO: 24952 - DNA, 450 bp, Oryza sativa
  unsure (1)..(450): unsure at all n locations
tcaccttggtgatatctctatatccctctcctctaactatgcttgcttgtgccgctattggtctagtggctgtatgtgcctttgtttacatgtgcgagacttctagatctagatacttctttttgtgtgcgctgctctgtgcattaacggaagttccgaaaatcctttcggaagtntcagaaattcccagcctagntccgaanattactgctttcgctntacttaagatcttaaattagcctaattcaccccctctaggcctaattgaccttttcaaaaataatataaggcaaagcctagacaagagtggcgtgttaagagcacagttacgacagccgatgaagctgaagccgataaggccagagggctgctaaggaaagccgttcatctcatcggtaatatgatcttatgctcctgcgagcttgagccaaagagccgaggtgtgatgtg

SEQ ID NO: 24953 - DNA, 378 bp, Oryza sativa
gacagatcgattgtgccgtaaagtgcatcaccttgcaaagacctggagaaagcaatttcctttacccctaacacccctaccgcaagtcggtctattctaacctgtttacaaatcaccttcttggagtccgtgcccatacgctatgaatatcccgacctattttctgaaaaataaaccagaatgccaccagaccgacagaatgagttcgccatagaactggcaccatgcacagctccaattgcaaaatgaccctaccaaatggcagcttatgagttatcacaagttaaaagacaaatcgaagaactggatagtaaagggtatgtgcgagctaactcatccccttgcggagccccagtgcttctgggtaagaaaaatgat

SEQ ID NO: 24954 - DNA, 422 bp, Oryza sativa
  unsure (1)..(422): unsure at all n locations
actaagcttcttaattagtgtcctcctttccaatatgacgtgcatgcgttatcttcttaacaaagtcttctttaattctcatagtgaaatgaatcgatgacatatatatactccctcctgtttcattttaattgatgttttcaacaatgacacggtctacaaaatatatctttgatcttatttntctactataatatatataataaataaatatatgtctacttttattatagtggtttgaaagacaaatctatatatattgtnctagnctatttatactaaatattcttaaagttattgatggttaaagttataaaagtttgatcttaatcttattcaaaacgtcaattattatagaaccaacagaagtaagtatgatacgtataatcgccggcatgtgtatatcacaatctctttctgat

SEQ ID NO: 24955 - DNA, 133 bp, Oryza sativa
agcttattggcttaatgcaacataataaagcattcaagtttatctctgctgaataaagagaagtacatacttgcgcatgcagcctatcgaattcctggtttaagagctcatttgtttctgccaaactatccgt

SEQ ID NO: 24956 - DNA, 483 bp, Oryza sativa
  unsure (1)..(483): unsure at all n locations
cgacctcctcttccatgtcgagtggcaacaccagctttcctattctctactgatacgatcaaggatggcttgccaatgcaccatgccacaagataatgagagtangggctttgttggcacagctccagctccagctccaccctcctggagctcagtcaaacaatntcagctctaccaaaactaggagtagagctctctcacaaaacgtattagagctgtggagctgngttttgacagctccacaattccactccagacttaactcctagagttatatttaagagttggagctgtaccaaacaggccctagttgttggttcgctccgccttttatgctactgtggagaagctaacatgtcgaanacaatcttacagcanatctattatattagtagattagttntaatataaattattcttgggccatttacatgtcacgctgtanatacattcangttatctataattttaatatattaagta

SEQ ID NO: 24957 - DNA, 440 bp, Oryza sativa
  unsure (1)..(440): unsure at all n locations
agcttgagtgtgtgcgattattgagctgccactatctatttttaataagaacgcgcatatttgtgtgtatgtttcttggtttctactaacaattgcagggatacgcaagataattggggatagctgtgctcaacatctacatcttcgtcgagacatgaggagggatcaacatgaccattatgaggtaagtgatgatgttctaagtgagatcaaaatctgcactgccttatttcgagggaaattatgatcctcgngcttacattaattctgaactagcggtagatagtgaattttaaaatcatggtttggtcgagaaacaaaaggttatgtgtgcctctagtgtttaaattaacatgcttctatgaatgaaacattttgtagcatacaaaatacccaatttggaagactgaacgattttaaagatgttatgtccatgtata

SEQ ID NO: 24958 - DNA, 424 bp, Oryza sativa
  unsure (1)..(424): unsure at all n locations
taaaactaagcttcatacttgtccgttggagataagaatttctgtgggtggttctattgtgctcctcggtgcgaaaaaaatatcgaanaaataaaanaaaagttgtgtctctctcctcagcactagagagagcaagcaaaaaaaaaaaaaaagagaggatccagcgagcacaccccaccattccccctttgtcaccaccttccaccaccggntcttgttttccgtgctgtttgggttttgtgttttgaggcgccctttgtgggtaggctcgcgtctctacttcgactagcctaggaccagcactgtacactatacccttgagcgattattcaattggctctgactaacgagggttctagatttctcttgagcattgctttcagcccaccaacagctccaccacaaacccgactacagcttgaca

SEQ ID NO: 24959 - DNA, 490 bp, Oryza sativa
  unsure (1)..(490): unsure at all n locations
ataatttcctattagttagtctatgttatgtcattatctannaaaaacgtcaatgcgatgttacctgccgctgagcacgagtaatttttgtgtactattgctctgattgattacagatagaaaaacataaggctaattggatcgattaaacatgagcagcttgtaataagttgttaatcttgcggagagcctangtatgcttgnggatatagtaagtgacattgccagtgtgccgcagcaagttcggctgctatgctcgctaggttagctagcaggaaagtgtgacacccgaactcccgaagcaagtgtatattcatttttcggggctacattatcacttcatttcactatatttcgtctggagcatgcaatgtcgctgtttctttttctgaatgtagcattggcacacataatgatcttgtgctgcatcttagatgaatgttctgaagctaattggtttgattagtccagagccaacattgtacaacat

SEQ ID NO: 24960 - DNA, 448 bp, Oryza sativa
  unsure (1)..(448): unsure at all n locations
cacagcgcatgtatataatcgttggacaattacgttctttcagagctccaaatgggggccaaaacggctgcgttctttccacaagtttcccaacccctttccatcgttttccgcgtgcacgcttttcaaactgttaaatggtgtgtttttttgcaaaaagtttctatacgaaagttactttaaaaaaacaaattaatccatttttaaaataaattaactaatacttaattaatcacacgctaatggaccgctccgttntccgtgcggtggagttgggttcccaaccccaagtatcaaacacagcctatactagtactaaacgaacccaatactcttggatatgatcgaatgatatagccttcatgcgaaacctagctactcctattttatacgcgtcctaactgcaaccncatactatatagtataattaaactacatatatattaac

SEQ ID NO: 24961 - DNA, 382 bp, Oryza sativa
tcgaccggatcttaagtcacctgcagctgcagcttgtcaaatattgtgacccgtgtgagattcttttcatacttccatgatcaagatcgcacgcacactccacatacacacactatgctaaacttctacactggaagctagcatccctcatccattatttattttattcattatccacaaaataaatactccatgtcatttatgccttttccttcaaaaattctttcaagaaaaaaacagagatagagagaggcatggctatgcaaaagaaggaaaaaaaaagtattgctcatacaagtatggagcattgataaaaaaaaagagaaaaaaatgaaaaaacaaatcttgctcatacaaagtatgggccatgattgaaaaaaaa

SEQ ID NO: 24962 - DNA, 477 bp, Oryza sativa
  unsure (1)..(477): unsure at all n locations
taagagagtacgccttgaattatgatacaatagagcattctttattaagatatgggaacccatagggagaactagagtagcacttccggtgcctactatatgagcattgcttccggcaatggtcataatatttccagttttcttagttaaggtgtgaaaatatctagtttcccttaagattgtattagtggtggcactgtctactagacatatattctcttcacccaagtctgtttatagaacatanacataaatgaaattaaacatggagtaagttgattctattaagggaaacattacaatgacttcaggcccagtaaaagactaagcgtgctcttcaggagcattattcatgaccaaagttctacatgtgctactcatgcggaacactgcatatgactgacatataggagattacttcaggtctccanatatgtcatcatctttttcaagaaagttgtccaatcatcgtccata

SEQ ID NO: 24963 - DNA, 451 bp, Oryza sativa
  unsure (1)..(451): unsure at all n locations
ttctcttgtgagaatctgtctgcccagtcggatgcgttttttggattgggagtctgacctgacttttggtcctccactcccctgaccggtctgatgacgaggagatcggcgttgagcgattgnggggtcagactttatcaaagcaaattcctgaatgaaatgcctccacggtcagttaattcaacaagaagacaaaattatgttttgatcacggtttgaagagttctgatacataccagcggaggtggattgaatgcattgtatggcacgactggcagcagatgcgaataactgacgacaatggcgtttgagaatatcttgtacatcctctccttcatgatcttaaagtccagagaatctgggtcttcacggtttggatcatgcttgccgtcaaactcgaatgctgtgcgagatctctctttgattggagctaatcggcacttaatgaaat

SEQ ID NO: 24964 - DNA, 354 bp, Oryza sativa
agctctgataaaacaatagtattttagtttttttcttttgtattgggatgtgtgagatagacgaaaaataaatttattttgtaacggagatactccagtaactattcttcgctcttgcacttacataaactatctgaccgtgggctctctctttcagcgtttcaccgagagctccgctactggaccgtactgggccggatgtcccccagtcacagacagagcccgtttaatgatcatgcccacgcatagaacattatccgagtctccgagacactgaaccgtgaactccccaacatgcctatcaaccggccaaccgggagtccgggacaccagcacaacggcacaaggcaaact

SEQ ID NO: 24965 - DNA, 394 bp, Oryza sativa
gcatgcacatttggcagtacagacatcttggactccacagttaacttctccatgctcatggattcatcaaactcatggaacaattgtgtcacaatcccatgatcctcagtatcatccttgattatcttaagcagtaagtactttgcactatcatatacctcaatcactgcacatctacgataatcgttcttgcagatcttcctccaaagcttgcgatcaggtccttttaccttctttggctgaccaagtgcaagtgatagctcattacagagcaagaaacatggccagcggattacacgcacattccacagctcatgtgggagctcaagaagctcaacttcgcgatcaccaacaattgtccttcttcccggaacttaggttattatctcattcc

SEQ ID NO: 24966 - DNA, 416 bp, Oryza sativa
  unsure (1)..(416): unsure at all n locations
cgctagatcgatctcacgtacggacacactacattaccatactgttacgccgaaattaaaacaagatgccagatcactcacccaacttaactaagctccaatcgatccgtgcccaacccaaccgtgccggcagctgtcgggacaaactgagtagactccgagcgtgtcgatctaattctaaagtcagagcacactntgacgaacaagttgacccactgcgacccaggaatcaaacagctagtaggaaactagcatttgtctcagcctaatagcccaaagatgccctcgtgtgtcctactggtcttagcccggccgggtcaacgcccagcctaaaccggccaacacggcaacgatacgagtcgcagagcgtgtgcttttactgacgcgacggatgccggcgctactggtactatcta

SEQ ID NO: 24967 - DNA, 405 bp, Oryza sativa
agcttctgctgttctctaataagactatctggctggtctgtctatgtaattattaagacgttggaagtcttaagattctttcatcttagttgtgcttgctatgtataatcatgcttaagatgaaagtgtggatctagggcacatcctgggaactagattcacatgagtatgaattaggaatatttgagaggctgtagatctttaaccatttttgtcaagtctcctgaatgtgtaacacatctggtcaccgccttcgagtggtttgacgggcacatctcatgctgaagttgactggcaggctaatggcccagcaatgtctccaatattcctctctcgaggcgtcagatggttcattatgcttgtttgatgacttgaattattcactttatctctcaaatattatat

SEQ ID NO: 24968 - DNA, 505 bp, Oryza sativa
  unsure (1)..(505): unsure at all n locations
cgtcatgacgacttatgttcttaagattagtgcttccatctttatgtcactctaatcttgnctatataattcatcgagttatcatatatctcatataatcttcgataatatcttcatctaatctgtaaccggctaacatctgttaatggaaggcagccgattaggttagacaatgatgttaacttagattatgtgatatatctaccactctatgaaacttccagcgtcttgattgtctagatattgntcttcttttcatacttaatgctgcatcagttgagtttgatttattaagtcgtgcttagaattgcaatctctagcctgctttctggttgccgattanggtagtatcggagtttcagccgatcttatctgaattaactacttttattctatatgctttgatgacatngtaaatctgccctttatgttaagaatttaattgcatctacgtatattaagctactgtttggatattctacctgcttaacatctaatatagagt

SEQ ID NO: 24969 - DNA, 439 bp, Oryza sativa
  unsure (1)..(439): unsure at all n locations
ctcagctcgctcaacttcacttaatatctctacacttagaattgttttttcatactgaatacttcgaggtcatgtgtctaagcttggtagcatctatctttatggtgtattgacataaaggatgaaccaaatatgttgtctagtccaaagtcttaacttaattttctgttgtgtttgtggacttctacatgcttctgttgaatcttgcagaatgctataatcctcttgttcaacatttcatgtgctactgataatgcctaatgtttgttgtgaatacttgaattacatttaattgtgatgtatatgtagacaatctttatactactgtagtatttctgaaactatcactctcaaccttctagaggctggtagctatctacattgactgtataagttcgttntaatgagggttatcaactagcgatcttttgaatatctg

SEQ ID NO: 24970 - DNA, 455 bp, Oryza sativa
ttaagtcacctgcagctgcagcttaaagagaaaactaatttaatctgtttatttttcataaaattgggctaaattaaaatctgttaaatactctgcttaattctataaattctagatctttctgggatttatttgagctaaggaagtatttttaataaatggcaatgcattaaaaaataaattaaattgaaaaaggttctaaaagtcttcttttggctttgggccaaatgccggcccaaaacctctcttctctctctcctcagcccagtcggtccagtccgccgcgcgcgcgcgccttcgctcgctgacaagtgggtcccacttgtcggatccgtcttcctcgcgccgccgtcgtctgccgaaaccctagcgctcgcgccgccgctttcttccaaatctggacgatcctttcttctccggccgaattgatagaggggaaacaatctcctcgatct

SEQ ID NO: 24971 - DNA, 335 bp, Oryza sativa
cctcggtatgcgggtcctttccgtatcaatgctcggcttgtatatattccttaccagttggagctgcccgcctccttgtgcaacgtgcatgatgtgttccatgtgtcgcaacgtatgaaatgtctccgagtgccttccgatcatgccgactcagaacatattgaagttcgcgaagacttgacttatgcggagaggccagtgaaaatcctgtacacctggagcgcacgaccaggatccggtaatccgtttttcaaggctcatggagcaccatgcctaaaagaactacttgggacgcgaaactagctaacgcatccatcccgactgttctacatttt

SEQ ID NO: 24972 - DNA, 353 bp, Oryza sativa
tccgccgttgcagttcccgccgcacgaccacgacctcgtcgtctgtcttcgcctcgtccatggcaccaccgttcgcgaactgaggcgagcaccacggcgccgcggccacgtcgttgatgcgggcggagacgggcggcggtgctcgctcatggcgatggcgcgggcacggagggcggtgatctcgtttgtgaggcggcaacgaaggaagagcgtggcgagcaggtgccttaacctggcgagcgccgttgtcgatgcggcacctgatccagactgcatgtggagaagggccgaaggcgctcatggtggccaagtcgtgcacagcttagtgacctctctggcgatgcagcttctgt

SEQ ID NO: 24973 - DNA, 416 bp, Oryza sativa
  unsure (1)..(416): unsure at all n locations
agcttctcatagcttgttctacctgcatgtttataactntaaccgcaaccaccattccatcatccaaatgacccttgtaaaccttgccaaaacttccagctcccaacatattatcctcattgaaactttccgtggcacgaacaatctcttgatatgatactaacctataagaagtaggtgtagtagtatctagcttccttttaatcttctttctagtcatttggtacaaacaaagagcaagtgcgccaactgctattgtgatggcagggagtataaacttcaggtagtggctaccattagttgagtgtgacttgtctaggcatggtaaaaatcctagacgaggaagaccacacaaggcagcattgcccatcanagatatcaaggttatattngagaaaacaccaccatttggtatt

SEQ ID NO: 24974 - DNA, 471 bp, Oryza sativa
  unsure (1)..(471): unsure at all n locations
tcggatgtgcatcgactacaccgaccttaacaaggcatgtcttatatgatccttaccccctgcctcgcatagatcagattgtcgactccacagcggcgtccgaccttttgtgttttctagatgcatactctggttaccatcagattcgcatggctagggaggatgaggaaaaaactgcgttcattacccccataggaacttattgttatacgacaatgcccttcgggttaaagaatgcaggtcctacttttcaacgtactactcgaatttctttgggtagccaattaggacgtaatgttgaggcttatgtcgatgacttagttgtaaagacgcgcaaccaggaaacgttactttcagatctagcggaaacttttgagagcctccgctccgcccgcataatactgaaccccgataagtgtgtgtntggtgtacctgcgggcaagcttctccgagtcttggtctcttgccgag

SEQ ID NO: 24975 - DNA, 399 bp, Oryza sativa
  unsure (1)..(399): unsure at all n locations
gcagcttaagaaaataacaatcgntaatgctgactagttggttcaacccatcaatcattttacatcagtaataacagcatggacgaaaacgagctaacataattcctgacagcctgaactgcaacatcaagatttacatgaagatatgaaccaaaacagtgacctcactggcttgtcgcaatcccctcacgcccaaccgtaaatcaatcgatccagagcaacaaaaactatagttacctcgtgggcgaagttgggagcggcgagggcgcgaggccggcgaggtggacggtgaggactgcgtgtgacggcgacggcggtggcgccgatatgaccgaagacgagcgtatgccgggcgatgtgaggaggaaagcgtgcgacgtcaacgctgatccgggtgac

SEQ ID NO: 24976 - DNA, 405 bp, Oryza sativa
tgttgacggtcattagcgatcagtttcttctattattattaccaaaatagaggagaactagttatgcttgcaatgcatattcacgttagaataataatattccactagtagttggttcactaaccttttgcagggaataaccataaagtggagtagaatcgacatcaaatcagacgataaatcaatcggatgatgtcgagaatcagacttatgcacgaataggcaaaaaactcataattgacaagatgaattgagccaaaattaacaagtctgcgaagagaagcaacagaggatgccaccagccaaaacctgtgctggttgggccggcccctagttcggccgaacccccctagcaccgttggatgcaggatttcttctggacggtgtggatcactccccaatgac

SEQ ID NO: 24977 - DNA, 456 bp, Oryza sativa
  unsure (1)..(456): unsure at all n locations
caagcttatgtttatataactctatagttctatctattctggctctctggtgatcattgtatttcttgacatagtatgtgcattcttggataagatctaatgcgtgcattatctttctattaatagagattctgacagtctctcactactggagaaccgatctttcatcgtggtacctaaaatcacaaatatcttagctagattaagaaccggtactaaagatgctttagtaccggttctgaaaatccaagtccctagaaacactatccaagtccctagaaacacttttagtaacactaaccagtcctaanaatacatctttagtaccggtccaagtccctagaaatattnttaaatcctgggtggtattaccaaccagtactaaagatgtctcccgggctagttcanaaagaaagtatcttctgtcaagtcaaacgtatgtagaaagtgggatga

SEQ ID NO: 24978 - DNA, 461 bp, Oryza sativa
  unsure (1)..(461): unsure at all n locations
tggtgtggcggcttgcgttctcgggatttgtgcttacatctttatgacactctaatcctggttatgtaaattgtcgagttattgtatatactatataatctagatcgatattgctatctaacctcattggctagcctctatcatcgaaaacagccgatagaattagatactaacattgaattagattatatagtatatccaccatctcaaaaaggctctcatagacttggttagatcttatatttctctttatgcttaatgctgcatcagttaagtttgatctattaagtaatatctagaatcgtaatatctagctggtnttatgattgctaatagtagcatcggggtttcagccgatcttagctgagttagtcatctcgttcctcatacgtttacttgatgtgctanatctgccttttatattaagatctcacttggataacatatatatagcttgttat

SEQ ID NO: 24979 - DNA, 376 bp, Oryza sativa
acagacaagggaagaaggacaatcgggatcataaaagacgagacgacaatccaccaattcaccatgcccacggaacgagaacgtacaatgcaagaaccataagccaaacagaagctactcccaatcactcaactagcgaaaacacgaacacggatggggaacgtctgcacactatgcagagtcacgaccaagctccggatccacaagaacacacacagaataagagctaacatttcgtcacaaacaaacaagtacaatcgatgcagaatcgccaggacatggcagccgcatcataactcagaccacagctgcacaggcatgaacaagccactgcaagcgacacaacacgcacaggcacaggcaccaacacaataaa

SEQ ID NO: 24980 - DNA, 441 bp, Oryza sativa
  unsure (1)..(441): unsure at all n locations
tgcanatcatctccctacataatanagtactggtatatatatgacatcaaatcatatatgtatgcgattgtggtccatgcatgtagaatctttggtgcagaatctaatcataattatataggcccggctcaaagcttattggctntgtgaaatgattggctggttcagaaacgagctgccaggcaaccactgcaagataatgggttgtccaccggcgtctaattgtgatttgtgatcacaagctcatgcatcaacatccacaaatgacaaatctttgtcaatgcttgacacaccacctcagataggtttggttagcagtgaagcttaattaaccaaggggagattntctttntcttttttggcttacgccataagttggactgggccacagctatgtaaagcatatgccanacaagtcatcatntacatggtcacataaat

SEQ ID NO: 24981 - DNA, 387 bp, Oryza sativa
  unsure (1)..(387): unsure at all n locations
agcttcattgcttgatatcttggagatctttntttttcaacctacgcattcacagtgagattaattaattcgtgcaatcacaaagtttatgcgtcttcagaatatcgactacttgtgctatatagatctttcatggacaacggataagtttaacatatatataaaaaggtgtatcaattatctttgaggaaacactaagatatatgtactagacaagctatactacttgtgagataacattgcttaagactaaggagcaagcatagatactgtaagcaaattcttaccggcactgtgaatacttggagcgaaattttattgattcattacaagcttgctatactccgattatatgggagtggcagcacctgtagagtcaatatatgc

SEQ ID NO: 24982 - DNA, 487 bp, Oryza sativa
  unsure (1)..(487): unsure at all n locations
ctgnttgtcagaacgacaaaaacaccgaagtggtcagttcagatctcgatgctgcataattgcaaagcggtgaaatatgcatatgacaacatagctaaagctagcgtggtcgtttgttgacaatagtggcagacggcattatagtcttaattgctactgatgaattattgggcatgctaaatatctataaacctcctttcaaaatacatcttgagaattcaccgtgctatgtcagcaattgttttgcanataaagtccccaaacttccagttaattacgcgctagcccgatctcgtctactccatatgaatgatgaactgactggctgatatcagtcaattaactaaaccagggaaatagcagagaagcacaccattgatatcacatacagtccctttagttcattaatttgcttggcanagtttcaacatcctcataatattatttacgactaactggctcagcgttctttgggaaaaaatattct

SEQ ID NO: 24983 - DNA, 381 bp, Oryza sativa
aatacatacaaatccgaagtgcctaaaagggttgcaacttcatcgtccaatgttctttttgtcatactacatttgcacctatgtattgcacacttttttttctccaaaatttaactgtaaactgatgaaacagaaaatgtgtgtggggaagaaagaatatataaaaatttagttcatttgctaaacaaggttttataaaatagttgagaaggaaaactctagtgaaaggtaatctttaataatagaaaacacactactatgaaaattaaaagaagtaaacacactataaattgttaaaactttacacataagtatttagaattatctagtgtaatattttatgatttctgtatgataagatatcttatattattgatgact

SEQ ID NO: 24984 - DNA, 397 bp, Oryza sativa
  unsure (1)..(397): unsure at all n locations
tactcagcttacaggcgacgctgccgcctccggcctctctctatcttgtgacgaactccgcagccggcggcctctcccctctcccccacctcgacgatgaacaccggcgccgccggatgtcgaggagatcgacgcggtggcgtggatccagagcgccggcagtcgaggatgccgaggcggcggcgtggatccggagcaacggcgggtgaggaggccgacgcgacggcctgaatccggagcgacggcacggatntggagggcgtcgacgatgatgactcgacgacggcggcacggcagcgcggatctggaggacgtcgacgacggtggcacgacagcgcggatctggagggcgtcgacaacggcagcggcactgcggcgaccccagctctgatctcct

SEQ ID NO: 24985 - DNA, 379 bp, Oryza sativa
aattttattaccggttcagcggagatagatactagtgtggccacacaagggtataaaaatctcaagaaaaaaaagatacacttctgtcttaattgatgtattggaggaaagaatcaaatgttataacgcatgagcggcacaactctatcttaaactgtctctggttagtttaatttctgacctgaatgagtagattgctagtctttgatttctagagagcagacaatcttttcttgtggcatcatcagtgatcagcttgggttcttaaatgcatgatgaggagcctcatcatcagtgatctaccctttgctagagcagctcatcctgaatgaacacatggatgaggagcctcattataagaatacctatcagaatttac

SEQ ID NO: 24986 - DNA, 419 bp, Oryza sativa
  unsure (1)..(419): unsure at all n locations
taattagtgtctcaattaaatcagtcgatatggtgttttttgaattatattcaanaaaaacagagaatttcactatcataccgggcatagcanaatattgtaattctcaccacatgatcatcatgaccttgccaaggcatcaaacacacatcctatttggagagcttaagattttgggaagtagttggttggtagtccaaattgttgntagatttgtgggctttgcatagacacgctgagggtataaaatagtagaggtgttgatgcctctagatatcaatttcttagagagttgaggtgagagaaaagttacggctctgaatatagtcgagatttttgtgaggggtgctattgatgcactttgtanacactagttgatgcaatanagttgacatatttaaatctacatcttcgagttt

SEQ ID NO: 24987 - DNA, 431 bp, Oryza sativa
catgcaagctttcataccttgacgttctgcgaggccttcgccttcttttgtacgcttccatcatgtggagggcgacaggctccttcagtgcttctgctgatgaagtctgagctgctcgctgatggggtgcggctatgcttgtcaaccatgaccagttgtagtctcttccaacgaagtggtgctgaccgtgtgaaggaagcgtctctttggtggcttggctgatgaccattgctggatgtcggagctgcttttcgctcttgcgactttcgcggattcagtgtcgctgcggttgtgaagtcggcgctgctgggtcgtttgcgcatgtagctctgcaacgataacacctcttctgtgatgttggagctgtttgagccactcttgtgttttaactcggcgatggtgttctacatttggactccgctgttgcttgc

SEQ ID NO: 24988 - DNA, 321 bp, Oryza sativa
  unsure (1)..(321): unsure at all n locations
cagctanggtttctaacagataactgcggttttttcacatcgaatgagaatggagtctactaaaggggagcgcctaccataactacttttgtgtaacgccagactaagttgggctccgtagcctgggatacagccatggactgggggtggctgcacttacaaacctgacaaaactatatttttacatttagtatttgaaaactatttataataacccttgaaaacttatttaaaagatcttttacaaaaaaacggccctcgctacaggggcccacacttggacgtctcggccacggactggtcggaaccactactagagat

SEQ ID NO: 24989 - DNA, 481 bp, Oryza sativa
  unsure (1)..(481): unsure at all n locations
tgttctaattacacgatcacaccattttttccaatcactgngaagtgaaagcagccttgtgccttgtcatatttacaattccaatataatccttattacacaacactgccttgaactttgccgccgctcactgtgcactgctttgcttataacaaggatcaagtggcattcgtggccattggagcaacaatggttggaagcatcaagttcttgaaagaagacggtgactacgtccacataggagatgaggttatctttacgcatttgttggttcatgcaacagctgcaccagttgagttcacagattatctaatgcatgatattatctcacaagtttgatatgtcagttttggaaggagcacaagaatatgcgtctttgagaaagtatctatctctcgcttctgctgactaaaacatctagccgaattcgactacacattcgaattccttgcaccttactattgctcaaattgatcattct

SEQ ID NO: 24990 - DNA, 446 bp, Oryza sativa
  unsure (1)..(446): unsure at all n locations
agcttcaagatgtcngtgtcgcggagaatatcggttcgatgatattgaccataaggtctcaacccagagaaaantacttcagattaatatcaccgccaaaattcgactagatcagactagataactacggtgctatttacagatgaactcattaatctacaatgagatatcagaataactgttgcccaagttcgattatactcaggcctaagaccttatgtgacggttcgactcttaatcggacgagcatacatacatggtatttggacctcggcaagccgaacacattctatccttccaagccgggagggcccacgcacatttggctgtactcctagatcatatgtctactacaccctacagtgccgtgtacaggagagtactacgtgcatcaatccttaatgtcatgcacaaatcaacaaaggtaattagtagattgtgcttta

SEQ ID NO: 24991 - DNA, 394 bp, Oryza sativa
  unsure (1)..(394): unsure at all n locations
acaaagagctagttcttccaaaaagtaaagaccaggccgattaaagaaggagatntagtcttgaagaaagtgctcaatgaggtagctgttggaaaactcgagtcaaagtgggaaggaccattcatagtcaaaaagaagacagaaacgggagcattcaagttagcatatcttgatggtgaggagttaaagcatacttggaatgctatttctttaaagaaattttatgcctaatanaaagaaaaaaagaaaaaaagaaaaatataagagaaggagagagagaaagagagaaaggagaacacgggagctcgagtttgtagtatactcactcagatgtaaatacgaatgatatccaagttaatgtatataaacagggacgtagggttttatccataat

SEQ ID NO: 24992 - DNA, 462 bp, Oryza sativa
ctgcaggctgcaagcttgccatcagtctgttaagtcaccctgacactatattgattcttgtttagcatatcttaatataaagtggtatctgaatactacctgatacacgttgggtttgcctatcggctatgctgtgagtacatataatccctgctttaaaatattcttggaactcaatggtttatactgtcttgatgtgctgaccgatctttcctaaacactttggttaagcatactttgaaacacatattatgttgtattgacatatacagccgatagaacaaactcaattatctctttcatcacattacggccgatctgatctgtatcatattggcctggcacaaaggatatgtcatcggcaatccaaccgatcggctatcattttacgggttaactttggtttctttgtttcttggtatttgcaggattaaaccaattggcacgccctgaacccgaaag

SEQ ID NO: 24993 - DNA, 191 bp, Oryza sativa
tactgataagatctctcaagattgtggacactagtatatcattagctcaagctgcacaactggccataagttgtctgtgccctgatgtcactccaaatgagccctctggatgcgaaaacatgagaaatgacatattctaatcagatatgaggcacaaatggcatgtggcaacactggcactatgatacagt

SEQ ID NO: 24994 - DNA, 439 bp, Oryza sativa
  unsure (1)..(439): unsure at all n locations
agcttctgaatcttctgcatcactccagggttctttatatgcttctgagaagccctatggttctccttgcaatcgaccagtacctgcaaaacattttcgatatcattaagattatggacagacaggtatttgtgatactttatgaactgacatctaaatttcagctaagaacaaatattctgtgttacctgtcgcatgatgggatctgtaagaatattctggatctctggatcctgcatagccttgttctacacataaaataaaggaccagttaatacagttgtacagtatttaacttttaaagcaacaaggggcatgaaaagtgcaacaggcttacctgtcgttcctgaatctcttcctgagtcaaatcacccctgttggccttgttgatctgttcgatacacctgcanacatgtgcaatagttcagagatggtttat

SEQ ID NO: 24995 - DNA, 454 bp, Oryza sativa
  unsure (1)..(454): unsure at all n locations
ttcttntataccgaaagcaaacttgaatttctcgggactattcggtggagtagtaccaaaatctccaggatgccctgagagcattacctattccaatctgcaaacagttgtacttcgttccaatctcacaataaagtccattagtccaagcaattcatcagtacagaatacgagtataacagctctgttgacttccaagttcaacatgctcctcctccatcttgatctggtcctcctatcctgcattgtattgatacctgatcaagaatctatgggctttgctaaattgattgcctctatcccggctgtaccgccgtaccaactatgcaactatgtacaattcaaaaaggaaaatagataagctatatatgcaaccatagaaaatggagcatgatattattagtacttacgagtgtatatgaatttcacgtgtagtgactctaaatgggcagag

SEQ ID NO: 24996 - DNA, 437 bp, Oryza sativa
  unsure (1)..(437): unsure at all n locations
agcttcttttagacaattcctgctggaataaattttttgnaattccgaaagtagttggtgtctttatggggtcctaaaattgctcatcctataatgaagcttcagagtatggaatgacacaggacaagtagatgaggacttttgaagttaaagaaaccaaagtttctttattgaacgtagcaacttggctcctctacattctngtattttgctagaatagtcactagcttgggggatgggttagaatcagtcctaacaagttaacttttactgctctcttcttgttcgatccatacatgggagatgaatatttttggctcaagttctgtcctatgagattggatggttgatcataatgaatatgtattttctttgttccactttaaattattagatacgttacagtcctttataatgatattatggtttgtggaact

SEQ ID NO: 24997 - DNA, 294 bp, Oryza sativa
tttttaaaatgcctcctaactgttggctaataatgtcaatcataaaaactggaacatctcagtccttactggactatcgatgggaagcggacaaagatgctgactgaaataaccatcgcatgatggagagctaacttgaagaggcatcgatcctgacattgactacccctaggatgaaggcggattcattgtggcatacaccgtgcagattgcgttccagaatcaatgatcataagatcttattaggtagattctcaattcaaatgattctcaaatatcgcgaacctacttcga

SEQ ID NO: 24998 - DNA, 438 bp, Oryza sativa
  unsure (1)..(438): unsure at all n locations
agcttaatagttgaacaacacttccttgctcacttttataatgaagattttgaattcgagaaagtcaaatgaactttgaatattttggctaacgacggntagtaataatacaactatatttggtgcataaaagttgtgcctatatatttgtattncaaatcaggagctntcacataatactgctctactaattaatcatgtggattagtctttgtttgtgggaaatgaggagtagtatgtgttgagcgaacaaaaaaacaagctgactnttcaaaaaataaaatcaacacaagcttcaagagttgaatagtattgctacttgcgtagttgcatatgtaagcatgatgaacggcatagtccatggnggcacgcctgtttttaacaaaaggaactcaaatttcggatgtggattcgtgattgcttagtttgacagctttc

SEQ ID NO: 24999 - DNA, 500 bp, Oryza sativa
  unsure (1)..(500): unsure at all n locations
gtactgtctagagttaaagctgtgcccgaattgtgaataatttctttttgtggtagactggcagtactgtttctgaatcaagcataacatacttcataacttttgcatagtgggttagtatttgattcaaccaaaatgcatgctgcacataatgtttcttccaataacccaaggatcatcttatagaatcaggaatctcataacgatccaaggaactgaaggctaaggatgatagcatatcagagttggagaagctcatcgaggagaagtcacagaagattgcttctctgcagagcgagattacttccctccaggtatgaagtactatatgctgaaggaattgcctctgaaacattactttatgggctaaaatttattgtatcactatctgatccatttacaggcaaaggggtctgtggctgctgaggagcangctggcaaagccaacgctcgggctgttgagcttgagaagcangtgcataacatagaatggtcatgat

SEQ ID NO: 25000 - DNA, 444 bp, Oryza sativa
  unsure (1)..(444): unsure at all n locations
agctngaatctttgctcgtctcgagtaaaggatgatatgaaacaaagacttggttattgatcaggagctgttgcaatgctgtatatctaaaatgtacaaaatgcatagtatgggtacccttaccaaaatcaagtcagccagcacggtggcttaaccatacgcctaaactgtgaggcatcatgcttcaccttgtcttgggtgtttgagagacagaacggttagtaaagcactactcacccattccttgtctaacttttattcaggagattttctcanatgatttgtgcaaataaaaaaaacaagttgctcaaatgattctctcagtccctcagcggtatataattgtattcctcaccaaggtattgcattggtccctattctaaggtcatatatgtggagtttggtanggatcaagtgagtcatacttctattcacatttattac

SEQ ID NO: 25001 - DNA, 363 bp, Oryza sativa
  unsure (1)..(363): unsure at all n locations
cctcgtgcaatactactctgagcaccctggagctttattatnttgctgcatgcattntatccacctagatccggcccctaacgtgacatgcatcactacctcgagacccaccgccactcgtgccgccgttgccattgattccggggaccacagatcactataagaccaccattggcttcgcatagaacccctcttncttttctcttttggtttcatgccgagatctgtcaccgatcgccgtcagcaagctctagaacgagctcagccatggctagctctgttcagctcgaacagggacctctgggagaaaaacaaaactgtatgtctaccttgtaaaaactccacactcatggaacagtcaca

SEQ ID NO: 25002 - DNA, 435 bp, Oryza sativa
  unsure (1)..(435): unsure at all n locations
agcttttaagctagcaccccgccgagttgtacttttatcttacctttattcgagctgtntattttagttcttccttttttggataaagtgtaagcatgttttgatcgtttttctactctactgggagctggaaatgcaaagctgctagtacctctttctggcttcagcttcgtttgctcctcatggtcctgggtaggtagcagatggcagtcatgggattctgattatatgcagatgatcaccagatctttataatttataatggagttagtataatgagagcatggagatggagagcatgtgtccgctgcattatgatattcacactgtcattttttccaactaccttatcatgcttacaaaagagtattcaagccattggagctactctatatactttttaaacactgacatctttcataaaactagaaaaat

SEQ ID NO: 25003 - DNA, 330 bp, Oryza sativa
  unsure (1)..(330): unsure at all n locations
ggcgacgacgccgtcgtncacaataacacgcagagaatgtgttatatcgcgagagtggaagggggctaatacaaatcaatcaatcattgccgcaaccgcatctccttgagctggatttatatatactttcttctttttctttctttctttctttntntttttgctactagagagcaactttgctttgttatgttttgtgctgtccaagaggaaactgggaaatgccatccttttgttgcatacgacgaggtaacagtgaacattatgagaaattcatgatgcagaatttgtttccattacaaaaataatgttgtgttggtaataaatgat

SEQ ID NO: 25004 - DNA, 374 bp, Oryza sativa
  unsure (1)..(374): unsure at all n locations
ttcaatactcaagggaccaaaaggattggattatctgtgtgatctgtataatctgagtgtacagaaaaaaaacttgcaaattagcattgatgcttaactcatatgacaaatgggataatggaaagatacaagagtnttggaggttccatatgtgtataccttcaaggcccatcaaatttatctgaaattgtcaggcactttatgaacatgaacagaagtgaaaatgcccttctagctgagtgtttctagtttatgcagtgcctctattttaaaaagcttgcctgagtgtgccattgtcaagctattagtacttaatttattggtcagaaattggaatatatgttnttttgacagcttagtatgtaaactatttt

SEQ ID NO: 25005 - DNA, 482 bp, Oryza sativa
  unsure (1)..(482): unsure at all n locations
gctgagttcctgctgaataagttgaagctaaacagagaacttttggtgtntgaatcgctagattatatgataaatatgttacaagtgaagcttgccagttgccattgaagtgattcatagagcatagtagaaagtactttctgctgaacgagctagatggcatcttggacttacggtcagaaactccataaatgtgatgatgttagggtgttacttntacttactatgggaaagtatgttcttatcaaagnttgatatgattggcttatctacaaaattgaacatagctagtgctcccattatcatacatgtatttgacgtagctggaaagattctatgcaacaaaggctgtcgtcttatctttcatggttcatatgcagaccaactcaagtctaattgaaggtagttggcagctcatatttactacaagaccagggtcggcatcctccattcagggtaaataccagcaggatgccccactg

SEQ ID NO: 25006 - DNA, 445 bp, Oryza sativa
agcttctcccgctcagcccaatggtcgaacgggcagtggtgctttatctctctccgagcgctagcggtgaagacggagagcagaacccgcgccgtcgagctcgtactccactgtccccctctcgccgaagtcttgggcgggaggaggcgctcgaggaggtcgaaaaatccgcgacttcgccgcacgcgggcgatggagaaagacggcgagacggggagcgtcgtctcctcgtctacggtgatggcagcacgccccatggcgcgctccaggctgcgggcgcgctcctgcgtcacccgcccgtcattcctgatccagagactccaactggacgttggctagatgacgtggccaatttggtcatgacggcgcagcagcgcctatgcgccggctggcggtcctccgccaccaaagccactggcgttgctactgctggctccgtgtcgtc

SEQ ID NO: 25007 - DNA, 450 bp, Oryza sativa
  unsure (1)..(450): unsure at all n locations
ggtgcanacagttacctacaaggattctcttataatggttgcactgctagtgcgatcattaaaaagagtttgcaccatggcctctctcatgagacagggaatggttaatgacggtgagctaatccgaattgcttcagatgatagctccacctcccttaactactcttcactcatgatggtagctagttgatgaactacctctttaaggaaagtttcctcgagaggttcattccaactacgtgggactggtggtctcttttgcacagaatagtttgaggtgtttccatagtcttcaaaaagatcacccttanactggaatgggatatccgaaggctgaatttcttcttccttcatttcccatggttcggttgagcattcaatgtgtgaatcttaagatatgaaggttacaagctccgattcaacgattgaaggctcgtcttgtgtatgctc

SEQ ID NO: 25008 - DNA, 395 bp, Oryza sativa
  unsure (1)..(395): unsure at all n locations
agcatggtggcttgtttgttatttcttctanatgaggcgccgtggggtgaaggatgtgggatctaccttggccgtttgattgataccgagggagcttgatgaaaagcgcgatctgcgtgtgagcaccggtgccatctgatgtaattcactgggtgtgtttagattgctggatgtgtctcataatgaatataaaccatatgggagattggatatgtcggatctctatattttaccttgagttagagtatatttattgctcattgatacgttgcattgctacgagtaatctatttttggtaagatattctatatacttagatctatttcctctgacctaaattttcttatatttcggccatttgtatgagatggtgggtctaaattacttttattgc

SEQ ID NO: 25009 - DNA, 413 bp, Oryza sativa
  unsure (1)..(413): unsure at all n locations
tgtacatntgatacatngattgcattgtgcttcanaacatcctgtctgaacatcatttcttgcagattctcgagagcaagggtgatattggtgtgtttccacatctaaaggctcaaccaacagcccccaaggaattccatttctctaccgatgatcgcttgngtcctcctgcagttgtggatctatttgataaggtgagggttctaagtcatgctagtaagctcattattttttttccagaaacctttcttctaagtccttttctaatttgtagctctctctttgctcagaatcttcatatcatagcaagaaagatgtgcccagattgacaataccaaaccccttcaatntacatacagatgtaagcagtatgaaagttatttgttttcccaacacattgcatttacctatct

SEQ ID NO: 25010 - DNA, 394 bp, Oryza sativa
  unsure (1)..(394): unsure at all n locations
cagctgtgcaatctgctaagtactcttgatattaccgtgctgtcgtgttgatgatagacttgcactatctaatcatggtgtcttttgtgaccatcattcacttaattaccctgcctttntctttttcaacttctacatcggcctttcaaagcagtaatctacataaaacccgaaaaaagagagcactcttttatactttgatgaaacactttacatcatgaataaccaagcactataaagtactccaagaagcaacaaaaaatttcaaaagtccggaggaaagaagcgagaaaaatattggttggcgccagtgcgtcgctttcattcaccgtggtggccctcgcgcgcacgaaacaaatgggggccttatcgccgtcgtaatcacgggagcggg

SEQ ID NO: 25011 - DNA, 423 bp, Oryza sativa
  unsure (1)..(423): unsure at all n locations
tactaagcttatanatacaagatgtaatggaccctgcacaattcagntattatttcaccggccggcctgcgcattagtactacagaacttggcgtttagaacctgctcattaatgggaattttaatgatttgatcaggacggtatccacgaggtcaacgcttggctttgtggatgatacgtatcataggcacatggtgattaggcgaaagcaccactaaggcgaatagaggtgataggtcatatggagagggagtgagctcacattgacgtcatgttatcaccagcctgcagccaagtgaaaaatcttacctttcgacgtcagagccatgaactgaattgaggatcatggagccgtcgcttggaaggtaaaaatacctcaaggccatgatcttgtcttctctgccccgtttccttccaaatac

SEQ ID NO: 25012 - DNA, 394 bp, Oryza sativa
catgcaacttgagtcgcccgtcgtaccatgccagaaatacacttttttgttgaagaaaaaacccacattctaaccctaaaacgcaactcaacaaatcaacttgaataccaaatccctcctaacccgagcatttggacttgtaataccggcgcccaggttgccgtgctcacgagaccacctcgccccttggctggggacggcattggacataccgcgggctgaatttagcggacaacccataacgacgggagatgcttcactcaggatagagacagccgtcgtcatgagctcacatctcgcgccgccgtcgcaagtacttgcgcgacgcgcccgtcggtctattcgtagggttcggtaatgggataactaccgccgccaaattcgccatatatct

SEQ ID NO: 25013 - DNA, 370 bp, Oryza sativa
aggacacatattccctggggtgtggacgccgatagaaatcgactccagaagctcacaaacgccaaccgcatccacgaacaagagcgagactagacggtgcaatccattatcatcacgaagatgcgatcgaaactgaaggaatacaaccacattaaccacaagtcacatggtggaactgaacaaaaaagggacataaaaaccgccagtcataagaaaacctctatcaaagagtgaagaacaacggctgcaccgaaggccagcatcagatacagggcgcaacaagaaagccaaaacacgtaagcggacaccccagaaaacaagaaccccaagctaatagaactacaacgggacccggcaagaaaaaaaaaac

SEQ ID NO: 25014 - DNA, 441 bp, Oryza sativa
agcttgacagttaaggtgtgatactatacttgtttctttaatgttacccactctactgaatctaaactatacacacagtatgcttatagcagcactgagcaatgttatttgcgctactttgtaacaagttgtgatgattgaaggctaacagattgatttaaaaatacgtgtttaaagagtgtcaagctcttgatcaagatgggaattcctttgaactctctgtacttacttgcaagcgtgttggagcttacgtgaaaagcaagaaaaatcaaaaccaggtacttctttgtccttgcacatgcacatacacactcatgtgctgtgatcaagtgaactgatggacttgatgccatactatgcagatatgtaggctatggcaaaaggttgattcaacagaagatcggtggttttaaagatttttggacaatgtgcaggacaaag

SEQ ID NO: 25015 - DNA, 430 bp, Oryza sativa
  unsure (1)..(430): unsure at all n locations
tactcagcttctcataagttccagcaccgtcaacattgtgaagagcttgtcttatggatacattaagcggcacgggattgagatccacttcatcaagaggcgcagcctcgagagcgcgcttggtgtcaccttgatgttccgagttcggatgtgtcttgactgcgtcctcatgcatgcctgggccgcggacattgctgaacgcatcatatggtcgcaccttgctccctgtaacatatctagacagacggtttccacccagtggagtctgttacacgcgctcatcgacctatgggcgggacggcgaatcttcaccattccaagaggatgggttggcttacatncgggcgaagacccgacctggccccctattgcgtggagaaccactggacactggctgaggggtgaccatctgtgctcttcacttggagag

SEQ ID NO: 25016 - DNA, 393 bp, Oryza sativa
agcttatctcttacgctccaggaatggatcagtcataacatcaccaccggcttgccgtcatcgccgccgactggtgtcttcgcctatacggttgtttggtcacaccaccgttgttgggcgtctacgacttcaccgaccggccgcctcgtccgccgccgactggtgtttccgcctgcacggctggtctattatgccgccgttgttgggtgtctacgtcttcaccgaccggccgcctcgcccgccgccaactggtgtttccgcctgcacggctggcctattatgccgccgttgttgggcgtctacgtcttcaccgaccggccgcctcgcccgccgccgactggtgtttccgcctgcacggctggcctattatgccgccgttgttgggcgtctacg

SEQ ID NO: 25017 - DNA, 480 bp, Oryza sativa
  unsure (1)..(480): unsure at all n locations
tcattcaccgagacctganatcaaacaacatcctacttgtggaggacatggaaccaaaaattgcagatgttggattggcaaggctactataagaaggtcatactaatactcggacaactagaattgttggaacattgtaagctcatgtgcataataaaaccttcactcatagagatattgaatgtgcaagcctaatgcttatcctctgcagcggttatatggcacctgagtacgcaatacacggaaatgtgtcaaccaagatcgatgttntaagttttggtgtgttggtccttgaaattgtaacagggagaaggaacctcaattctgacgatcatgatcgcgggaatctccttagtgatgtaagtgctcaataaggttgagcttgctcctgtacatatatacttttagtgcatttacatactgcaatattcatgatatcatacccgaaagtcctctatatcaagttntagataacaaact

SEQ ID NO: 25018 - DNA, 442 bp, Oryza sativa
  unsure (1)..(442): unsure at all n locations
tgcaagctttccctcatgagtcatgcccatctcctgaatctcgctgtaggtgagttctagtatgatcacaagtttgtatgtagcattttgtcttcctggtacctaccattctcataccatttatttttatctgtactctctttttttcacacaatctaattaactagctgttaatttacaaaggaagtttatagaatcagtcaaagctactcatatgtcaaccgcacttctctatcttacatgcatgcacatactatcttggtgtgatacctatggccaaatatttggacgtgtgatacctgtagccacaagagcgagtgagaaaagggccatcaaagttatgtgtctgtttgatttcaaacctagattcaactaggattatagnngttgacactctaatttttttctcttggtcagttatatatttgtacccttctttcag

SEQ ID NO: 25019 - DNA, 313 bp, Oryza sativa
ggtgcagagatcgctgccaagtggctaccacatttgcagaacagacatttggaaggagatattttgtctgccccaatgtatacaacaatttcgttgtatgtctaaccgtttccaaaatctgctatgaattgcacaaaatttctacccaaactgaataacattactcatttttcatggcaatccaatgatgtgtggatttactctgtggatcgacaatgtcactccatcatatcatggccataagattgcagagtctgaaacactatgtgagtatcatcgattgaaggaccacgagaatgctatgcatattgac

SEQ ID NO: 25020 - DNA, 439 bp, Oryza sativa
  unsure (1)..(439): unsure at all n locations
agctnttaaaatatgcaaaaccaccatccataaccatcttatatggtaatatgactgattntacaaagtttagagggttaaatgtccggttttaaaattcagggtgctagatggatttcatccaaagttagggggggggggcatttggactttttccatttcgacaatattttctttttcagctccaaacatttacatcgcattgcaacacacgagtatttttgctagttntaaaataaaatgtgaaaatatatgtgccattatgtgagaaaatataaaaatactagccacacaaatctgcatgggtcacatgctaattaactaaagacaattagtctcattttatccaatgtattacggtgagtgatattttatcgaaaccatacaaatgaagtaacatattgtctattttctagctcaaaacgctactccctccatt

SEQ ID NO: 25021 - DNA, 440 bp, Oryza sativa
  unsure (1)..(440): unsure at all n locations
tactcacacgttattaccacctcgttgtggtgaacatttaattttatctttagttttatcttcaggagattcaaacaccacctatatcttactcaaccgggaggatagagagagaactaagtcaaacaatccaagcgccagagtgcaacagaaacaatggggactgatncaaatttgtcagactgccgggcagctcaacaaggagtcaaggacacattcgaagtgaggtgagaactatcaagaactatcgtgcgataaaagcatcagaaacttacacaaataatcgatatccatacaaactttatgcaaactacatagacaaacatttgaagcaaactgtatatttgtgtgaagtgtaaaatccaagtactggaatagtatatcacatcacataatanaatactgttgagttatgatccaaattcatttgcacttaataa

SEQ ID NO: 25022 - DNA, 394 bp, Oryza sativa
gaaagcaaagctttctgagatccttataatattttctttaatatgacttagtaaacgattaggtcaaagtttttaatattattattcactagtgtaaacatacataataatcatttttttcaatgtttctcttaagaatactgtcctaacataaagaatgataatctttcatataaataccaataatgataaattctatatgaaaaattgtagttctcaatgagctatctttgtagtcgaactggtttcatgttagatcgtttacggccccaaatgtttgttacaagctctcagatgtattttagaaaattcttgagtttgagttcttcaaacgagcttggattgagatatcctttgtatgatagaagaattacaagtttggagtagatgactt

SEQ ID NO: 25023 - DNA, 372 bp, Oryza sativa
  unsure (1)..(372): unsure at all n locations
ctatcaccacgtgtcagtgggatgtctttcagcatgttccatagaggagcatctggcgccaaggatgtcggcgctgcccgtattggttttgcaggggtgtcatggatcccaactaatgtactctttaccatatacgccttgctgccatcatgtggcacgggtgcctgctgatgtgggtatggtgccgccttggtctggtgactactgagcacttcttcaatccangcttgagagcaaccatagcgctctcagcacatgatccagatggctgggcaaatggagcactattagcagacatcactgcacaaggcgctgcatcactactagctgccacctcatgacaggcatcttcattctccaaaacagacttgt

SEQ ID NO: 25024 - DNA, 385 bp, Oryza sativa
  unsure (1)..(385): unsure at all n locations
ttttttctttctagttaacatgccgatcccaccctgattttcggtagcacatttttaaagctgtaaatgatgtgttttgtgtgagaactttttatataaaaagttgctctaaaaatatgaaataaatccatttcttaactttaaaataaataaaaccttggtaagcatgtgcttaatagctntctcgttttatacgctcatatttactcaattagattcaaacgcttgaatggagagaaagtatgttgatcggatgataattataaaatcttggggttttaaaagcgctgaatcgtattgggtggggaagagtctagcaagctagcaactgtgcttgtgggaatatatactgaaacaaacactctatatgaaacttgattagtat

SEQ ID NO: 25025 - DNA, 456 bp, Oryza sativa
  unsure (1)..(456): unsure at all n locations
ccttttgtgatgatgacaacactgctggcccgcagcaaccgttatcctgaaatagccttgtttgtatccaacaaggtcagtatgttactatgagtgtctcacctcattgtaaatgttcaggataacgttcataaaattgttngtgaacaatgctataagcttgatggtcaacatacttaacaaatgactgatgcacaaagttgaaaatgtggtggaaatattcttagcaatttgcgttgcaagatacacaaaaagaaaagaggtggtgttattgttcgcaatttcatttaaaaatctgtgtacgtcttcaagagatagtctttggctctttgcattgcaatcctatatactttctttctgctacttactcttgttcaatctgttcacacctgaactctgtctgatggaagaactcttagatctgactntgattattagcctgaactaactaatcat

SEQ ID NO: 25026 - DNA, 447 bp, Oryza sativa
agcttagcgttgcttttcactctcatgatataagtattggtattcaacagactaagcgcaaccagatgagtaatttggaagctaagcttgatgacctgcggagagagctctctttcagtaatggaggcgtattcccacatgctgttctttctgcccagcaaatttccctcctgaaccgccaaaaaccaaccactgttgctgaggagaggtttggatcaaatattctcttatcctacttagtgctatcctaaagtgatatatggaccgtctctaatttatatgtacattctatctgcggcctgcagcttgaaaagcttataggaaaggttaagacaggtaagtacgggagcgcgatcattgagctcatgctgttacatattgattcagaagtagccggaggaaaggcctgtgcatctaagacgcaaaagacagataacgaggatgtta

SEQ ID NO: 25027 - DNA, 430 bp, Oryza sativa
actgagctgcaactttaactattatgaggtgctcattttttgtatttttctaaccaactcaccttaaatcacaatctataattgacaccgttacggctaattgaactttcaatgagatatgttgacacagtttttcaaaagtgtccataggggtagggtatgtgtgtatgggttcatagaactacctctgtcccattataagtgcagtcgtgatcttacgtgatccgtcatcttatttaaattttttaaaaaagtttataaacataagtcacgcataaagtactattcatgttttatcatctaataacgatcaaaatactaatcgataaaattttcaaataagataaatgattaaagttgggtacaaaactcatgactggtgactgcacttataatatgacagatggagcatgtgctatgagcatatatg

SEQ ID NO: 25028 - DNA, 342 bp, Oryza sativa
  unsure (1)..(342): unsure at all n locations
tggagctctngtgctgacgcggtaccagagctacgatgagtttcctttcttgcgccgcggagcctagtgctgtgaccaggtccagcgagcactaccatgctacttaccacgcggtactcctgctgtgcttcataaggtacgctgtgtcgtccaccttgtagcttgttcagcttgtgcgctctagctcacgagccacacgagctagcttgagctttcaatacatccgagctaagccatgacttnagctctgtatgataacaagccaagccagcttcgtatcccaatcagccagaccgagctgagccgggccaatccagctgataatccacacctacctagata

SEQ ID NO: 25029 - DNA, 406 bp, Oryza sativa
  unsure (1)..(406): unsure at all n locations
agcttgacaacacgcttggattccaagatgagatttgtttttggtgcacaganccgtaatgtgtttgatggtggattcctattatgaagtcaaatgctaatactctaccacgaaattcccaatacaattaaccactcgaaatggagcatattataattctctaagttgaatttgggggttttgaaggttatacaaatgagacgtttcaaggaaagtctatacatactaaatttttacaaaattttacaaactcaatgtggcaagatataagaaatctagattttttttacttgctctagtaaataaacggagagaaattgtagtaaagtctgaagaaatttatacattacagtgctggttcaaatccttaatcacacttaaaccatattatcgatgttaccacaaa

SEQ ID NO: 25030 - DNA, 456 bp, Oryza sativa
  unsure (1)..(456): unsure at all n locations
catgcaagcttgaatcaataatcaaaaatcataatnncatacgaactaatanttttcatcnnaacaagcacataggttgaagaataaacactaaacacatatacctattgcatttatcactctttctcaaataacctttagcacaaaacaaccaagagaattttttaaccttttctttttcttgagactttttgctcatatttggtttcttttattccgggtacgtccctatcgtcaagactatttccagagattcggcacccattattttgctcacatcgaatacgttcttgtcgtcaagactgtttccaaggattncggattcatntttttttatattttttattctcctttcacaatgagcaattaaagctatttaaggaataacaaatcaataaagcatatatatagagcatttaaaaatcaaaccatatgctatgatcaacattgcatatt

SEQ ID NO: 25031 - DNA, 458 bp, Oryza sativa
  unsure (1)..(458): unsure at all n locations
tatactaagctgctatgcaggaaacatatatgtatatatacacacatggggttgtggatagaagatgttgtatcacgcgtgcatgtatcctggtatcatgctatntaacacaagcatgcttctggtacatgaaacaacgtattgtgtatgcttatgattacactcctttaaaatgacggcacaagttagatcatttgcttgctgaactaaaatggtttaaccctttcattttgtcaaaagtgtgaacatcatgtctgtttccatacaatagcagtcattagtcatctaatcaatagtagagaatatagtatcattgtcgaatcctgacatccataatacatgtaattaacttattaacatgattttaggtcatatcgntatcgaatgcagngcctgtaactcataataatttatttctgctttgaccaaaataccaatacggattctcgtgtcaaatc

SEQ ID NO: 25032 - DNA, 445 bp, Oryza sativa
  unsure (1)..(445): unsure at all n locations
agctntttaccaagttcttaccaaagcttgttgtttggtgacgtacaccaactcggccaagcatcccaatggagtttggatgtatcgataccttggcaaacacttgctatacggctgcaatcaaatatgtggagctctgggtaggcttaaaatgtagcaaaggaatagcaaatgctcaaatcagataatacaaaattgaataatcattcaaagtcagtaccgtactggtcctatgctagaacgtactatagacgcgatcctagacacagacgataccacaagatagctccagaaacaactcaagcacactctgatatactaaagcaaactcaaatataagagctcattgttctcttttccatctttcttctttcttttatatcttttatttgtcttttctattatggtgcggcttttcatttctttttttatgcaccttcctgct

SEQ ID NO: 25033 - DNA, 307 bp, Oryza sativa
tctatacctatctcaacaaacatcgctggtgtattgcggactggtccatggtgagtagctgtcaacgtaatcttcaccaacaataagaattagaattttaaaagcagaaagttcagaataaaagaagaatcatcaacagaaaaggtacctcaaactctggaacaagaccttggtctaccgcaatcttttgcatcatacggagccatggaccaattctaggattgggcagagctgcccatcctggtctccctccttgaggtggcgtctcatcttctcttagatgtggcacaccttaaggcgcgacaca

SEQ ID NO: 25034 - DNA, 445 bp, Oryza sativa
  unsure (1)..(445): unsure at all n locations
agctttantactttnttcaagaataactggaaccttattcttagaagacggacaaactatactttggtttattctcacatcctaattcctaaaccaaactacttcgaatctttccaattcttccgcgcaatccccctcatcccaagcaatccaagaaacctaaaacgagtcaaaccaaaatcccatcgtttcaccagccacctagtattaaatcggatgtagcccagctcaaacctgccacttggcggtgccgagcgccgtgtgcagctcgcggcggagatccccagcggctcgcccccatccaccaccaccacgttccgccgccgtcttcaccgcgccgccacctacttctttcctctcctgcaaccacctcctgtacaccgactccatcctacacgagcaaaatacccaaaccctcaaaactccaaaaagaacaccagaatca

SEQ ID NO: 25035 - DNA, 437 bp, Oryza sativa
  unsure (1)..(437): unsure at all n locations
agcttgtctgaatcagtacttcagtatgtttgtgtgcttgaggcattgcaaaattttgtctagttattggttttgatgcatttgcactaaattccttccattagtgttcattattgctgntgtttttttattacaaatatatgtcattatcttttcctaccaaatcattgatgagatgttgcattacgatattagtgctaccacanactagaggagtacggctcaaaattttgaaagacaaaattgctaatgtaaacataaaacataccgtggctacttaccaagggcaactagagagggtttcaggctgcaggtgcaccgggtgaggcttgccgacatggccgcatgggctgtggccatagcccatagagattgtccacgacttgcggcgtgacgcgattggcacggagatgcgttgttgggcagatagcgatgga

SEQ ID NO: 25036 - DNA, 480 bp, Oryza sativa
  unsure (1)..(480): unsure at all n locations
gacagcttggtggagctgtgcttctaacttatttatctgttctgttgctcttctcaacttggtatgctaaagttatatagagcataggcatcagtagtaagaaatattatgtaaacaagtacaatatgttcctgtacaaaacgatgatatatggtgatatatctgttcaggacttgagtcaatntaccttttatccatgatataactagaacatttgcaccatgaaagatgactacagtaaagataatattgccatatactgaacatggaagggcgcaagcttatgttcaaagctcaggatatgggacaaatgaaatggaaggcagaaattgcttgatctccaatgtgtttaacagaaaccacagaggataaagcaccataacattctagtttttccagggacaaagttcaatattataaanatacataattccagaatgtgactctgtcatgctgaatagtgaacactgatgatataca

SEQ ID NO: 25037 - DNA, 386 bp, Oryza sativa
  unsure (1)..(386): unsure at all n locations
agcttgcacaccatcaacacaagcagtttatcatttcttttttaatatatataatattactctctccgtttgaagaaatattttcggccacattccccaaataaatatggcaacagaacctaaggaatttaaattttaaatcttgatcactggagtgactaaaaaanttttgccccggccactaccctagttgttcaatagaatatagctaattaaacacattttggttaattggttctacacctacatgtggttgctggcagcgtgggtgggtacgacacaagtaaccgggaccctgtgacacatgcagctaggacacaagtatctgggacaagcagcactcgcgtccgattgcgtatggtgataggcgacatactgtaaaggtc

SEQ ID NO: 25038 - DNA, 479 bp, Oryza sativa
  unsure (1)..(479): unsure at all n locations
tacttatatatatcacctcacttacactgttattctcgctgctcttataatagtcaacccanaaatgatatgggtggatggacaatgccttacaagttgactacactcttgcttatatagtactactaagcagatcctctcaataaaaaaacatagaccacatcataattgcactaggatgtctaagacacccactcaaaggatctgacatntccatcggtccaacttacctctaatagtacatatgcatatagacaaatgtccaaaaacatgttccctcttaacgcaattcccatcggtccaacttacctctatagttagatatgcatatagacaaatgtccaaaaacatgttccctcttaacgcacgcccgtacgtcaagtgatcgatacaaactttcatatacatccaaaagaatattgataaacatagatttataagagtataaatatatctattttatataataacctatacat

SEQ ID NO: 25039 - DNA, 402 bp, Oryza sativa
agcttatggatgtgcagtgcgtctccggctgcattgttcccctaagtccggtcatatcaaggctgggagagaaggcagtacccctatttaagctcctcatacgctccgggccgtttacctggacggaggaggctgagcgggccctcactcagatgaaggcgtacctcagttctcccccagtcctggtcgccccggagccagatgagccgctgctactctacctggcggcaaccccgcatgtggtcactgcggcgttggtcgtggagcgcgacgaagacaaacctcactccgcgcatgcctaccctgtgtcgactcgacccgggagagagcaaggaggagaggccccctagccgaacggtggcccaaggcctccgactgccggagttggcctccgtctgttgt

SEQ ID NO: 25040 - DNA, 502 bp, Oryza sativa
  unsure (1)..(502): unsure at all n locations
cttcgtctacgtggcatacgaggaacagttnttatcggcgatgcactgtgaacgccctgaagatgcctcacttcaggcggagcctctccgcttggatgatagaccgattatttgagcctctccacttggatgatagaccgactatttaagcttggaaggagttgctttcctcctttctctccgttaatttgtaatctgtaattngaacaatttgctatgtatctctttcctctaattagctctccccctgttgatatttcaaaaaacaacactcgctggaatagtggaagcagctagcaccccaaagatcattcaaatcacagatggacaatagacataggtaacggcgcttaattgattactctgtgcattagcatttgtttacctcagcttcccccaacccaagggccaaggccncaatcccaagcgtcgaccgacaacaaacggccccattgtcctgtagcattnntcagtaaaaaaaacaaccctattgcttcactta

SEQ ID NO: 25041 - DNA, 435 bp, Oryza sativa
agcttcagaaatagccattactctgcttcagtagtttataaggcaaacgtggcttgcaaacttgccttccaactaatagcacatcctccaatagtgaaaacataacctgtgaagcgatttctcctatccaaatctccagcaaaatctgaatccacataaccaacaagtccatctctagatctcccaaactgcaaacaagtactagatgtaccacgtaggtatctgaaaatccattgaacagctttccaatgctctttgccaggattagccatgtatctactgacaacacttaatgcatgtgataagtcaggacgagaacataccatggcatacataagtgaaccaactgaacttgaataaggaactctaaacatggactcaatatcataatctgactgtggacataaatctgaagataatctgaaatgtgcagct

SEQ ID NO: 25042 - DNA, 172 bp, Oryza sativa
gattgacaagcacagcaatgatatgcagtacaccggcagaaatatgagagataactcccatggggttgagatgatgaaaaagctaagtctgagtgcaagtttgagcccagttgaactgctaacatactctccacaatcatacttggtgtgatggctcacccgtcttatatag

SEQ ID NO: 25043 - DNA, 446 bp, Oryza sativa
cagcttatgctgttcgggttgtgttgcactcaatgtaagttttcatctgcaatggatcacttttagctaacgtctaaatgctcaattgctacggtccatgagctagaaaagaaaaacaatagtgatagatactgctatctatctttactttacagccaaattcagattgcaaaacatagaaatgagaaataacttgccttgccatcatattcttttcttgaaagaacttctggcgctatgtatgctggagtaccaactgtagacttcggcttcgaatgcagcaaagcagactgaaaatcaaagaagccaagttgttcagtactccagtttgattctaccaagaaggcaagaacaattcaatctatttctagtaaagtactctgagatgtagaacagaactagtagcatccatgttagcacctttgagtaaccaaagtcacaaatct

SEQ ID NO: 25044 - DNA, 408 bp, Oryza sativa
  unsure (1)..(408): unsure at all n locations
ttagctgggattaatttctgtcacacaatgggangttcattagctatgagcaacacctcagagaggaatcgcgtagattatgcaagaagtgtgtccatggattctgcatgtcattctttatgtgctatgtctgcctcaatcctcagtatgagaagcagcatgcacggttcaaggggatccatcaccctctcccgtgagatgggggactcgatactgagctcgatgaggcattcgcttcaatcagcagaccagttgctatgtgatgtagatggctcagttcttgctcacgtcattgacagtggtgaccgacggctagcatttgaaaacgacgttgactaatatgaatagaataatgtggaggatcatcatgctgttcctctcccacatgatacatcaatgcggattcat

SEQ ID NO: 25045 - DNA, 446 bp, Oryza sativa
  unsure (1)..(446): unsure at all n locations
agcttcaccttggtgctaccatttttctacacctatttatgttactgtcgngcatcatcttcgtatggcaccttgccattcatatgnatttgatgctaggcaacaccttaactggggttatggttccaaatcattacgaactgactcagtatgaaatgtcaccttcaactgtcaatgaattccatgtatatgtcatgtatgagctccataatcccgtatctattgcgctaaagggagcagaaacttaaactggtgtaacttcttttcccagcaaacgaggctgttggagctgctgaaactcggcatggagaatggtcagtaacaagattgcgtcctgctgcacatggcactgctagcattgagagctttgagctgggtattggaccaagggggggacttggagatcatggtgattccgtttctcgacagcttgttcttacaaacac

SEQ ID NO: 25046 - DNA, 476 bp, Oryza sativa
  unsure (1)..(476): unsure at all n locations
tactcaagctgaattatgtatacatataacatacttatgtgaagttaaatatatatttntatagnttaatatttctgtatttgttactggcttccgatctgtaccgacatgtttccgtttgtattgttcctcttccggttttccgatatttccgatatcgttttcgtttccgactatatcatttccgatatcgtttctaagaaaaaatatggttacggaaatggttgaggctgttttccgatcgtttccgaccgctttcatccctacatttatatacaccagatagcaagcctgatttaaaacaagttgcagagtcccaagaggcacaccgggtaacgaagagcctcaataagtgagaatatagatggacggcaaatcataaatgcaaacatattcagatctcgaggggtttatagtagacgaacagactgcaattgaattgcagtagtacgaaaaacttaaagaacaggaaatga

SEQ ID NO: 25047 - DNA, 447 bp, Oryza sativa
  unsure (1)..(447): unsure at all n locations
agcttgcttctcagcgaattgtcatccatgcattccgaagcattcctatagcacgcgttgcaacagctccaactccaacgagtgcactaccacaaggtgtcaatgcaccatttcagtcccatccacctgctgacgagacagaggccagtatctgcgttgtacctttggatgttccaatacagcagctgataaatcaagtacaagatgaagaacccgagtgtaagaaagttattggttgttacaactgtagtgaagaagggcattactcgagggactgtcctcaaccaaggcanaatcggcccccacattttcgccaatttacaggaagcaaacatgccaatcgccaagtggtcactggagcanatgcagtacctgttaagcctagtgctattcaatagcaaccataatactcttatatcggtgttcaagtacttttcgtttatatct

SEQ ID NO: 25048 - DNA, 322 bp, Oryza sativa
gagtggaccgagtgccaagaagacttgccttatgataagatggaatattggacaatgcattctgatgggtcgaagaggctcacaggcactggagctagggtcgtcttgatttccccgactggagaaagattgagctacgtattgtggatacatttttctgcatcccataacatggcggaatacgaggcgctactccatggattaaagaatgcaatctctttatgcattcgccgattaatcgtccgtggagactctcagttggttgttatcaagtcatgaaagagtggtcatgtctagatgataatatgaccgcttaccgaca

SEQ ID NO: 25049 - DNA, 401 bp, Oryza sativa
  unsure (1)..(401): unsure at all n locations
agctngaacctttgctcgtcccgagtgaaggacgatatgatacataaacttggttgttgatcaggagttgctactatgctgcatatctcaaagatacatgtgtaaggtatatgtactctatctcagattaaataatctttggcacggtggcttacccttacccctgattcccacgagaccactgcttctccttgccttgggcggttgaaagacagaacaacaattagagcaccaatcacccaatttttattcaactnttatttcggaaggtttcaaatgattttcaaaagaaagccaagttgctcaaatgattcactcagtctctccaagtgtatcaatttgaatttctcaccaaatagtgcctttttattcctactctaaggtttgatatgtagagctcg

SEQ ID NO: 25050 - DNA, 440 bp, Oryza sativa
  unsure (1)..(440): unsure at all n locations
tactcagctttcntgtattgggttttagtgtacttttctggttgggatttcaatttntactccgattgagttgaccttaggagtgcaatgtataaattgtgcttgatccatanaatatttttgcttttattctgtttttatagagaaccatccaaattgtcaggttagtatagtttatatgaaatcgcttaattctaaaagaattatatggagtgcattgcataaaaacaattacatagattcttcttcgtttgttaatatatactgtcaaaacgtgccttgcacgtgcacgataatgatggcgaatttcaaatcctcctgcctgacgcangagacgtagtcgtcattcgacatttaaagagtgaggaactttctgtcctcatttgcactanaagatgggaaccctgccataaacagtaggcataccgtcttccgcagac

SEQ ID NO: 25051 - DNA, 437 bp, Oryza sativa
agcttacctgccgggaccaactagctagtaaaagatcaaatccttaagtatattaaaaactaattgagttctgggaaaagatcatgatatcgtattcaatcgtctagaaagaatttaaatttcgttttatcatgttccaacagaacgagcagaattattaaaattgtcccatctgagaaaatttaaattagctacaaagaagcgacaagggttccagcggaaactcaccctattttcagggatatatcacaaccatcatcattatcctgcgagctttccgaatttaatgcaggcatcacagattcagatgattgtccatcttcagtaagaacattttcagtatcaagaaccgccaagccagcagtaggcacctgatgcatctgcataccagcaaatgcacagaatataaatgcatattccgccgtgcctgatatgga

SEQ ID NO: 25052 - DNA, 379 bp, Oryza sativa
  unsure (1)..(379): unsure at all n locations
tccctcatcaaggtcgagatgcttcttggttgccataggtgtcttgatgggcttcgcattctccaagccaaacctcttcagtaaatccttgatgtactnntggttggctcacaaacgtcccatccttgagttggttgatttgaagtccaaggaagaagctcaactctccaatcatggacatctcaaaatccctagacatcatatcaccaaattccttgcaaaatacctcattagtagaaccgaatatgatgtcatcaacataaatttgacacacaaagaaatcatcaccaatgattnttgtgagaagggtggtgtcaacttttccaattttgaaatcctttgacaaaagaaaatctctcaatctttcatatcaagccct

SEQ ID NO: 25053 - DNA, 439 bp, Oryza sativa
agcttgcactagcatttggttgataatacatttattgagaacctatacttgtgatgaaaaatctaaggacacgtggagactgtcataatgccatcataatcatctctgccataactttcagacagattactgttagagatgcacatcggttccattgtttcagcgatggaagctgttcctgtggagattattggtgagacagaaaagttgactcaaattcataagaaagatgagattctgttttgtttcaatgattacatcggatgaccatcatagttcttcaccacactagactggaatatagtcaatttggtcaaagtagcagcacgtatgtcaaactttcagcttccctaaaaacttgagttgtcccaattgctactaagatcctcagtagaaaagccattgagctatgatattatctgaagctaatgactcaact

SEQ ID NO: 25054 - DNA, 453 bp, Oryza sativa
  unsure (1)..(453): unsure at all n locations
atctctctctcaagntagtatagtgctctagtgctaatgttattgaataagatagctctcttagtcctcgagtctttaggagaattaggttatggcactagtagctcttctctctattcttgtaaggctacatgaattaatagaatattcttctttatatatcttcggtaatttattttatccgagtatcgacttgactttatatttgactcaaagaagtgtgcactagcttgcacagaggtgcaccggcatgggttaatgctcatgcaatgattgtctatttattcccagggtataagcagtattaataatgaggcatgggcttagatattagaaggaaaagtcccttcacttcttaaaggaccccatctatcgtaccctcatataaactgatggaaactccgactatcaacaggcattactccttacgttgaggcggttctactgcctacg

SEQ ID NO: 25055 - DNA, 299 bp, Oryza sativa
  unsure (1)..(299): unsure at all n locations
agctttggggaaagtcaaggaaaagcatatcatattatattgctatggacacccacatgagtacacctagcgtctggaataaagaaattgcatcagccaacaagtgggccaagaagaacacgtcctacttgaaagtgtgatgcctaatagtgtttagacatattggttatatctttcgaaccctcgcttgctacagttttttcccctctcccgacccctcttcctcctcgattccggcggccttcgtcccggcggagggagggagagggngttcttctttccttacgaattaatacagt

SEQ ID NO: 25056 - DNA, 377 bp, Oryza sativa
tctcgggtagcccaagaagaagacgtggtcaccggttgcgcttatatcttctcccacactgacagcgactgcgggtcgccggcgtctgcgccgttcacaactgcatctagctgattcgagagcgataagggcaaccaccacatctaacgcgtgcacggacaccgagaggcggtcgcatgcgcagctagacgtcgtctgtgcacccgcgtcttgataacgctggccatcaactaactcttccgcgtaatctccatgaggtagctgcgccagcgcaccttgccgggctcatcatgcagcggcagacacgtggtttgatccccatctgctggaccttcgatctcgttgacgaaacatctcgccaagttcacgcacacggt

SEQ ID NO: 25057 - DNA, 437 bp, Oryza sativa
agcttcaagaaaacacctgcttcggtccatatatttgtataattgactagatttgaataaactttgaccaaatccaaaaaaaattggaaaaaaaccaaaatttttgaccggcatttgcttgccaaaaaggggcgaaattaccaaaccgaaaatataaatcatcctcagtatataatgcttacatccctgtcccactctcatgcatgaactcgactgaccttggacgctgcaccattatctgtttataaagtatcgcagtggacatgactacattgcgtatgtttacgaccaccttgctgcgcgtatgctaatccatggagatggctcaattttaagagcgccggagacagcatcggcgccgtctgccggtgcagagatagtatgatacttgctcacctttctcgagaacgctggttcgattagtaagtacagatgaa

SEQ ID NO: 25058 - DNA, 300 bp, Oryza sativa
cataacatctaagttcgaatcaacacgttccgtaataacaacaattagggaattacatgctactaagtaatgccatatccatgtaagaatgaacttagtcacgggcatgaagcaactaaggcactatactaaacaaaaatttcagcaccaggaggtttatcaaatctagcaactataaacacacattcaatctttctacgtatgagctatgctaaataagattccatatacgtaagtctgctttcaggtagagaataaccagaagcttcaaatgtctaatagatcatcttgcagatgttg

SEQ ID NO: 25059 - DNA, 439 bp, Oryza sativa
agcttgtcgagcatccaatgctagggctcattgtgtctcttcagatgcttcttcaaaccccttgcctggtattacggtaagggaaaaggaaatgatcagcacaaataacaacataactgcagagtagcacgacatgaatacaatgacacaatgaaatcacaaggttatgaacagccctaacatcgctcatggcaatggtgcggcatggtttctaagtaatctttgttaattcttaacaaacaaggaatctagacaccagaacctataatccttgaagccaggcagatatacaagttgaaccttggcacgtaacagaaatgtagaggaacaataacgcaacaaacagcacgagctaaaccctcaaactagcattgacagtacaattatacaaagcatacttgaaataacgagctgtctaatattccacaaatgggcgaca

SEQ ID NO: 25060 - DNA, 437 bp, Oryza sativa
tgtaatcagctgtctctctccaaaaaccaatatgaatcctgcatcttcagagtcatctcatcttgtccatgttgatctcaacttgtgcatgcagatttcacttgggtagatgctgcacgaaggatcagcagcttatgacaatccattcacagaagatagcaatatgacaactatctgtatcttgcaatactccatgggaatgaccccattcatgttactggactcatttctattgtccatattgctactagctatcgttaacacgataaacataacgtattaatcccatcagggcgcaatcagaacccaggactgagtatatagttattataaatgaagacataatgtccaacaacgaatgaaacacgatgtacatgtaaatgtgttcgtgacgagcacccctaccgagcgcactgatagtgagcgggttatactgg

SEQ ID NO: 25061 - DNA, 446 bp, Oryza sativa
  unsure (1)..(446): unsure at all n locations
agcttggtggttggatgcctggatccagggtggaccatctaggagaaaggggttgccccatccgcaccaccctagttcgagaagaatttggaggtgtcagcggagctgttggcggccggcagtcggatgacgtcggagctggtcagcgctcagctgcttcctggtggcgccgagcaggccttgtccgtgcagcttggtgacctcagccacctcgcctactcccatgccaaccaagccctcttcagcccaatggcccaacatactaaatcatgctttcactctgaataaagctntaattgtggctgaaattactcgagctgtgctgttctttggcatcgattntgcatgatcttaccaagagcagaacatagtagctttaattgctattgctttnttntttcgaacgttgctttgctgtattcttcctgagacgagtcatntactct

SEQ ID NO: 25062 - DNA, 450 bp, Oryza sativa
  unsure (1)..(450): unsure at all n locations
catataccacctatttcaattgtcgcaacaagttctgtgcttattgntacagcttccaatgataagttgggtacaacttgtaatctatttttcagatgaacatacactgtattttctatgtagaggaaggggcatctggttgtctgtctgggagtgctgcttgaaatgctggatgtttcatatactcctcatggagcctcgcgagagtgggataatttaactgccaagaaaacatatttcattagaattaacanaatagataaaggcatatgcatggatagagtaagaagcacaagaacagtaccatgttaatttgaaaacgagtcactgctgcataaatctgaggtgcgaggaatacgtctgcctgcatgtgtaacggaaatgcaacagttactgaagccaatacagtgctttgtaatatttggagtgctacaaacatgattacataaa

SEQ ID NO: 25063 - DNA, 397 bp, Oryza sativa
  unsure (1)..(397): unsure at all n locations
tttatcggcagaacattaatggaacagagccccatctagctaactctttaaagattctacgcctgcatcaccaggaacacaagcactaatgtgtgatgaaatggatactacattcggaaatgaggaatatataagtccatctgtggtgccttcacgtgatcaggatatttctgagctaaatgctgatcaagaaagaatagtattgacagggctgcgagattatcttcgtgtgctnatcacacgtggaaatataaacggtgagtgcaacttgcttacactgttattgtgaatttgtgatcctaaatagcacatcgtgttcggtttgctaanatgttaatttcacacatactntgccatggcatataagatcaaatattatgataaacttcaagactat

SEQ ID NO: 25064 - DNA, 443 bp, Oryza sativa
  unsure (1)..(443): unsure at all n locations
atgaaacttctgtgttctgactccctagctatccagcagaccagcacacaattntcagctacatttctcttggacaactcacaagatctgaacgaagacaaaatgatagtatgatactcatgaacaatgaaggttagctcatgattactgctatgacaatccttggtcttatgctcatttntttatagaatactttttttatagttgtcgagagttcagtcatactaccactgtagtggtggcttagattccaagagggaattcaagctgtgaagcctcaccaggatgagactgtgctactccaacaatcacagcagctacgggagatggtgaagtagatgagatatctctatatttacctactcgctagtgtcatataataaagcaacaactttgtactggcatatcccaaanattagtaattatgtagcatgtatctaaat

SEQ ID NO: 25065 - DNA, 424 bp, Oryza sativa
tgctttccattcggaagatgacacccagtaagtattatcgtcaccatctgaagtaaatattattgaacttctctatagtgtggttcaatgcatataatctgcttctaacatgctatcgttagaaaaactatggttattgaaaaatattatcacaatgagttaaaaggtttgttagactttgtggaattcatatccttgtggaaatgttggaatttagatgtgcttaatcgaagcatatttaatcaatatgtacaatgggtagagatattatagattatcaatcatacttcttgttgatgagataacataggacaacacacctgtagcttatatcagtttttttgcagtaccttgggccttcgccaccagtccagaattaatatgaaccaatatggcatagttgagtcttatctcattacgttgt

SEQ ID NO: 25066 - DNA, 451 bp, Oryza sativa
  unsure (1)..(451): unsure at all n locations
tactcactttagtggtggggatcggcgatggcctgggagatttttgctacctggcagcagccgtcgggactcgggaccacggtgagagaacgtggggagcagaatgggggatcgatgtgaaggcaacagcgagttggatgcgcggatggngacgccggagatcgtggtatgggagggaggatgagatttttgccgtaaaataagtgcggatatgggaacgaagtgctcgtctctttcggtcgagggggtggttgttggtgttctgttcggcgtcggcggtgcgaatgtgtgctgatttgcttgccgcacatgaggggatgagatcatgagattacttcangcagactccagcagcagccgccgtcgacggtaaaactgtggctcgcggctcgccagtgttgagataagaactatataagaagttttggatatagctagcatagcaacgctc

SEQ ID NO: 25067 - DNA, 187 bp, Oryza sativa
  unsure (1)..(187): unsure at all n locations
cgatgacatgagtttcagcctgggcagtatggatagtgattctgggatccagtatgttgttgccatcaatggtatggatgtgggaactacaaagccttcaagtgggcatggtttangaaacacgtccatcaatgagttggatcagttcattaatctcaacaacgatagtaaccaaccatattcaagt

SEQ ID NO: 25068 - DNA, 454 bp, Oryza sativa
cttaataccactatacaggtaattggaatgagttaaaacattgtttttgtgcaaaaggaggataggatgaattaccaagagatatcctatgtgcttgctaatccaaaacaatctttatctgccaacatttatctctgagactgactatatatttggttcacaatgtcagtacaaaagcacataacatctccaacagcctccatataccactctctaagttaatattttggtgattttgaagcaaaatcatactccagcagactagccaaccggatggctgtggctaaactcttcttcgcgctggccaaatttggccagctaatatagcctagccagattgtgcgtcccacgcctttcccctataccatcccatcccgtactctctctctcttggcgccagatcgagcgcgccctctgacatgccgttcgtacactctaccacccttcgccggtg

SEQ ID NO: 25069 - DNA, 107 bp, Oryza sativa
aagcactgagctgagcttacgaacagaaaactgacaaattatttttttctgctcaccaaggaagaccgggagccataatcctttcttaccctttttaatcgaatccc

SEQ ID NO: 25070 - DNA, 515 bp, Oryza sativa
  unsure (1)..(515): unsure at all n locations
tgtcgagaatnggttgcacctcagcttattgtggctgtcttgttttcagtggtaatcccaggtagatgatagggaataattgaatattgcattgcaactcattatccaccacctgaagttgttcctgactgcattgaattggagtgattgcacttttattgtagttggtcattaatccactggctgcaccacaaatctgtagaattgccttgactaccttggcttcttgtagacttggtctgaaatataatactgcatcatcagcatatattgatatactttgaactgggcgtcttggtgctggttcaaatatcatgccactagctttcgcttgagctacaactgcatgcagtgcatccattgccagaacgaataacagtggcgataaagggtctacctgccgcaatcctctatccggcttaataaggtttgactcatttccagttataaggattgctgtttcaggcgtgaagaacatagataccaaccataatctccacttggcaccgaaacct

SEQ ID NO: 25071 - DNA, 436 bp, Oryza sativa
  unsure (1)..(436): unsure at all n locations
agctttggatgactatctttctagggttaataaaattttgagtgatcttagatctgttgattcttcttatgatgctaattatccacaatttaagatttctcgtcactttttgaatggtctcgacatgtctatttgggagatgaaagttacatctattcaagagtctgttaacatgtctactttgactttggattcactttatactaaactgaaaacacatgagataaatgttctttctcgcaaaattgattctaaatcgagtgctttggtttcttcttcttcctctttagatgttgatgcctcttcatctaagtcgtcttttcttactggttagtgccacatccgatgatcaactcgaacaaatcgaggaggaggatntggctttggttgttaacagaattgctcgagctatgaataatgccacgaacaggaaaag

SEQ ID NO: 25072 - DNA, 460 bp, Oryza sativa
  unsure (1)..(460): unsure at all n locations
tactcagcttgtgcctatgagtttatgcgatttagcacaggtttttttccatggtataagggacgatcactcactcgcatcgagcttatgcttcgatgtaaaccatcatcgataatcttttgccatacatcattctatattatccgtttcaggttataagacgntttgactttagtcaaagtcaaactggtttaagtctgactaagtttatagaataaaaggaataatattttcaacccaagaccaatttattatgaaaatatatntaattatcgatttgataaaactaatttagtattataaatattactatatttgtctataaactnagtcaaatgtaaaactgttcgactttgaccaaagttaatacgtcttatatcctgaaatgaanggaggtattatgcaacttgtgacgcatacatnctgaagcttatcatttacgtaagggttgtttatggca

SEQ ID NO: 25073 - DNA, 448 bp, Oryza sativa
  unsure (1)..(448): unsure at all n locations
agcttaatagtcaccacttgcaaaggtagcataagctgctctagtatgacccggacaatcgccagggctcagtggctcacccctcgcctgattccctcattgcccgtaagccccggatgaaagaatactttaagtatctagacgaagaggatgaacaagatttttaaatttgcatgtttttaagttatttctatcataatgttatgtttcttcttgtttttaataaaaacgagctcangttttgttctgcttagtacgttgagtttacctgtcctgttggtcgattcttgtaccttntgttttgtttttcctcgattacttgagtattataaaccacaatgaaactcaagctctatatgacatgtacaagtaaaatcagcagcaaatcatactagtgcatgtgtatgcggctntatgtattanagccgtgttagttgttttggcacta

SEQ ID NO: 25074 - DNA, 215 bp, Oryza sativa
  unsure (1)..(215): unsure at all n locations
gcatacaagaagagcttggcgaacagccggatcgacatcggcggcgcattatttctgcatgagaacaagctcaaatttaacagaatctgcatctctcttttatcaactaccccagcttaccgagcccaaaaagatatttcatattntcaatacagctataggagattagatagctcttcttgatcgatcgaccggataccgttcgagaataatgg

SEQ ID NO: 25075 - DNA, 414 bp, Oryza sativa
  unsure (1)..(414): unsure at all n locations
agtctagctagcatcgaactaatacactttatatcttattcnttgcggtcttctctgaccgtgtgaagctgctgcaatgctatagttccactgatatagtggagtacttcctactattcagatattcagaacttcagattacagttcagtgatggctaatactaatactccagtgtccagtctaagagaagctgtggctacagtcttacagacagcggcgcatgtcaaatatgacacatttatgggcttgttgataattgcatatatgtgcagttgcacaccagaaaatatagaagaggctaagcctgattgtcaccgatgagtgcacgagcaataatgacgttttctcgtatacatgtacacagaatcctaccgattcagctccataccatgatggtcgccattgtctcgctt

SEQ ID NO: 25076 - DNA, 442 bp, Oryza sativa
  unsure (1)..(442): unsure at all n locations
agcttagtcaagcattagattntctacagctttggtatagccattaacttctctcaaaaacagcatgattcatcttttatattccctccgtactcgtaaaggaagtcgtttaggacaatgtttaagtcaaaccttgggaatataaatcatgaataactctcaagttgttgagtttgaaaatgtaaaaattatatgaatagatttgtcttgaaaatactttcataaaagtatacatatatcacttttcaataaatatttttatagaaacaagaagtcaaagttgtgttttggagaccgtgtcgctgtccataacgacttcctttatgagtacggagggagtatatgctaaatctgtgctaattgccaaatcgccaacaatagcttctcatatccttctctcattgatttgcaaaaagaaagacagaagtacaaatttcaaagt

SEQ ID NO: 25077 - DNA, 397 bp, Oryza sativa
  unsure (1)..(397): unsure at all n locations
tgtctttcgctcaaagtccttgataaggattgaacccctatatcttaagtacgcttgaaggtcatcatgctattgctgcatcatgttggtgaagttggcgaactgagcatcagcagttggttaccattcttgcgtctgtgctatgtgttccgtgaggttgtactggatctctcctgtctgcatatcaagggtatccattctcctagtgatttcacccaagtcccaacgagaggaactcgagcgacattcacttgtagatggaggtactccacttgatctgnnggggtggttgtcctcccattgtatgtgatgaggtgcatgccatcggtcctcattggcacttgcccagcttgagaccccgatgctatggtgtggagtctgggtccatccgggtgca

SEQ ID NO: 25078 - DNA, 437 bp, Oryza sativa
  unsure (1)..(437): unsure at all n locations
agctntcttgactntcctgatttttagtttcttattctctccaaacaggacccaaggcgattgagaagtcattgagcatggagaaagtcaactatgtctgtgactactaaaagaggccatttcaggctgactccaagtgtgaaactaaacttttacagaaacttccatgaaaaaattttatgtgtgtttttgaattatcatgctttttttttctcttttgaattatggttacagactacacaattctttctcttcaacaataatccgatctcattgggagagacgatattggctttgtcttccgatctcattgggagagacgatattggccttgtcttttgagatgtgtaatctgagagtttggtcatcggcggtctattctaaggctgagtttgaacctccgagttcacaacagttctctctagcatgaaaaatgg

SEQ ID NO: 25079 - DNA, 432 bp, Oryza sativa
  unsure (1)..(432): unsure at all n locations
ggcctcatctggtctctaatcgcattcaagtacgtctttttcatccatgtctcgtactactaccaactacacttatcaacatctctcacgtgtacgtactgtaccgtactatctctgtccggaatagttctattttagttctcccctgcagtcacaaataaaaaaattgaaatccctctntttaatggacatgcacttgtgtgttttgcaggggtggatctcgatgccaaaaatcgcgaggactctctgttcaccattcgaccaccgctgtaggcctaagcatngtttcttcaggttagtacgacgacatgacgtattgacatcttccgttacatttggaactgttggacttcaaccgtgggcctgccttctccaaagaggagaatattacctcgtcatctgctaatgaattaagcgtgaattttttttgcg

SEQ ID NO: 25080 - DNA, 430 bp, Oryza sativa
agcttgctagtactaaactgccgaatgttctgtttatattatgaacaactgtgactgattgagcatgaagtacttcatatgctgcatggaaattgatatgaacctgctgaagattgggcctaatttctagtcccaagtgtcttttcctcttgtttagtaaagccgagatgatgttcgtcgatgtggatcgacctcatcccgcagctgctgcaggtgtgagattaaaccataccagcaaggtgctgttgctgacagtggcatgataactatcgcggaacgtatcgaggttatcctgtgtactactaagtacactcttatctcaagtaataaccatatgatagatatgttgttgcacacaagcaggaggtaaacctgttgtaatgggaataagagaggtgttgccttgcgaataatgcatgcttatataaac

SEQ ID NO: 25081 - DNA, 370 bp, Oryza sativa
gagctccgcttattccagagttactaatgaaccagcagaaccaaggagtacagaaaccctcgggaagatgctccggaagataatccctaaagtatggccactcttagagatagagatagagccggtctggtacatgtgataatacatgcgatatagatcggtttgagataagattgattttgtggaaccaatctcattatgttatcatccgattcttgtaagccacgtcgggggatgttcccgactccttatatcacaactatgctgcctcgagacgaggtgacaacgcttccatattcttcacatggtatcagagcaaatctgcgacgactaaatcacatctagctgatacatgctccaacagcagctc

SEQ ID NO: 25082 - DNA, 392 bp, Oryza sativa
  unsure (1)..(392): unsure at all n locations
ctaatgggggtagatgttcttaggaagttggatagcttaagaaaatacgagaaattggctggcaatgtatgaaatttaagtagttccgcgtggaatcttgaccgaggagcaaaacccaatcttgctaatttcacatagggcgtcatgaataaacgagtttaaacgaatttatgtagcanacatgaattataatttcaactggatggcttagttctatcctgttcatccttcttcctccaaggagtantttttctttctcaagttgtcactactaacagacctgtagtccatccttcttgtattccaatgcatntagtcttaccagttaataccctttatatcagtaacatgaacattatccaagaaattgtngtcaaggtttattttcttta

SEQ ID NO: 25083 - DNA, 378 bp, Oryza sativa
aacccgcagcactcgcagcaatgcgcaagatttcacatagttattaataaacattactggctgcattctaaaagactccatttttaacatatttcacacatgccaatacgaaacaaaacgtttactatctcaaactacataaggatgcatttaatgcccttcgtttgcattctcaaactccaaatgaaattttcatccgctttctcaaaaatttattgcatcgactggttcaaagataaagcttgggtggatcaaataaaaatgctaaaataaaatatcttgaaacatggaaagatcaacactaataaccattaaaaataatctcctgctcaatgacaaggtgacatgcatgatgccaccacgttcgagtcgacgtgg

SEQ ID NO: 25084 - DNA, 434 bp, Oryza sativa
  unsure (1)..(434): unsure at all n locations
agcttccgtttcacgtattgaaaaattgttgccgtgccgtgcgtcatggggatgattaagtcagtcaagtggatgctgttagtagcctgttttcggctagcagcattattcacgtgaatagaggatcagcaatncagcgttaggatntactaatacacacgatngcggaaaaggcaattgcagatttacagtcttaacagatacttgcatacttggatgtgacctgagattgtctatcctaatttctgccctgcggcctgcgcccctactaactttgtgctcactgtcctacgctcctgcgagatcagatgttgaagtttatcttgtaatcttgttttcttggctttcatatgtcgtagtgtcacggtgtcagtcgcatgcatagaagcgtgttaagtacaagcaattatcggacatggtgagtatgatcatcg

SEQ ID NO: 25085 - DNA, 499 bp, Oryza sativa
acacttagatactcagctgctatagctttaatgatgaaagtcaagaccatgataacttttatgttggtgctggtaatcattcagttgactagttgtgttcattgcttactcttcacctgattcttcattgtaggtcgaagtgcaccataaagacgctgttgtcatagggtctttgagagaatatcatttagatcataacatggctgctgtcgtcgtcgagaacttacctgatcttcgccctgtgcctttcaacaatgttcagaaatgtgtaccacatagcatggtagtagctctaggccgtgatatctctggaaaattaatggccacaggtgggttgttgattggtggttcatgcggatcatacaatcctaagcttatgtcgtcgacttgtaaattctctgaagacacctgttttttatacttgaagacacactgcatgatacaaaaaaatgttaatctgttgtttatcatatctgcgagaaagagatgattttctact

SEQ ID NO: 25086 - DNA, 444 bp, Oryza sativa
  unsure (1)..(444): unsure at all n locations
ggaccttagatcgactgcagcatgaagctagtgattagcagggataaaatatatttacatgatcgacacattgagaaagatatgaagaaatgttttcccaaaatggctacttntattcgctccctttccagtagcaagaaggaagagggtttaccaaccaacctcctacgtatcacttaaagtaaatcattcggctcctagctcagagccccttcacaatactccaaacaacaattctagataaaccatcttattctgaaacgcgtagcaatcgtgtccctccaaatcatccaagacactaagatcgccactggatcaacaacttctttgtgattaagtatcggcttcctttacacaaccaccagagcattaatttttctattgcctaccactagttaataaatttttcctattgctaaccactagtcacttaattctctccac

SEQ ID NO: 25087 - DNA, 300 bp, Oryza sativa
  unsure (1)..(300): unsure at all n locations
cgtgatctgttctaattacgaatccaacggaatgaatgtggaatatcaaatgcgttctctattggccttgcatatatgcaaattttataattaggtactaagaacaaaaataatttaatctcatcaacaatgtcaaaaatcaatataattagtacttttaanaaagaaaggtaccgaataaagccttaagagtggatcttaaaaagatcattattaagtactcggctctggagtcaactttttcccccaattcaataatgtataaatttaaaatgaataaataaatgggattaactctta

SEQ ID NO: 25088 - DNA, 325 bp, Oryza sativa
gaggttactttttttttgcgctgtttttttaattttttcgctatctttctctttgtcgagaaatctcgtttacgcaccggtcttttgtgcccttcccgctgttgacgactcctcttaccagagggccagtgtcatcggcaggcacgtggggcccacttctacgtggccggtaacgaagggttccgccgcgcgtgctggaatgtcccttacgtgggccgtgggccactttgagaacccactctctcacggtctgtgatggccacatcgacaagcccggctagccggacggagcctgataaagtaacgtcccgatggggccccgttt

SEQ ID NO: 25089 - DNA, 421 bp, Oryza sativa
tgcagcttagcttctctttactatcttctggtgatatttattcttgttcccaacaaacggaggctgcagcgtgttgcataaaactagggattatctatcaatgaatgaatgccaatgggaaaattaccctctcatgcaagttggcagcacacctttcccgtgagcatttcaaagaggaagattccaacactccaccaatcaactgccttatcatgcccccgaccaagaataatctctggggccatatactctactgttccacacatcgaggttgatcttgtattctcattaaattctttggcaaggccaaagtcagtgagcatggccttgaatgaggcaacaaaaagatatcatcaaatgaaaagaagagcatgaggagattttgaagaagcattctacatggcatcagcaccaaaagata

SEQ ID NO: 25090 - DNA, 463 bp, Oryza sativa
  unsure (1)..(463): unsure at all n locations
gagataatcacactanacttacagagttgtgataactttctttngcatcatataaaatcaaatcgatggatggcatagtgcatcaggtaggggatataacgagagctgtttgggcatatgaccgaatggaacaaccaaagcaggccatgtgggtccaaggacaaaagcatgtgaactcacattctcgcatcacaacacaggaagtgccgactcaatgagcttttgctttcagaatgtaatgcaaaccatggaagcctcccctagatcatcactattgcgttaatggtggaattcgcactccaacctcttcttcttcttgcctcataccaatgcaaaaagatccaataccttttggtcagttcagatgttggcagggaggagaggatatgtccaaatcgaatagaatagatgattacggatcaccatattcttttgaagatggactcctacacttctatgtctc

SEQ ID NO: 25091 - DNA, 444 bp, Oryza sativa
  unsure (1)..(444): unsure at all n locations
agcttcgaatagactgtgttagagttgtctaatattcatctctacgattaaggattggacgaagaccaattatttggaattcaagagatatagtataaagaaagttcataatacattctaattttctagaagcacagttcaaatgtaggcgctcgtataaacgtgtgcacactcaccgtataaatacacacatgtgcaccccatccctataagcacctcctaatactagaccgcaagcgctcacataaacacgcacgcattcacttgtatgaacacatacatgtacaccctatctttgaacatcgtcgaatactaggttgtataagcgcttctttaaatgtgtgcactctttatgaatgcacacacagacatcttatttctatgagtaccttcngatactagggtggcatatcttgaaatgtacgaaattactatatgcgtctc

SEQ ID NO: 25092 - DNA, 315 bp, Oryza sativa
  unsure (1)..(315): unsure at all n locations
tcaacttcggaaatacattctatcaagaactctgcgatnattcgtttttcgtgggtactaggtatttgctaagcttatctatcaaagtatctaatttatctagataatctatagaaacaatccgctcaataatctgtatcataccgagaataaggtgaacgtgcatttcttatgtatatatgacagggtaaatcaagagggtgacttgttgagcagtacatgagtaacatgaaccgaacttgacacttagactaacgcttgttcagacaattggatactacagcttgctatggatttgactttctatactgctct

SEQ ID NO: 25093 - DNA, 417 bp, Oryza sativa
agcttagcgttgcttttcactctcaggataaaggttttgtatccatacgtactaagcgcaaccagatgagtaatttggaagctaagcttgatgacctgcggagagagctctctttcagtaatggaggcgtatttccacatgctgttctttctggccagcaaaattccctcctgaaccgccaaaaaccaaccactgttgctgaggtgaggtttggtcaaatattctcttatcctacttagtgctatcctaagggtatatatggaccgtctctaatttatatgtacattttatctgcggcctgcagcttgaaaagctttatatgaaagttaagacaggtaagtaccggagcgcgatcattgagctcatgctggtacatattgattcagaagtagccggaggaaaggcctgtgcatcgaa

SEQ ID NO: 25094 - DNA, 441 bp, Oryza sativa
  unsure (1)..(441): unsure at all n locations
agcttcacttttattctctttcaaacatttatcttctgcttctttggnactatcatctttggccttggttcaccaatgattactccttttcctttagtagattcggcttgctccggccaaatcaacaccttcttgtcattgaaattaattgtattcaccggaaaaggatcatgatcaagcttcatcttggagccatcggtgaacttcaatcgtccttcatctatggccgattgaacctgtcgttgaaacacattgcaattattagtggaatgagaatgagaatcatgccatttacaataagctcgacgtttcaattcttcttgagatggtacgatatggcctttaggtaatctaattttttctcttgtaaaagataatcaaatatcttatcacacttggccacatcaaaactatatttaacctcactttgccgatctttgc

SEQ ID NO: 25095 - DNA, 403 bp, Oryza sativa
  unsure (1)..(403): unsure at all n locations
tcgtgtgagaggatccagtggctcagtaggtttctcgccttttattctctctaccgcctcaacgccagagtatggaggttgactggataggtatgaggcaagccaacatgatggccangcggcggtctggggcgcagccgcacagatggctgccgggccaaatctcgctgtaccgtggaggtgccccgaattgaggcagtggtggtgctagtagcggcaacgacacacctncaccaaccggtcgaactctggtcgtcatcaccacaccacgcaccgcgccgtggtacaaatccattggtggtgaaccaagcggaagcaacggccaataccaaccttgctgcgaagaatagggtgccaccgaggaagatgtcgtcccgcgccgctgccgatgaagatggcattg

SEQ ID NO: 25096 - DNA, 439 bp, Oryza sativa
  unsure (1)..(439): unsure at all n locations
agctagtccttcaaagtgtcaaacaacttcttctgtgtctctccccaatggaagaccacccctttcttcgtcaactcattcaatggtgcagcaaaggtactaaaatctttgacgaaacgatgatagaatcctgcaagaccaagaaaactcctcacctgtgtgatggtttggggaaccggccaactctttatggctttaattttcatctcatccacctcaattccctgtggagtaacaatatatccaagaaatgaaactcgttccgtgcaaaagatgcacttttcaaggttagcaaacaaacgtgcatcgcgtagagcattaaaaacagcacgtaaatgatccatgtgttcatccaaagacttgctgtanatcaatatgtcatcaaagtaaactaccacanatcatccaatgaaaggccttaaaacctcattcattaagc

SEQ ID NO: 25097 - DNA, 495 bp, Oryza sativa
  unsure (1)..(495): unsure at all n locations
tatgcgtaggaccaacaatgatatctctcgtgagtcatgcttttactttcggctaaatgcatggatggatcttgtcattttcatttggtcctctacttgacccactgagacacagagcttccaataaacgccgaaacactttgctgaacatccttgtgtgtatgggcaaaatctcatggagatgtcccttgtgccaggtaggccatcacaaaatcagctgatgatcactcatcactcgctctccttaaataccactangttgctgccaaatcaaggagcataaatgctgcggctaccaagaactattacacaagagaaacaggcgagtgctttgctgacaattgctgggcttcccactcacagtgataaatncatgaaagcattatacctatcaacaaaatcatccaacatatattagtttataataattggaaanaagacacaagtttcctagttaaatttctctagaatatagatttgcatacatgaattttc

SEQ ID NO: 25098 - DNA, 418 bp, Oryza sativa
agcttgacattacggaccactgggtctagtaccagtgggttccgccccgggtggaccactcggtcaggatgatccgagcggtcaaacttgattgcgatctctgaccatcgaagatattggggcgtgtcgggctgaacagcgttgatctcccgttcggtcaacttttgcttccttttagactcataagccagggggccgccgaagatatggttgagctccttgcggtggtcttgaaatcctgccggagcgtcgccgtcgtccttcttcctcgacgtgctttgttcttcgtcggagttcttccatgtagtcttggtgtattgatccgcgaattgcttgtagacgaaacaatctttggccacatggttggagttaggatggtgcgggcattggtgagtcatgatcttgtcgaacgtgttga

SEQ ID NO: 25099 - DNA, 369 bp, Oryza sativa
  unsure (1)..(369): unsure at all n locations
tctcttnctccctttccttncattggaagactcgactgagnaaatacaaattagaaatacaccaggggggaaagtgaataatcaccaaccacgcgcggtgctttgtgacactgccacgtgggacccacagcaccgtgacatggcacgtatcctcaagcagaaaaggaaaggggtcagcttcatcgtttgttatatcgaagaaaaaagtgaaatgatatatntgaaatgaaaaataatttgtgaataaaatttttatatatattattcttaacgatataaaaataaaggctgaaaaataaatttcgatgaagaaattctaaaattaagtgcgaatttaaagttgaaaattaaattttagctgataagcat

SEQ ID NO: 25100 - DNA, 441 bp, Oryza sativa
  unsure (1)..(441): unsure at all n locations
agcttaccagaggtccactagctatattaatatttctcagagattccccatactccttccagaaatcaaacttctcaggagtcacatattctctgacccgcaagtgtctttctgttggctgtataagcaaggagcattggatgatacaacaacaagaacaaaggaagtccaggaggatataaaaagcgctggcaaagttgctcaaagatcaaacctgtaaatattgtcccaaggtcagaatatcaacgtcaatggccctcaaatcacacatggtttgcttcacctcttcatctgtctcacctagaccaagcatgatagaggacttcgttaccataccatctttgcaattnttcgcatgtttcagaacagctaaactctgatcgtatctgtggaaacgagataataaactggaaataagataataactacattgccaagagt

SEQ ID NO: 25101 - DNA, 436 bp, Oryza sativa
  unsure (1)..(436): unsure at all n locations
ctatcaacattactcaaatgcagtataattaaacaaagcagcaggcttctgtgtccagtttggtaacagagttatggagttaccccgagaaaattgttcaaacttcaaacgttatntattcttgctataaaatattactaccacaaagtttctagtggaatggcagatcaacataccatcgcgtcgaagacaaatctctggtatatttttcacttgatcattaatgctgtcattgtatactctggtttcaatatcaccctcaacataaactgcagaactgaaataaggcaagaacaaagacagcaccaaccacagtaaaaaagaattcaagccatagaactangaaatggtatatagttgtatactcgtatggagaaaagaaaaagggtgatcttctcactganaccacgtacttcttcaccagcttctggacagc

SEQ ID NO: 25102 - DNA, 450 bp, Oryza sativa
  unsure (1)..(450): unsure at all n locations
acactcagaaagaaggctaagatttctttgacacttactcacatgttgctagattgaccacaattcgtgtgctactttccctagcagcctcacatggtcttctcgttcatcaaatggacgttaagacaacttttcttaatggagagctggatgaggagatctatatggatcaacctgatgggttngtagttgaaggtcaagaaggcatagtgtaaaaattggtgaagtctttgtatggtctaaaacaagctcctaagcaatggcatgagaaatttgacaaaacattgacatctgcaggctntacagtcaatgaggcagataaatgtgtgtactatcgccatggtgggggtgagggagttattctgtgattgtatgttaacgacataatgatatttgggacanaccttgggtgagaaatgagggtaatcattcttgctcaaaatctgattg

SEQ ID NO: 25103 - DNA, 354 bp, Oryza sativa
  unsure (1)..(354): unsure at all n locations
tattataaccctatggctgatgaaaaggaagacctggttcaatctagattaaaaacccttgcgaaagttacccaaggataagaacgggttgctcggcattacaacaagaagtggtacccaaaagattttcagaaagggaacttgtatggaagttgatnttgccgattggaactcgagatagcaaattcggcaagtggtcgccgaattgggaaggaccgtttcaaatttataaagttgtatctaaaggagcttacctgttgcaaggactcgatggagaagtttatggcagagcactanatggcanatacttgaagaaatattacccaagtgtttgggttaatgcatgatcggctg

SEQ ID NO: 25104 - DNA, 423 bp, Oryza sativa
  unsure (1)..(423): unsure at all n locations
agcttcactgtgtacaaatgcattatcagctatcatgcaattttattctatgccacaantntgcttccttctctacagaccctgtgcacttatgttgtctgagaccttcacagaaatattgaattctggtcatcgtaaacccagaatttgaactggaatgacttgcatataatagcattaaccacagagcaacatcagaggaaaaaaagaaatctcatctctaccactatatccgtgataaaaccaatccagtagtagttctgcttgaaggcagctaccagcattctcaatctaataagctgtacttaactattacgaataaatctattaaacaactagcgacgacgatggatactggtaaagcacataataaaataaaatattgtgtcatattagtgaacaagtggcttgtactagtgaggg

SEQ ID NO: 25105 - DNA, 449 bp, Oryza sativa
  unsure (1)..(449): unsure at all n locations
atctcactccgcctatactgtagtataatccaatagtacattctccaatgttaattactggaattaatgaaatgtggactagtactacacactgtactagtaatatgcagtgacattgctagagagnttgagtatcccagctactgtagtagtactgaaactttgtcatacacatgtatggtcaggtgtangagtagtgcagctatccgtattttaaagcaggaagagaactgccactatcatcatcatcatcaatcagtgtaattaagtaatgggaccagcagacactaaatgcagaatctacctcgagatccaactcgccaccaactccaatccaagtgcagcagcagctatgatattccaaaattcatcttcaatcttcatgctacaagactgaagcagtataccactactaccaatgaacattntactgtaagttggggataaaa

SEQ ID NO: 25106 - DNA, 384 bp, Oryza sativa
  unsure (1)..(384): unsure at all n locations
atgcaagcttgttgaantggcactgaatatcacttctctcctcnattatagggaaaacaagaaaaaagttgaagtactattcccgataatccctcctgttagattttttcggaccaatttgcatgatataccaactggatgatgtccctaaatcttctcatctgaaatgcatccattgattctaactagtcacactcattatgtggaagcagatggataaccaccactaaaagaaatactccatgagagggagttcttctttaaagcacgttattactgttcattcaaacatgcacggcctggtgaaaatacacagatgcttcttacagtgttgttcctaacatagttctaaagttgtccacttttgagtttatatatactttt

SEQ ID NO: 25107 - DNA, 251 bp, Oryza sativa
tttttttaaaattacccccctccctacattatattaatttgttttattatttatatttagttcacgatttaatatatatttgggatatatagtttataaattttttattttgtgtatataaatgatatttatattttgtaatatattaactctttattttttattttatatatttttttttatattttattttttgattttttatatttttatttttaatattgatttttttaggttttgattgttttatt

SEQ ID NO: 25108 - DNA, 431 bp, Oryza sativa
  unsure (1)..(431): unsure at all n locations
gcttctcacggcatgcgtggtttaatatattggtcatcgatcaacggcgaatgtaaagggccaacaccaaacacgcatgatggctagcttccttttcgatcttttcctgaatggtggggggattagagaattcttatataaattctcttcgtctcaaaatataataagggatattggttgaatatgacacatctaggatcatgaatcttttcacccaaattttttatattttatgacgaagggagtatatgtgtatctaaagatggtatcatatatatatatatatatatataggaaanttggttggtgctccatggcgcccaggcaccattgtttgaattgagttataccccattccaatgacctgacactttttcattattatggattatattaactacttactaactagtgaagcaatgttaactgat

SEQ ID NO: 25109 - DNA, 498 bp, Oryza sativa
  unsure (1)..(498): unsure at all n locations
gatagtatagataatcatgtgacaatcggagttctgggtggtctagtatatgacgaggttagatatttctttccgaaggatagtaaagttggatatttattctaggcaagctatgaagaatttgtgagttagtgagtgtgaccactgcttcctaagacaaatgcaactaacccttatcagcatcatgtgcctttatctcttttaaattctatggttttcttgcactctattatgagcattcatgtatttttnttctatcataggattctgatatttattctattccatttcctatactctanaaatccacgttcaatcataaaatctccatggaaattgacaattctacattaccactagcaggaccaaaagggtaaaacacaatgggtatanttagtttacgtcaaaattgataggttggataanantggaacaatgtgacggaaaaaatggaagttatggataggaaagtttaatataatggaaaactggaagttt

SEQ ID NO: 25110 - DNA, 442 bp, Oryza sativa
  unsure (1)..(442): unsure at all n locations
agcttcacccaccgaaacttctttgcactctcgtatgatcccggncttggtaatcgctgagcttccttgcctcagtattgccctctgtatctcaattgcagactgcatccctttccgcagctgatcgacattgctcagcgacaatgcagagtatgcaacccagaattgctcagcagcagaagaccccttggagtccttggactcagcattcagtgattcaagcaaagctgtgacgccataaacaacatctgcagcagaaaccttggagcggtacccatgcaccctcaagaaactccgataatagaactcggtgagcccatactcaggcaagaaccgatcaaactcatcacgcatcttccgcttgacctccatgctcatgtactggaacctcttctggcagtcggcgagcgggaatcccatccttgccagaagcagcttcagc

SEQ ID NO: 25111 - DNA, 455 bp, Oryza sativa
actaagcttatctgctctgtgtccttctaagcgcacacactaattgctatatgttctgatagtcttcccttgtcctgtactcagcatccattatatcacctaaccatgtagttagccaattatttaattatgggtttacaaacgataaaacacaattaaaatcaagtaaattataatatccaaaacctggacgattctatgccactgttcctccttttcaagagctacaagtgcttgctttaacgaggccacaggaaactcctgttaaaggcaacccaagcatccagagtgctgtaaacaccttcttttgaatcttccaggtcaagcagctacaagttataaaaattattgattggtctctaccaggaagcaattataaacaaaacctaattatcatagagacttcatgctgtcaaatagtagactagacaatacgataactagctgtgcataca

SEQ ID NO: 25112 - DNA, 422 bp, Oryza sativa
  unsure (1)..(422): unsure at all n locations
agctttgcgaatcccttctttcatcacaaatacctttattttatttnttgcaatcaagtagtaatatcccattctttatgactacgtggtttgtcatgtcatgctcataagtaagaatattaagtttctttgatttgtgattgttgaatgactatgtggtttgtcatgtcatgctcataagtaagaatattaagtttctttgatttgtgaatgttgaatgactatgattctgaaccgttacatcaaccgatgagaaaaatactaccatcatcagcactgagattctgccttatggtttgtactggattgaactctaataaatttggacttgtgcatttcagggttccaatggttagcacttttgggcctcnggccgacatcgntgacaggattaggtgagcttttcaaacaatataataata

SEQ ID NO: 25113 - DNA, 433 bp, Oryza sativa
  unsure (1)..(433): unsure at all n locations
actcagaaagaaggcgaagatttctttgacacttactcacctgttgctagattgaccacaattcgtgtgctactttccctagcagcctcacatggtcttctcgttcatcaaatggacgttaagacagcttttcttaatggagagctggatgaggagatctatatggatcaacctgatgggttgtagttgaaggtcaagaaagcaaagtgtgcaaattgttgaagtctttgtatggtctgaaacaagctcctaagcaatggcatgagaaatntgacaaaacattgacatctgcaggctttggagtcaatgaggcagataaatgtgtgtactatcgccatggtgggggtgagggatgtattntgtgcttgtatgttgacgacatactgatatctgggaccaccttgaggtgataaatgnggttaatcattcttgc

SEQ ID NO: 25114 - DNA, 434 bp, Oryza sativa
  unsure (1)..(434): unsure at all n locations
agctnttatatatatatgggattaatcggatctctttaaccatatatacgtagcgacggtaccggtgagcatagatttctcctgtgtcaccgatggtcggcacgaagaaaatggcgcacgatcacaactggacataaggaagaaattcaagtggctgggttgcaatgcaccaattgtggcactacgagtatgtggtggttctttttcccgattatatgggaatactatacgcatacacagaccattacataatactctctattttcttaatatacacgacgtaattgaaatttataaatatttaatcatttgtctttgctaaaaaatacatanatatatattttttgttagacttatcttagcactattttaatcatgacttataatttttatatatgtataaattctttaataagacacaagataataagtat

SEQ ID NO: 25115 - DNA, 415 bp, Oryza sativa
  unsure (1)..(415): unsure at all n locations
tcttcaatctagtcacatgngtggcttttctatcactagcaggacatctttgaactcaaactcatgtggttctttgttgaagcgctctacaagcctgtacctcacatcattcatgtagaatgagtgagcactctctaaaagacatttcgcctctgaatcagtcagtttactggtgaaaacaacgtctcctcggataagcactgtatccttggtttctgcaaactctgtataatgagtgatcgtataataaaggcttgcttgagtgcgccctgctttgtattcttcaagtccggtgaagatcatatgcggcatctgaactgggatgttcaataagaaagggtagaacacaaggcctaaatattagaaaacgtgctgataattacaattctattgaacttatcaattataccagata

SEQ ID NO: 25116 - DNA, 484 bp, Oryza sativa
  unsure (1)..(484): unsure at all n locations
tactcagcttagtcgtgcatcagtacctggattaaaaagtagatatttgtatagtgaagatgatacaacaagaatgtacttagcttgaagttctcacaggtcacttccctaataagaaataaaaagtgcatcttagaatataattgggctaataattgcatataggcatatgctactagacatttcttaattattcaacccatgcgcgtgaaaatgaagacatgttaatgccacacatggattgatatgaatgttaatgagaaagtacatcatctcttatttgtccagaaagcgccttttgctgatccaatttatcatccaacctttcaatacgctgagtcaaatggcctttagcagcctgcatgacaatcaagaaaatggtttcacaattgaggatctcagaaattgtacaacaaactaccanacatctcaacagtgacatacaacncgaattctgtgatggtctatatgatgaagatgtata

SEQ ID NO: 25117 - DNA, 203 bp, Oryza sativa
ctaagctgaggatacctatcgatgtgtacacagattaggctgttctcattcgaagggtggttatctgttgcatgaactgcagaaaccttccaagatgaccaagcatgtaacatttgatcgttttgctacctaggatgcatgtttgatgataaatatgatagcatgttccttgatcaagataagaaaaacaacaagaagaaagc

SEQ ID NO: 25118 - DNA, 359 bp, Oryza sativa
  unsure (1)..(359): unsure at all n locations
ttgaaacaagctcctatggcatggtatgtattgtcttaaaactttntgcttgcgaaatgtttaccatgggaaaggttgaccaaacgctttttgttcttaagcatggtgataatcaacttttcgtttagatttatgtggatgatatcattcttggttgttcgactcatgcgttggttgtagattttgctgagactatgcgcagggaatttgagatgagcatgatgggtgaagtatcgtactttttgggattgaaattaagcaaacacctccaggtacttttgtgcatcaaacgaaatatacgaaggatcttttgagacggttcaagatgaaaattgcaagccgatttcaacaccaattga

SEQ ID NO: 25119 - DNA, 385 bp, Oryza sativa
  unsure (1)..(385): unsure at all n locations
tcattactggccttcacagtgtactgatgtggcacgttcctcttcttaccaggttngtgtggtagtgacactggtggagaaaccatctttggtcggtcgaccatattccacaatagtcccggttgcaataaaaatggagactaaagattatctctaatcccggttgaataggttagaactactttttgatctttagtcctggttggtaacaccaaccgggaaaaaagatcggcatgcgcggatagatcgaggcgtgcgggatcgagatacatatctcctccttccctcctccctgccggntctatctcttcttctcctccccttctcctctcctacgatatcctcttctactcactatcttacacgcggatgatcctctcctcct

SEQ ID NO: 25120 - DNA, 371 bp, Oryza sativa
  unsure (1)..(371): unsure at all n locations
catcaggcccatgttccgggctgtacacctntaccataccacatctcaaactcttctactgttattagcccttagctttgaattcttcatataacgccaaggtccattggtgaacattgcgcttctcccaagggtttcccatttcatgagaaattggctaaagaacaggtccattaactattcattcccttcatatgcatctcgtgttagacgcgccgaatatgtcccgcgcgcgcatatcgacggcgcagcaccttcacctgccagatatatgtatcaaattcgctaaccccggcgaacaccacatggggaaagccgtcgccggtgcgttcaatgaaagacctgtataccaatggcattctctatattat

SEQ ID NO: 25121 - DNA, 456 bp, Oryza sativa
  unsure (1)..(456): unsure at all n locations
tactaagctaatccacactggacgantagacgatgatgaaacactntttcttcttgattttatagatcatggtcctacatttgttggtggatctagatgccactgctttacagggcattttcatttggatttgggtggtgataaaataagtggggatcgctaagactaatcaatataatcatcatagacaggctagatctattaaatgccatgaatggctgcgaatgctttcctgctttacagaatggagcaccgatgttagtcatccatctctgaaatctagacaatattgatacactgaatgtctgaattattcatggatagtactaatatcatcccaaagctcaaaagccagcaaaccttaccgcacatttacattatgtaggcgggtacaatgattttaccactaagtcacatcatgatctttcgtcatgagacagcccatatctgcaagcg

SEQ ID NO: 25122 - DNA, 408 bp, Oryza sativa
  unsure (1)..(408): unsure at all n locations
ttttttatagtaaaaaactttcaaatatctcatattgaaagtttcattgattctgagtaaattctttttagtttggttgaaagctattgattcttttagtaaaaactttcaactattcaaataaactttcatgattttgagtagaaatgttttgattttttataatttctttaaaatcttatttgtagaaagtttatactataaacatataaagtttatataacaaaattttctacctataaaaatatatatgctgaaagttaaagcttanaatcgcttgcaaaagggaataggacacgtttgcatgcacggngtcagcacattcacgcatgtcttnttgtcattcttcccataattngcaagagttgggtctaagaagaggtttgatttatatgtggagggaggagc

SEQ ID NO: 25123 - DNA, 393 bp, Oryza sativa
  unsure (1)..(393): unsure at all n locations
cattctccatgttgtctattatagtgtgaatgatatgtatgggaggctcaatgtcattgtgaatgatctcaaggggcttggggcaaactacactgatcttgaggttgcccaaaagatgcttagagccctaccgaagaagtatgagacccttgttaccatggcctcatcaactcnncgacatgtcaaagaaatgaccacccgcaaagccttnttgtgaagatcaacaccaatgacatgtacaagttgaagaagaaggagatggatgaagcctcaccctccaagaagtgcattgctctctaagccgaagttgaagaccagaagcagagcaatgtgaatgaagtcaatgatgacttggaggaagagatggtctntcttactagaanggtcaatgat

SEQ ID NO: 25124 - DNA, 437 bp, Oryza sativa
  unsure (1)..(437): unsure at all n locations
agcttgtggaggaaagaagcaatgctgtgtggttgatatgggaccacnaaaccagagaggaagaggaggaagactcgatggagaggagagagctttatattcaccgggcacggngggaatatggggggatggccttccgtttgtgcactcgacctcgacttgtctggggccgtctcatgatgcgggatatgtatggatcatgctgcgtacgactgcagcagtggtattacattattattactaacggcctgtttgtatgtgtaagcttagttgaaattataacgaattgacgaaaaatctaaaagtttatgtgtacggaaacagtttgatgtgataaaaaagttaaaagtgtgaagaaaaagtttggaactatactcagccttattttgcaaaaattttccaactaatatggacacatatctgatagtttaaacata

SEQ ID NO: 25125 - DNA, 394 bp, Oryza sativa
cctacgcacctggtctgatcggtaccgacaagtaccatgttcattacagggtatcaatgtatgggaggagggacgcacctgtcgacgctttgggcaggatggcaatgcacaccatgcccgcttagatgacttacatcatcgatcaaatgcactcctctccactttcattgttgttgctacaatcattggggtatagagatgaatgaattatggtgcattacacagatgagatagaccaagtctgatgttagagctcgatcattaaagcatcctggtcttgtgacaagatcattgtacatagatgctcttatatatcccccatctgactaggattaacacaaatactttaacggagcacgtaatacaagacataccatgcacgcatgattatttg

SEQ ID NO: 25126 - DNA, 378 bp, Oryza sativa
  unsure (1)..(378): unsure at all n locations
agctttgaaagacatggttccttgtcaattgtagtttttgtttgtgagcgaagcaaatgtactaattttgaagggtgaatttaccgtttctaagaagggtacagaagggtactattgtgaaattttaatgtntaataaaatgtactattctaccgtttattgtaaaatttagtaccttaaggtaaaattttggtacctacaaatactttattctgattttgttgcntttaatcaaattgtaattttgtaattcacagttatttgtcgtgcaaactctatatataataacgggctatagcttttctgaagtaaatgccataataaattccattattttgaaaagattaagtctaaacataaacaacacagatgttaatg

SEQ ID NO: 25127 - DNA, 442 bp, Oryza sativa
gatatggctagagttctataacttcaccggctttgttatatatcttgcggcagttgggctctcccaactctcaacgctcatctcatcttttaaggagcaacaagggtagtagcatataatacatgaatgtacattgagtgtgtgcatcctcattatgcagaggccgagagatttcttattatggctctatcatcttaatgtaatcgtctgagattaataatagcttcctttataaaaaaaatacatgaatgtacaattgggtttcctccaattattcgagatgggtatagatcaatgtgtactcattacaactgcgtgcttaataaattcttatagtcatcaatcgagttgcaatacttctgaatcagatattccctccattccacgattaactaacctagtactggatgcgacacatcctaatactatacatcttgacata

SEQ ID NO: 25128 - DNA, 426 bp, Oryza sativa
  unsure (1)..(426): unsure at all n locations
agctntcctcatcaagttccagcaccgtcgactttgtgatgaagcgctggcgaagggatacgtcaagcggcacggcattgagatccacttcatcaagtggcgcagcctcgagagcgcgcttggtgtcgccttgatgttccgagttcggttgtgtcttgacggcgtccccatgcatgcctgggccgcggacattgctgagcgcatcattggtcgcacttgcgccctggaacagatcgagacggacgtcgtccacccagtggagtctggtaacacgcgctccatcgacctatgggcgtggacggcgaatcctagcaccatcccgaagaggatgtggcttggcttcacaaagcgggcgaaggactcgaacctggcgcccctatttgcggtggagaacccactggagcactggcagaggggggtgcgcca

SEQ ID NO: 25129 - DNA, 397 bp, Oryza sativa
  unsure (1)..(397): unsure at all n locations
ntcgttctgctatgtnagacagtgtgcttgatattgacttactccaccatgtcttcccaggttaagcgcggtctgaaatatgatntctatcgcatctggcatttctgtagcatctgcaagcataagctcacaatcagcaattcagcattcaagaagttcaaccaacgatttaaagctcctatgcaaggtaacataccaactgtctgtcctatagtgttggcaagttcttcagcatattccatttgaaccaaanactgactctctatctccatgcatgtatcatataacagttgagagtttgcaagcaaatggggagcatttgagccaaaacccttcgcggtgacatcatgggaaggattctctcttgtggcagaagatgcataagaagtgcacatgt

SEQ ID NO: 25130 - DNA, 434 bp, Oryza sativa
  unsure (1)..(434): unsure at all n locations
agcttncagcgagcgcacgagcaagggctttattgaataaaaggatccatgggtttcgcgacgaggagctcaccgagcgaagccgacgaggcaccgcagccggcggcgaggggagaacgcggagagcggaggcgaaagccgccatcttttcttctcctctttcctctgccgcgctatctatccaccacctctgcaaaagaaaaaatcgaagctnttttctttttcacttcgtctctatctcatcccaggggcaatctcgtaaatttacccgagcaaaccactccagtgccactggcagttgggccccgcgagtacggacgaacaagttaaccgaataatgaatgattaggagagacgtgattagtttagtagctaatcctctgtcaaattaatcatcgtccncttttctgctcggattaatgcctaactaatct

SEQ ID NO: 25131 - DNA, 263 bp, Oryza sativa
  unsure (1)..(263): unsure at all n locations
gcacccccttggtctccggcatgaggaggtacacaaacgctgtcatggcggcgagccacgcggtgaataagaagacaatcccggccctcatgcagctgatcatggcgaggaaccgcctgcccacaaacacggtgaacacaaatcttgtctgcaccagtacgctttgcttcgacgacctcacctacagcgggaacacctcgctggngacgagccagtccagaggtcctcacgaccacccgaatcctgcgacttacgccgcgttc

SEQ ID NO: 25132 - DNA, 473 bp, Oryza sativa
  unsure (1)..(473): unsure at all n locations
gatcatcttgaactccttcgccaacataatgtctcatcctggggtcagtagccttccaaaatttaaggagcttgaagtgaagtgcaacaagccacttctttcatcatttgaaaatgccaataaaatttccaaggtgactcttcactctaccttgctgaagaatgctgatctacaaattcttgcaaaaataccaagcatatgctgcctagtgctcctgagcgattcttatgatgaaagccaacttaccttcaacaaaggagagtttctcatgctcaaccttcttattgtcaagtgccctaccatcaccgacatcagcttcaccgaaggagcagctcctatgctngagaagatcatctggtccttcaccaagttgaattctctctcaggcatcgacaacctcttcaaactgaaggagctcgagttcattggtgacctttgtcctgaccacgtgaggatagacattaatgtacata

SEQ ID NO: 25133 - DNA, 302 bp, Oryza sativa
ctgtatcaaccagccacacaccgagaggcttcctgtcaatcgctcaccaacaccggctgtacccatagccacacgccaagcattgatcagagatctcacaccaacagtagttcaccaagtacttagtaagactacgctaaggaatcacctcacatccggccatgaccgtggccacagcttgtctaacagttaataaccctctgcagaaggggtacactttacccaccagacgttactaacccgggtcacccagcccatgcagaacagccacgtctgttgactttaggctttcatgacaggca

SEQ ID NO: 25134 - DNA, 454 bp, Oryza sativa
  unsure (1)..(454): unsure at all n locations
acctgggctgcagctgtatgagataaatctgacaacgatggacattatctctgcatatacatgggtcaaccggatggtcacaagtgttgatctctgcttaagcttgaccccaagatggatggcgcaaggcaaaggtataatgtagctaagaatgttttcttattcttttcccggtcttggtgtntggtgtaaactggatttgctagataggcgccgtactatcaaaaggggtctatgaagcgagcttgtggatgatcttatgccatattagttcatatgcatgtaggtgcattttgtgggcttgtctaaccaagtgtgatgagttttctcacgtcctaaaccaagagagaagtggcatgtccatangagtgagtgcatcttgtgggtatgtcgtgatatnctttgagtggagcccttatcctgactaagtgcgttcttggaggatttcatgggt

SEQ ID NO: 25135 - DNA, 402 bp, Oryza sativa
  unsure (1)..(402): unsure at all n locations
atgtacttactatacatatattgatacgatagtcaaaccaatttcgtatttgcacacagctgcaggcatagaaccattcatgctaattcatcaactcaattaagagtcaagacttagcaatgacgaaagtagtttgcttaccggctaccagtaaaatcatggcttccaagcctcttgagcacatcaattncaatcatagcagcctctcgatatttctgaagggagcgcacaattttgatagccactgtctcttggtgttccaagttccagcactctaagacttgtccaaaagtccctgcnacacaaattaagaaaggtagttgttgtaacatgtcaaagggcnaacttttgagcataagcattatcctgactatccttattaatgaatgtgaaatagaaagg

SEQ ID NO: 25136 - DNA, 472 bp, Oryza sativa
  unsure (1)..(472): unsure at all n locations
agcttacttgtcttatagtttaggcgctntatctgtctttggttttatcgcttggtggtntgtctgggtcaataatacagcttatccgagtgagttttatggacctactgggccagaagcttctcaagctcaagcatttacttttctagttagagatcaacgtcttggagctaatgtgggatctgcccaaggacccacaggtttaggtaaatatctaatgcgttccccaacgggagaggttatttttggaggggaaactatgcgtttttgggaccttcgtgctccatggttagaacctctaaggggccccaacggtttggacttgagtaggttgaaaaaagacatacaaccttggcaagaacgacgttcggcagaatatatgacccatgctcctttaggctctttanattctgtgggtggcgtagctaccgagatcaatgcagttaattatgtttcttctagaaagtggtag

SEQ ID NO: 25137 - DNA, 344 bp, Oryza sativa
  unsure (1)..(344): unsure at all n locations
tacacaaatgaaacccaaccatacatgtcccccaattatatcttctaaatcatccacactaacaattcaaccctctcccccaaaaggggattttagtaaataaccaaatataacaccggggctaagggtcaaattggtaaattttcttacatcntcctccccaggagcccaggtatcatatataccgccaaaataaagagncttgagtactataagaaaagcacctatacctaacaaaattaggtgaatacccaaaattgtagtcattttatttctatctttccacacataaccaaagaatggaaaagattcttcaagagtctccggtcccagaagcgcgtgat

SEQ ID NO: 25138 - DNA, 438 bp, Oryza sativa
  unsure (1)..(438): unsure at all n locations
gacaacatgcctctatactttatttacatgcaagattcaacacacacaagtacacaactactcaaggtagtagccagaaggccaacacatcttacacgtgtaagaatagaacaaaacggggtgcagagcggtgtgcacgtagcaggacgccctgcatacgtgtgcgtgattgggtggcgcaaccgaaaacgacctgatccaatgcaaacgcaacgtagcaatcacgattgcccncacggaatcgcacatcatcactagccggataattactttcgtttacggcagtatcaacactcgcacccacttatgtgccgctgaattatacatgggacccactgctcgtggggcctacacagtgtgataatactccatccgtttcatcgtattataagaatgctttgaatttgaacgcaaaacanatataatatcaatacatat

SEQ ID NO: 25139 - DNA, 462 bp, Oryza sativa
  unsure (1)..(462): unsure at all n locations
tcttgaaaaataatagagaanatatataagaggtccctcagctcctaactatttcactnttcttcttccattnntgttgtagttcggtgcagcactgcagcggttccaacttccaagtggaacatatgtggtggttcagactcttgcattgccggtgtggaggtttgagtggatcaaaatttngcaagaattcaactctggtgagaagaatttntgtcatactatctactctggttttaagcagtgtacctgaacagagagacctgcactaggttggatggccaccacatagacgccggctcaacaagataacgccggaatattcccgcccagccgaaccccagcatctgatggtactgtatcgtacacgcatgagaaggaagaaatatatttttctatttttgattgccaggtaattaagcttatctagcatcanggctgtgacaacttaatttattaaat

SEQ ID NO: 25140 - DNA, 396 bp, Oryza sativa
  unsure (1)..(396): unsure at all n locations
agcttgtggggtanctccacaatgcttaaagtcatgtactgttgcatcttctattgcttaaggggtaccttttcacacattgaggatgcccttaacacttatcttgaagattccatagataagattgctgacgagagtttaaacgttgtcgaactaagtttcgctatatacacacaaaaattcaatgaaacatgaaaaaataagtccaatacaagtacttggataaaaataactccgctagcttaacctataatagctatacatcaataataacgggctgattcggttaaacatttacacgccaatgtggttttgcaatgaaattaagtatagggtggacatttgcaacacaataatttatggagtgaatgtcagactccaaatgacttatatgat

SEQ ID NO: 25141 - DNA, 433 bp, Oryza sativa
  unsure (1)..(433): unsure at all n locations
taatggggtatttgaaccttgagttntcagggcatcctccgtcttatcaacgttattataccagacatcatagttgcaatggctattaatcccacgaatcgcgatatagcaagaagtatcttgtagagaaatatctttccgatgacacctgaaccatcgataaaaaaaaacctagctcttcttattaactacatgatctcatcaaattttgtacatggctcatcattatgttcttgaaaaatttacttgattgacaagaacaaataaatgcatcaagaaattattggtaaataggataataaaatttaataaaaataaaacataccggtataaaaataatctcacctcggaaaggccataatgttatgatatacttccctattgaatgaagcanatgatgtacttcctccattcctaaatatagctacctagt

SEQ ID NO: 25142 - DNA, 343 bp, Oryza sativa
ctgtgttcattgcttatttggccattccttcttgtatatatcaatatatgtatagctgatccatgatctgatctggcatcattcttatgttataagactcaggctattatcaatgagttggacattgtaagcgtaaagaggcatctggcaaacttattgatagtggtgagctatcttcttattctacctctatgaatatttttcttaatataacaacaatattattcgactcctgtaggaaaaagaggagaataatgatgacatggaacaggatgatgttctgatggatgaaatggatgaataatgatgttgcagctttcatgcatcggactgcaagtgtact

SEQ ID NO: 25143 - DNA, 428 bp, Oryza sativa
  unsure (1)..(428): unsure at all n locations
atgacagtaaaaatccaatcaccacgcgcaaggtcatcttgtgtctcctgaaatcatcagtcgccttcatcaaatgcgtcggctacaatatgtgcaggtaaagcaccactgctgctgagtatgagcaaatagtagattatgtgcttcacaatactatcgaattcacctcacaagattgtcgccggtgaaatactattgcagcttcaagctaaccgatttagtgacgcatataatgcttctcactcatttcccgatggcctctcattcttgcccaaatacctctaattctaatggcgctctaacttatctcaggtgattctagcatatgccccaattntaattcgtggacagtctaatgcatgtacaacttcagaattcacgaataagtctcattccatcccttgtgttgatcttcttgcttcctttat

SEQ ID NO: 25144 - DNA, 420 bp, Oryza sativa
  unsure (1)..(420): unsure at all n locations
ctgcagcttacccttatttccttccnacaccaacttccggcttctttggcaccatcatcttaggtcttggctcaccaatgaccacttcctttcctttagtagattcggattgctccgaccgaatcaacaccttcttattattgaaattaattgtattcaccggaaaaggatcatggtcaagcttcatcttagagccatcggtgaatttcaatcgtccctcatctatggccgattgaacctttcgtcgaaacacattgcaatcattagtagagtgagaatgagaatcatgccatttacaatatgctcgacgtttcaactcttcttgtgatggtatgacatggcctttaagaaatctanattgcttttcttgaaaagataatcaaaaatcttatcacacttggctacatcaaaactatactt

SEQ ID NO: 25145 - DNA, 492 bp, Oryza sativa
  unsure (1)..(492): unsure at all n locations
tactaagcttgtatgatactctaatcttggttatgtaattcgtcgagatattatatatcctatataatctatgacaatagtgntatttaaccttcaatcggccaacatctatcattggaaagcaaccgattacgttaaataccaatgttgccttatattatccaccaccctatgaaacattcaacggcttgattgtctagatattttccttcttttcatacttatagctgcatcagctgagtttgatcttataagtcgtgattagaatctcaatctctaacctggctttggttaccaattatggtagtatcggagtttcagccgatcttacctgatttaaactctttatatctcatatgcttgatcgatagtgtaaatccggccttatgttaagatcttgctgcatttaggatattaagcttcccgtttgataatttcgcttgcgttatatcttaatatagagtgatattggagtactagccgatacatgct

SEQ ID NO: 25146 - DNA, 467 bp, Oryza sativa
  unsure (1)..(467): unsure at all n locations
agcttcagttgccacatggaagtaatatcagtctattattgcaatggtaatacagccaaacgaattaactctagcttgaccctgacagcaagccagtgaaagcatatagcttgggccagttgaattccattggtaaatttcatccatcaaaatgacagcttgctgttcttgagctatcacacacaaatgagttaggtttactacagatcttatccatctacaagtggcccaaggattttgtaacccctctctttacacattgtacctttgcttgcatcacttcactctgaactgtccaatcgtgattggtctcaaaataagaatgttgaggactggtcaacgcggacatgcttctattagcaagatttgaaattntttttccagaagtaggtaaagaagccaattcttataactgctaagccagcagtacagaagttcaaaaaaaaatcttacatatgggtaaaaca

SEQ ID NO: 25147 - DNA, 491 bp, Oryza sativa
  unsure (1)..(491): unsure at all n locations
tatcagcaaagtgctagcanaccgggttcaatgggaaatttatatttaattgatccaatgcaatctgcattcatcaaaggaagatcaatcacggagaattttatactagcttctgacattgttcaatgtgcaatcaaaaggaaaaaaccaacgattattctaaagcttgacttccaaaaaagcttttgacacagttaactgggattgcttatacttggtcctacaccgcagaggattcgacgacacatggatcaattggatcaaacagattttggaaactagacaagcacacatattgatcaatggatcaacaggcgagtcatttaagtacaggagaggggtccgtcagggtgaccctctctccccatatctcttcatcctagtcgctgacgtcctacagcaaatgatacagcangccttccactccgagtnagtactccacccactggattctcactcntcctcctccacgctgcaatacgctgatgata

SEQ ID NO: 25148 - DNA, 441 bp, Oryza sativa
  unsure (1)..(441): unsure at all n locations
agcttggagaagatgtcttaggtggagtcctgtcttataccccagttgagcgcctgtgaagatggagccgtatgcccgctagtccgctgctgtttatttttgattgtcacgcctgaagcgcctttgtaataatgtaaatattatcgatgtaataaagatgtgtcttttatatcatgtttgtatggtgtaccccggcttttcctgngacggtgattaatacactagcgttcgggaaaaggcaattttcccggtcgcgacaagctggtatcagagccatctcgactgtaggataagccaaatggataaaacctaaggacatatcttataaataaaattatttgcgacagttcctctttttctccttcccctaatgctatttgcanaaggattactcttttctttcttcggatttcaactaagtactagatggtcagctttgcg

SEQ ID NO: 25149 - DNA, 455 bp, Oryza sativa
  unsure (1)..(455): unsure at all n locations
ttgctcccatccaccaagtatctcatctagacccatctgcctatcatcccaaactacataggatgacagcttaatacaatattgttcctctaaagtcttcttcagagaagcagccactattggtggatcttctgtgagcttactgataactctgtccttcacccaagagttactggcccctattgctagcacacctatgcttgtatggcatcttctttatctacaacaaaaaagttacagatttgacattatcatttaatggcataaaaggaatagaattgacaaanaaaaacaataaagatntagctacatacctgccaagtttgaccatctagcaaccttgaagcatggatcctccatctgcacctctttgccttgcaataggccctgtaccttgtggcctcagagtanggaactgcaagttcaaccttttaaaacatcatattgccttatac

SEQ ID NO: 25150 - DNA, 452 bp, Oryza sativa
agcttccggcctccgccgccgccgtttcgccatggcctcggagaccgagacgttcgccttccaggcggagatcaaccagctgctgtcgctcatcatcaacacgttctactccaacaaggagatcttcctccgcgagctcatctccaactcctccgatgtaagtgccctcggcttactggttcagatctgcacgcgcgcgcgttagaagggcttttttttggtccgattggtagatcggtttgttcacccaatctggttcgagctgactcgtgtgtgttgctatgtgtgtgggtgtgtgaaggagtttgcactgcaacactggttactggttactgagacatcatcccacataaatctgcgatgtggtgtttcactcccatttttaagaatatgttccattccgacgtaattacgttcttatgtataatctgtggacatgctccagacttaat

SEQ ID NO: 25151 - DNA, 479 bp, Oryza sativa
  unsure (1)..(479): unsure at all n locations
cggggcactgtaaaatagttacacagggcgtgttcatcactctccaatgcacataaaacaaggtcttactagcctattntatcaccaaacccccactttgaaagcactgtttcagatgtgaatcaccctttgctttgctgaatctactcctacatggtgaatactcctaatatagggagcatgcatcaattgtagtggcatgcaacaacactcctatcaagatgtgcacaaagtataatgtgcatacttctcccgtccaaaaagatttaaattgtctagatttatctttagaatttaaatcattttggacaaaggaggtacatcttaagatgagacttaaacggaatattggactcaaatggacatgaagaaaaactcttattgcttcacgttgtctatcagccacgatcaagattagattttaaactacatttagagtaatttaacggttctatataggttattttcagctatacctt

SEQ ID NO: 25152 - DNA, 430 bp, Oryza sativa
  unsure (1)..(430): unsure at all n locations
ncagcttctatcttccgcctgttcttttttgtaggccatgaaactgtagaaccttctctctctgtttttcttccttggtaatgggtgaaccacactggattgatactctagctggtaattgacagccatactagccagtcaacagaagatgactcctttgtggatgagaagttgggaatacattcaccataaaaaagatcaaagttgaaaggacaatgttgaaaagagaacatgaagcatagaagctgaggaggtccttgtcctacttcttgttgagagaaggatggcgcttcaatgattggtctatccaactattcaacctagcaccactagatgtttattttattctcttttcttttttgaaaccaaataaaatggttattggtatagtgaataaaatcccaatttcaagggtgctactattactatc

SEQ ID NO: 25153 - DNA, 442 bp, Oryza sativa
tactaagctttacaaacgtttcgtggctcaacacaaccttggatgctcatctgcgacgcctagccgtctatgagaccttagtccccaagagtaacaaacacaatcgaatatatttgcttgctatgaactcgagtactcaaagtatggagtgaagctcactagctctcaacttctcaatctctcaatccaactctcttcccttctcaaatccccctcacaaagaggcaccacaaaggatgggaaatggggatggctatttgggtttggatgtgtctaatgttgcccaagaacaacagcaactcagaggaggccggtggaggagtttatataccagagcctcctcaaaactagccgttggaggctaatactgtaattttcagaagtttcaaaaagcattttcggatatgttcgaaaatttacaggagccattctcaaattcaca

SEQ ID NO: 25154 - DNA, 414 bp, Oryza sativa
  unsure (1)..(414): unsure at all n locations
agcttttccacatgagttatctttccagngttctgcttccaaaacgaaagttgtggcacctgacaacttttaaattcgaaatacacaacacatgatcatctactgataataactcttttcaatcactgatttccagtttctgtaacattggcatttcaggacagaatctgacagacttgagcttctggaagctttcaatcttcagtgactttagtgatggcaattctgagtaagctggaagttgatcaccacagtgaaatgacaaatataatagcgaaatctgtggcggcaaattatttagtattgggcatctgctaatacagagatgggaaagtcgtgcgaaatcctcattgtttgttccattccagaattgcagagagtacatcttccacagattcagtatctccagtgatg

SEQ ID NO: 25155 - DNA, 411 bp, Oryza sativa
  unsure (1)..(411): unsure at all n locations
tacttatgggtaccttatactcttaggattgatgatccagctgaggctgcacagagttcaatctgggcgacccttggcatcaagcctgacgataaaggcatattcaagtctttccagccaaatgttgcgaanaatggcacggcaccagaatcgcctcaggctctgcaggccaatccagcagcattttcgcgttctcaatcgtttcaagagacgacttgaggagctcttctgtttgttntctgacataaggatcatactgctacctccacaggaatggtcacaatggttctatccagtgtgatcttgagctcatatgttgctagagccagatcaaatctagcaactcanatctggcagagttgccagtgatgaacttggatctgtggtaatggttatgttgatcaaaaatct

SEQ ID NO: 25156 - DNA, 405 bp, Oryza sativa
tgcaagctggaggaaacaacctccgggaagtctatattaccagctgcaatggaagtggagattgtttcgcagattcttggtgtccttcgccgtgtttcctggaaaagtttgtttacaagagtagttgcaatatacattacttttccaggtttccgaagtggattcatcccacactctctagatgtctcacctacttggatatcgacgttaaacaaatggaacgagaacatgtacgtattcttgaagaattgcctgctcttattgtcctacacctagacataggggaagctctcgtgtatggaatcaggatcagccatggtgcattccaatgtttggcacgcctacgtttctgcaacagatctggacctggtttggtattcaaaggaggcatgccaaagctcgaat

SEQ ID NO: 25157 - DNA, 253 bp, Oryza sativa
ttctcgaaatatgagatcgcacatacactatagagcaactcgtcacgccagatatatacgctaaacatcgctgtgcacgctccactagaacccagctaaaaccttataagtaccctaccaacaaaagcgattgattcagaaactatccatttctgaattcacccgagctccaaaccaagccagctaccaacacggttcacaagaagccctcgaatacctaagcgccccatcaccacgcggagggggggggggg

SEQ ID NO: 25158 - DNA, 439 bp, Oryza sativa
gcgtgtatgcacttgaagcttgctttaacattctcaatgatgggattggcaatgtcacctggcttccatcaacatcagcctgcaatttctttgaccgatgctcctcaagcatggtctcatagcgccttaagaactgcagaatatcttcttgctcactgagctctcgtttaatatcattaatcatattatccttcctaagagtggtgaggatatcagcagaaaacaaggctcttcaataaggcaaagcccatttttctttctccagaaaaagtttgttgagccactcattctcacctacatcatgcttctcaattaagttttcccatgctgacaagaattccacctcatcatcacattcaaagagacaatggcttaaagcattggcaaaactccttgagccttcaatacctgcttaagtgcctctttgagtatggagata

SEQ ID NO: 25159 - DNA, 461 bp, Oryza sativa
  unsure (1)..(461): unsure at all n locations
cacagatatgctactaggctcattatttgcttgtcaatatggtctagactatagatgattatatattaatacttaagctatgcaggggaggaggagaaagagggttagcttaccaaacaaaagcttcagccacaaaagattttacaaacaaatgggagaattattttgaatgccaaccaatctgatcttccccaaattaaacacacccatctacatctccaaatcctccatggtataagagatacatggaaattctgaagagcatgggcaggtatactgntaagccacttcaacctttttctaatctgagataccttcttaattaatcaacagaatacttaagtcaattcaatggagacgaggattgtagtagactagctaatccaggagtatgccttatattttcaataanataagggtcgccctaactganatgaaatcatttttcaaaaattaaaatg

SEQ ID NO: 25160 - DNA, 435 bp, Oryza sativa
  unsure (1)..(435): unsure at all n locations
agcctcgacacgctagatccgggagtcttcatcttctattgtaccggatccgcagccatgaactctgctggcggcggcaaacagcgggactcaaagggagagtggcgagcgtcatgtaagccagcggcgacggcagttgcgagatggcgatgcatttctctcttccttttttntatcatttttttcatttctttttctatccgggtgaccgggatatcccgacgattaatttataatagtgtaatttaatggttggcacaattttttgggacttcctagtttggcgaaattcttcgtcattgaaatttgtgcatctccaagaagtcagtaacactgcatgtaatatgntgttattctctccaatacgaagaaactatactcaatattccgaaaacttcatcttggacttaggntaaactcaatttaatacccatg

SEQ ID NO: 25161 - DNA, 380 bp, Oryza sativa
  unsure (1)..(380): unsure at all n locations
cttatttgtagcctgtgtatttgatctgtgcagatatgtggcacaagttttaatctacagatagtttcagaagattcttttnttttcccaatatgagcacatttttgtattctatcatgggaactataggttatttcttaaactatttggtattcttagttaggaaatttggtatttcacatgtatgcacttatttggtttgttttacatgaatgtcaagtgcgcaccacgttttaaaacttattgttattatatctcaaggtttaacatgctggagtaaatatntattggctctgacatatngcacgaatgggtaacctttcgatcttcataatngatataatgtgcctttgggacatatacctttgaacatactattt

SEQ ID NO: 25162 - DNA, 281 bp, Oryza sativa
ctcacaaatggggggtctcacgattccccgctattgaggatcttccctcgacagattcttaacatgatcttcaagctcttggaaattttcctttggggctatcttacttctaaatcatatgttttctttgtgctccatccaaacagtttcttgtgttttcatttcttaggattcgaggtgtgataacatttgaatcatgcgtatttcctaattgtgtgttttgagaattctgagttcgaaaggaactcttaataataattactacccgcttcccaaataca

SEQ ID NO: 25163 - DNA, 217 bp, Oryza sativa
ttgaactcagcttactgggggatggggggctggcctgctgggttcttttttttgagaactgacctgtccatagggggtcgaaattacactcgcgcttcgaaaacccaaaatcctaacggtcctacctgcgcgccaagtcgggaagaactcctctttggaccggaggcccctttggaggtcgccgggcacttatgagatccaggcttgcgagagaatg

SEQ ID NO: 25164 - DNA, 397 bp, Oryza sativa
  unsure (1)..(397): unsure at all n locations
agcttcttaattgttggtaccaaaaaaagagcatcggatttagtagcatcagctgcaataagggctcgttgtcattatgttaataaaaagtggttcagtggtatgttaacgaattggtcgattactaaaactagactttctcaatttagagacttaagagcagaagaaaagatggaaaaattccaccatctcccaaaaagagatgtggcaatcttgaagagaaaattatctaccttgcaaagatatctcggcgggatcaaatatatgacgaggttgcctgacattgtgatcgtcctcgatcagcaaaaagagtatatagctcttcgggaatgtgccattntggggattcctactatttctttagccgatacaaattgtgacccagatctcgcgaata

SEQ ID NO: 25165 - DNA, 467 bp, Oryza sativa
  unsure (1)..(467): unsure at all n locations
tcttcccagcatacggctntctagatgtatatgacgatctctatacagatggatcttatatgaatcgtatgatgaagtaccacatgagtggatatataggaaaggaatccaaatctgccgaatcgctcatgttatgatcttctacatcctaggtctccgcgttccgtcatctggcttatgttcttcatgtagcattcagatcgaatgactctatgagantacgtcgatacttctacatattatgggtaacgtacgagacatccctantttcccccggcggtcttaattaccactgcttagctntcaattcgcctctgaccatcaaattaaatgtgaataacccgtcctcctctctttgaaacaaggngcgcttccggttctgtgcgtgcttcanacaatattgtcttctccatattaccatatctctagagtcaataattttctatgaggaactactgaactcaata

SEQ ID NO: 25166 - DNA, 467 bp, Oryza sativa
  unsure (1)..(467): unsure at all n locations
agcttcaaaatcagtaannaatgacaactgagcatgggccanaatantttttttccttttgactaactgatgtactgtacattttgacatttgtcatttcctctcatatacacattggaaaatcgttttgatgatcagcagatcctataaaaggcggatgcagatcagagggagccagagttggttcatcgtctatctacaagcttagagcattcaaaagagaaactctgatctggatcaatctcctgaacaaagtctcaactccgctctcgagatcaacgatggcgaactccaacgcctgtaattgctcctcctggcatgcaagccttgtcttctgaaatgccttggagacaagtgaccacttgctagaatttgatgttgtgatcttctttgacaagagatgtgaagaggactcaagcattgagatggcgacctctctagcttcggccaacagcttgatcaccctg

SEQ ID NO: 25167 - DNA, 382 bp, Oryza sativa
  unsure (1)..(382): unsure at all n locations
gctcacaaaggtgagttctttcaagaatgctctgcaagacaacatcttcgctaattaaagtctacataacttattaacgcatagcctacctgccttgcagctcacgagagtacatgcatcttcacttggagagggtatatatatggatactctcctctagntgactaatggattgttcttcccaggatctaattcacgggatctccgatcacatagactgggttaccaccatagtataactcacatgggtctcaaacccatcttcttcgatgcattagttatcacacttcgtgatagtcccttcgcgaacggatctgccaggtttctcgctgtttggatgtaattcaacgttataactccggagtttcttaatttcctgaca

SEQ ID NO: 25168 - DNA, 412 bp, Oryza sativa
  unsure (1)..(412): unsure at all n locations
agatgaatggtctgctggttgtgccatcataatcaccacagatgatgataaagtggccgagtctttctctgcgtataaaatcttcaacccagatagccccggntatgttctcgatttcttccttagtaaagctatagctctgcttaaacatgaaaatgaaaagcagctaaggaaaatcctaccgtgcatgctgatccatcttgaacctgaaaccttntttatgaagatgctccttcggtacctgtattatgggagatatgctacgttacgactgcgtgatgcactgcagcatacgtcatcgctgcatgattattggcctaagaatatggtatacttatgctacaattatttgcctgataagtaccggagctgcatgctgtatctgtctattttcccacctggttgcagcatc

SEQ ID NO: 25169 - DNA, 347 bp, Oryza sativa
cgaccaccgggttctccagccacttctgatggatgacttcacggatgaatccggcctccagaagtctcgccacctcctcgcggatgaaggcttgacgttccggggcctgccgccgcactttctgccggaccggccttgcgcccggccgcacggcgagacggtgctcaatcacctccctggggaccccgggcatgtccgctggtctccatgcgaagacgtcagcgtttgcccgcaggaaggagacgagcgcgtcttcctatttgccatccagaagaccaccgatccgtgtggtcttggatgggccgtcgcccaaggcaacctccttgaccgggacctcgtcgcatgtg

SEQ ID NO: 25170 - DNA, 423 bp, Oryza sativa
agcttgcccatgataacacacagttattctgtttcatgctagttcatccaggatccgatgatagtgccccttgtcacaacaagaaacagtaagtatcgtattgaaaaagaaagatcttttttctattgctcctattgtttgatacagcggcagagccacctcctaggcaggacaggtggctggacacatacacgactgactgtgacagcctattatttggccatatgcctgtatgagacctgctgctaaatcacgtaacttttaagttgaagcttaactgcctattgatgtaactatgccaggactactatggttgccttaagagtgtgagacggagtattgtcaaggagcacatgaggtatactcacgcacatcaagcaaagtatatgaaggctctactgctatcgggtaaatccatgaatt

SEQ ID NO: 25171 - DNA, 446 bp, Oryza sativa
  unsure (1)..(446): unsure at all n locations
tcatgagttctaacaaagggataactcggagttctttggctttctcccgagacacaatggcatttcagaatctgccaccgacttattgaacttctcaaatccctctcattatgatctgggtcttcaatatcatgcaacatttctgatagaagttgtggctcgaaatctatggcatctccgcctaatggcgaanggatgaaaataccatctcaacctactgggtngntcactacatctggcacctcattagttgcaacatctagtgtcttttgctctccatacttgctccagcatctgtagtggtccacgaatcctctatggatcagatgagaatgtacccatgaactctcatcgaatatcttctcattttatagtncgcagatggacacaacatatanttactcatccctaatttcctatcattatctgcaaaatatacgaaatct

SEQ ID NO: 25172 - DNA, 467 bp, Oryza sativa
  unsure (1)..(467): unsure at all n locations
agcttatggataagatgggcccacatgacaggtgcaaccgtgggaaaccgctntacttgccacaactgcctaaaggactcacctatcagccactgtacccaagggaaggtcggttggagccgacccaggggttcggccgaaccaggggcaagccagctaggtccccccttccacgtggacgtccagaattgcttctcaatgacggtgacaagggtaaaatggacaattcgcatggnggtaaccgtcataccgaccctataaaaggaggagctcacttcacttctcaacacactcaagcaagttgacacgcccgtaatttctatccaaaactccaaacgcttacatgagtgtaaaccctcgtccaagaatcagccgacgcacacaataacagattgataatatagtgcaaatattaatctaattaataggcgaatataaagtcattacagaggtagatagctcctctc

SEQ ID NO: 25173 - DNA, 454 bp, Oryza sativa
  unsure (1)..(454): unsure at all n locations
actcaagcttacttactggcctcgtctggagccatatcttttatctaaatgcttcgatcggacgaccgatccagcgcaaactatcggacacttggacgatggacgcaccgtacaactcttttttcagattatgagccaacatgcatattgtctctttttcaataccaaaacctttctctcacataagatagcacacatactactcttgccctctcttccctacacatgcatgcattntttttaataagctttagatgttgttttccaataatcatctatcaaatttgtgattcgattacaccattaattcattntaattaaatctgtataataagatatcacatgactatattctgatcgaaatnatttatttntatttttttttgcaatagatgttgtctaagtttttcacattatcttatttatatatttcaataagtattcgattatccta

SEQ ID NO: 25174 - DNA, 459 bp, Oryza sativa
agcttgtgcctgtttggagagatcatcataaattattaaagtatgccgctcgcggtacataaaatactcagccagggctgctcccgtataaggagcgaggtattgtaatgtagcaggggaatccgccatttcagctactacaatagtgtattccatggccccctcttcatggaaagtagttactacttgagctacggaggatgctctttgaccgatagctacataaacacatattacatcttgccctttctgattgagaattgtatctgtagctactgctgttttgccggtttgtctgtccccaataattaactctcgctgaccgcgcccaataggaatcatcgaatcgatagcaataagccccgtttgaaggggttcatatacagaacgcctggaattatacccggagcatgagattaattaagcgagatccggagctacaaattcgctctccatcat

SEQ ID NO: 25175 - DNA, 491 bp, Oryza sativa
  unsure (1)..(491): unsure at all n locations
ctcattntcgngcttatcctagttgatggtttattttatgcatgtgcgaaaggagccttggaatggtcttaactgaatattcagacaaaaaaaaacaagaacgaaaagattccattaagacagctatgagtttgattgagtttcccctacttgaccaaacaagttccaattccgttatttcaactacactaaaagatctttcgaattggtcaagactctctagtttatggccccttctatatggtaccagttgttgtttcattgaatatgcttcattaataggctcacgattcgactttgatcgttatggattggtaccaagatcaagtcctaggcaagcggacctaattttaacagccggtacagtaacaatgaaaatggctccctctntagtgagattatatgaagcaatgcctgaaccanaatacgtcattgctatgggagcttgtactattactggtggaatgttcagtacggaatcctatagtact

SEQ ID NO: 25176 - DNA, 366 bp, Oryza sativa
cggatcttaagcacctgggctgcagctatacgggaactttccttgtgtcattgtttacaacagctagccattcgcgtgttactttctaggccgggtacggccgtgatttgcttattatcatgggccctgaatatcaggcatatatgggaggtgaggagaggagagaatgtttatcaagcactccctccatttaataatgtacgacgccgttaacttctacataacgctaactatttatcttattcaaaagttacaataactatgtagatgtatacgtcaatatcatatttcatttgatcgtaacacaagtcatgaacatataaatgatctctatataaaacaatataatgtgactattgtccatcg

SEQ ID NO: 25177 - DNA, 326 bp, Oryza sativa
  unsure (1)..(326): unsure at all n locations
gtcttctcatagagtacctatgcaaactaactcctcgaagacaactttaaaatgtatatgacatactgcccatacggatagctttatgaccaaaacagtaaaagaacgattgttcttagtctgatatgctgattgttcttagtttgatatgctgtacagagagcaacanagtaaaaaacttcaagtgctttctgaacccttattatggatgagcttcatggaaccaatcgcctgctgtcacaataacatcgagcanacccatttcgactcctgagcatatctggtaattgtatctcagctaggtcatgtaaaaggaaccctaaatc

SEQ ID NO: 25178 - DNA, 484 bp, Oryza sativa
  unsure (1)..(484): unsure at all n locations
attacggaccttaaaactaagcttgtaaatcttgcgtagccatgtatctaagtctatattcatgtatgcatctaataaaaaaccatgggtagttgggtggtattacgttttctttagcaatctataaactacctcttctcttaatttacttcttcaatctacgatccatggcactattaaattcgctgcaattaaatctttataataagaccacatatggttatattttaatgaaaaaatatttagcatttttacatctcttttatatgatgcacaaattttatttaaatgtttcaactacaatacatatgatgttgcactagttaacttgcaaatgttgcacctgtgttttctggaatgtttcaggaagtaatttataatgtttcaatatctacaatttaatattaatatgngatataaatatgactttttttcgttctttggacttaatgttccatataggtgggtactattgttgcaatcg

SEQ ID NO: 25179 - DNA, 406 bp, Oryza sativa
  unsure (1)..(406): unsure at all n locations
gctttgggtnnttggtggtcatgacattcatccccgtcttatangcttggntctggtattcaatcctatagagctcagcgatgccagatctggcatgggggaacacggcaatggcgggtatggcagtggggagctcaacgacgacgagtgtggagctaggagctcagcaactgtgactgtggcgctgggagctcaatgacagtangtgcagcggcccggagtggtgatggcaaatccggtgttgggaagctcgtgatgccgaatctaacactcgagagctcgatgtcggcggtccggcggtgccaaccttgagaggtgcagatccaccgtcgctggcctcangagctgtaaggcctcggcggcgaccgacagtattgatgaggacgatggcagcggcaattgatgt

SEQ ID NO: 25180 - DNA, 384 bp, Oryza sativa
  unsure (1)..(384): unsure at all n locations
ctatgctcacggtggaacgctcaacccagttgatggctccctggtcttcaacgatcagatacgcgaggctgcgcgtcgactaatggacacagtggaagcctcttctcagggcacgttccgacccgacagagagaaggacgagctgtcactcgccctgcagactctagagcatccaggacgaacacgagggaaaggggtgattccttggaagattggattcaggaggacatccacacgtataggagtcgaatgaggagcaagagagataccgaggcgaagattgcagatcttgagtacagggtatcgagctacgagctcagcatgcangaggaggtggcaagaaaggttgatgaacgcatggccgcacatcggtcccatgatccc

SEQ ID NO: 25181 - DNA, 131 bp, Oryza sativa
gatgatgagatatcttttcaaggaaggcaggaataaggacggggcctcactcagggacatattgtccaagtttgctttgatttggctttgctatattgtaggcattgtatacgccttgggtgttattttcg

SEQ ID NO: 25182 - DNA, 411 bp, Oryza sativa
  unsure (1)..(411): unsure at all n locations
ctaagcttncagtctagctcgtttatcttttccgttgcattnggcagtctttttctattttgtaagacgtggatctggttgtcaacaattgtcgtttgtgtaccctggctggtcctggacagggatttaatgcacattcagcttagaaattctggttcgtgaatttctgggcgtgacaagccaccgggcttgagcggctgggatggcctcttgggcctcctcgaagctggactcgttatggcgaagtcaccctccttagtcacactcttcgccacatagtcttcgcccaagaagccttcagccttgtgagataccagcgtgattcttcatcattcgccatctttgcttcatagacttcgccatgggggcttcgccccgacgaactcgacgccttgtgcttgaaccctcact

SEQ ID NO: 25183 - DNA, 456 bp, Oryza sativa
  unsure (1)..(456): unsure at all n locations
agctntagaatntatagttctatgataactccaaatttattttgagagtgataacttcaattttaaatatgtagttttgtaatactttattataaatctatagttttgttataaaaaaatagttaaatttgtaagtgtataacatgataaatctataattntgtgataattcgtttaatatattatagtttttgaaatttagtcctttacttttggatgaaataagaaggttatattgacttggtcatggcctgcatcaatttcagtagcagtagagtaggtgcatccacgatgtgcttgaaaaaagcgataccccatcaacatgttcaataatacatttatataagtgctataaatcatattgttgaggagagatcctcaatagcggggaattgtgagaacccccatttgtgatttcggccggggcggaagctatctcttgaaatactcgctcgt

SEQ ID NO: 25184 - DNA, 397 bp, Oryza sativa
  unsure (1)..(397): unsure at all n locations
tccggggggacgacgacgcggcggcggcggcgacgctcgcgtatgcgctctacatcgncagcatgggcaccaaagacttcctcgagaactactacgccatggcgcgcgcccaagcggcggagtactccacggcggtggcgtacggcgactacctcctcggcatcggcgcatcgccgagtcgtactcgttcgtccgcgagctgcacgcgctcggtgcccgcaaggtcgaccttaacggcctcccgcccatgggctgcctcccgctggagcgcgccacggggagcggcggcgcgtgtaccgacgagaaaaacaccgtcgtcgagcgcttcaacgccggcctccaggacatgatcgcgaggctcaacgatgagctcggcgacggcgagatgatcgtgtat

SEQ ID NO: 25185 - DNA, 454 bp, Oryza sativa
  unsure (1)..(454): unsure at all n locations
agctngngttcccaattcctctctatcgtatttcgtgcgcacactnttcaaatngctaaacggtgtggttttttaaaaaaaagtttctatgcgaaaattacttaaaaaatcatattgatccatttttgaaaaaaaaactaatacttagccctaatggaccgctccgtttccgtgcgcactgtccatgctgggaacagatgattccgaacatagccctagtatgcaagcagtattgttacgcttatcaaccaaaatttgtgttttcaacattaaatttagagttgattntagagttttttcatcatagnttatttttaacatttggctttagatattttttaagaacacatatatataagagttntatttaaaaattatttttaatttacaaatatatcngtgtgatttttntctcctatatgtgaaatgatggngctagaccttttcacgaata

SEQ ID NO: 25186 - DNA, 490 bp, Oryza sativa
  unsure (1)..(490): unsure at all n locations
tcanacttgtgagaantttgccaggtgcactttgtatggattgtattcgcctataaaatgtaattgcctagtggagcgatgtctcctgtagagacaatgtgagttgttttgcactgcatgctttcttctttcctttgtactaatagacaagcaaggctcctgtcactttactcccctccaccaccaccacaaggaattccccttttggctcttaatatgtgaatatctgcagttcatagtccatattgtgtatgtgcatcatgctatccatgcacttgtcttactagttcttgcagccaagctntggaactggtgcaccaattcttccaagaccactgcctgcttcagtcgtggactctacgatatcagaaaaggacaatgatgctgagaaagagaactcataggaagagaaggtatcttgtaaaaaactaactctcgaagtttgatctctgattcaatgaatctagcatnttaagtatgctaaatcatc

SEQ ID NO: 25187 - DNA, 448 bp, Oryza sativa
  unsure (1)..(448): unsure at all n locations
gcaagatgcggttttgacaagcacacattgaatgaacacttctaggcattatagcttccttggctagtttgtcaaccactctgttaggctctgctcctcttttgctactttctaaacggtattgaatccctgtaataagttagaaacatgcacaatgtcacatgagtcaacccaccaagtattaaaggaaaattcaacataaaggaattcattaacattagatatttcttcaaaattatggttacctttcttagctaaccacactttgaaacatgagcaattcctttgccaatatccatctacctcgcagaaagggcagtgtggagtcttaaaaggggcatctttagtttgagagcctgaactatcttgcttactcccacttggcttctgagaagttgttgacttgttcttgttgctgntagaagcgtctccttgatacatctttctt

SEQ ID NO: 25188 - DNA, 362 bp, Oryza sativa
ttgacagatgcagacatactcttgaagaagtttctgacactggggtctataggaatcttcttttctggacttcgaggcttgaattgtctcttgacttctgatgcaacgtaagcgtcaagctcctcttgcgtgcaatcgtaccccgggtccttgttcttggcggcgtcaactttcaccttctatgttgcccttgtgtgggcaagcggtggagctggtggggcccttgactttgaaggtgccggaagaggagcttgcggcggagtaggtgtatgagcaccacgaggagtctgtgcacgatcctgaggaggagtcgatgctggagcctgaggtggagaccgtgctggcggagcatgaggaggaga

SEQ ID NO: 25189 - DNA, 472 bp, Oryza sativa
agctttcacgagccgagccaagtctggctcgtctcggtttggctcggctcggctcgatttcacccctaatcctatacgcccacttgttatgcgaactttctatcgactattgaccttcagtgtaaggcaataactgcttccaccgaacaagatacagtgcttagcaccaccaatctgacaaaatcagttacttgattactcatctcaagaagagaaaaacacttgatcttcagaggtagagacgctgagtgtgagtggttagccaactgccttatccaacatcccaatgtgacaacgcgttaatgccagtgcgactggccggaatcaattcagaattacgattggatgaaagattttggtggagttggccaaaagcccatgtatacgcttctctactgcattcctgtttcgtcaatcaaatgatcacccacaatcacattgatgctgatacaattattcccctaaagaacgt

SEQ ID NO: 25190 - DNA, 416 bp, Oryza sativa
  unsure (1)..(416): unsure at all n locations
aagcattacccattcaacgcaccaaccaagagtgctcgcgagaaacatgtcttcctgacttagaacattggtgcccttcaacagcttatagctatcgaccacagagagaccacgattgcacttccctaccatatcaaagacaataggttggagatttagtggggttttactttttactcatatgttatagactaatcaagtcaaatccatctcacctccaggtacattgtagtccaacatctgcttcaaagaaaataaacaagttaaattgagcagttcccaacagtgacaatntaactgataagatcatctgtcgtacacccaatctattgtgaagctttacattatatataataagaaaagtagcaaatggagaaagcagtaggcgactaagccgaccatccatgatccatcta

SEQ ID NO: 25191 - DNA, 410 bp, Oryza sativa
  unsure (1)..(410): unsure at all n locations
agctttctcanaatcaatcttaattattacactcacttttatctttgcgatgtaattcatgtaaagtctcatgtaaaataaccaccccttccataatatttctcccaggaatgaacgctgtttgagaaggactaattaccttttgggcaacatccattattctatttgtagcaactttggtaaaaatcttaaagctaacattaagtaggcatataggtctatattgttgaatctttaaagccttagcacacttaggcaaaagaatgatagtaccaaagttaagcgaatataaaggcaaactcccagaatgaaagtccttaaatagttctaaaaggtcaaatttaatgacattccagaacacatggtaaaactcaacaggaaatccatctggacccggagcttnntgtatg

SEQ ID NO: 25192 - DNA, 399 bp, Oryza sativa
  unsure (1)..(399): unsure at all n locations
tanagccatgaatcccttttatgcatatctggatctggatcctgctgaacaaacatataggatgagtagtatctaatataaatataatactcgagaaaaaatcaagtattntaaaatatgtatttcttctcttgttaattntgatttccccgagcagatgactcattacgtttaaacactctgcccgactagtcatagccaccaagcactgggagtcggcctaagcacttcccaaacatgcatatgagtgacatgagttcgtcattaatggaacanagtttcacggatcggagtttactactcgggtactnttgcaattattaagagcagaaaataaatntatctcatctctattgctttgattattccgaatatacttgcaccttgcgtactcggtca

SEQ ID NO: 25193 - DNA, 435 bp, Oryza sativa
  unsure (1)..(435): unsure at all n locations
agcttatagttcgaggacttaatgttctacaatttaataatactgtcatttctccactctttctangtctgggtatatggagacagcttcacatcaatgttagtggcagtagttaatccacatgaagagaacaccatgaagtgggcagaatcaaatggctgcaatggttcttttgctgaaatatgcaagtctgaaggccttaaagagcatatcctgaaagagctgcaatctgttgcagcaaagaacaaggtacattctttatgcaattccacagtggagaaaactgaacatatcacatgtttgatcattctatcccttatagtatcctaataggctaatactatgttcaacatgattttcttttcgttggaattagaacaaaggaaacttggaaagtatttttagattcctaatgtctaatcatgtgagatatag

SEQ ID NO: 25194 - DNA, 377 bp, Oryza sativa
  unsure (1)..(377): unsure at all n locations
aaatgagacacacatcctagttctacgattctggatttgaggtatgcttaaatttacagtagtaggatataccatattatatactaagttgttatgttttaggatgtcggattttgaaccagctgtgatttgatcttatatgtactagtggcaccgccagttaccggngattaccaactactctcatgtgtgttaagttaaccatgcatacatgaatgtagagactgggatgaatatgttgattattatcttataaaagacattagatagtactacatgtgattgtgaatgtgtgtttagatattaatgctatgcaagaatattgtactatcgccatatatataatcgngtcaacttgtttgatatattnacatata

SEQ ID NO: 25195 - DNA, 445 bp, Oryza sativa
  unsure (1)..(445): unsure at all n locations
agctntcttgtgagttcttcttcagcaggttgtccgaagctgcatggatgatagatgcttcagttatatcttgcacctggcaccgtgcctgcaaaaaccggcgtacgtactcccttgtcgattcccctggcctttggtgtatgcccataaggtctggttgagttttcagctcctcatangtacctcgaaagttaaggacaaagacatcatgcaattgcttccatgagtaaatgctatcaacaggcaaattgaaataccaagatctcgctatgccatcgagcgcgaggtgaattaccttcgccttggtattctcatcgccatgagcagcttcaattgcagatttgtagatggactggaactctttcggatccatctctcccgaataccgtgggactggagagacttaaactanggtgggatgggatgattcttgattcctcagctg

SEQ ID NO: 25196 - DNA, 429 bp, Oryza sativa
  unsure (1)..(429): unsure at all n locations
nttatnctttctgatctacttcatttacttgccaaggagaatgactacatcacaatactgagaagtaagttatttccattttccttttgaatgggataaggtgtgtgttctgaacaaaattgtatatttgattgtttacatggaagatttgtaataatgaatgcactaatgtgattgaaaattaaagaagggactgaattccctagtattntgtgggaaatgttttcaaacgtcagtttaaacttcccacttatgaagataagataatgagccctcacacttatttaatttagggttgtcaatattacaccaacttaataatatgtaccatgctttatgattctgaagtattnttgtttaggtcccgatgcanatcctatttttttctttgagaggaacacatcctttttgattaataacatgtattga

SEQ ID NO: 25197 - DNA, 397 bp, Oryza sativa
  unsure (1)..(397): unsure at all n locations
agctntacaagatgcaagtntgcgtatgaatatatcaaggtggaatcagtcagggctggatgttgctcagaagtttgtccctaccaaattgcaatagcaaaaattacttattcatgagcgatatctgcaatgcgcagcatcatgagctgtgtttcctgagcagatgcatattatttgctccaggataattaatttaatttttgtaatgagtatctattcgcaacaagcagtgcaacattaaatgattctgctattacttgtgtgaagtttatacagtagtcgtacctgaagtttctgtgatgttggtgtgggtgcctaacccgacgaggcgcaaatggcttctctatgccacgattagtaattctgagcgatatgattctttttcctccaattttca

SEQ ID NO: 25198 - DNA, 398 bp, Oryza sativa
  unsure (1)..(398): unsure at all n locations
agctngatcaaccattaacaagtaatcctaatgtgggatgtgtttggtcagggggatgcagaaatagtgcttcaggatccattacgcgttcaaggccttttgttcttcttcgcatccgttattttggcacaagtttttttggttctcaaaaagaaacagtttgaataggttcaattgtacgaaatgaatttctaggtcccgggatttcttaccatcaagttggtaaaaagccgcgatttattggcgattgctagaattctctatgatccattttggaaatcttttttttgtttagactatcttttgtttgcgagatgtcttgtctgcaattccttatttctatcatctcatgcaaaacgaggagaatgcaaggcatgggcgagaacaatataaggaac

SEQ ID NO: 25199 - DNA, 468 bp, Oryza sativa
  unsure (1)..(468): unsure at all n locations
ggagagatcatcataaattattaaaggatgttgctcgcggtacataaaatactcagccagggctgcttccgtataaggagcgaggtattgtaatgtagcangggaatccgccatttcagctactacaatagtgtattccatggccccctcttcatggaaagtagntactacttgagctacggaggatgctctttgaccgatagctacataaacacatattacatctngccctttttgattgagaattgtatctgtagctactgctgtttngcccggttgtctgtccncaataattaactctcgctgaccgcgcncaataggaatcatcgaatcgatagcaataagccccgtttgaaggggttcatatacagaacgcctggaaattatacccggagcangagattcaattaagcgagattccgatgctacaatttcgcctctccatcaatacgttagccagacatttat

SEQ ID NO: 25200 - DNA, 412 bp, Oryza sativa
  unsure (1)..(412): unsure at all n locations
ttaatctggttcttcaatggtaaaaccactctggtaataaaactaactcttattttattattaagccacatatcgactttggattcaaaatggtgggtggagatgtcaatggcatacctggcttgcaatcggttgtccgggtaactaattttctctttaacaattatattcccacagaggacanctgaattgaacgtnctgatggactcttgtagtttaattgtacccatttaattactactacgattccttatttcactatcttgggtaccagtactatgttcctagcttgtggacttcttaattattagtggttttggctttctgacaggagaaaatatcanagcaaatcgcaaacttgtatcactggcctaagcttatacaaattccctatttagatgaagcgaggtga

SEQ ID NO: 25201 - DNA, 458 bp, Oryza sativa
  unsure (1)..(458): unsure at all n locations
tgtcttcaccgctcaaataactcagcagcaaactccttacttgccttactttcctttntaaaanngcaacatgttatcaaaatatgaatgtaatgcaaattgaactcaccaaaattttgcaagagcttcaaggttcatgtaggtatctattgttcagaacacanaaggaaagaaaaataaataacacgaacattaccttctttgaggaacttgagctgaaccattggctcgttgcaggagattgagcctgaggaaatcctgcatgattgcaccaaatataaatggttgtcctatgacatagctaattntcccagcatgaattcctattgaagggtgcattccttaccatcgatatctggatcaactctcttagcatgatgctntgatttctgtaaagcaattaatcatcacactattatncngntgtgttgtgcagcacaacttaatgaatctgactg

SEQ ID NO: 25202 - DNA, 445 bp, Oryza sativa
  unsure (1)..(445): unsure at all n locations
gagtggaaaactatggttgatttacaaactgagaggaaggtgaaaatccttcgtactgacaatgggatggagttctgttctaagatatttaaatcatattgcaagtctgaaggcattgtgcgtcactacaccgttcctcacacacctcaacanaacggcgtagctgagcgtatgaacaggacaattatatcaaaggcccgttgtatgttgtctaatgcaggtttgcctaaacaattntgggtggaagctgtttctactgcttgttatcttatcaatcgatcacccagttatgccattgataagaagactccaattgaggtatggtctagttccccagcanattattcacacttaagagntattggttgtactgcttatgctcatngtgataatggtaaattggagcctagagctattaagtgccattttcttggttatccgtctg

SEQ ID NO: 25203 - DNA, 162 bp, Oryza sativa
  unsure (1)..(162): unsure at all n locations
gagcttattgagccgagcctgagcctttactgagnttaccgagcttatacataacggataagttatatatgtttgttaccttaatgagttaataaactaatggatttatatatatatatatatatatttatatatttatatatatatcaatattatatatct

SEQ ID NO: 25204 - DNA, 466 bp, Oryza sativa
  unsure (1)..(466): unsure at all n locations
cctgcggcatgcaagctgctaatatcttcttgtcagtacattggttactaatgctntgatgtgtaatgccaagggtatcatcctaacattggtatatatttttagccttctgtatggaatgcagacatggtcttctttgcaaccacagcaacagcttgccctacactctgtgctgtcgtcatagctaaccaaataacctgttagtactgatatatatggtcttctttgcaaccacagcaacagcttgccctacatggtcttctgtatgcttgactaaacttgttacttgacatatatgcttgactgaacttgttgcttgactgaattattccttacacatactgtagtacttgcttgactgaactatgtcaggatcttaattaaaaaaatctatgtcagcactgctactatgtcaggatcatcagtatgatgcttaagtaacctgtagtatgtcagtacttactat

SEQ ID NO: 25205 - DNA, 346 bp, Oryza sativa
  unsure (1)..(346): unsure at all n locations
tgatgccatcacaacaatcactatgcttgtttgttactagtaagagttaaaggaaattgattcttaagatcaagagtgatatactagtttgatcactctttcatgttcaggtctattttcgaaagaaacagtctactgtggcaaaagttatgagcacaatgtaggatcaaattacaataactaagccaaccagaggggggtgaatggttggtatacccgaaaaccgaaaacttttagcggaaataaaagttatcctcgaattcgatggatcgcggtctgaccgaagttgtcctgccggtctgaccgcctggntgtcgtcggtctgaccggtgtagatcgattggtc

SEQ ID NO: 25206 - DNA, 128 bp, Oryza sativa
  unsure (1)..(128): unsure at all n locations
agcttntcaataaggtgttaggagttttaaggtcatttttcggcttcgntggatgacatttgtatttagattttaattcctttacttggtactacctccgtccaanatactgtatcttggaatgcata

SEQ ID NO: 25207 - DNA, 357 bp, Oryza sativa
  unsure (1)..(357): unsure at all n locations
cgctagctcctacngaatcgctcagaatcgtttctatcagattatcagatccatgatcttgcattgggctcttggcgtataatgaacgcgctagcttgatgtgcatgtatgatctctctgtaaattaaagtcgcttcatgggtcatgataatngacaactgacaagcaagtttcaagtagtatttcggtatttgatacgattctgaaacaaagcaaaattgaactcaagacgattcttctagtagcagactcctctccagctgtaacctgcacagctgagctgagccgtcttaaggctgcacattcctccatctgatgttctaaactacaggccacgtacaccaatcatatctctaa

SEQ ID NO: 25208 - DNA, 461 bp, Oryza sativa
  unsure (1)..(461): unsure at all n locations
agcttangacaatgcgaacgaagatgatcaatttgtccacattcaaagcaacgatttggaccacctcttttcctgttcctggcattattcatagctcgagcaattctgttagcaaccaaaaccaaatcctcctcgnattgttcgagttgatcatcggatgtggcattaaaaatagcaagaaaagaagacttagaatcaacttttcgagaaagaacattcatctcatgtgttttcaattntgtataaagtgaatccaaagtcaaagtagacatgttaacagattcctgaatagatgtaactntcatctcccaaatagacatgttaagaccattcaaaaagtggcgagaaatcttagattgtggataattagcatcataagaagaatcaacagatctaagatcactcanaattttattaaaccgagaaatatagtcatccaaagcttctccaggtttcatctc

SEQ ID NO: 25209 - DNA, 465 bp, Oryza sativa
  unsure (1)..(465): unsure at all n locations
actatgaatactaagcttgtgattaatcctcagagcagacctttgggaggactatatctnntcgtctgcatcgnattttgacaaacataaacaatcaatattntgggagttgtttggtcccctgtcctgcattctgtattttcagtgaagtaccaccaaaatgctctacaagttcacactaagctgagaaaaaattagccattttgtcaagattatgtgccaatcacttggccaagtttatcatgtggtgaggtctacagtggtgaaatgggtttcccctttttcttgtcattcaagtatacctgattttttccattgtggttgatacactggtcctttcctgggatgaccactgaatatgtnntgtggtatgctctgttttaacgtctganagtggagatgctgtgcataccagtgtttctaannatggtaaacactgngtaccgttctactcccttcgtcaca

SEQ ID NO: 25210 - DNA, 461 bp, Oryza sativa
  unsure (1)..(461): unsure at all n locations
agcttgtacaaattacaacagnggaacgctatattaaatatcatgtacagggaattgagagagcattccgagagaagtntcctgcatgctcaattgctgctaaaaagcatattgatacgacaactacaatactggatgtccacggtgtggtatgttcaattgtccatcgccacctaactatgtcttcttcttgctagcagttgtctaataaaattgacaaagaatatcagtcctacattaagatactttcatgctcacaataaagacatttgcctgaactaacaatttcttaaggtgttgatacattaaagacatgaagttattgaaaccatcaattggaaattagctttcatcattgtttattaaacaccaagaacatgtaaaaataaatatccttcatgatattgagttgagaatcatgttttaaaaggaaagcattgtcctagtcacaattgtatgat

SEQ ID NO: 25211 - DNA, 418 bp, Oryza sativa
  unsure (1)..(418): unsure at all n locations
tcttggattggatcccaaaccggcagtgacatccaagcgcccgtattaaccagtagcccgtgccgtccatcttcgagcgagtcaacccaagtaatattcctagtaaatctactctcggagcaatggaggccaacactcctatggacgacaatggcgcgcccgcaccaacttcaggtgataacccgatggacagctcataacaagtcataactcataagaggacctgacatgtncaatctcctctgtagtgattagtgaatggatattactgccaggcatatctgatatgcacaatgcgatggtatttagatggtctctagaattgatgaatgggtctggccaatgatggcaattgatcacgggtatatgcactgactgtcatcatgggaaatggacctgtgggttatatgtatatact

SEQ ID NO: 25212 - DNA, 466 bp, Oryza sativa
  unsure (1)..(466): unsure at all n locations
tccctatgcctattaccaggatggtgatgaagacgatggcgctcaataggtcttagttacggtcggtggctgtggcaatggcatgccgctgtcttaattccgctgccttatctatctctgcttttgggatgtattccggaccgctcggttcgatgatctaagactatgcctgcgggcttttgatgtaataaatcgcactagactctcgtgtatgtgcatttggtatttcagctatgaactcgtgtgtaccagactacttgatccagggaaatggtactgttacacgattgattcctgttataaaaatgggggtccacagacctggtatcagagccatacgactgtaggaaaagaccaaaagtgccctcaccccncccttttgtatagtggccaagggagaaattcccatttagtaatactttcaaaaaaataaaaatgctatgnttaccaaactctatacgatttt

SEQ ID NO: 25213 - DNA, 382 bp, Oryza sativa
  unsure (1)..(382): unsure at all n locations
agcttgcagcatacaagtctttctctgacctgtttcctgttctccagttcactaactntaccgcaacacaggcgcttcttgatgagaatggtggcatggcaacttcctgcatccatgtcattgactntgatctcggtgttggtggtcagtgggcttccttcttgcaggagcttgcccaccgccggggagctggaggtatggccttgccgntgttgaagctcacggctntcatgtcgactgcttctcaccatccactggagctgcaccttacccaggataacctctctcangttgccgcagagctcagaattcctttcgaattcaatgccgtcagtcttgatgcattcaatcctgcggaactcatttcttcctctggtgatga

SEQ ID NO: 25214 - DNA, 496 bp, Oryza sativa
  unsure (1)..(496): unsure at all n locations
tagcacaaaacttaacacaaatgtcatcactcatggaaggctctttgcagagatgatgatgaaaactaacagaagcactgtattttatgccaaaaagaagagaaaatatgccaaagctcaaattcttttagacatgaaattggtctagcatacagaanaaagatatattcaagtattgaaagatacacgtttccttcttttgccaccatatccactncagctgaattntctagtttataaatagcaaatcaaatatgttatgtgcactcacattgcttaggaactggtatgccaactgcgttgagtatgtttccttgatgtacaggaatagccttattatctgcaaaaagggaaacatggtgcatcaattccttttatgaggcaattaaggttataatccatctcactagtcaacaccactaggaaatgtgctgcatcatattgtacgatgacgcatattcatagatttccttttcttatgttcataccccttata

SEQ ID NO: 25215 - DNA, 463 bp, Oryza sativa
  unsure (1)..(463): unsure at all n locations
agcttgtgctgtagagacccttgttcgtgcgatatataatcataatgaaaccataatactttgccttgaagattgtagtgactggagcaatgcaactacaaggagagtggtgatgcangtttgcactttaaaactagcttttcttatcaaaaggtgctcaatgacattctcatggtctcttgtgattccacattagttgtaccttatttactgngttactatgtttaaacaaaaggcgtgcttactatatcaagttcaaacttcaaacgttcaacacacaattattttgttaacctgtaagcagtgccagtaagctatgttttgtgtttccctttntcatactgcaggttgatcctgatcttgcaaggactgttctagtctccacaaaactggacactataatattacagtttgcacgagcctctgatgttgaagtctttctttcacccccgacctgtgctct

SEQ ID NO: 25216 - DNA, 475 bp, Oryza sativa
  unsure (1)..(475): unsure at all n locations
cttgaactcagctggctggtcttattggccgggagatnaatggcattcttcacatatgatatatttatggggcccaccgtcattagctagctatttaatctcgtgattgcttctgcatgccaggcgcttgttgagcatcaccaagagatatccaataaacccattctctagatgatgttttagagatttctaatcatgatttgagcttggaaaatatactctcctctaacagattatgtaaacatgacttccttaataaaaagcggagacttgcttaaaagatgtcgacatctttttgggctgatctcagtcggctttaacgtccgtccgattgctcgtacgagactacatgtctttggctgtgcctgttcggaccgttcgatttcctcctgatcatctcctgtaaagtaagtgctgcaatatgcttttgtttataactcttccaatggtaaaattaaatttatactccacttac

SEQ ID NO: 25217 - DNA, 449 bp, Oryza sativa
  unsure (1)..(449): unsure at all n locations
agctntactgacacatatcataacaccaaattttttagtgtgataagaagaggaaacgagcgcataaagtgtactgtacaagaatgatcgatttcctttagatatggcactgcttcggcgaatcaaaacttaaacaattgcnaacagagaatgaagaacagaagaaaaaaagcaagaacaacctaacagtacagtacggcaccgaacgccatcacagagaagtgaaaaacaggttacagacaaaaaatgcacaatatctcggtaagggagaaggaagccaaatcaagattcaagagatggaagtttctttgataggtaaagaatcagaagatttacaagtaattcaatggagcgacacatgcagaaatcattgaacganaaaatagcatcgagtaaacaaagccacaataggacagagagttctttcgaggcagaaaacagagagacgt

SEQ ID NO: 25218 - DNA, 379 bp, Oryza sativa
  unsure (1)..(379): unsure at all n locations
tagttattaccagatgccttcttattngaagaattgctnttcttattgttcaacatttcctaaagggtgtgagatttatagtgatgatctaattcaacagtggatatcgcttggtttcattcaagaaagacctaataagcacatatcgcttgaaaagataggagaacagtatgtaagcgagctattgggaatgtcctttcttcaatattcaagtcttggccctggtgagncgaatttccaacttacatataaatctctttagttgaattacatataaaccttanaatattcaagagatngtaagttggaaaatttaatgttcacccaacttatnttggggcatccattccatgaattccaacagttaagattacatgac

SEQ ID NO: 25219 - DNA, 475 bp, Oryza sativa
  unsure (1)..(475): unsure at all n locations
agcttgacactggggataccaagtatgatgtgctggtgagtgccacggaggagatggcggttgtctgggccattgtgaagctgcggccgccggatactctgaggccacactacctcccgcagaaccatggggggccgagggacacaacctatgggtttgcaagggtgaatttgtcgganacggtggacagctgcaacggaccattggatgctgacaacaaggaggatcaggagaggatcatcgcggatgcaaagacacccctggtggtgacatctgctccagccgtccgctacccaaacccaccaaaccctgacaaggtgatttacatcaacaagaaggaggctcctctgctgaanggtgagagaggtgtgccagtgaagttctcagtgcaggctgggcatgaatgtgcactttacatcacgtcngatccaattggngggaatgctacactgcggaataaaacagaggtcatata

SEQ ID NO: 25220 - DNA, 455 bp, Oryza sativa
  unsure (1)..(455): unsure at all n locations
actcaagctagcttactcctcgccgacgtccctgagaatgtnggcgagctgtttggcgatgccganagccattgcccccttgtagacggtctcggtgttggccctcgagtccggcgagatgcccatgaccggcaccgtcatgagcccgaccgttccggcgacgtagtagcagtagaggtagagctcgtcgaagctcctgtacctcgacttcgttaggtccaatcgcatcccctcgatcatgtccctgaacggctgtacacacggagctatatgaacacgccatttttttcttatggctattagccaaaatttaaattcttaacattaaacttatagctgagtttaagattttgcatcggagcttatttcttcagtctgtatttttactgtcagatcaccaagaacacatgtatataaagtttattcacaaattacttttcgcttgtaatatgccg

SEQ ID NO: 25221 - DNA, 408 bp, Oryza sativa
agcttgcatgctgtaatgtgcttgttttgtaatattactagctcgcatgatcactacaccatgacatggaattaccaacagacatctgttggcaaaaataaacaattagtgataacatatctgtcggtaaaggtttttggcaaactatatgtcagcaatagtgcataatgagacatggtatatgtcagtaattctaaatatatttttggtcaaaatatctgtcagtaattgtaagagtacgagctaattatatgtcagcaaaacttagagggtgtatattagactattaataatactatattgcaagcccaaaaagcccatctagcctatcatatataaaccaaaccctaatttccccacaatcttattcttttcttccctacccagccgtcacgcactcacgctttc

SEQ ID NO: 25222 - DNA, 455 bp, Oryza sativa
  unsure (1)..(455): unsure at all n locations
taataatttcatatataaccaatgactntatctatatgatacaattntagcatttattggaccaataacaatagcccgtgcaacgcatgggtggatgactagtagtcctaatgttttcaaaagtaaaaaaaatatacatgaatcaactactgataattccaacattgaaatacaacttaacacattcaaactactataaattacatcgcacatacacacacacacacaaaatcaaatttcataattataagttgtaaccctacccattcccacacaaaaatcaacatgaatcatcctgagcaacatcaatacggaactaccacacttcatcccaacccacattgattccccaatttagatttcaaccaaaacaaccaaaatacatggagaaagatgggtcttggaaggaagttactntgcaaatcaatctcccaacaaatccctgaaatcccttc

SEQ ID NO: 25223 - DNA, 459 bp, Oryza sativa
  unsure (1)..(459): unsure at all n locations
agctngcgttggcttcagtgttctgtaggttgtggctaggcctcccctgctagtttaaacttatcaaatgtactcctatttcataagcaccaacatttgcttgtcaactactttgttaggtttcttgtgattgaacctgcctattcgagtttaaaatttaggcttgacacgagtgcttgtatttatggatatttattctttcagggatagatgatatacccgttaacaatgagacgtttgtggagactttgtcattatcaagatatacatgcctggtctttcaggggtgcttataaagaattagagatatgctgtgtgtttataaggataagtgcccctaccaataggtggacccttgtcactgggctccgtgccatatcgtccaaaattggtgggaaatgctagccaatacaaatgaggtgtccaagaaaagcctgcggaccctaattctttaatagt

SEQ ID NO: 25224 - DNA, 391 bp, Oryza sativa
  unsure (1)..(391): unsure at all n locations
tagactcggcatntaatcttgatcctgctgaatgtcatatatggagatcaactgaagctgaaccagacctcaatctatatgcttatggngtatgcatttcttcaataccccccacacccacccnctctctcgtacttcagcttttcatttgtttgctcaaggttntgcctggacttgtgctntattttgcattatttggtatgaactgtgctgtatggcttaatatatttacagcttttaagtatggcacattgaagtaatggtgagctaccaaacctccaaggcattaattaagccttgtacacctaaacaaaaccctgttagttcttggttagtaagtgtagctgtgggctcgtattgttggagtggtgagggaagagaagttgttcat

SEQ ID NO: 25225 - DNA, 441 bp, Oryza sativa
  unsure (1)..(441): unsure at all n locations
agctttcacagataaccctggggattgtttttgttatattgggngcgaagcaaaatgacaagtaagtgtgttcacctttggagatgatgaaggcattatagctgcactgatattgacattgaaaaaactatccaactgcgaatttctttagctccactgactgatgtactttatcttatccactaaaaggcatgaaagtttaggtatatgtcgtttgactttaggttctttggcaagacttaggcccatcaacctctaatgcataaaatatatagtttgtggcatttgaattcttttgtctatcctaaggaaaaacacgctgtttatgcatcctctntttagtgaacagatgtacagtatgcacatccttcttatggaggctatataattttgaaagacagtcaatattctagttaaaatgttttctggagcacttgattt

SEQ ID NO: 25226 - DNA, 431 bp, Oryza sativa
  unsure (1)..(431): unsure at all n locations
tgactgaccaaactccaatgcaccacgattaatgttccatgcatnccttagctnnttgacatgcaaacactgtgactcaacaagccagccagaagaaacaaaactggtctgactagtactccgtcttgcatccgatcaaagaaaaaaattccttctcgatccaccagcttgacattgcctactaagactacaacggccccagtagtagaccgtctcacgcacaaccatgcgtctccatgtgtgtgcgacatcacctcggacagccacgatctgctccaactgcttcggccttgggcacacaccgaaccatctctgcagtgcttgtgctccgcttggttcacgaacagctgccctacacgaaacaaacnaccgctcgtcctccgaaatcaatgccgcttccacctggaactgccgccatcttcactgaagtc

SEQ ID NO: 25227 - DNA, 466 bp, Oryza sativa
  unsure (1)..(466): unsure at all n locations
agcttgtaaattcccctattattttatgtattataacccctctggagccttggtcaactgtatgcaatatagatccagattgttacctgtatcaatcaatcgatctacggcttgataaagtctaaacatactgattttcgaatcattagttttcactttaagaatctattttatctatgacaaaaaaaattcatcatggatcactgaaaattcgtcatagaaatttgtctgtgacgattctacttaccatcatctattgagcgtcacagattaaatctgccgatgttttctccgaaatcgtcacggatcagtacaatctatgacgctttttaaccgtcataaaacgtttttgggctcgtgtagtccagccaggcccgaccttacgtcacatatggttgccacatggaggccaacatggcacgtgacgtcgtcatngacacatgtgtgatgacctgtcactcatgac

SEQ ID NO: 25228 - DNA, 365 bp, Oryza sativa
  unsure (1)..(365): unsure at all n locations
tcaagcttcctttgctntctccactcaaatctagagccttttcttgtgatattgagagattagatgagagtgtaggagtgttttggagatggcttgaagattacgttcgattgagcactttggataccttgtgggctggcacttgggcttattactcttggagatcttctcctagataggtaggtgtctcccgtgagcttccaaagatcttgtggatgccgtaggaaagattgcgaagattttcctcacctncgcaaggaaacgaggtaagtgagtaaagattcttgtgctgagttttcagagggtgtcctaggtagagcaacttgcacttgtgcgcttttctagaagaaatcttgagttggatc

SEQ ID NO: 25229 - DNA, 429 bp, Oryza sativa
  unsure (1)..(429): unsure at all n locations
agcttctaaatcttccatcctggatatgnctctttttctgtcatcgactgaagatggaaatacattcactccattggaataaaaactcttcgatgatatagcaacccaaatctaaaaataggtgctctttcaaaaaataaactcaaaaataggttagcgaaagagagagtggtcaaggaggacaagcttcatcgttagtggttcagctaacgggaaccatatgaatatatgtgatgcaaaacctgctacgcgtgcctgcgagattacaccggcgccgacgtgattgacgattcgaaattggcacgtccgtgacacagcagcggcaccggcaggttgcgacttatagaaccgactgcagcaacagcaggcaacgattcgaaccaatttaaattccccagcctacangaattcaacgcgcatactactact

SEQ ID NO: 25230 - DNA, 475 bp, Oryza sativa
  unsure (1)..(475): unsure at all n locations
tgaattaggcctatgtattcaaaccctcctattcatggtgcatctatcgnggctaccatacttaaggacaggtaacattgatgtcataataattctagtcaaccatagaaagtgagctatatgttgagaaaggcatgcctagaggcagattcagggaataaaagtgtgtgctaagttctttttgattatatttttactagtgcaatgttcaatgaatggactgtggagctgaagggcatggctgataggattattagcatgaggcaacagctntttgatgctctgaaaacgagaggtaatagtttctgtcaactcctctatatcgtccttgctggaagtacataactaatgctatgtacaaagaaanttgatcattggccttttagtctntacgttatttcaagttctgtttgacagcatttgactattctgttatgttaggcttacggtattgaactgaggcgtatttcctttt

SEQ ID NO: 25231 - DNA, 444 bp, Oryza sativa
  unsure (1)..(444): unsure at all n locations
agcttcaagctgaggttttgtacatatgcaatgcaccacaggctntacctagaggatgaagctgacaagcacaacaagtaactaatctcttgacagataccatactatcagatagattcctgttaccactcatagattgattgatcgaattttcgcacggggccttgtctggtcaggaacgtttaccggccatcatcttaagatgataagagcaagcgaaatgctagtcagcctcactcacacctttgcctgccttttggttccctgccctttcatctgaaacgtcacggatgaaagctgaattatntaatggagagcgtttatgcaacatctctttcttgccttcttttttcctccatttctttatacccttcgctttctgatattcaatacatttgaccgtatatacgggcatcacgacagccgcagatatttcacttaaaa

SEQ ID NO: 25232 - DNA, 461 bp, Oryza sativa
  unsure (1)..(461): unsure at all n locations
ttgggtattggtgactcncttatttataattatggtccaaatttaaccctagatgagatatagtaagggttggccaagtttgaaaaggatatgagcattttgcacatggtttatccgaccggtgatttaaggctggtctaataggagagccctatatgagatcgagtctaattacagcgattctctgtntttttttacttgggcacaaggcttcttgagtcataaactttgtctctatctttactactataaatattaaagatacttttaccggtattttaatacgtcatccgtatntaagtcgggttttaagttctttcgcttggaaatacatatatgtgtttgagtccgaatttaagtttatttgcttttggaaatgcacaaggtgccgtataagaaatctcttataaaactcgcatgctaacttgagttgaanattggactactatatgcagcttatg

SEQ ID NO: 25233 - DNA, 359 bp, Oryza sativa
ccgacgacgaggatgattgccgagaacgtgaccgcgaggaggaaggagaggaagatgatgacgtggaggctgtggctgataaggccatgggtgaggtggtcgaagaccgctccgacacccctggtacctctacccaagcctggcacaacgaaaccagggtggagtcgaacagctcccccttcttcgaaggatttggaaggggcgaaggccttagttgcgttctctttcggagtggcggcgaagggaggccctgtctaaaaggtggctaaaaagaaagggctcgttgatgtcgctctgcgttttagcgacgacgagtcctccgacgggactccgacttcgcccgctggtcgcagccagga

SEQ ID NO: 25234 - DNA, 397 bp, Oryza sativa
  unsure (1)..(397): unsure at all n locations
cttgggcagagaagtctatatcctgagttgatcngnatttacgagcgacattaattgagcaagagagagcctgcatagaatttactacagagttcatcagtgtatgcaaagaaattaacttctcagaaaactactgattgtggtgaaaggataacaatatgatttgttaacgaccacaattggtaatatcaacatcggaaaggacgattagattgaagtggagtttacgactgagatcgattctagaacagagcaagaatcggctggagtctggatcggctacgattggatcggctaagtctgagtcagactgtgttaagtgatacagccgattcccacaatatgacttggtgacaacatcaagttgagttgatatgtttcagatgattgcccacat

SEQ ID NO: 25235 - DNA, 436 bp, Oryza sativa
  unsure (1)..(436): unsure at all n locations
atatgaagctagctatgagcccatgcaagatggtatatattgctatgtgcattgcgttacttaatcctctacgcattgaatgtacatatcactgggactactttcctaggttttgcaagaaatttacaggattatatcgtacaaattaggtcaactcctgtaagaatttcttcaagatcaccttccattttantttaaaggaggcttcttagaactacctccatattttaatgtatgacgtccgtgattttttgtccaacgtttgacccattcatcttataaaaaaaattatataattatcatttattttattatgacttaattcgtcatcaaatgttctttaagcatgacatacaatattttatatttgcacaanaattanggagtacatttttttggtgaccaaagagtatatgaatgccgcattgtaaaacta

SEQ ID NO: 25236 - DNA, 451 bp, Oryza sativa
  unsure (1)..(451): unsure at all n locations
ttgtctgaatttgcatgccttattcctgtttcttntagtatttcagatctccaagcaacttgtctttctattatgctatttgttacgcgatgatcacacagcaatttcatgagaattcttcaagcacgacaaaggttttacatggtccagctagtctccatttgatcaaagagtttaagatactggagacttgattattcccatcatgatcatctgctggcaaatgaaccgaatcaaacagcctaacatataactagcatctcgtaatgctgcttctgtaggatcgaggaaggctgtgttagttccgagaagaaaggggaagagaaactntgtttnntttttcatgtnttccaaattgcttaatggtgtaatttttaaaaaaaaatctatataaaagttgttaaanaacatattaatattttaaaaattaaactcaattaacaatcgctat

SEQ ID NO: 25237 - DNA, 411 bp, Oryza sativa
  unsure (1)..(411): unsure at all n locations
agcttctcaagctcaagcatatactnttctagtttgttatcagcgtcttggagctaatgtgggatctgcccaaggacccacatgtttatgtaaatatttaattgcgtctcccacgggagaggttatatttggaggggaaactatgcgtttttgggaccttcgtgctccatggttagaacctctaaggggccccaacggtttggacttgagtatgttgaaaaaagacatacaacctttggtagaacgacgtntggcaaaatatatgacccatgctcctttaggctctttaaattctgtgggtggcgtagctaccgagatcaatgcagttaattattgttctcctagaagttggttagcgactccccattttgttctaggattcttcttttttgtgggccatttgtggcatgc

SEQ ID NO: 25238 - DNA, 443 bp, Oryza sativa
  unsure (1)..(443): unsure at all n locations
ctcacttcgataagctgtattatnttactctactaaacaactagcgataaaaccaaagacagantaagcgcctaaactataagacaagtaagcttcttcagaccatacaaatgcacggcgagcccatgcgaagggtttggttaagatatgccaaattccgccaaatacacaaatgagacccaaccatacatgtccgccaattatatcttctaaatcattcacactaacaatccaaccctctcccccaaaaggggattttagttaataaccaaatataacaccggngctaagggtcaaataggtatattttcttacatctcctcccncaggagcccaggtatcatatatatccgcaaaatatagagctgtgagtactagaagagaagcacctatacctaacaaaattaggtgaatacccaaaatggtagcatttaattttatct

SEQ ID NO: 25239 - DNA, 416 bp, Oryza sativa
agcttggccaaaatccacataattaagttatctagtccaattagcacacattgcatccgaaattcaaattcaaagaatggaattcgatcaatccgcttgaacatgaatactgcctccattttattggtttcatgctataactcgttttaacttttttcaagttaatggttgactaaagaaatttatcaaaaaatatatattatcaaaatatatttaatgttagatttaatgaaactggtttggtgttttagatgctactaaatctttctataaacttggtcaaactttaaaaagtttaactatggaaaagttaaatcgacctggtatatgtaatggagggagtataatggaaccttaattacaagacaaaatacaatgtttagatatatatcataatggaatgtatatatgcatac

SEQ ID NO: 25240 - DNA, 454 bp, Oryza sativa
  unsure (1)..(454): unsure at all n locations
ctcaagctntgtcaatagtatggattagaatcttgaagagtaaataaattttgttccacatttgtctaaaagattttcttctaatcttgtgactattcgcttgattatcttcatctcanaagttctgatatgctaacctactaaatgaaactctaatgaacataatatgtcattctccatatatttgttcctaacacaatatatacaattgttatacttagagactaaatannattagaagcaatcatgtgtaagcaaacacaatgtgctaaggagtaagggctttaaattgaaaatcaatttattccatacattagcccaaacatctagttncaaaacacctattccactagcaacacttcatctaacaaatctaacattcaaaaacatatggctccaccatttgagatctatgtatttgcaagcatttcatatacattgccataagaaagaa

SEQ ID NO: 25241 - DNA, 455 bp, Oryza sativa
  unsure (1)..(455): unsure at all n locations
agctntaatcgactggtactcctacagcgcacagtactactatgtctgtnttataaaaagggagaatagttctatagtataggacagctccaaccaaattgcatgattgatactatttttcagtaaatgagtaaatttcacaaaaactacagatactttgatcaaactattgcaaaactactgatttaaggtgttatatcataaaaactacagaattagtgttaagtttatcacacaactacagatttatattgaaatatatggtcacaaagctatagattaagtaacaaaattatcatataactaccaagttagtgccaatntaatcacaaaactacaacatttatagctcaaacataatggtggtgctatagaattgacctcacaaaatttgtagtttgtgaataactcaatgttaatatataattaantacgtgatacttgacctttaatat

SEQ ID NO: 25242 - DNA, 307 bp, Oryza sativa
  unsure (1)..(307): unsure at all n locations
cggccttgctctcgtactcgacattgccgatcttgttctagatctttatctggagagctgcacagagaaatccacagatgattntagaattctagtcttctttcgtattgcattgctatgtgtggaacgcgtgaaaaataaaattatttgcgaacggaggaagtataaccgagctcaactgcatgtaaggtaaactgctacatactcttgaaagcatactccgctttcatgttctttcgggtgcagtccgcgcacttggccgtgccgattactaccgacgccgctttccactgactgtagcaccatc

SEQ ID NO: 25243 - DNA, 423 bp, Oryza sativa
  unsure (1)..(423): unsure at all n locations
agcttcacaaagcgagggtgagtccacgctgtttatgcgcgaagatgacatcctcacagaggcgctcggaaccaaagaacatcctggccggactcggagaattggcagcgatttgccttggaagcatggactgccgcagcacagctcccaatacaggaaacggaaagtctccaaggaagaaagggacgctcgttngaaggccgagcgtaaggtggaggccattcaagaactagaagcaagcatggacgctagggtggaagaaagggttaacaaggtcctcgccgacatgaatataccccgaggcacaacacatgctgtgcattcaacttctcgtgcacaacacgacgcgagtctgtcacagcgtatgagtagttgtgcatccacagaggtgacgacctctggtctccctggcgcaccactaac

SEQ ID NO: 25244 - DNA, 214 bp, Oryza sativa
ctggaatgctgcctctctcaagcgcttttatgtctaaaacgggtggcacccaaatcgccaatatgtaaaaaagtatatacaggcgtgtaagccattcagcactatgtacgccttttagcacgggaaaaaatgaaaaaacagacgtaaatgaataagacaaaaactagatgtcggctattatccccatggggcccgaccagtataaacctttgtg

SEQ ID NO: 25245 - DNA, 478 bp, Oryza sativa
  unsure (1)..(478): unsure at all n locations
actcacttggctcgctgtgcataaaacatccctttccatgtcttctgatacaacccanaaaggcttgcctgttcttagtgcataaacccttgggatcatttcgcgaactttgtgtaactcttccacttctagtaaaaattctggtgttcttgcccgataataagcactagcaggttggtgaagcataatcctcgcgtgggggaatgctatacgcttggtgggttctcctccaagcagaatgaaggacgccatggacgcggctattccgaggcatattgtatatatatctggtgtcaccgtttgcatcgtatcaaaaatcgccattcctgagattaaccacccgccggcggaagttataaacaaaaagatatcgctaattccatcttctatactgagatataccatgagacctgtaatatgattcgtgacctcgtcacgaatctcttgacctacaaaaagtgttctttctcgatacata

SEQ ID NO: 25246 - DNA, 443 bp, Oryza sativa
  unsure (1)..(443): unsure at all n locations
agcttctcccgctcagcccaatggtcgaactgtcagtggcgcacaacctctctccgagcgctagcggtgacgacggngagcagaacccgcgccgtcgagctcgtgctccaccgtccccctctcgccgaagtcttgggcgggaaaaggcgctcgaggaggtcgaaagattcgcgacttcgccgcccgcgggcgatggagaaggacggcgagacggggagcgtcgcctcctcgtctacagtgatggcagcacgtcccatggcgcgctccaggccgcgggtgcgctcctgcgtcacccgcccgtcgtccccgatccagagactccagcccgacgttggctggatgacgtggccgacttgatcatgacggcgcagcagtgcctatacgccggcgggcggtcctcccgcaccaagggcctctggcgctgctaccgccggctccgtgtc

SEQ ID NO: 25247 - DNA, 483 bp, Oryza sativa
  unsure (1)..(483): unsure at all n locations
tagtgagttgaagagtgtgccctgtcaacgttcttatgatgtatctctcagactggggcaaagggagcatttctatgaaaaatatatttgtaacagcagatcttatcaatctaacaaactagtagatgcaccagatatgctaagcccagagaaggaacttttcttgaagacacttcagaaaccgagtccgcatactttggagaaggagaacacccaaaataatcaaaacagacaggtagtgaccaagttagagccaaggaaaattcttgaaaaaggtgaaaatactaagaattcataacagcacgaggtagccatcaaaacacatagtaaagagggcaggaatatctttttctggaggaaagataaatcaattatgaagggtacatcagaaggaactaatagtagtaagatggttaacanaatagttatactaaagccaaatccaagagggatcgatactactgtagctacagcctctacatg

SEQ ID NO: 25248 - DNA, 424 bp, Oryza sativa
  unsure (1)..(424): unsure at all n locations
cgcaagcttaattgtaaaggtcttggntcatggttatactctaatgcatgctcgttatattatagatgagtttatcttctttttattgcaacacatgacatgatatgctatatgtatgctaagctcttgaacattaatgaacataattcctatgcttgatgaaatcattgtcaaaagggggagaagcaaaggtaactttttgactttttgggagaagcaaggtgaatgtttggagaagagaagagtttttgagaagagcatgttttttgttcaattgggaatttctttcttttacaaaggggaagaagttttcttttggatttttgaattttcgagcacgatgtgtacgtttgtacgaagtgtgcttttaccgcttttggttttattnttccaaacaccaaaaccattttgatgggattgcaat

SEQ ID NO: 25249 - DNA, 395 bp, Oryza sativa
  unsure (1)..(395): unsure at all n locations
ggacgttccggcgcctgtcggcgcactntctgccggaccggctttgcgtccggccgcacggcgagacggtgctcaatcacctccctggggaccccgggcatatccgccggtctccatgcgaagacgtcagcgtttgcccgcaggaaggagacgagcgcgtcttcctatttgccatccagaagaccaccgattcgtgtggtcttggacgggccgtcgcccagggcaacctccttgaccgggacctcgtcgcacgtgactatccgctgcctcggngcgacggngacggaggtgccaagcctctcgtcgccaccctcgggcttggacgcagcggcgaggtggtccgcgcgctgctccatacaagcgagcgcgactntgaggtcgccatggacagagat

SEQ ID NO: 25250 - DNA, 466 bp, Oryza sativa
  unsure (1)..(466): unsure at all n locations
agcttgatgaacccagcgtattggtgaaccttacagttaactgtgtatttttcaaatttatgagtgcttttagttgtcccccgttctgttcttaggagcacacatatatttgttgacatcacgtcaataaacagaggttagctgtaactaaattcattccatgcctttttttgtcagttcatttcatttgtttatgacatgatactgcttgaaataagttctgattgnngtaggtgctgatagaatgcttggaaaataaatgattgtggataagttaattcatccgtaagtttcaaagctggatcacttactgacatgataactattatagaacgtcactactactatcagtacaatgcaactaanaatagatgataagatatattgaatatttccttgaaaagtgcttacataccatacaccactctaaccaagcaggattaccctgaagtacatggtaatgctg

SEQ ID NO: 25251 - DNA, 450 bp, Oryza sativa
  unsure (1)..(450): unsure at all n locations
tgaccttcgagctggctaccatcaagtcataatgagtcctgtataataacctannactgcatttcaaacccattatggccattttgagtacaagggtatgtcgtttggttttactggggcacctgctacctttcaagcagctatgaacaaaaccttggcatcagtcttaagaagatgtgctctagtattctttgatgatatattgatttatagtccagatcctaaaacacatgtggctcatgtttcacaagtattgcagctattgaagcaggatcagtggcaggtgaagttatctaagtgttcttttgcacaacagcaagtttcttacttgggccatgtgattggtgtacaaggagtagctactgatcctggcaaaatcaatgatgtgttaattgggcagttccactaccattaaaaagttaagaggattcctcggtcttgctgatacta

SEQ ID NO: 25252 - DNA, 456 bp, Oryza sativa
  unsure (1)..(456): unsure at all n locations
agcttganagcgcgcacacaaacacatagcaaattgtatgtctggcctagaagcagttagatacaataaagatccaatcatacttctatactccttttgatcaacagtttcaccatcttcatcaggatccaacacagctgtagaaccaattggtgttgaaattggcttgcaattctccatcttgaaccgtctcaaaagatccttcgtatacttcgtttgatgcacaaaagtaccttgaggttcaaaagaagcaacaaatgcagaatntgcacaaacatcatgagtcgttaccttagaccttgtagtccgctcacctatattaccaataatttgttcaagcggatgtcgtcgttgaatgtgcaaaggagccgtgacttctgaagtngatccacgttctgtattagtactggtcaaagtagtaatctccggaggaccatctcgatcagcatcagcagt

SEQ ID NO: 25253 - DNA, 327 bp, Oryza sativa
  unsure (1)..(327): unsure at all n locations
tagcagcgcctggaactcatggtcgtacaagggtacagtactcttgtgcgactgggactgggagtcactctcactactggtagatccattattactgatgctggctgtgtcgagcactctctgtaagcggctgctgcagttggtggagtctccccggcagagtacggcgccgtagacgatgtcgggacctgtcgtcccagccgtggcgccggcggccgagtgcgaccccgtcttggtgacattggcgatcaggtctttggcgaggttgagcaggttggtcttgtatgtgccctctgccatgtangcgaaggtgttcgcgttgctgct

SEQ ID NO: 25254 - DNA, 411 bp, Oryza sativa
  unsure (1)..(411): unsure at all n locations
acctgcggcatgcaagcttcttgccaggtcagactgtnagcataatgttttcatttacgaattctctgntattaagaatcgacaaaaggtgcttgaattctaaacacgtcctatcatgtcacgtagataatatgacacgagttgacaacaacatgaaacagacgcaagaccacacacacacatacacattcgctgatatttcttgaccaaaccgatccaaacctaccaaacacgcgctaanttttatntagacatttcgttcgacgtaacctgcggcgacgagcgagcgttcccgcctcctggccggctgctgaccaggcaatccgtgtcgtagtggtggactccattgaaaatccttanatcttacgtgacagcagctggattttgcaccgatcgcaccacgtcttcgtc

SEQ ID NO: 25255 - DNA, 303 bp, Oryza sativa
  unsure (1)..(303): unsure at all n locations
gctcacannnaccgcatgccacataagcagaagagagagaagcttgcttatcccttagcacactcatcatcacggggtggccgatgaaggctgtgagcactgccgacttgccggcgccctgcacggaacaacaacaagccggatcgagtcagatcgggcggaggagagagggggagctgccgctggcggcggctgcggcggttccggtggaagcaaaacacttactacgttgccgagcgcgaccgcgtttacgaaagtggaagggaggcgcgggcttgcctcctccgaggggtcgaattctta

SEQ ID NO: 25256 - DNA, 329 bp, Oryza sativa
cttaacaaagaaattcaggacatgcttgattgtcaaagatatacatctctttctcaatttgtacaacttgcttgcaatgctgaaagtaaaatagaggaggacatgaagaagaacatgctatgtttttgtcttctattactaaccatttgcaggaagtgcataatcatgaaaaggaggagagagacatgaaagagcccgcagtcccattgatcacactcaaagtcgaggcacctccattatctgaagagggcatcaaaggtaaacttaatggtgctgaaattaataaaggtgagtgtgctgtaatgaattgaattctccacttttatgct

SEQ ID NO: 25257 - DNA, 478 bp, Oryza sativa
  unsure (1)..(478): unsure at all n locations
tcgagttagagcagtttgcttatcagccaagggcatatgttctctactggttccttactggacatgtacagccatacacacgatctgaacagagtaaaatgtactatcccgtaaagctgatcagtataatgcatgcgtactcctctcccgcagaatggaagaaccggctaaggctctgtttagttctcacaataaaacttttcaccttctcacattanacgtttaaacacatacataaaatattaaatatagataaaaaaatcaattatacagattacgtgtaaattgcgagacaaatcttttaagtctaattacaccatgatttgacaatatggtgctacagtaaacatttgctaacaacgaattaattaggcttaataaattcgtctcgcagtttccaagatgaaatctgtaatttgtttggtattagacaacacttaacattttanatatgtgtccatataaacgtggatatctt

SEQ ID NO: 25258 - DNA, 412 bp, Oryza sativa
  unsure (1)..(412): unsure at all n locations
gcacctgcagctgaagcttacccnacgctagacaacgagccttttatgcttctatgtcctgctccaagtaaataatacggaaatgatacatatcgggatcccgtcgggatgggatcattcgtcctcgttgtctatccaaagagaagcgagagctcagtgcctgagccgtgaggagaaggtggctgccgtctgtcagtgagaaccttcggcatatgttggggaagaggacctgcttggcgagaggaggacgcggttgctggcgacgagccccgcgcgatgagcttccgcgacgtcgaggacctcgtctacgtcgcgtcgcggccgcgcgagccggtggcgagggatatatcgacgaagagaggaggggcgtcggtggccggagccaggaacagagtgacgtcggtggtcggag

SEQ ID NO: 25259 - DNA, 481 bp, Oryza sativa
  unsure (1)..(481): unsure at all n locations
ctcagcttgtgcacatggtgctaatctgccaataatccagatttaaattatcttagcggttcattntaaattaaggggcacactgaaaacaaaatgaacatgttaccattctaaaagcaaacctcatagcaccagtaacacttcctcaatcgtcattgcaagacatgattactaattcaccttatctaaagcttttccataatcttcagtacacatccaataccaggtttcaatacaataatcatctacggagtactaactagcccaatttgcacaattaattcatgtagtatataaatacaataaataatttaactatgtatttttcggttattatttttaaaaacaaattgctcctagtaaattcatctgacagatactacaacagcagaatatgagaaatatattggcactaattgagattaatgtaataacaactgggagcacaagataacataaatatttccttctcagtattatg

SEQ ID NO: 25260 - DNA, 446 bp, Oryza sativa
  unsure (1)..(446): unsure at all n locations
agcttcgatggcggatgccgcgacgcgaggaatgaagaatacgactaatggtttgcctgcacgaatcanagaccctactggtatttggttgatttgtatacgcctagaaacttatagtcacattaaatttacacctctgtgctataaaaatattatatcctaactgcgaatcttgatgcatgcatgtcgaggttcatacccangaattaatcttttttaaggaaggaatacatattgctaagcccaagattacaaggctatgcagtgcgcaatntcagttccttcgatgttaaatacttctatttgttcctaacatnttagagaaaatcctctatatacccttgagaattcattcaatcttttgcgtgcccctgaattttgctcataaatatataccctgagttttaatttgatnntctctatgctcattctgtagtgatcatgag

SEQ ID NO: 25261 - DNA, 442 bp, Oryza sativa
  unsure (1)..(442): unsure at all n locations
actcagctgactagattcaagctagaaatcttatatttcgagatgtttgtcaagcattgcccaactagctagctgaacctgaacaccaaaaccaaacaggcctctagaagcaatgttgtttagagcttgctccttaagcgtactccgtcacattgttccatttgtcacctatcactctcgggcgatttggatgtgccttcatgcaggatgccactntagtcaccatggataatatgatgtcgccaaagaactctatctccttcagcttcagcagattctccagacctgtaatcccatccttgggttcttgcaggaatgctattgtcagccactcaaggttagggactgagcccttctcgaagtgcacattgcgaatggtctccatattatcaataaccaacattctgagcttcaaaaataccatgagcaaaaatatatggca

SEQ ID NO: 25262 - DNA, 399 bp, Oryza sativa
  unsure (1)..(399): unsure at all n locations
gcttcatagcacatgaatgagattccagccgtttgttttatctntgatgcagctcggcccaagccccttgtaaggcacgcaatcccttcattctccattatgcaatacagagcatggaagacattcttgtgacctgcctgacgcctaccgctacgacctgcatttgcttgcgagctacctcgagagggaaggtggcggtgctccagatggcacccgcggctgaaccgatgagaagagtcacgatggtgctgaactccatctgcttgaatgtcttcctggaaagctctttcacggtgtcgtaagcataagtattggttgcagcgtatggcaccacgccgatcagactccgtgtcagcccacggtagatctctgaggtgccttcctctcgtagtatcttga

SEQ ID NO: 25263 - DNA, 463 bp, Oryza sativa
  unsure (1)..(463): unsure at all n locations
aagctaactcctaagaaacatcatcagctctattcgctgnggctgctaatataagctatgctgatcactattcacttgcaagcatgtgcatcagcataaagtaattgtgaatgtacaaaaagggagtgttataaagaacagaagggcatgtcaagtataactgttgagatataacatgacagttaggaatttgaccagtacgccagcaaagatgtctcaatgatctgatggttatcgcttcatttctgggaaatgaacattaagagagatgccaccatagcttcaaattctgtcctgaaggcaccgtcttgcacttcaaaaaagtagctacttaaccagtaaaatcatgtatcgtcattatctctacagtcagccatgtcaatatatgatggccgatttgccaacagcttcgtattcatcaaggagagaatttctcattgttatacctacgaggtaaacttgt

SEQ ID NO: 25264 - DNA, 345 bp, Oryza sativa
ctaactttgacaaacagctccactcggaagatctttcactctggtgtgggggaaaagagagccagactgagtactacccactgtactcaactagtcataccggatgaggaggcatgacgcacgatataaccaaatgaaaccacgggttcttttgcataaagctagcatctatatacagtagttgaaagcagtaaaccagctgtgtaattaatcaatataaccaaacactgtccacgctcaccacgttgtaaaggtccaacaaccactgaactaaccagttctttagctaacttggggtgagactaatcacgcgaatctggtgatcgccataacgccggcaccgta

SEQ ID NO: 25265 - DNA, 480 bp, Oryza sativa
  unsure (1)..(480): unsure at all n locations
cggaactataaaactaagcttttctctccttagagcagncatagtatttcaactattaactntaaactatctatagataatttaacagccaattcatataatagttagctataaacatatactacacaagtataatacttaatcccacatatcatatacacattgcgtcttgtagtctgtattgtagctgactatatatctgtagccccgctattcttatctctcctcatatatcttctcgatatgtgtttatggtctgctattataccagctcttatttcatttcatgtgcacgttntcaaaactgttaaacgttataactttngagaaaaaagtcataagacagttgagtttaagaattatattaatttactctctaagttatgttatagctccaataatatttaattggtaaacggtaatgagtaccaaatttcgtgcacggagaagagtccaaacttcaacacagtataaacacat

SEQ ID NO: 25266 - DNA, 472 bp, Oryza sativa
  unsure (1)..(472): unsure at all n locations
ctcaagcttcngatgtgtatcgactacaccgaccttaactttgcatgttctaangacccttatctcctgcctcgcatagatcagattgtcgactccactgcggngtgcgaccttttgtgttntctagatgcatactctggttaccatcagattcgcatggctagggaggatgaggaaaaaactgcgttcattacccccgtaggaacctattgttatacatcaatgcccttctggttaaagaatgcaggtcctacttttcagcgtactactcgaatttctttgggtagccaaataggacgtaatgttgaggcttatgttgatgactcggttgtaaagacgcgcaaccaagagactttactctcagatctagcggaaacattttgaaacctccgctccggccgcataaaactgaacctcgataagtgcgtgtttggtgtacctgcgggcaagcttctcgggctcttggtctctg

SEQ ID NO: 25267 - DNA, 358 bp, Oryza sativa
agcttatctcttacgctctaggaatggatcattcataacatcaccaccggccgcctcgtccgccgccgactggtgttctcgcctgcacggttggcctattatgccgccgttgttgggcgtctacgtcttcaccgaccggcttgccttcgccgccgacgactggtgtttccgcctgcacggctggcctattatgccgccgttggtgggcgtctacgtcttcaccgaccgacttgccttcgccgccgccgactggtgttttcgcctgcacggctggcctatatgccgactgttgtgggcgtccacgtcttcaccgaccggcttgccttcgccgccgccgactggtgtttccgccagcacg

SEQ ID NO: 25268 - DNA, 380 bp, Oryza sativa
  unsure (1)..(380): unsure at all n locations
gagagatatcacatataaataggcaacattcacatagtgccatctacatcagcagggggaacaatttggtgtaattatttagtatgcaacattctaacagttcacatatatatttatcaagtggtcaacttaaggatctcttactactgctgaatgttcatatatgtcaatccaactgacaaaaaacaactgaatgcattccacttatcataggcaagaatctgcatccttcacgttggatgcacaaacatacacattccacagtgcaagctcattcgccaacatgtggttcttcacctgcaacctaccacactcccaagtcttattgaagatttctttctgaattaccaatantgcaatccactaattcatgatcagag

SEQ ID NO: 25269 - DNA, 277 bp, Oryza sativa
acgggataaacagcctgtcagtacagcgtactgacgaagaacaagggcacgcggagattatgacagttttgtcccagattcggacataaagatgctgtggacccaatgcccagacaatacccttcctgcggagactgacgactaagtgaatatgtggacactgaacaaaatggtagagcacgttcagagcttcaacggagatctgtaccacaagtatatactgaataggcagacacctaacttcgcacattctcaagcttaggatcactgggacgag

SEQ ID NO: 25270 - DNA, 439 bp, Oryza sativa
  unsure (1)..(439): unsure at all n locations
agcttcgatctcngatcagatgggttttggattatatgcgagacaccccctcccttacctagattgacgagtagtttgatgattagctcgttgtatcttctggatgaaccttatttggactgcgtatgtatgcagtcgattgcatcatgattcatgtaccatttgtgaaactctgtgatgttatttatgatatctattgttggtgtattataaatgagtttattccaccatgcttgcaaaacaaagttcatatcaacataactctcttaatgggataaagccataggagctagttaganaattaggatacttactccatcaacctacacagatggcaagccgacgttgggcaacaaccagcaatgacgaaactcagacacccgacttaaccactctggccggagttatgggcacncaaactcaacttctgcatgctatc

SEQ ID NO: 25271 - DNA, 377 bp, Oryza sativa
  unsure (1)..(377): unsure at all n locations
gacacatgaaactcagcttcggtgaatctacaaacatagtaccaagtagggtatgtacatgctaaacatatcagcatatgtcccgaacagctagaacataataaataagtatgtttattttggacaaataagcagataacaatatccaactgtatcatcatatataggaatagaaaacacatcttccacccatgatccactataccagcaggccttcattgatgagttagaattctgataaaatataatagttaagcatgacaatatatcttcacattaacagatttgacacacctttgaatgtctctaatgaagtactgtgaagtaatattatctctagttgaaatacacantttacctcttggtagctatactca

SEQ ID NO: 25272 - DNA, 449 bp, Oryza sativa
acctataaaactcagctttataagctgaccaaatttaaaaatagagacttttatacaccgaatttgttccgttaaacctaatagtgaatatatttcaatagtatgtttgtttggcgttaaaaatgttgctacgattttatattaacttagtcaaacataaagatgttcgacttagaaaaatgtcatagcgtctcataatataaaatggagggagtattgtgtaaactgtaaccatcgtttgctatgcaaagaaaactgatggtgttatttgacatataggatagaaagggttgtatatgtatgtgaagtgtacgcttaccaggtaatatacggtcaaatccaactttgtgaaactctgtatgaaaggaatctacctaagtttgctgacgacatatatcgcttgtcgtaaccattttttacataccatatcttggctacttgagattcat

SEQ ID NO: 25273 - DNA, 437 bp, Oryza sativa
  unsure (1)..(437): unsure at all n locations
ctcagcttcttacctaaaggccatgttgatgggaagccggnctcttttgatgctantggatataggtgctgctgtgaacttgatgtcgtactcgttattcaagaagttgtggcacgaggatgatgagttgaagaagactaacatgattctcaatggcttcaacggttaaccaacggaggcgaggggtatcgtttcagcggagctcaccgtgggaaacaagacgctaccaaccgctttcttcatcgtcgatgtgcaaggtaactacaatgttattttgggtcgttgttcgattcatgccaattgttgtgtgccttctaccttgcatcaatggttaatccaatgggacggcgatgatggtgaaattgtcaagccgatacatcggcagaggttgcgatggccgatgctacttttgagtggcgccatgggaatatctaata

SEQ ID NO: 25274 - DNA, 417 bp, Oryza sativa
tcactatgcaagggttatgttgagaattgagcttaatagtttatgcaaaccttcactgctagccatctaacatatccagatctcctgattgcatgcattgatggagcataacaagtacaagcgggcctcattttcacagaagaggaagttgagtacagagtgcgcaatgttctggccacgtgtgaatcatctctctctaatgcatcattcctatcgggaaaccctcctgagatagtggtttggagtgcctcattgtatgactacaaggtaattttgtatctcaggttatcattccctattgctatcctctagcaacctaattatgtttggcatgctaaaatcattccaccagaatccgagggaattgtcaacatcacacaaccaatttttgaaggagaaattaccgatgaacacacc

SEQ ID NO: 25275 - DNA, 447 bp, Oryza sativa
  unsure (1)..(447): unsure at all n locations
actaagctcgggcatacctttaatcagttctgctcacgcgaccattgtttcttcaaatgctctcgctctgcttgntcctctgcttctctctccctgatggatcattcttagcaaccagcttgcacgttaaacaacacatggaaacaaataatcgatcatcacagaaagataatcataaactaaaagaatacctgtcaggaagaaaacttgtctcaacagtagggtccttcccaagtttgacaggaccatgtttcttttgaggttcttcttgtaaacacattaaagcataatgtccatacttgctttacaggtaaggcaacttcacaaacttaaacaaatcaagattcaggacacacacacaaaaaaaggacagtacaaacacaaaccccatggactaaactgccaatcataacgtaaacaatagagagagaatggtcattctgaatg

SEQ ID NO: 25276 - DNA, 478 bp, Oryza sativa
  unsure (1)..(478): unsure at all n locations
gcttaacatganaagatgtcacatcatcatacactaactattattatatttaaacatcatcatgcaacaatgttatattatctttaattntatagttcattaaattctatagctttttaactacaagcatattaaggttctattcggctacactctttttcactgtgttgcagccaacagccacagtgttttctttgtgcagctgctaaacaaagcagccgaataggccctaaatcatcatctcacataattcacataatatttcaatatgtctcatattttttatacctatatagttcatcctaactaatatgttctctttcttctctcattaagccatatcacatcaattattttgtccttagatgattatgtatgggccaaattgttttcatccttttcttctcttatgaagacatatcacctcaatcgtttntagctcttaaatgaataatctatgatccanactatctccatc

SEQ ID NO: 25277 - DNA, 428 bp, Oryza sativa
  unsure (1)..(428): unsure at all n locations
gcttggtatctaacctccacgacccanataagttgtgtacctataagagctttgatcttcttttataggtgaactaccgcaccggtgggagccattgggtgcttgatactggatgtcacgcccagaaattcactagtaattntcgaacttatttgtgcataaaatcctcgtccaggaatcaaccgaggtacacaaactgacaatttaatatacagattcatcataataataacgttatatacttacaaaagaaaagaaaatagcagcggaattacggtctagcgaagctccggctccactctcacaggcagctcaactgggatataagccaaacgtcttctccttcgcaacttgtcttcaactgaggtttgattgattattgcaaggtgagtacatggaatactccgcangccacacagcatatatgt

SEQ ID NO: 25278 - DNA, 417 bp, Oryza sativa
  unsure (1)..(417): unsure at all n locations
agctggagtgggctaacttatctcggaggcggttgantttttgtagatatctttgganantgccggcggcggcgttgtccatcgtcagtgctactacggcgatcatcagagttgagagagatgccgttgtttctgactgaagaacgtacaccgatcacggtaccaatagtaaatactcctactacgagcagtagtgagctttttatggatacggatgatttgaaatgctgtcccaatgtggagcagcacaccgattctttgacgatatctcccttctcgtaccgacgccccacttgggtctgatgacttgggcaacgaccctttcttctctatctcgaagcagcgcagcacggaacgatcgatcgagcgatgcatctccgccagacatgtgccggactctatttctctactacactt

SEQ ID NO: 25279 - DNA, 381 bp, Oryza sativa
  unsure (1)..(381): unsure at all n locations
aagaatgtggtttcatcatgcgcagtgtgcacaaactaaacaaattatggtcatatttataatattaataatcgaacaaacatgattntaagtaaaaacacacctatcaatgagaagaatctagcggatgaggtagcaatggaagtcgtgccaccagtcaagcccaagggatcaaaaatgtagaaatagccaccagatagaatactcaaggtatcacacacaaaataactgctaagaagtccaagtccatagttaagaatgtttcccttcaatttccatggaggaggaagttggaggctgcanacttcttctctgctcattatncgttcttcaaagacgactgtcaatgaagaaccctggaagtcacctagattttttttt

SEQ ID NO: 25280 - DNA, 418 bp, Oryza sativa
  unsure (1)..(418): unsure at all n locations
aagctttcccaccctggnctggtgcgncacaacggcgtgnatgctatgtggcttcaaggcttggggcatagcatacgagaggagtnaggcggacaaatgacgcttggggagcaggactcaacaatggcttggcggcgtggtgtgcccagctaggattcggtgccaaggtcacggcgtggatggatgcggctgtgtgatggtgatacattggtggggtggcaggaagaggcttacgcggngaggaatggttgaaatgccaaagttattgccatggngcccactggtgacacgcgctacacggtgcaagagcggtccggcaatgtggtgcatgcggtatggctgagcacgggcggtgcatggacacagctgtggtggtgcgaagcttttcccacccttgtctggtgcgtcacaacggtgt

SEQ ID NO: 25281 - DNA, 452 bp, Oryza sativa
  unsure (1)..(452): unsure at all n locations
gctgctagagccttacccgaactcttccggaattctgactcctattctatntctattccactagctagatactactgaactaaacttgagagaaataagagagttattgcttgaggtgtgtgttgaagtgaagagagtgagctccttatatagaggtagttatgatagttgtggaaggggaattgtccgaagtgccctccaaccgtcattgggatgcaatcctggacgtctacgccaaaacctggatccaacagcgccaggattggttcggccgaacctggagctggcccaatccagcccaatttcggctggcggcctcctctattgctccactccgtagacttgtgagatttggcccaatttatagtgtcaattctgagttcttggcccattcatacataagtctggtaacgacatcgtccgagtgattttatcgttgagttgatgtcgat

SEQ ID NO: 25282 - DNA, 317 bp, Oryza sativa
  unsure (1)..(317): unsure at all n locations
ccctanatcactataactgtcaccatgcaatgtggagcatgacaataacaagctctctccaccacttgtaccagtttatattaacaaatctcttctgtgtactggcttatcttgaagtcatgaagactgggcttattaattaagattacttctgagtcggtttcatgttcgacaaatatgtgatatctacgagtttgctgcataatgtatgataaatgaatacaaatattataaaaatcttggatgggcatatcttgaaatattataaaaacgatatagggatgaggatttgatatactcgtatactgaatctgagc

SEQ ID NO: 25283 - DNA, 409 bp, Oryza sativa
  unsure (1)..(409): unsure at all n locations
cagaaggcgtttggcctctggttgctcacaatgtaagtcggatccctcaactttctattaatgtctaatgtgagtctctcctataagcagaacctataagccccataattaatcctagagaagcaataaattctcacattagtcaaaaacattaaatcaacaatgtccatctatccaatctattgatcttctagcacagaatatatggatttattaanaccagaattaatgaagcctcagcttatgtggttttgactattaattactccctccaacccactgaataagacatatatgtatnttaatattcaactctttaaatattttaccaataactatgttattataaattaaatttatttggatataccatgggattgacatttgaattactctcctatgataatga

SEQ ID NO: 25284 - DNA, 416 bp, Oryza sativa
aaaacacgcgcaaacattgcttgtggttcaaagttaacattctactctctctttatcctgagttatcttttccctcatcacctataaatagctctcctttgttgagaaagaccaccagagagagaaatttgcaagtgatcaacagctgacttggttgcctctgccatggagaagaattgtgcatgcccaccaccaagcaagggaaacatgatcacaattctgagtattgatggaggtggggtgaaggggatcattcctgctgtcatcctctcattcctggaatctaaacttcaggacaatcctatatttcttaatctctgtccatgcataattgtgtatagcttagtgatcagtaagcttgggtaaataatcgtaatgggaatcatagcccttctaagtaacatcttctcaccttg

SEQ ID NO: 25285 - DNA, 413 bp, Oryza sativa
  unsure (1)..(413): unsure at all n locations
gctgcaactactacgtactccctctgttataatgttatactttctagcanggggcacattcatataaatgttaatgaatctagacacatatatatttagaatcattaatacctatatgaatgtgggcaatgctagaatgacttacattatgaaacggaggaagtataacagagctaccagttgaactaggatcaacataaataaatctcacaagttgctatatctatataaatagaccaaaacgaatgcatttacatgcttaggctgattgaatgctctatctaaagttcgcatanggatcatatcaatcatgtttgtatgtagcgtttatgactttcttctctcttaatcttgagctttccattaattctgaatcccatgagttttgtgtgattgtaagaccacctatggaa

SEQ ID NO: 25286 - DNA, 446 bp, Oryza sativa
actcaacttgatattgggaataaagaaaatccaaagtattgggcatatttcatgcgcacactgctttaacagatgtgcttaagtccctagaagacacatggtttcaccacacctggatatatatggcatatgtggtgtgagatccgagtaaataaactcataaaggatttaccaaccgcctagaaaatgaccacaatatataatcagcctaagccataatattgggcaatcaaaatgccacttagtggcgaaagcatgatattgatccatcattgttaaaacccaacacacctgctatatataaagtcacggacactattaagctactgttgcactttagatgcttgaccaatcctaaaagttaataactgcggcaaaaaggatttaaggattggccctgacacaccacttgcctagcaaaaggctagtcctaaaaaatgacagcc

SEQ ID NO: 25287 - DNA, 444 bp, Oryza sativa
  unsure (1)..(444): unsure at all n locations
agcttcttgacatacaaagnatacaatgctanattatattgaagaatngacactccaacaatgtcaataattctcagttgagaattcaacagcatttaacaccacatggtgaaaactgagacattctgggaaccctcctcatcccatttttaatactccaccaagcctccacaataggccagatgacatggcactgatcaatcttattaggccctgttaagtcccacaccaaaaatttacaccttgtcacatcgaacatttgaacacctgcataaaagaatagtataggctaaaaaataactaattacacagaatgcgactaatttgcgaaacgaatctttaagcctatttggccatgaatttgacatgtggactacagaaaatatttggtatgatggattaatangctaataaatccttcgctgttactgacngatctgtaat

SEQ ID NO: 25288 - DNA, 456 bp, Oryza sativa
  unsure (1)..(456): unsure at all n locations
tgaggcatgaagcagttgagttcatcccattttctaagatttgatagagaagacgcttatganatgggaaatgatagagcagtatccatgttggaatgaatntacgcagagaagaataaatacagaagcatcggtcctgcattgtctagatgcatgcaatttactaacaaaaggtgcattctgaaccacaatattttgttcaaaatgccatctgagtcgacaacagtacaatgatatcgaacaaaacatggtaatgcacctttaccctggcacaaaataacaaatgatggaccaaggtacaaaagcatggtaccaggtatttaggttatgatacanagtttgcttatttatcagctagttgagtaaaacagggaaatgctgaatccttatcatgagtaacanaaatcaacggtagagactctctgactccaaagttgcagcaatctcagtctccca

SEQ ID NO: 25289 - DNA, 336 bp, Oryza sativa
  unsure (1)..(336): unsure at all n locations
cgacagcagacgaatttatttgacatcagtagtatgacatggcatgctcaagtactatatttcattactagttgggtgtaattattgcaaattntgtgaaatgactganattttgttcacctctctagtttcactcaggtttttcagcaagcatttcattgacatggtaattaaaaagtcattgcccccttttcaggtcagaaagcagagtgaaaaacagacccaacatgttgatcaaacatttcatcactcaaaaatggtgatggaagatgatcatcactccaatgaagctaatgatcacatcactaagagcacaaagcgatcaatctctgtcct

SEQ ID NO: 25290 - DNA, 420 bp, Oryza sativa
tgcaatcggaatctgcacagaggaacaacagtcactgattgtttagatagcatatgacacaatatcatcgatgctgtctcttccagcgaaatcaatgacaagacatcttatggctgttgatgaggcagctcctctatactctgttcgtgatacatttctcatgtgtatgctttcatcgggcatagttgggcttcggcctcaaacacctgtaccagatatgctgatgatgattaatctctttacggtctttctactgaaaggacagattccagctgcccatgcattagcttctattttcaacaaaaacctacacaattcggaatctcacatgagaataaactggataaagtgattgatactattcttgagaggtggttctcaacaatatcagtgcgaagcaatatgaagacatctctctct

SEQ ID NO: 25291 - DNA, 295 bp, Oryza sativa
ttcacttaccccatatcccctctaccccctccagaggcccttatctcatccccacaaccactacctattcaccttctgaggaacttttaataccaactggcaaatggaaagctaccctcttctgcctaagccctaaccggatcgtgggtatgattgtcagatggacaaccttgctagatggacgccttgatccaaaccctgaccgagaaaaggcagcaatccctaacgttatgaaatcatcggagtcactgagagacccatagctgctgagtgcagctctagaactcgcacctca

SEQ ID NO: 25292 - DNA, 459 bp, Oryza sativa
cttcttgttgattgcatgctggacaattattatggagtttcttctggggctgcagcggcatcatctgcaccagtttctccagtttcagaatcctcctgtgacatcaaaaaagatgtctaaatgagaagccaagtgtgtctattgacaagggtcaacttcttttgcttttatattagcaggggaagtgaaataacatactgctactgtgctacatgccacctcaacaactgtcagtattacatttatacgactcttcagcagaatgcagcttcttacctcaaatattgacaaagagatgcactacactcttgtgctataaacctataatataatctgcacaggccctctcgtaaaaactggaaaatgaaatggtcgcataactgacctactatataatcttaccttgctcttacagaatctaggaaatagaacaagatatctaaatgtgactagatagag

SEQ ID NO: 25293 - DNA, 217 bp, Oryza sativa
  unsure (1)..(217): unsure at all n locations
tcatcatcgcgccgagaagagcatccgcgggaaaatgtctgcgcgagaatcattacattcatcttcgcgctgctcgaccgtctcccttaagaacttatcgcgccggaagttgctgtcgcttaaataaaactccacctgcgacaaccaaaccanatcaaaagctcaaaccttccccccacanataaatgctcaaacaaaatcgccaaagggggagaaa

SEQ ID NO: 25294 - DNA, 481 bp, Oryza sativa
  unsure (1)..(481): unsure at all n locations
acctgcggcatgcaagcttcgttggtagaggtgatattaatctgacctctgtttactatcttcgaacatatcactcggntcataactgggaatagctcccacgaacaagcagcccggattcactntctttacattccgnttacttcccattattatcttcaggttgtcctcagttagcattcaacgtattcctctacacctttaaccttgatgcgttctttccccttggatcatcttccaagacatggcattacctggtaaccggtgcttgcacttttcactccgtgtagcttctgataccgagatgaagatttcactccttgccttcatagaaacacttttacctaggtcatcttgcttacttaaagatcaggtgactgttgcggngcgattactatcatgagtcctccttgaacgatgcagaacatgtatctggttatacaacacctttcggcctacttctttcatgctggagaacatc

SEQ ID NO: 25295 - DNA, 420 bp, Oryza sativa
gggctgctgggcaaaatttgaagaagcacatgcagttcaagccccgccttcagcttggagctccccgtgctcctatgacggggccctcttctcatcctggagctagctcaagctcagcacctcctccttctcctgagtatgatccaaatgctttcttccatccacagtttgcttactttggaacgcaacccaatgaatacttcaacccggtacttggggctattaataccctaagtgaaagcattcaacgcttgtctaccgggcaagaagcattgcatgaggatgtttgtggcttgcgcaccgatgttggagacttgaatgcttccatggggagattgacactagagtgggtgcattggattctcgagtccaaatgttggagagcacccaagcttttctatatcatcgtcttcctgatgc

SEQ ID NO: 25296 - DNA, 366 bp, Oryza sativa
  unsure (1)..(366): unsure at all n locations
tatacacgggttttttttgtgtggtaggtttggaaacaatacagacaccttgcttttattctgtggattgcattgttcattattattnttcctactacagtgaaatatattttggtgactgaccttgatctttcttgtcaatgcttcaggatatgccctaagttctggtgaaggacgagtttctatggaattctttgatctatctgagtctggtcaatctaaaaagtatgtgttctgcatcttagctttgcgtttaaaacatttgtttcttggagcatgttaattaagacttaatataatggactaagaatcttccatccaaacagcttttctgttttacagaacaattttagtttcctgtcctca

SEQ ID NO: 25297 - DNA, 474 bp, Oryza sativa
  unsure (1)..(474): unsure at all n locations
tgcagcttttttcactatggtcggtccatcttttcctattcagtnttttgtgcgttgaatttgactatttgaattgatattaaagcatgcgcagcttctggtggaatgacctttggctggtcgaataatgtgtggtgtaaccaaatcaatccaattcttgcacaaactgcttgtagtcatcaaaattcacaaagtaagatatcatgagcaacaattggttaagcaccccatgtagcctagtgatttcagngattngtatagcacctcaaggtcataagtttaaatctccatatgaacgaatttcaaattatgttggttgagagactaagttcctaacttagatggctgccaatatccggatcgataaagaggccgtgttaaaatatacttatctaaaaaacaaattgttaaaggcctggtataatccctggaaatattacgccctgtcacatcgaatatatcgacacatgtatg

SEQ ID NO: 25298 - DNA, 363 bp, Oryza sativa
gtccttgaggagataccaagtagtaccaccttttttttattgtaaatttggtatctcataggtacctcatggtaccttctaaaggatggtaaaattgctcttaaattttaatgtaaaatcatgctctcggtaccttcagtaaaatttggtgtctttcaaggactggtaaaattcttataatcttgtctcatgtcatctcaagataacattatcaaccaatcgtgtcaacacaacatcagtaagtcatcttgactttgactagaatcattcaaaagtgatagagaagcgcgagatgcatgattgccatgtcatgctcagagaagtacaatatttgctaacttgattaggacgagatatggatct

SEQ ID NO: 25299 - DNA, 312 bp, Oryza sativa
ttaatgacttctaagcgaatgagctcgcccaaccattccggcaatatttccaaggtcttccacgagcacaaatatagctctctgagggagaccaaactttgaaggaggtctggaaaggtgctcaacccactggaaccttcaacttgaaaaaactcaatggtggcaagatggtgaaatattacccacatgtcaaggggatatttgcacgtggtgatgaccacaccaaaaggaagaagtggagatcaagggttccaacccttggtctgggacaacttatcgctatggtcaagaccaggcatactttaggggata

SEQ ID NO: 25300 - DNA, 487 bp, Oryza sativa
  unsure (1)..(487): unsure at all n locations
ctataaatactccgctctagacaatgtnttctccataaacaagaacatgattctgtataatcaaataaaaactcttggaaaacccattagaattagaggtacaaagggaaagctttatactccacgaatagaagcgttaaaacattaaaaacgagaatactaacgaaggacacaaaacgaaacatcaaactccaaaaatctaatagtaagtacaatgataaaagatttagaatccgagtagaagcaccatgcatgaaacaaagagaatgttccattgataaaaggaaacaacatcaaattccaaaattcaagttcaagctaaagacttcagaatataaatggaagcatgataccaaggcaatattttttnttagataaaagcatagaccatcttgtagaaaatcaatagtaagtaccaagttaaagaactaanaactaaatacaaatgtcctacggtgaaaaccaaataatggtattataaaacaac

SEQ ID NO: 25301 - DNA, 452 bp, Oryza sativa
ttaatcacgcagcagcaactgaacaaccaagctacaggccattttttctatcactcataacggaaagagtagcagagagtttttacttttctaaaccttgcatctatacgcatctcagtgaggaagagtttcaatgctgatggaagatggttcatctctgtgcttgagaaatcattaggataaaaccgcgcaagcttaatcaacttatctttgtcccaactaacaaagttatctataggactaaatgcacccatacacaggagcaaatctgtggttacctcatcaaaccgttcattaagctcttgtagatgtctatcaacgacacttataaacatgtcaacatggaagcgaagcatattcttgattctataaagacctcctatctttgcaaccgtgcgatataaagagccatattagcgaccttgatctatgcttacacacaagattggctt

SEQ ID NO: 25302 - DNA, 477 bp, Oryza sativa
  unsure (1)..(477): unsure at all n locations
tatcaatatgtgatcaacacatattcgtcagcgtgtacttcttttttntcttactctccacaggaatatctttacaccaatcttatcatgagcaatgttntgggagatgagcctggcacacctttggcagcttctcaagtaatctaccctacaatctgaagtctattattcgtcaactctaccttttgatgtacggatctttcacctttggtattgtctaatcacaagttgcgaggaatatctgcaatcacccagtaatggtgattggatctgactttgaacagaggggtgaatcagaagagaagaaggatgctntaactgacattatccgaaaaggtttattggcggtcagtaacatcgatgatattgaagtcgacgactacagttttgccagcaaagtagcttctactatatatttggtggatatgctcatcaaagaagatataagatcttgtattttctcatctccaccaacat

SEQ ID NO: 25303 - DNA, 488 bp, Oryza sativa
ggacttaacgacgagctgcagctggtgatgttaaagtaatatctttttggagaaaagaaatagaattagaatcagatgaaaagactttatctagtagagtacgagtgttagaaaatagactaaataaactagaagtagaattagagaacctaaaaaataattgtgatattaaggcattactaaagaataagaacatacaaaacaccgaatttaaagagcaattgataacactaaaagacagtaatactgctaaaataattcaactaagagaggccataactaattttggaaataaatatatagtaagattgcctttcaaagaaatattaggtataagaattcctgttaaaataaagttgacacccaaagtatcttataaagtattagcactagtagacaccgggtgtacaaagaatattattcatgacaaatatttcataagatgtcctgaaatagttcacacaattgacgacaataaggcagaagtt

SEQ ID NO: 25304 - DNA, 426 bp, Oryza sativa
  unsure (1)..(426): unsure at all n locations
tatcataacaattctggattgtccggagcatgtaagactgttcattatgtgtatgttntcccaaatgcgcaaatacattgcacaacacaatctacacagttcagactattcaagtccacctggattctccggctagttcattgtcactgtctgatcaacacatgatcacaaatggacaatgaacactcgatcaacgcatgataatgcttcggactatatgatccagctgttttagcctgccagacaagtgctagcctagacctagactgtctggctatttcatgtttcaaggtaaaagcaagaaactttcaatgcaacttatgctcgaaactttcacattgtctagcacttgaagagagaggttcacaacctagcgggcaccacacctagactctagcactntcaaaacatgttntgacgtaatga

SEQ ID NO: 25305 - DNA, 354 bp, Oryza sativa
  unsure (1)..(354): unsure at all n locations
taattcaactagaataaaaggttggtgaaaantaaaacgatgtgacggaaaagttgacaatgtacgtgtataagagagttttgattgatggaaaagttagaagttgaagaagaattttgaaactaaaccagaccttaatacgtgttgtccttgaattattgccactactagtatttattctgaacggcattgatacccgtacgttctagttcaactggaaatagtacacgagttggtactactactaaaccatttgtatagttctcagacattgtagactgtgtttagttccatattacacatagaaacttgaacaaatgaaacgaagagaccgaaaagatgtaaagttatgtg

SEQ ID NO: 25306 - DNA, 438 bp, Oryza sativa
  unsure (1)..(438): unsure at all n locations
agctcgagctgaatataagaggctctattgttctatattgnatactaaaatagaaagagagtagagtagaagaagtcggaagaattccggagttgtcggcaatcttctcctatttttcttattctgtgtataactttgaatttaatataatattcttctcgagtaatttagatttatcttgtgagaattatctcttggttagttcctaaatagcatacgtgattattggtcactataattaactgaaatatagtgattgctttggtgagttataaacactaaagtagatagtaattgcttatacgtggtgtttaggtaattgttatccagtaattgatgtgtatcccgcagtacgtttgaggtgggtgtagaggtggtgatagccctcaagatcacttgtaagtcctctctgtgcgtgtcataatagagcgacatctg

SEQ ID NO: 25307 - DNA, 331 bp, Oryza sativa
  unsure (1)..(331): unsure at all n locations
gacataacctgacctacactacgagtacacgttaacctctcgcanacgctccagacgttgcagaggatgngctgatttcctactttgccattttaggatgagagccctatggcgaggtggaaacatgatctaccgctcctggagccctacgccagaatatcactttgtcaagagatgatgcgagccgactgtgcacaacaagacctcaacaatacgctggctcgacgtgactcaagggctcacgaatggccatctactagaaggatagggatcgaccagctatgtccactcgtatgaagatctatctcacaatatatgacagaggagctta

SEQ ID NO: 25308 - DNA, 88 bp, Oryza sativa
accacgggaaaacaaacacggcggccccccccaacctttaaaaggcccccggccaaaaactttaacaggccccgggcaaaacaatcaa

SEQ ID NO: 25309 - DNA, 423 bp, Oryza sativa
  unsure (1)..(423): unsure at all n locations
catgggtacctgctgttatgcttgagttgcataaaggctgcaactagtgcccacaaacagtgtgaattccaaaacgcagatgcactttgttcctctcaagtttaggtactctgttaacctgtcttcaaattacaagatagaggtctcttggtcatagcacgccacgtatggtaactgaagtgttcgatcagcttgcacggcaaagtgtttgtaggttgggtgttttgtgcagtttggttgatgcccgtcataccacgaaatgaagtgcttctaggtttcctttntcctttataaacaagaagctctcgtgaaagctaatctgagtgtcttctgtagtgtaccatatttgcataattgatagtggtcaggtctccgagtgtgcagaaatcatgctagctcgttctgctagctccgcaatgatgc

SEQ ID NO: 25310 - DNA, 403 bp, Oryza sativa
  unsure (1)..(403): unsure at all n locations
aatgcaataacaaagatataactctctatagttattaagggaactaacaaggttaagaagcgtgatatatcaagcagtatagggcgctttgcaaacgaaccatgaagtcggaagactgagaaagagcacatcgagtgaagaggataaatctcgaaaggtaatacgaaatgctttaacaaacgctgcggccaaagaaatttattntgatagtggagattaaggtctctatgctagaatctaggggagaactggtgccatatggaccaccagcgagctacgcccctactgcggtctaggcttactgctggaggggaaacaatccatgtggaagctacgaacagctgccatgcacctcggctggaaaagtcttcaagctatgctgataccgtgccccaatggacgc

SEQ ID NO: 25311 - DNA, 393 bp, Oryza sativa
  unsure (1)..(393): unsure at all n locations
cttatgtgggccgctagcgaaaacaattttcgcttgcggngcgcataagccggcgtgcccgaaggacgtttcgagcggcatctcggtttccgctcaagaaataagtctatttgtgtgtacacatatatgattaatttatcaaaaaaaatattactttttttaatgtttgcgcctgatatttttttaatgcatgcatacaaataaatttataccaaactatntcttgatcctacaattatcatgtcaccatattccatatacaaaatattatcatccatcattgtcacgcattataatacaataaaattcatcgatacgtccaacaagatatacatatattatgaattagcatctaacacttttccctacaccttcatttcttatgtatggttt

SEQ ID NO: 25312 - DNA, 392 bp, Oryza sativa
  unsure (1)..(392): unsure at all n locations
gcagcttgtggaccaataactacatatatagtgtggctctcgaactataatttatctaaaaacattttactccaatacgacctagataatatggtctatactatatggcgtcctgactattctaccggtcctatcacgatgtctggatatcgaaggcgatctatatgtgaacgcaggtcaccatctacattgaagcatcttctctaatcaatgcgttgggggcacaattgccatgcgtaccggaggtgcaaaatgccgtggcccacggacctttttatatcttggtttgacttttttctaagataaacatttntaagcttaatcaaagttattaaaaatatagaaaccattttaacacattacaaacatactattcaaatatatttcatatt

SEQ ID NO: 25313 - DNA, 411 bp, Oryza sativa
  unsure (1)..(411): unsure at all n locations
atcggatttatcccgcagattgtcggtatcggctttagtggatcttggcagcaaggagccaaagacccgacagattccttcggggcttcaccaaacacacatgtactcggagaagaccctatcccatatcgtaaaatctaaacagtgcgccctcttcgtttagtttaatcgcgcgacgcacctncgaccgtccgatctcattatctatttattttcggcttacgttatcgctttctccactggtcctttactgcagataggctgacacaaccacgtagcaggaaggactgagatagacatgtatgccttttttctcttcaataaagatttctctcaattacttatccgatctacaatccaattacactattggtgttcgtacanataaatcttcacaacaagatcttacat

SEQ ID NO: 25314 - DNA, 415 bp, Oryza sativa
  unsure (1)..(415): unsure at all n locations
atatagcttttggttggacaaaaaaacaaattgtaggcatgttgtcaacagtcgggatagaagtacagaggggtagacagttagagagagaggttatgatggatgatactgtgcaattgatctgtatctagttttttgtctgacacattcttggagatatgantccgtgacgaattttgtggaactacatatgatctcatatctcgagcacctgtcaatctatgaggcagatgctgattttggtttataacagatgaaagagaacttgttcacacggttcgcttcctgccactacagtttacacctctcttaagtttatgaactcgtcatagggactgtttgaacaattcctattcaaggataagtggactaggagccgcagatgctgtttatctctatgaactgtgagatatat

SEQ ID NO: 25315 - DNA, 420 bp, Oryza sativa
  unsure (1)..(420): unsure at all n locations
ctcagcttgggttactctattacttaccttttactttgattgtctaactttattcaaaataatccaaaaacttgcgctattaattggataaatggcttaactccctcctttcacttgtctttagatgccgcgctacaagcctgagtacttggttggtggtgagggatttgaccaggagttgcgtacgatgtcctttgccataagatttgggactgcccctttgtatgcccagattcctcatgatcgtcacgaagagaagtgccgagtcaaagtcaccttgaacagtaatagtgaagatatcccatcagtgatgttcgaagatggaggaggaaactacatccatgcatgtcaggaggtggcaaggatcgccatangagagctccgcgatcgctacagtgatcagttggccgacactgagta

SEQ ID NO: 25316 - DNA, 312 bp, Oryza sativa
  unsure (1)..(312): unsure at all n locations
gcttcaaattatgctgtcaaactttgacattttttgtgtctcttctcttcaggagcagaggaaaagaataaccatttgttcagctcacaaaaatatttatcaactaggtcttaccactaaggaactgtgttgttggcgaatcatacactggatttagtgtacacaaaacaaattaaccttttgcgggttctttaaacacttgataaaagcgtgtggaattnaactaaaatgtacatggcctcttgacatatacgtggctattctttttaaatntgtgaacatgtataatgatacgctagcgactatatatct

SEQ ID NO: 25317 - DNA, 391 bp, Oryza sativa
atgtttggaaaaaataatatacagcgaaagcggtaatatttcttaccttctaatgacccttcctggactataccgtaagagttcttctctagtcggcctccatggggtgctaagttctgctgctgcaacttttgtaacattcttcctaagatgcctacgcttcctacaagtaatcaaataaattaatattggcattttcatttaagattttgataaataaaatcagtccttacctcttttttgctgtcccattgagtgggcacttggcactagcttgcctgtggcctttctctccgcaatttttgcaagtcataggtcctctgatcatcttctgtccctttccattatgtggagcaatatacgtgtcaccttccttctcaccttcaccctc

SEQ ID NO: 25318 - DNA, 270 bp, Oryza sativa
atattgctataatggaggaagagctgtagaccaaattccagctcatcgacaaacataataagctcatcggagggtggcagaaagagctgaacgaccacctgggaaagcatgttactgaactctaaagagtgtgacaccactggcttccatgaaatgtcccatgctccttccgatgatcaacctgagtagcccaatgctgggctatgccttggagaatttgagtacgccagccaggaaaaataaaacaccacaacaatgttttaggatctg

SEQ ID NO: 25319 - DNA, 468 bp, Oryza sativa
taaagatgagtgcaagacattcttaataacctaactagttaattcttcttgactgcaacttcaaatctatttgctgtgtgaaaaaatgcatgtaccgctttgagcgcctaagaaaaaaaatgcatgcccttgtatttagaatggttatttcagttagctgaactttcactattatcacttctagaccatggttgaaccttcacgtgttcataatcgatgttgcaaatagttaacatatgatgttccagctccagcggtatcgatagtatttagatttcattttcaaacaataaaaccagaaactttacacctgtaaactaccatactgtgtataatgatagttacttactaggatgttgttttttcctttattgttagaggactccttaaactaccatatctgtgcttgttctgctgctgccaacacatgttcattacaccagatacaaccatgcataacatatacat

SEQ ID NO: 25320 - DNA, 383 bp, Oryza sativa
  unsure (1)..(383): unsure at all n locations
ggcagacgcggagtgcgggtaaagcgtacatccactgcagtgtgagtaaatcaaatctattccaatagccgtgcttcgggttattgagcaccgggacgtgtattacacttggctagactaaattcttaacttgtgtgggatgggatattgcatgatgatttntatgctgttggagccacttcctgagaggagggaaggtgtacgtcctcaaaaaaccatggcgacatgtcacgtcctgataaattcatcccgaaataaaaatcattcgctaaaaggaataatagaattaattaaaattcgaaaagaaattggcaaacactataatacgtgcaagagaaattcagatgtggcccggagaaattttgtaaattcttcttggtcta

SEQ ID NO: 25321 - DNA, 473 bp, Oryza sativa
  unsure (1)..(473): unsure at all n locations
agagacgaagtcgccaatgtcgctacaccacttgttcaagctatgttccttaataacagtggtccgagtgcacttgacgcaaccgaaatctttgacaagctgagagatgcaccggatgtatacttcaagaatatcaagaaagctggaagtatgggagctagtatggcattggcgatgaccaaatccttgtacccgaggattgaaattgataccattgatggctttgcagacgggacaagtgaagaagctgctcttgatcttattagtaaggctcaaagtgcggctgacaagattgcaagtgatgttgtagagcaattccgcaacaacgaccttcagccaagcaataataactctgatgatgaaaggactgattctgactgagtgtanatgtagcaaatggaggctcaatttgacaatactggtgatttatgctgtgcttgatagttctacccaagtctttgatttcttaaaag

SEQ ID NO: 25322 - DNA, 276 bp, Oryza sativa
  unsure (1)..(276): unsure at all n locations
atctacattgcgaaagctatatgaaaataatcaatgtccatgtccagttgcaatgggaagggtctctgtcttatgtctcaacttatggcttttaacaaggataaagatgctgcttgtgctaagcactcttgtggtgatggtggaactcataatggaatcaatgagaacaacacgatcactgatgaacatgggcttctaggcattcacatgcgcccatattatgactctattataaagggtgtngctactggtatgggttcctaatccaacttgaat

SEQ ID NO: 25323 - DNA, 384 bp, Oryza sativa
  unsure (1)..(384): unsure at all n locations
tggatatgcctggacttataataccatcatctgatgactctaaggtatgacagccaaagcaagaagtttgttattactcattccttgctgatatgaagaaaattaacaaatgtgatgcaacattctcaggtatttctaaattattacaatgagtcccttgtgagagatgagacctcaaacaaaatcgtcagctttggtgcaattgcaaaaatactangaggccaaaatccaaattatggtatttctgccccaaaagtaattgtttattctgccangggtcctgatcctgaggacaactcactggncaatgctgatatcctgaagccaaatctgatagcacctggcagttccatttgggtgcttggagttctcttggattggact

SEQ ID NO: 25324 - DNA, 342 bp, Oryza sativa
tttttctctgagccaagtcaaactactttaagttaacttaaaaaggtctgataagattctaaaaaaataataacatttttcattcaagataaatttattatgaatacatattccattatatattaatttaataaaaccaatttgatattataaatattaatatgaagttgctatatatttgtcgacaaattttctcacaaaaatttgacagatattattacagtacaatcgtagtgtaattacactgtaactataatgtaacttatacgtactttcaaaaatctctttgtaatatgttatttcggtaaaatggagggtgtgggaacaaatccttacacatat

SEQ ID NO: 25325 - DNA, 409 bp, Oryza sativa
  unsure (1)..(409): unsure at all n locations
tctgggttgctcaccgtaaatggtttcttttttatcaacaaaggtctttcaacaacttgcattggttgctattcaaacatgttgcattattggctattcaacaccttactcccttatctggaaattntattggctttctatactaggggggatggtaggcaagctaacttggggtaggagatattaatatttctctattttctcaccatccacatgttaaaattttagaaattttggaatgacatgttgacatttgaatacacgctgctaaagtggcaagatatgacaaagaagcttttgttaagctcttccgcatggttcgtacaactgaatctttgccacattgactaacaaatggtgatccttacaatgcattattagttgttaatgctgataacatgcatatttc

SEQ ID NO: 25326 - DNA, 428 bp, Oryza sativa
  unsure (1)..(428): unsure at all n locations
agcttggaccatgattattttaaactgcattattggtgttatgcaanttttcttcatcaccagtgggcatttcttcatgcatgatggaagtcaccgctgaaatcatttcaatttatttatgctcttatctaaattaataagttgtcaatgaaacggcagaccatagattgatctgcagaccccatagaccctgttttctacgtttctatcctacttttttttcctttccaaaattgtaccagcaaggtcccgtttatcttaatttaatcaataataaagggtgcatgcatgttatccatgagatacccactccggtgccctctaattgtagtagaaaataatatgaaccgttgatctcatttgatcatatgggtcagatctatttctactaccatcacacttaatggtagtagaattgtggagggata

SEQ ID NO: 25327 - DNA, 320 bp, Oryza sativa
atgctccttatatcacgaagaagatcgacggccagactgggatttgttattttaaggaccatcaacacaaacccttctgacctcatgctccctctacttcaaatacttcttctaccaaggcaactcgtacttctacctcagctgctccttcttcctcttgtgcaccacaacgttctgagtcttcttcttccataaaaaaggctcttagggctatcttttgtatgtgtgccaagacagctaagaaggtaaagaagatagagaggcgtcagaaggaagattggattgcaatacgcaaggatgtctctgacatttctgatgat

SEQ ID NO: 25328 - DNA, 473 bp, Oryza sativa
  unsure (1)..(473): unsure at all n locations
agcttccacttttggaattggcctgccttttctttatcacaaaggcattnaannnagcataaataagtggtgtacgatactcaggctcaacacttaaaatacatatatatcataaggcacaacaacatatagtaagacattactttgagagagttgttgtattaataaaggttgcatgcatccttgagccagctgtcaacatatcaggtaaatatctaacagcacaagagtcaagtaaacgcaacgtataagtgtcatcatctatggaaaacttcaacatccgcaaggatcaattaccctggagaagaagtggctgtatataggtattgtaccaaggtaagtaaaaccagcaacccatatagaattatgtacctgccatcaaagcagattgtagaataagattaaatagaggggtgatggaatttcttctagatatacatataaacagagaaatgacacaatagtggtttcag

SEQ ID NO: 25329 - DNA, 319 bp, Oryza sativa
  unsure (1)..(319): unsure at all n locations
ttgggcttattgcaatggctgaagaattatgagctgagatggctgtacggtcacttgagcgtcttttacagtatggcgagcagaatattagacgggcagttcctcttgctcttggcatactctgcatatctaatccgaaggtatgcaacatttgaccaacataagtttttgtaaggatcacgatctaagttaaatttgaagtaatgctntgatgattaagtgtaaaaaaaactttgagagaggatgcagaatctaaactccagttcaatgaaagtgtgatcaattggtttatgtttgaaaagagtagttaaaaaaggag

SEQ ID NO: 25330 - DNA, 328 bp, Oryza sativa
tatcatgagtacttatcttgcctaccttcagcttaccttgcgtgactacatcgcgaacataatggtacttgatatcaatgtgctttgtcctctcatgaaacatctgatctttattgaggcatatagcactttgactgtcacaaaacaagttaatgcaagaatcaactccacaaagctcagcaaacaatcctttcaaccaaactgattatttacatgcttcagcaatagccatgtattctgcttcagtggtagactgggcaacaacaggctacaatgtttgctttcaaccacagcacaactaccaatggtaaatacataacctgtgagt

SEQ ID NO: 25331 - DNA, 475 bp, Oryza sativa
  unsure (1)..(475): unsure at all n locations
agctggccaggcgaaggtaaaggtataaccccgtcatattgttattgttgttcatcgnctgatccatgaataccaccatgaaaaatgcaagccaactgttgatatgaactccaacacagtgaattctcagctctcaccaagagatgaacaccaaatgttaactagaaacgctttaacacacagcaggaatgtgttgcctgacttgttttgtagtcggcaccaccatcccaaccttcgtgacctcatttgagaaccctttcgcaacaatatctgccagatgataaataacagcacgacactttgttgcactcagtttcctcctgtcatttctctcgagggtttattcacttactgcctgctatatcttgcaatccttntttttttcgaatcggagaaatgttttctgctttctttgaacatcattgcaatagaaaactgtntactgctttctttgaacatcatcgcaatataaaag

SEQ ID NO: 25332 - DNA, 470 bp, Oryza sativa
  unsure (1)..(470): unsure at all n locations
cataacgtagatatcaagttcagtacatcaacagaaatgaatgcactactaaaccacttatttctggcaaaatcgagtagcttgttgaaaaaattaccgggcaatctggttgatgttccagaatatttgtataaatgagagtaaaactatccagactcttagctgaagcaagctcccttagatcagccagaatccgcactctggtttcaactttctggagcacaaaatcatagagtgggtaaagttacagaaccaacaaataagcatttgtgaagaaaagtctaggattacagatgttcgatgctaaaattgtaaaatccagtttaattatacaatagcacaaaatacatggtatcgtgggtagcttggactttgaatgaaagccacatgaatggaagttgcaagtatacttactgtcacattaatgtgttctctganaaaatccataagcacttcttcatcaagcctca

SEQ ID NO: 25333 - DNA, 268 bp, Oryza sativa
  unsure (1)..(268): unsure at all n locations
attatacctaagtctcaatagagaactatgtaataagatattgtagcttctggctgattaaagggcacattttatcattatggtaaccaaatatatttgagttatataccaagtataaacgaactacacttttgtaactaccatgtattacanttaaataaattttaaaagaaaaaaatatcgacagatgtatggttagcaataaaatgttcttatttgtaatccaaattatatctgtcggtgatatgggcccggnggtatcacgtct

SEQ ID NO: 25334 - DNA, 361 bp, Oryza sativa
gcggtagaccgcttctgttgtttttatctagccacccgtgtggcccaaggcagagcgtcgacgacgtgggctcgagtcaaagcggccacgcgcagcgcgcttcaacatggagcggccaagaatgaggaagatgatagcgcgcccccgccagctcctcctcttccttcatttcaccttctacaagctaccctatcgaaagaggtggtgcgcggaagagatggtcgcggatctggatgttgatgagcactgctgctcctccgcggatctggatcagtgcttattctatcatattactgttagctgattggtttctactggatattactattggtttattgcataaccattagtcgattgtgtc

SEQ ID NO: 25335 - DNA, 443 bp, Oryza sativa
  unsure (1)..(443): unsure at all n locations
tactcagcttctcggtntatggtctctgcccgaggcatcgaggccaacctttatattatactagctataaagcggatgcgcccccgcagcaagcttatggatgtgcaatgcgtcaccggttgcatggccgccctaagtcggttcatatcgaggctgggagagaaggcgctacccttatttaagctcctcaaacgctccgggccgtttacttggacggaggaagctgaacgtgccctcactcagttgaaggcgtatctcagctctcccccagttctggtcgtcccggagccaaatgaacccttgctactctacttagcggcgaccccacaagtggttattgcggtgttggttgtggagcgcgatgaagacaatcctcattccgcgcacccccactctgtgctggcttggctcgggagagagcanggaggagaggcccccgagcc

SEQ ID NO: 25336 - DNA, 422 bp, Oryza sativa
ctgggatgcttactcttgctaaatttgctcattattggcttatagagatgaactgcgtggctcctctatatatacatgcacttttaactcataggcctccacatgtctggaaaacacatagttccatatagctctatatggcctgactcaccatcgcgtgagcggtacatatctgctataaccgtctttatgatgaactattcatatgcataatgcctaccttctaggcaaaaataacaataatttgtctctcctgtacactgtgctacctcacatcacatggttggatattgagtgggccagcgggacccaagggtaaatgtcttatcttaccatatactccttcgttccaaataaaccaacctatgagaggatgatatggttaatttacggcttaaggtcatcatatgactaaatgtgga

SEQ ID NO: 25337 - DNA, 421 bp, Oryza sativa
  unsure (1)..(421): unsure at all n locations
tagcttggcgagacctatctagtattttggtaacttaataaatgctgaacaaatgttacagaattgacatgaatgcttataataaaaaaaaaaccccgaacagatgatacaaaatccctattatgaaactntaaggagcatcaagaggcgattcatagaaggccagtgtatactgtagtcgtagaagaggtgaagtaacatattaattaccactagcactctaccatccttgtttgaaaaanacaggcaggcaaacaaaaattaaatgtgaacatattaaaagaaagaaataagatagtctgtacatatttgaacattgtaaaagaaccaagcagaaacaactagaatgtgacagaatttcatttcatgcaaataaccaacaattgcttgcactgaaaaacacataacctgcaattcactg

SEQ ID NO: 25338 - DNA, 376 bp, Oryza sativa
  unsure (1)..(376): unsure at all n locations
agcttantcatgaactgtagctggagaattttttattattatggaacaacatccatgacagttctaatgggaaaaataaaaaaaacaagttgttaaactaaagaaagctgcattaactttatgaatctatacagcgactgatacttgtcaaattggtagttaagactgtgttacaatgtccgaccttgccatcatagtggcatgatttgcaaacgctgactcgatttcttctttcacctagaaattataattgggtagaacatcaagaccatcattggacagccaaaaataacacatggctgaagaaaatcctacttaggataaactttcaacagctttgagtgaaaatactatcttctagatagaaacaaatgag

SEQ ID NO: 25339 - DNA, 431 bp, Oryza sativa
  unsure (1)..(431): unsure at all n locations
agctgaattataagaggctctattatactatattgtatattatattangaagagagnacagtagaagaagtcagaagaattccgaagttgtcggcaatcttctcctatttcttttattctggttattactctgaattcaatataatattcttcctgagtaatttagatttatcttgtgagaattatctcttggttagttcctaagtagcatatgggattattgttcactataaacaactaaaatatagtaattgctttggtgagttataaacactacagtagatattgattgcttagaagtggtgtttatgtaattgtatacagtaattgctgtgtatcccacactantttgaggtaagtgtagaggtggtgacagccctcaagatcacttaagtcctctctctctccgggtacgtagtagagcgacatct

SEQ ID NO: 25340 - DNA, 326 bp, Oryza sativa
accggaaaaggagaatgtgtgtctacttcaccgacctcaacaaggcgtgtcccaaggatcatttttctcttcctcaaatagaccaactggtggactcaacagccggttgcgaagtgttgagctttctcgacgcttactccggttactaccaaataagcatggcaaaagaagacgagtagaagacaacattcatcacgccattcggggtattctgctacgttaagatgccgttcggactaataaccgcaggaaacactttctagcgcacggtccaaggtgcacttagcgaccagctcggagacaatgtcgaggcctacgtcgatgac

SEQ ID NO: 25341 - DNA, 448 bp, Oryza sativa
  unsure (1)..(448): unsure at all n locations
tagtcacctgctagctccatattatttataatcaatataatagtcaatttataccataattatctataaaaatatactgcgctaataatacctggtcccacatgtcatacacacgttacgccttagagtccgtgctgcagctgtctatagactgctattgtacctgctcttatttgaaattcctgacttcacacgagaatctgacttcccactatgatcgccactttcaccttgtggcactagccgcactactactgtgtataacacatttgtactataatgtgtcttcacatctagtattgngttggtttttacaggacgagagatgatctaataatactattaactagtaacgtattacanacttanaattaatttatctgacatttangaaagtttatcacaaggtcgacaaaacacacattatctttgaaatatttactgaaca

SEQ ID NO: 25342 - DNA, 478 bp, Oryza sativa
  unsure (1)..(478): unsure at all n locations
ctgngagggatttacggacgatgaaatttctcatgctatttttcaaatagggcccctgaaatcacctggtccagatggctttccaaccaggttctatcagcgtaactggggcacaattaaagctgatataatcggtgcagatcgccgtttcttccaaactggactgatgcctaaaggggtcaatgatacggccattgttcttatccctaagaaggaacaaccagtagatttgcgagactctctgccgataagcttatgtaatgttgtctacaaagtggtatccaaatgcctggttaacagattgagaccgatcctagatgatcttgtttctgtggaacaaagtgcctttgtgcagggaagaatgataactgacaacgctctcttagcctttgaatgtttccatgctatgcaaaagaacaagaaggcacaccacgcagcntgtgcatataaactggatctatcaaaagcctacgacagg

SEQ ID NO: 25343 - DNA, 388 bp, Oryza sativa
  unsure (1)..(388): unsure at all n locations
actgtatttattcaaagtttaagaatgggagaattatttttctaaatcttgattgggatgacattctactggctagtagtgatgtcaatctactgcaggaaacaaagaaattcttgtccttcaactttgacatgaaagacctcggtgaggcttcatatgttntgggcatagagattcaccgagatagaacaaagtatgcattgtgactctctcaaaagacatatatagaanaggtgttgaagaaattcaacatgtacagatgcagtgctacacctgctcctataatgaaaggcgaaaagtatggggcatcgcaatgtcccacagatcagtatgagctcaatgaaatgaaaacanagccatatgcgtcagctgtatgaagcctacagta

SEQ ID NO: 25344 - DNA, 389 bp, Oryza sativa
  unsure (1)..(389): unsure at all n locations
tcaccagagcccatcaaggtgccgctcatcaggtccaaccctggattttcctttccagcaaccattaagctacagtaatgaatgtggcacttgggatggtgcgagtatgaattcactctggttcaaccagaatgatttcaactgcagcacaatcttcaccgtgatgccaccaggttcaccatcagccctctcaacatcaatggggctgaatcttcccccagaaaaatctcgtcacggaggcactggcattggcaacaccccgttctactgtgatggtttcaatcctagcagcagcggcagtactgggagcagcggaagcaacagtatgggattcgagccacatacacaacctcattntggaaacagtgtattccatgacagatatcgac

SEQ ID NO: 25345 - DNA, 394 bp, Oryza sativa
  unsure (1)..(394): unsure at all n locations
agcttcactgtgttcttactataaaccaaaaattcttattctattattatacttaaacgcccgagggtggacaaccaggggaaacggcactggcagataagccccatatgtcagcatctcaaggagccgacctaccgtggttcgggacaacgtgtgcggtccaacgccgatccacgaaaccggtggctcgggtcggtcacgaaaccgaccaagcaacgctagggtttgtcngctcggctgccgagctgatgcaaacactgcgttggcacggcaagcagaacggacgggcgacacggcaagtggccggcacggtgcggcacgcgcggcaagcggctggcatgcaccggcactgcgcggcaatatgctgcaagacttgcatggtagcggtgcacgg

SEQ ID NO: 25346 - DNA, 468 bp, Oryza sativa
  unsure (1)..(468): unsure at all n locations
aaaaaaccttagaacacatttntcacacttgcttgtatgtgattatctattccatggaacttacttacacttcaatatccatctaagaacttacctattaaagcccgtaattgggaatggaagtagaaggggaaattccagaaaaaactgtatgcagcaagaaaataatagtggtactggaatgtatcatttctgtactacttatatgaattggtggtgatgggttgtgctctacacccccaatccttcaatcaacctttggtgaaacaatcagcatagacgtgtgtcattttactcatttgtacttctattgaaccaataaatagatgatttaattctgttcatatgtatgtggntgtcagttgatccaagttaaatattttaaatgtgaggatttttttttggcatttgagtaagccaacttatgcgtgtttatctgagatttgtacaagagatgggcaaatatgc

SEQ ID NO: 25347 - DNA, 411 bp, Oryza sativa
ctacccctaactaagccaaagctcaaacatggcagtggtctgcagtgagccggcgcgtgcaaacatgcgttcgggcccaagccggccgcgccaaggcccaagggcatggatatacacacgcgcgggcgtgtgcgccccatggtggcagcgtactccgctggcgaggggttgctgtcggtgtatcgatttaaggaaggaaaagcctgcggcgcaagccatggcatggcatgcattagctagagcggcgtttactcactggctatggctactcagctcggagttgatgccggccggccggccggctggcactgcagccatggcagtggctgcagtgtaatctgatgtacctgctgctactagaaatgttccgtgtatttactccttgcacacactggatcaatggcactgcta

SEQ ID NO: 25348 - DNA, 426 bp, Oryza sativa
ctttttttcttttgcgcccactttcaactttcaatattaatttccatgaaacttattctaaagattgcacaaagcaaccaattgctctacctatcattcattcactgcccattatttcatctaccttgagattgttgctttcctttggaatgcatctgaatttatgtttttgccattcatttgctcactttatattcttatatagattggtgtattttattccaaggaaggtgcaagagtggtctggggctatgttgatcgtattctaggtcagccatcacttattagagagtcatcacgagggaaatatccctggtctggtgtcttctcacgtgctatgagtacaatgactagtaaactgaataaaggaagcaacttggggaacaacgggaatgggtttggtgatgttattctaaatccttctct

SEQ ID NO: 25349 - DNA, 329 bp, Oryza sativa
  unsure (1)..(329): unsure at all n locations
agctttacgtgttttttaaaaattatggatactctacgtctggttagagcttttgaagggtgtgtttggttcccggtcaagcttggatgggatatggtggtctttttttttttgattgtgtgaatatggcgatctatttttttgaagttgtcgggacaaaggtggatttggcggtccaactttttatttgattggaggaagtatggtggatttgtaggtgtggtcacctctcacttgagatggtgaatatacctccatcaaattaatacataatacaattntacaccactacctccattataaatacacatagaanaaagaanaaaaga

SEQ ID NO: 25350 - DNA, 396 bp, Oryza sativa
ataattgacgtggtgatgcagatatgcctcacgcaacatgttatcgccatgatctgacagccttgtacttcatgaaagccttgggtgattttgtttggatcactccttatgtattgtattgcactagtagccagccacttttgctgttgtatcttgttttttccctaacaaatttcactttctgtttgtatcttgtactacaagatgattaatacatccatagtgaacagaaagtgaaagatacaaaccgcctcatatttgtaacatataaaaaggaacctctttcatgtggccaactcacagaggttaatgtatctttaaactttaccccacattttctgtagtgtgtctaatattcttatttctttcgctacgtaatgtctggacaaatcaata

SEQ ID NO: 25351 - DNA, 477 bp, Oryza sativa
  unsure (1)..(477): unsure at all n locations
agcttcttcagcggcggatccgacatttctagtgttttggcttctcgcgcagatccagcagcggtggcgacgttggcggctcccgcgggcagatctggcggaggggacattggcgacagtgggtggatctatgggtgtttatgttatttgtgtgtttgtgttgttgtgtttatgtgatgatgatgttgttgatgtgattgattttaggggtaattntggggccgaagcggggggaactcgcactcgatgcattggcttgattccgagccaatgcatcgagccgacccttttttcttttgcatctaggagaccttaaaggtgccggttcctaaaccagcacctttaagaggactcanaggtgccactatctaggtgttgtgtgggaaaaccggcacctatcgcctattcagtagtagtggtatttatgntgctaggatccanacccatcacatattnngttgtgttccctatgcaatc

SEQ ID NO: 25352 - DNA, 425 bp, Oryza sativa
  unsure (1)..(425): unsure at all n locations
gtgcctatcattggagtggtttgggtaatttttctttnttttgntagaattcacaatataacagtgtactagcaatctagcatatgttgataattttcaaatttgtagattatgatggatcaaaacatggaagattcagatattgagcctgctcccaagctcattgaggtggttnttcaaaactgcaaaggcaatgtggatcaatgggttgagccttacctcagtcttacaattgatcgattgcgtcgagcacacaaaccatatttgaaatgtctccttgttcaagtggtaagatccctttgttttcaaatcttgctaatcaaatgatgttttgttagtgttgcctgagatcactntcttagaatcattgtttcaagcttatacgatgaactggtacgtgcggatgccctggtaactagtaaatg

SEQ ID NO: 25353 - DNA, 470 bp, Oryza sativa
  unsure (1)..(470): unsure at all n locations
gcttgagacatcgactctggaggacgatatatagtattccgcanatgagcatganaagttttccttcaaaattccccaggattcatgctcacataagaaatacccagagtcctgttcgattagtaccacttccctatgtgaggaccacaaccacctttcggtcatcatttctaacatgtatagaggtgttggtgtagacgcttatatttatcataaatactgcaaatctcgtatttgtttgtggcactaatcttgcagagcaatgtccctaaggtcgagcttgtgacaataaacaaagcactgctaggagataccccggattatcatggtaagctttctgtcacaccccaatccggcaccgncgtacaacagcacctgactggagcgtgtcgtatgaaaaacggcgcgaaaccgcttctacgaaaccgcgatctcagtaccagtcccaggacatagcgcttgtacccacg

SEQ ID NO: 25354 - DNA, 274 bp, Oryza sativa
ttacttgccagatgctttcacttccattattgatgaaccttttctgccaataacacgccccattttggcaggagggacatcctagactgacaggatattcacctcaagaacataaacatcaaggtcaatttcatttgtatgacacaaatatcaatcagcagtttatcacaaatgtcccggtttaccaagttgaatattaaataaacttgaaaatttaagaatacaattgaagacatccctgatgtgttagtgatgcttataatttaaaatatac

SEQ ID NO: 25355 - DNA, 432 bp, Oryza sativa
  unsure (1)..(432): unsure at all n locations
gatcttnagtcacctgctgcatgcatgcttgacgaatcttcgaggaaacccgttattttttatatccgataaccgcaactatacgcaaacaatcgaaaacctaaacaaaaaaccaaaagaaagatcctatttagactaattagtagtgccattaaatagatctcaattttacggaattactggaagtggaacggagtctatcggatgagcggtttggaatatatggattttcgaagtttattggatttactaatcaaaggaaaaaggatttaataatttattaaaccctttttggaaagaaaatgaaggagggatgtgatttagacttactcgggcggcttaagctcgagccaagggtcatgcgcagcgcggtcaggccattgtgccggcgcgggcgcgggtggtctgcccattatgggcgcggagagagag

SEQ ID NO: 25356 - DNA, 467 bp, Oryza sativa
  unsure (1)..(467): unsure at all n locations
cttagtccacctaaaagtttgatacctacaaataaaatttgttatgacttatgatatttatgatatgaaacagaggtagtacgtacagtattacagcacactgaccataccagacaagtcagcgtgttagtctaaccaagcaagtcaatggtcgagctagctaattttatggcagacgacaagtcgggcacgtgcagtcttgccgacaaattcggattagctacagtattacgcagtcatgttgttttgtaatatatgccgcttcggaaacgagcaacgttgtttttaattatgtcagagagactagtattcagcatcctgaggtggccttttcgttctaaatatctccttntaatgccaagacagcttttagtattggttaaggagagtgctcagatccataaaatattgattgtggttagtactaatgcattatgctgaataattgtgcggtaccataataatat

SEQ ID NO: 25357 - DNA, 454 bp, Oryza sativa
  unsure (1)..(454): unsure at all n locations
agctntctgaggatctgggtgctgcccctatctttgtgttcaacaatggtaataattgccatatttnttatatcttgatcaccacagctgacctcctgaatcgacactaaactctttaaatatcaggaatcaaccataatgatgaagttgatactgctgccgatgctccttttgtaaagtatgttctgaactctctattttattttctgtcaggtcaaatgcaccttgatgtgttaaatagtctccactttagaattcacctgtgacgtcctagctatggctgcacttccatggatatggcatgtgagaaaactgatactatctttactgccatcatagtagtgctccatcttttatctttgcatatctaaatattanagatcctaagaatgtaactgcatatgatgtgtctcattgaatgatgctaaaactctcgccttattttcttactatt

SEQ ID NO: 25358 - DNA, 366 bp, Oryza sativa
  unsure (1)..(366): unsure at all n locations
ccttaatactcacttgaatntgatgggatccaatcacatttggggaatattttatgtcctttagcgatcttgggtatagcgatccttgcgagggaaaattctctgttcgcactatgcatttttgggataactcccaaaattctggatctcctcggaaaagggtaaatctgacccattccggacaactccaaaacttcttgggattatggcattttttgtgatctattcaatttaacacttggagagttgaggtccttgctctatgaatttcctgacgattataccgtacacaattagtctcggctacaattttggtgttctcttgcactctatatctgttggcatgttggatgttagtgatttttc

SEQ ID NO: 25359 - DNA, 430 bp, Oryza sativa
  unsure (1)..(430): unsure at all n locations
agcttncatagctcagccttcaccgccctcgctttggtatggcaacccacgggaaacagtcggntgtcaccgccaccaccactcacacggtttgtcaccaggcctatccaagctacaacaggagtgccaagatgccatcggtgccacagtggtggatgatcaacgatgaccgggccaccatgatgacgctagcaacaggtcaagctggctgtatttctagaacaatcttcgtggcttcgatggacgggcactacctttcccttgggtgtgaggagaatggtcaacatgaagtaccgcctgcccagtaagctattatccatggatagtagtagtaattaagatgaggaggcgagatcaaggaagagtagaatctacaaacctggtcacctatgtgcacgaaaattgacattttgacactttccanaaacta

SEQ ID NO: 25360 - DNA, 294 bp, Oryza sativa
ggtcagacattgtctgtgtctatatcacaatcatgcatcttatacttcttccgtacacaaatacaacaaattaaacgaaggggtttaatattttccataattaccaggaattccatggagtactactttcacccaactatttctcaattaggtggtggttgaatcttctgaagatgaagatgaagaataactgtttcacgcaaaacgaggtggtaataacgtgtgctcaatcgaattttaattattataaacttgaaaaacggattaatctgatattttagaacaatttttata

SEQ ID NO: 25361 - DNA, 414 bp, Oryza sativa
  unsure (1)..(414): unsure at all n locations
gtaataaagataaatcaagcatatgagataaatgtgttcgatacaaacaaacacaaaatgttcagctcatactaaataggtaagtaataataaccatcctataccttgtatgaaacaagcttgtgtctacttgtttcaacatatgtgtcatattacctacaactacaagatttatatcaattaatagtaatagctagaattgcatatgtcactgaccatcatacacaagagaccataagaccatctattgaaaacatcagctcctaatcgagcaacgtccattcacattntccaatacattgtaacaaaaaaaagagtctgataagagtgacagatacctgcaacatcttggccatcatacgtgccgcgatacacggtgccgtaggtcccctgagcaatgacgtaccggatctc

SEQ ID NO: 25362 - DNA, 446 bp, Oryza sativa
agcttgccgttcgccttgggaacgacctccgtgttcgtcagccactccggatggatgacttcacggatgaatcccgcctccagaagtctcgccacctcctcgcggatgaaggcttgacgttccggagcctgccgccgcactttctgccggaccggccttgcgcccggccgcacggcgagacggtgctcaatcacctccctggggaccccgggcatgtccgctggtctccatgcgaagacgtcagcgtttgcccgcaggaaggagacgagcgcgtcttcctatttgccatccagaagaccactgatccgtgtggtcttggatgggccgtcgcccaaggcaacctccttgaccgggacctcgtcgcatgtggcaatccgctgcctcggggcggtgggggcggaggtgccaagcctctcgtaccaccctcgggcttggtcgagcagcga

SEQ ID NO: 25363 - DNA, 230 bp, Oryza sativa
aacatgccctaacattgaaaaatcccaagcaacttattctcagatggctcaaataaacgatggactccatgacttatcaccggagtgatcaggaacgatacttatagccttggcttacggtgtcacgaactaaaccacacactatctaagtccaatatgtagcactgactatttatgggatctatacacacacgtcgccatatacaaccgtcaccgccttgctatcgtac

SEQ ID NO: 25364 - DNA, 447 bp, Oryza sativa
  unsure (1)..(447): unsure at all n locations
agcttgtgtgcatangatatgtcttatataacatatatgttattctactaacgaaaacatatgataatntttaataactaaaaatataattaattggttatgtcatataaaaaataattcttttgtataaataatatccagcataacaaactaataaatataaatatgtctcacacaacaaattcctatactctaacagtatataaatttatatgtttcttcgtaccaaagtgtaaaatgaacttttccctcgtaatttaacgatcaacgaaataaataaggtatgaaaggatccaagctaatattcgagggtacatataggaatgagcaaacacttatgatcatacatgagactnggtaaaaattcaggggtatatggagaatntcttatagaaanacatatgaattntgagagacaagccgagaaaacatgagatatatagtcta

SEQ ID NO: 25365 - DNA, 423 bp, Oryza sativa
  unsure (1)..(423): unsure at all n locations
aagagagtctggttttgcacaaggaccccctattaccgatatttgcccagttcaccggcctcggcgctacgctccttatgacgtgtacacccatgccgagaaacatgagaagttcatgtcaggtctcgatgatgaattgaccaattagatgatctccagagactctgaggactttgagaagcttgtggacaaggctattcgtcaggaggagcagcacaacaaaatggaccgaaaaggaagactagtcagttcagggtttcctcggggaacaatcagaagcctcgcttcatgactggacagcaggttcgatcttccaccatgaatatctgtcagcaccatccctactacagcgtcaaccacaacagtagtggggcagcacaccaccacccanactctcacccactaatggcttcaattcagtca

SEQ ID NO: 25366 - DNA, 135 bp, Oryza sativa
cagcttttatgtttggcaagattctaccagaggttcatcgagaacttcttcttaatcgctctgcccatgacacagttggtgaagaaagaagaaaaatttgtgtggagcccgcaatgcgagaatgcgtccatactc

SEQ ID NO: 25367 - DNA, 420 bp, Oryza sativa
  unsure (1)..(420): unsure at all n locations
acaccctactcctcgtgttgcgaatatggatgaagtttaccaaaggttcttcactctaaaaagcgcgctcactttctctcttctggaggtcaggttttctgggcatcggccccttatcttagtgggcagggtcctccttttatagctcaaggggataccacatgcaccgcctctacctaccctctatcggagggggatcccactccactttgggcttcaaaccgtgccttctccccgaagcttagcaataacacggtctcgagtggaaccctgcgccgccccccgcctgacacggnggacagccctgtcatttcctcataaatgaacgatgactcgccatagcccttcctcgagtgacgctcggatgtgacnggtcatacccacccccactcctgcgggtacaatggcgacgtgaggaca

SEQ ID NO: 25368 - DNA, 436 bp, Oryza sativa
  unsure (1)..(436): unsure at all n locations
tcttggagcattgtgcggtgcctacttgtaccacatcattatgaaatgtacatgtgtgaaggtgaatntaaatagcaacatgcagtcattagccacgaagcaaagatgaggcatgacttgagacggaacataagatgaatctagcacatggcatcggaataaaggttgcccaccaatcagtgtgtgaggagtggttgcccatgagcaaagcccacacttgccacactcttaaggtggcagccacagcaatctattatgtgatgaagcattgactctcccttcactccacgccactaatttaactcggggcaatcatacaattccatcaacaggggcatattatggatcaatggcttcttaacaagtctgaagaatcattctgccacatattgaattattccatcctagcttggaagtggaatgtggtattgtctct

SEQ ID NO: 25369 - DNA, 435 bp, Oryza sativa
gcttgcaaatacatcaaaagacagccatgatgtattcttctttatttggaacttcctggcttacatgctactttcatctcaaacacaaccatgtaggaaattggtctcatcaccaaaacatgttctttttttctgaccaaggatgctacccgacttacactaaaagctagtaacaagagttcatcatcacaagaacaacaagccaaatctggcaacagaaaattacatctcatcgatggctgaaataaagggataatacctactgaaccttagatcttggtgcagtgctgacataatgtgacactaatacacacgctcaggtggactcaatgagaacttgagaagcagagcatattactcagatgagttatgttttgcataagtttctgctgcatggcatcgatgagactgaagaaagcaagcctcatgcattac

SEQ ID NO: 25370 - DNA, 300 bp, Oryza sativa
ctctttttcataacatcgacttcctctagtcataaataggtgacggttaagacaaaaattggttaaactttataaactttgaccatcaatttcatattagaatatgtttatagaatctagtaagtttatgatggtatgatagtacttttcaagggcaatctacatgaaccattttaaaactaaacatttgagaagttattaatggtaaaaaatttcaaaagtctgactaaatcttgtcctaaacgccaaatatttatgaccagagggagtagcaaatatcgaaaaactagtatagattat

SEQ ID NO: 25371 - DNA, 471 bp, Oryza sativa
  unsure (1)..(471): unsure at all n locations
agcttacaagatgcattctttatacggggtcctttatctattattatgtaacgccactgtattttgcttagttttggcctatcatgcttgttcattaagtactcgtacgttgtcaaaagaacattgaatttctgatgtacaatcatctctctggaatgaaaaaaaaaactaaagtgaataaatattaacataaagcaaatcatggatcagatggaagaatttaaaacctacttgaatagtttgcgcctttcttctggagggccagcatatgcaattttatttatactaggtgcccagaagttgagctccgattcccatccaggaagaacagaagatggtacaaccacaaggaatggcccccggtcattttttgtttccatgaggtagcataacaaagagaatacctgccaaagtagaaaagcaggcaacacaaagtgaattaanggtaattgtttcaccaagtaacataac

SEQ ID NO: 25372 - DNA, 506 bp, Oryza sativa
  unsure (1)..(506): unsure at all n locations
ctaagctccttagcacctganacattgatttcaaaccacttagaaccagtgttctatagaaaataaataaaaaggtggagagctgctgctacagtttaccttctgatgtattgatagctcaaacaaaattgcagtaaactagtaccaaggcactctacctggcaatatcaggaatgcaatatacagcggcatagatggtaaaagctagcagcgtgcggcacacaaaactggaggagaagataacagtctaacagaagaatgcagcatggagaactggaggagaagacgttcggcaactacttctgaggacgaagtaatgtcatgctggagaagaactatactatggaattgacgaattagtgaatggtttggttatcatttacttaccagtcttccacatggacttgctaagtagaacacagggtgaccagtggttggtgatatcacgttgcaaaggtactaccattcttacagaccattgttgagaagggcatgtgtacacccgg

SEQ ID NO: 25373 - DNA, 369 bp, Oryza sativa
agcttgctcgggcagctggaggaggaagtatattatatataggggtgggactttagtcccgggtggtagcaccaaccggggctaaagatcaccgggatcattagtcccgggtggtaagttaagatctttagtctcggttgggagcaccaaccggggctaaagatcaccgggatctttaacccaggttggagctacaaaccgagacaaaagatactaaacttccaaccgggatctgagatcctggtgggctatagccccggttgtactatacatctgcgactaatggccacccctatattgtggcttcttccggcaaagctgaacgagcaagcttgatcgagcaggggacacataggaccccgggtccga

SEQ ID NO: 25374 - DNA, 370 bp, Oryza sativa
  unsure (1)..(370): unsure at all n locations
tttaagggctggtcactttgatgccaaaaaaaacctaaattntggcatagttgacaaaatattggcaggatttcttatatagttatcaaaatttggcagcaaactaaatggagccactttttttggcaactttgcccaaatttggtaaggttaaaaatggcattaaagtgaacatgccattagtagtagtagttaatacacttcatctcctggttgaagttgaggacatatatgttcctacactacatgaatattngaactggttaattccaacgaaaatcttaattatatgtaggttcatgttgcacacaactactgcttcatacaaaaatacagaaacctaagaaatttatgtatccaaaccggacct

SEQ ID NO: 25375 - DNA, 445 bp, Oryza sativa
  unsure (1)..(445): unsure at all n locations
agcttggtggtgacgaccatgtcaagctgagcatcgctctccactatctccttgcgtttcttcgtggacacattatgagcaatttcagcacagtacatcctgtttgcagaaagacaagtgttagcaaataatacttgattgagaaactcaacagaacactgaacttatgaaatagatgatgctcccggaatcaaccgttgtgatgaagatcacaaagttgcatacctgttgtgcatcataagcagctccagctctgagacgttgtgcaccacaaacttcttgaacttgntgggcaggtaatgcctggtcttcttgtccgaaccatatccaatattgggcatcaatgtgcagtccttgaacttnctcctgacacgtgagtcaataccctttggtctgcgccagctttgctacacgtaacggtagaagtaaaccattacaaatcaga

SEQ ID NO: 25376 - DNA, 323 bp, Oryza sativa
gtgcagttttctgaaattatctcctcttttttgttttttgaagaatgcccctatgcatgttaaaaatgttcgccgagggttcctgagctcaaatatttccccgaaccagctaaatttcacttatggaaatggactatcaacgcgtgtgtatatgaatatgttaacctttctttcttatttgaaattttcagtatacacacaatccgccaatcacaatgcttctaatttgtagagttgctgacccctactttctgtacatgactctaaaagtagttgggtggtccatcatatttcgtccattatgtattatatcaatatcatcc

SEQ ID NO: 25377 - DNA, 471 bp, Oryza sativa
  unsure (1)..(471): unsure at all n locations
agctntanccatggatagaaatttgngtaggtattattcttatcgatatcattggaacgagagacatcaagaattcagaggttagatttcttccgcctgcacagttaataattaaggttcatcgatcgtgtggtatatgcctacttgatgtgtaattttttgccggcatttctaagcattttcacttctgctaataagctttccccaattttcttgtgtcatttcagctccgtgtatacgattcgtcgcacacgaaataaaatggctattgacgctgcaagtagaggatgtgagccgccctctccttgaatcaaagacagacacccggtgctggtggagaatccatgcgtccgagcgactagaacatgctgcttaagatctatcacaaacatcttgngttacctgngtctangcagttgatttgcacatctaatgtagacaagtngggaaattttgatgatcctaaatcat

SEQ ID NO: 25378 - DNA, 385 bp, Oryza sativa
gacactatataatcttcagcttaccccccgggaccgcctctccatcgtcaccttcgaaagcagtttctatagactcaccaagcttcgtgccatgacccacgactttcggggcgagctcgacggaatcgtcaaatacctcattggcaacggtggcaccgacatcaaggccggccttgacttggggctggctgtcctcgccgaccgcgtgttcacggaatcccgcaccgccaacatcttcctcatgtccgacggcaagctcgagggtaagaactccggtgacccgacgcaagtcaaccccggcgaggtctccgtctacacctttggtttcggccatggcacagaccaccaggtatgtatgtacaattgctagttgctacttgctact

SEQ ID NO: 25379 - DNA, 418 bp, Oryza sativa
atatgctatattgctgcacatccatgacaagcatgagttccactatgccctggtgattattaacaaagctctagcttacaaccatcttaagctctgatcatataaatttgagcaggtggcaaactaaccatgatatgatgctgatttgtcatgtacaactactctgtatatatgatccagaatatggagtccatttctgcagctaacaacttgtggtgacccactaattaacatcttccacacagtccacagagatgatcaaagaagacatccatccgtcttccacacatgctggaaaacaacaggccgaatcacctgaactgttctgtcaagtgaacatcaacacaacatatatgtacatcagccatcaaccaaaaaaccaacacggaataccaaccacacactggaagtcactact

SEQ ID NO: 25380 - DNA, 464 bp, Oryza sativa
agcctcgcgcatcgatcgatcgtgtatagagagacctgttggactttaatgtgttctttcaactcaacataatccaatttgagccaacataatcaacagaggtaacagccggctggcggcaaccgtgagaatattgcgctgtggcaactcacaacttcgcaatcgcaagtcatcccgttgcggtgactgttgaaaccgacgtgtcagcatgtacaactcgatcaaattcaatatttgcgagtgttttgggccgaaacatttacattggccggatgggcttcctttcaaaaaaaaaagaacaccacgttgatcatccaataggattaggcagagctagaactaaataataagggggaggcttatgcgcgcgtggcccctccgttccggtgcttttcttttttatttctttacaatttggcgtgcgttctttatttttcacctttttctatatttttaatctttcc

SEQ ID NO: 25381 - DNA, 472 bp, Oryza sativa
  unsure (1)..(472): unsure at all n locations
agcttagtaatgctggcatgcttggttcaaacttcatccaagatgggaacatggaccttgatttctgatatcataaatttcttacggactgaaagtcgtctttgtttttcgattctactagtttcgttcggttttcgaccgataggaccggttttcaccttgatattgaataatgtgaaccctctgatattagcaaagtactagcatgaaagtatgacctcaaggcaataaaagggtagccaattgtgagtaacgtgcgttaattgcgtgcacggtgcatctacatagaaaatgagcagtggtaattattattattatctaaaaatgaatagtggtaattaaatgagctaggccaactggaaggcccagttccaagcaggatccagccaagaaatcagaggacgctcctctgcatgnttatatcanatctgacgactctgtgcgctccatgtcatncatcgtgcgggccacg

SEQ ID NO: 25382 - DNA, 389 bp, Oryza sativa
  unsure (1)..(389): unsure at all n locations
tctgaaatcttgttcaaactgcagtgaattcgtgatactatgacttccaattcaagcgaaagggataaaaaggagtaaagtaaaagaagaatggccaagatttctgaaatcttgttcaaactgcagtgaattcgtgatactatgacttccaattcattttagggtactgtagttcttttttttctttttgaattacaagtaacagaccaactgggtctctgccgttcattcgttcttgatgtccattattgctgagttcggaaagattctctgcacgtacctttgcaaatattctctgttcttgaaatgtaccgtatccctcctgnnttgtacttccacttcagtcaaacagacttcagtcaaacagagattggaatcatctgaagtac

SEQ ID NO: 25383 - DNA, 416 bp, Oryza sativa
  unsure (1)..(416): unsure at all n locations
tttcacttattactaacacgcttaatcatttgagcattagtaaaatcatactcatcaaattgttgttctactgctagctcccaattaatgtangcagcggaatcatactctccatcatagactggtaacttacatgcaacttgtgcaaaattatagtcatgtacctcatatgcatcacgtgaagaagtcgtcatatcttgtccaaggtgtagatgttgacgttgagcatgaccatcttgtttccccttgcgcaatcctgccatggttagcagcaaacaagaaacatagactagaatatacacgcttctatcaactactaggtactggcagctcaaatctcacacacactcaagcttttaacaaagctcttacaagatcttaccaatgcaagtggaatggtgatgtacaccgactca

SEQ ID NO: 25384 - DNA, 444 bp, Oryza sativa
  unsure (1)..(444): unsure at all n locations
cttaagcacctcngctgcagcttgtcataacgactatcaacaataccactactcttatcctttactcngccctgagtaaagctcctggatccactagaacaatgacttcacgttcaatgatatgtggcatatgagttattccaaggcatacctatgtttgtcaaaaccttgatgtgtctaccatgttatcttgggtgattgaagaagtggaacggtccttgactcaaatcacctttactctttctcccaaagaaccttggggttttctttgttgctcataaaaatataacatttactatactcctctggtgtttctctcgaatcactcaatgtgtgtattcgtcaccaaggcattgatgttgccttttcttatcctacctttctactgagccttatgtggaggtcanggtaaggaataagaactagcatacttgattaaatata

SEQ ID NO: 25385 - DNA, 389 bp, Oryza sativa
cggcttgtgtctggtcattaaaaaaaagccgtaaccgtcatgctcttctgctctgaagaaaagccgaaacccacatcagccaggctcttcgtgggtgccgcgtttccgttggctgggctagaacagaggctcatgtcatctgtggatgccacccaaccatggtagctaccaggctttgcccattagagcgagtacatagcaggctgagtgctgtaactcatgtgaggagaaagagaaaaagagaaggaagcagaccggctgccgacggactcaatacttgtgtgatatgagggtgggacatatattaatgggtagatatagtataggaactatacatgaatagctttagattgagtatattatatatgaataactattagatcgagtat

SEQ ID NO: 25386 - DNA, 172 bp, Oryza sativa
  unsure (1)..(172): unsure at all n locations
taagcccatttgcaccttccatacccttaacaagatatcctgagatccaaacgacacttcatcttccccgccggaactctcgccattttccccactccctgctacagtacagagctgcgccggcaaactanggttcaccattccactcgaattcaccttcgaaaagttcatc

SEQ ID NO: 25387 - DNA, 201 bp, Oryza sativa
ctctatttttaacaatggtgtctaagaatagccttatgtgccttggtttcaagggtgtcttgtatgccaatgccatggcggattatgatcacggatggtgtggaatcttgtgagacgttgtaaccaccagaaaaggagtcaagacaattgctctttactcctcatctatttggaggtcacttaactgcttgaacctttttc

SEQ ID NO: 25388 - DNA, 468 bp, Oryza sativa
  unsure (1)..(468): unsure at all n locations
agcttcgtacagttgggaaggagtttattgagagagtttattaatctacttcaaccgatatgcccttaggcacggccatacataacatagaaatcacacgtggaaggggtgggcaattagctagagcagcacgtgctgtatcgaaactgattgcaaaagaaggtaaatcggccactttaagattaccatctggggaggtccgtttggtatcccaaaactgcttancaacagtcggacaagtgggtaatgttggggtgaaccaaaaaagtttgggtagagccgggtctaagtgttggctatgtaaacgccccgtagtaagaggggtagttatgaaccctgtggaccacccncatggnggcggtgaagggaaagccctcattggtagaaaaaaacccacaannnccttgggttatcctgcgcttggaagaagaactatgaaaaggacaaaatatagtgatagttttattc

SEQ ID NO: 25389 - DNA, 419 bp, Oryza sativa
  unsure (1)..(419): unsure at all n locations
atcattctggcatcgagctattttgccgcaggacctcccctactgtatcgtcaccgcagtagagtttaaccaccaaattcgggatggattggtgtgggtcctctacgcctaggacaccagaatatcgaaccatgaacgaggaaaggcatgagagaaatattggctagtaattgtgaagccccaattcttgactggaagggacaccaaaggcctcttgcctccctctctatctatccaagagatggaagggcagagcttttttttggttgtttcatcttttcatcaaagagttgaacaatgaagatagatggcaagtgcctgatcgatttgatcaggtcgtgtaggaacaaggttcaaatcgttcgttcgttaggatgcctcagctgcatacatcactgcacttncacttgacacctatt

SEQ ID NO: 25390 - DNA, 419 bp, Oryza sativa
  unsure (1)..(419): unsure at all n locations
tgaaccccacaggtatgcgttctagtaattgctacttctacctacaactttcaagtattattaaatttaattaaatttaacaaacagcacacagtttgcctttatactctcaatggtcatgtacttctccattaaactcaactctattgcagttgtgtggaactgtaatgatgcacgctgttagtgacttggtcctcattattgttatttgttaactttcagcctttgtggtgaaggcattaaacagaaatcaaagtagcatgagcaagcactaactgggaatctccataatacagcattccagtgagttgaggactnntttttgcactacagaaactaaggatacctgcgtgatttaaaatttcatgtgtattagctcatgaaatcctgtcaacttgttcatattaatatgccacatg

SEQ ID NO: 25391 - DNA, 342 bp, Oryza sativa
  unsure (1)..(342): unsure at all n locations
acaacatataggatgaggagtgtctgatataaatataatactcgagaaaaaatcaagtattttaaaatatttataaatatgtatttctcctcttgtcaatnttgattttcccgagcagatgactctgttcgtttaaacactctgtccgacttgtcatagccctcaagcatcgggagtccgtctaagcatttcccaaacatgcatatgattgacatgagttcgtcattaatggaacaaagtttcacggatcagaatttactactcaggtacttttgcagttattaagagcagaaaataaattatattatctctatgcctttgatttcttccgacgaatactta

SEQ ID NO: 25392 - DNA, 401 bp, Oryza sativa
ccaatctcatttttatatgaaaaccatttgctatccatctccggtgaattttttctggcatttgacactttgttttggcctccatgcagcttgcgatgcgagcggcaatttgcaagatcgatgtttcatgcaactcgccggccggctggcacgtcggcctgtgttacctagctacccccgcgcgcgtgatgatggagaagcacggtgccaatgtggcctctgattgaactggccgccggcagtacgggcactctcgtcgtcgtcgtgaaatataaaagtacagtcatacataactaaaattacaatttgtaattcagttgatatggcatgtaagtgcacttgtgatttaataaaaataatagtgtagtaaatatatatcttgtattttctttaaatataaa

SEQ ID NO: 25393 - DNA, 445 bp, Oryza sativa
  unsure (1)..(445): unsure at all n locations
agcttggctntcgctcaaggtgcttgataatgtttgttcccctgaaagcggaagtacgcttgaaggtcatcgtgctgttgctgcatcatgttgttgaagttggcgaactgagcatcagcagattgttgccattcttgtgtttgtgctatgtgttccgagagggtgtactggatctcccccatctgcatatcaagggtgtccattctccaagtgatttcacccaagtcccaacgagaggaacttgagcgccattcacttggagatggaggcacatcacttgatctggaaggatggttgtccccccattggatgtcatgaggcgcacgccaccggtcctcactggtacttgcccaggttgagacttcgatgctgtgacgtggagcttgggtccatccaggtgcatcccagttggctcccaacctgcctcatacatctgcacgggtgt

SEQ ID NO: 25394 - DNA, 382 bp, Oryza sativa
  unsure (1)..(382): unsure at all n locations
tctattgaatatattntggtgattacatacaaatcggaggtgcctaaaaggtttgcaacttcatcctccaatgttttttttgtcatactacatttgcacctatgttttgcacactttttttgtctccaaaatttagttgtaagttgatgagagagaaaatgtgtgtggggaagaaagaatatataaaaatctagttcatttgctaaacaaggttttataaaatagttgagaaggaaaactctagtgaaagttaatcttaaataatagaaaacaaactaaaatgaaaattataagaagtaaaacacattaaaattagtgtaaaactttacaaataagttttaagaattatatggtgtaataatttatgaattttgatgaataa

SEQ ID NO: 25395 - DNA, 352 bp, Oryza sativa
acacattatcttaaaattatagttcaccaacaacattgatactaaatctgtgatttagtttatgacacatcatctgatatatgtaagtttataatagtttgggttttgtgaaatttacccattctactattatattagacctagtggtacatctagtagaagttttaaatgagtgaaaaagaaaaatataatatactaatgatatgataaatcccgactgaagtaatgaagtcttagagcacccgcaatggtaagtaaggtgctatctataaaacatgtacacctcaacaatagactagattaatagtaaaccacttcaatggtatgtctacatgggtatctatagctctct

SEQ ID NO: 25396 - DNA, 466 bp, Oryza sativa
  unsure (1)..(466): unsure at all n locations
agctttatgatggngacgcacaatttattgcttttatcatattacctctttatgaaccagagggtcccgaacaatcccaccacctcctacctgaacaggataaaaaggatttgctgttagtggcttgcttatttctatcactgtgcatgtatgaagagatctgaaggctatgaaagtgattatacattcttttccaattgatattcaatcaaaacgttcgaaaagaaaaactaagaccatttgtttgatacctgagatcgacgagcttcaaattgaggtttgataagtgtaatcaatgtcgagtctgtcttcattactttgactacagcaggcataaccttgatttacaggtaacgtcagtgaacaatggatagcatgtgctnntaataattatcgaagctgctgatcttatcatcttatatttggagaagattgagaacatcnaaacatcatgaacttgactaca

SEQ ID NO: 25397 - DNA, 345 bp, Oryza sativa
  unsure (1)..(345): unsure at all n locations
taaattgcgatatgccaccctgacccacatgtcattgaataatgtgggtttaaattaggtgtataaatattttaaaacagaggtgtagcccactccaaattaaaagttggcactactcttatcagcaaagacgctgttgtgattgcacacgttgccgtcatgtgcacgccgccgccatctgctantttctcctgtgaggcctggttttagttcccaaatgttttttccccagaaacggcgcatcaaatctttggacacatacnggagcataaaatatagatcaaaataaaaactaatcgcacagtttacatggacatcatgagacgaatcttttgagtttaatta

SEQ ID NO: 25398 - DNA, 314 bp, Oryza sativa
  unsure (1)..(314): unsure at all n locations
agtcgcttgtggcatgatcccnaacggtctattgcacgctcagcgccccccccttccccgcgcgggggagagggcggacgggagtaagccaccttccgcttcccctttgggtcgctggcgggatcgcctccaggttcgcggctcgatacgggcgcccttgagtcaccgacaactaggccgctggcccgcccccccccctgctgacggtgctgccaccggcaccgcctctggtggaccggctcctgccggcaccaatggcggacatcacagccaggatgctctcccgtcgcggcgcagcagagggaagaatccgc

SEQ ID NO: 25399 - DNA, 470 bp, Oryza sativa
  unsure (1)..(470): unsure at all n locations
agcttgacgttgcgaaccactgggtctagtactagtgttgttcgccccgggtggaccactctgtctggatgatccgagcggtaaaacttgattgttgtctccgaccaccgaagatattggggcgtatcgggctgaacagcgttaatctcccgttcagtcagcttttgttttcttttagattcataagccagaggtccgccaaagatgtggttgagctccttacgacggtctcgaaaacctatcggggcatcgtcgtcatcgtccttcttttttgacatgctttgatctccgtcggaggcctttcgtgcattcttggtgttttgttctgcaaactgtttgtagacgaagcaatctttggccgcatgattggaatttggatgatgcggacattgngagttcatgatcttgtcaaaagtattgacgcgcgaacgttgtcgggaggaatgtgtagtagttgcaacaagttcctc

SEQ ID NO: 25400 - DNA, 436 bp, Oryza sativa
  unsure (1)..(436): unsure at all n locations
ttgcaacaaaatgtgacattggttgaaattcagatggtgatatgtgctatttcttgatatgcaaaccagccttgggttcttttgatgatattgctaagtcgatacctcctggtggtactaaccttttgcaagagtatgagaatgtctttctagctgagatacccccaagattgccacccatgagagggatagagcatcaaattgatttgattccaagagcatcattgccaaaccatgctgcttatcgaaccaacccagaggagactaanggaaatcaacggcaagttcaagaccttttggaccgcgggtatgtacgtcaaagccttagtccctgtgcagttcctggtaatttggttcctaagaaagatgaatcttggcgaatgtgtgttgattgtagagccattaataatattactatccgatatcgtcatcctat

SEQ ID NO: 25401 - DNA, 435 bp, Oryza sativa
  unsure (1)..(435): unsure at all n locations
gctttctgaaccccttcttaaatacaaacgcttttttatttgttattaccttgaccacaacgtactctgcatgcactaactctgctggccatgcatcgaacacatggctcaaccactaattaaccaactcaactaactcatgccagcacatgcctcataactgaccaagtaatacatctcctacatgcatgtcgtacatgattccgtacatacaaacttgttcacactaataatatcacacttgcatgacaatgtttccaacagaatttaacataaataggttatggatgaactgcttcacggtaaaattctgaattcagtttttcagagatcaactgtgccttttgggtttcaatatcnagtttgcgaatcacccatangaatctgggagtgaaattctctattgaggatttcaatangaatgtaaacccatat

SEQ ID NO: 25402 - DNA, 413 bp, Oryza sativa
  unsure (1)..(413): unsure at all n locations
cgacagccaaccggcggccactgcgagcgtgacgcgtgttcatatcccacaacatctccgtacacatacggggtgacgtcatccacagctagcgcacccggtaccggtagtactaccgccgcgcgtacgtcgagccaaataanaacgagaggtggtcccgtggatcggatccgggccgtcgatcgcgccatcgacggtgtcacgtggatcttccaatcctactactagtatagtacgtgtcgtgtctgcgtgctgctggatgttttcctactttcctttggtccaatcgctatccaattcagcatccagctagcagcttagcttttgaacgacaaggtatatttcgtaacttgtgtgcacgttgagctatagctttggctaatcgacacgacgactctatacacttacataag

SEQ ID NO: 25403 - DNA, 369 bp, Oryza sativa
  unsure (1)..(369): unsure at all n locations
acactggggatggcgggcaatgctgatcgggctaacctcttagtgtttggtaaatgcaacacctcttgccgaggctgatctggtggtattgcccatggcctcaatttggttcgtgtgaaatgtggactggaggcagtattgttgaatcggtgatcactatgtagtgcttttagcttgaattcatatgctagctatttcaatgactagctgcgcaatcctctccactttcacatcaanggtttgatgtttgagtgatgatctcatcactcatgtatgatttgctaacttgtcttcttgcttaagtgttctgcttttagtccctgagagtgggtgttataatcngtgcatatcangggcatactggaatct

SEQ ID NO: 25404 - DNA, 377 bp, Oryza sativa
cttcttttgctgcaactgcgggttgaatatctacaagagaagcataaaaggctttgagggacaactcatgcagcaaaagtttgacttcagtgtagctgcaacttacctggatactggattaatgcctggaaaccagagttcttctcaaagatagcaatcttttgcacaaaaccaaaagcagaaaagacctgcaattacaggagtcaaaagataagtccaagctatgtgcacaagatgatctataacatcagtgtgaaacacattacctcgtgaagcacatctattgtaacaacatactgcatgttctcaacagatgcaagcagaacgttgctctcttgttcctgctttcttccatcctgcacaaaaccaaaataaat

SEQ ID NO: 25405 - DNA, 364 bp, Oryza sativa
acaccaccactatggaattagagataatgtgatcactctttttttttttgtccaaattgttaggtgaggccagagaaatcttcaactggtatcaacgccacaaagaaaatcagattattaaaacattaaaacaccagggacaaaatagaaacagaaagaaacgaagagaagagggaaacattttgaaggcaaatcggggcagcgcgcgagatccccaaattgtaagagatgtttggtcccgtcgtattggtgccagctgctcaccaaaactcccgcggccaacgacgtgtcgtgccgcagatcgggtcgcccgcgtgccggtgccggtgatccggcagcggcggcggcagcccacgaggactca

SEQ ID NO: 25406 - DNA, 238 bp, Oryza sativa
  unsure (1)..(238): unsure at all n locations
aaactaaactcaataagctttcccaaaaaaaatgctcattcaccttcatagcttttgagaatcaaaagatatgacgatttcttanactggtctgttttgaagttgaactggtcccgttttcactgtagcggtttgatcttcatggtccgatacagacttctcttgttgcataatcctaagcgcaacccaagtagaacatttatgtagtataacattctcatctatagatgcatcaaat

SEQ ID NO: 25407 - DNA, 55 bp, Oryza sativa
  unsure (1)..(55): unsure at all n locations
ttttttttttangatccccttggtgattctccttttggataataaatcctcctgc

SEQ ID NO: 25408 - DNA, 476 bp, Oryza sativa
  unsure (1)..(476): unsure at all n locations
agcttgttgctgtaagacatgaatcatttttttattatctcaaagaagccttaactgattgtgattggaagccagaaattattcctggtgagcaaagtgtcataaaggtgagttcttcatgtcatatctatgtttaaatagctgatgctttgctgtgaattttataaagattcaactctcatataataagttgctcgccacccagatgcagttacaggtgttactgggatagtagggtgtgcacgactgaaggtaatctttctttttatattgcatattctttgctctgcttcctttaatattaggtgttaatattacagaaactcaattatttctttgatgtttcaacaagtatattcaagaatttattgagaaagaaatgaaaatatatgtgcttgaanattatattcccagtgttatattaccataacaacangccattctaaacatatagtactgaaacactgtgaatacat

SEQ ID NO: 25409 - DNA, 423 bp, Oryza sativa
  unsure (1)..(423): unsure at all n locations
agcttcngatgtgcatcgactacaccgaccttatcttttctgtnctaaggatccttaccccctgcctcgcatagatcaaattgtcgactccacagcggggtgcgaccttttgtgttttctagatgcatactctggctaccatcagattcgcatggctagggaggatgaggaaaaaactacgttcattacccccataggaacttattgttatacgacaatgcccttncggttaaggaatgcaggtcctactattcaacgtattactcgaatgtctttgggtagccaattatgacgtaatgttgaggcttatgtcgatgacttggttgtaaagacgcgcaaccaggaaacgttactttcagatctagcggaaacttttgagagcctccgctccgcccgcataaaactgaaccccgataagtgcgt

SEQ ID NO: 25410 - DNA, 435 bp, Oryza sativa
  unsure (1)..(435): unsure at all n locations
accttaagcgacgcggctgcaactggacctattcatatggtaatttaatttgtatgtcanaagcttgcttttactcaactctagctataccttagagaattagcacgaatggggaatcctttgtgttctgaccctcattttagttttcaagtcaatgttactgatgcagtgaagtcaaccacaaaaccttatcttttactcaaatcaaaagtgttcttttaggaaaagatttttttttctgtggagcacttttcactggcattaatccctaatgtaaatctcatatcactatatcagctacaagacttgacctatgtaaactgaaatgactgacatatgctgacatagtatgcatttaaccacttcctcattttctatgagtttactttanaaccgctaaacgatgtgtttttctatataanagaattatataca

SEQ ID NO: 25411 - DNA, 291 bp, Oryza sativa
  unsure (1)..(291): unsure at all n locations
tgatgtgccaataataccaaagtatttgtgtgtcactatgatgtcttgtctgcttgcctgaatgttcttgttctgaattctgaaagtgtgtgagagaacactcagttgcaagccatgaggcccaagcatgccacttgtccagccttttattagagatgagatgctttccagtgggttcttgatccgacctaacgatggtggaggcagngtgatacacatcgntgatcatatggacctcgaggtaataactaataaccattacaatttcttattccaatagttcattcatct

SEQ ID NO: 25412 - DNA, 284 bp, Oryza sativa
cgcgacgagttaatactatttattcaataagcgcggtcaataaacctcccttatccttagaaaggttggtctaatggccgaacccgcttggatatttacctttccctctaaaaaacatgtgtcgcggccgatatggactattcacccatggatataaatatgtaccccccggggctcttggatctatctctcgatcaataccactactcttggtgcatcggcactctcttttcccaaggtgttatttatcacccgccgaacctggcaactgatgctttatattg

SEQ ID NO: 25413 - DNA, 492 bp, Oryza sativa
  unsure (1)..(492): unsure at all n locations
atcctctgagtcacctgcngcatcaagcttgtggaacccgggagatacctatattatgtttcattcaagtagattacacatcctgttttacctttaatttgacctgaaactgaaaacattactggataatcgttaatggtcacgaagatgatggccttcactgtgaagtattcccttaagtactcatctcacactttcaatccctctttccataaatcagccatatcttccaacaatggttcaagaaatacgttaatatcaataccaggctgacggngtccctgtatgaggatacagagtagtacgtattttcgcttttgacaaagccaggtaggaagattatacatggtgagaagcactggccaagtactatgtgagctgctcatgtctccaaaaggattaactccatcagtactcanggcaaatctaatgttccgtgggtctttagcaaactctctatactgagcatcanagtttatccactgacgagca

SEQ ID NO: 25414 - DNA, 235 bp, Oryza sativa
tgagcaaatcataaattggtatagtttatttacaatcacattgaaattgagaacaacaacctgaacacgatttcctctctacttttatgacaaggataaagtacaaaatcgactttaaaacactgtttataattctaaaatataaaattcaaaattgattgtggttataaaccgtgcgcgagccgggccaaactctcattaactcgcatgttgaattgacgtattcatttgcgtc

SEQ ID NO: 25415 - DNA, 254 bp, Oryza sativa
acctatctcaatcgggcctaaactataacccgtcacagatgacccttacctatgaccggcattaactatagcccggtatagcccggtacagatgaatcatctcaatcgggcctaagttaatggccgtcacatatgagtcatcttaatcgggcctaaggtaatgccagataatggccgtgatagatgacgtcccgcctctctcaagagggccttttgtgcccttactcgtgtgcaccccggatagggcattaact

SEQ ID NO: 25416 - DNA, 387 bp, Oryza sativa
  unsure (1)..(387): unsure at all n locations
tatctggtgatcctctggttgactttactatatatcngatgccagtatgtcatttcttattccctaccctgagatccatataagcctaattaaaaaggtaggatgagaaaatgcaaccttaataccttggtgaagaataaacacttttagtgatttgagggaagtcattgagaagacagtaaaagtattgttttatatacatcaaagaaaatcctatggtaattcatcacaagtagtagaggggacttggttcgaggactggtacgttcttcaatcgcctaaagatggcatggtaaacacatcaatgtttacagcctcaagtatgtcttggaatatttggtatgtcatgtcatgaagcaaaaagtcattactctagtaggttcatga

SEQ ID NO: 25417 - DNA, 478 bp, Oryza sativa
  unsure (1)..(478): unsure at all n locations
agcttataaggaggaacttggattgatccatgacatgtctttctgatagaccacaatgcttcngctaaacgagtatgccattgccgaggataatcacaaatcttccttttaatcaacttgatcaaacttttggtagatgcctcggcttgcccattagcttgtgcataatacggtgaagaattcaacaactttatacccatactatcggcaaactgaacaaacttatcatacacaaagattgaaccttgatcaatcgtaatagtctgaggagtaccaaatcggtagattatatgttcttggacaaactgtattgcatccccagaatcagccttcttcaaaggaatcgcctctacccatgtgatgaaataatcagttgccaccaatataaacttatgtactttactcgatgggtggataatcatgccgatcatatcaattccncatgctctgaatggccatgggttaatgatgggatcat

SEQ ID NO: 25418 - DNA, 364 bp, Oryza sativa
  unsure (1)..(364): unsure at all n locations
ctttacgatattggtttctattattatacctaactcangaaatggtacatcacagggacctgccttagagaaagggtatgagagtgattgaactatatgacatcacaacatagatttcggtggtattttcttaaccacaacatttttggtacactagaatttatttgaaaaacatttatggtaagaataaaagctgacaggtgaataaaaagttcatggataactcacacctaccactggaagacaagaacagcaatatgtactaaccaatcacacgcttccaaacaacagtggaaacttgatgcatacacaactacaccctgatgatataattctcacaatacgagaaaagtgttcacagaca

SEQ ID NO: 25419 - DNA, 373 bp, Oryza sativa
  unsure (1)..(373): unsure at all n locations
gtcttcgcctatacgggtgggtgaacacaacacctttggtaagcgtctacatcttcaccgtcggcttgctttcggcgtcgccgactaatgtcacagcgtgcacggctggcctattatgccgctgntggtgggcgtctacatcttcattcgcgacttgctttcgccgcccgcgactggtgtcaccgcctgcatggctggcctattatgccgctattgttgggcgtctacgtctttaccgaccgtgcgtctcttctgcaccgactggtggtttcgcctgcacggntggcctattatgccgctgactggcgtttccgcctgcacgggtggcctgttatgacaccaactgatgctatcttcttcatggctggctacg

SEQ ID NO: 25420 - DNA, 335 bp, Oryza sativa
agagagccacaactcacgggtcaacttttgtgaagactcgctgaatattaacgacgtgccaaacccgggctttgtctctcttgctagatagtaccacaaacatgcatgtgcccacttgatttacgggtcgtctcttcttcggcaattcaattcttcagtacttccaagtctcaaccgcatatattagttctgttgagattatagacatataatgatttaatctattccattaataaatcatgatattacagatgaaaactagcatgaacgcatcattagatctacacatgttaactatacagtataacatgaacagatcaaatatgcgcaacata

SEQ ID NO: 25421 - DNA, 415 bp, Oryza sativa
  unsure (1)..(415): unsure at all n locations
agctnttctaactagcaactccttcgacgagtctcgttccagtcggggccgggcccagtccccacacacctcaccggcagcgcgcactcgatcgttcgcctttacacgcaaaatgattgagcccggagacaattctccacgttgtgcttgctagctgctgctgctgatgctgccttttcctttttcagtttagtactaatctctctctccacacttaattaagctacctagtgtagtactagtactactactactagactagactattagtaccaacgcaacagcggcactaatctttttcgtgagaaagctagttactctagctgatttgtccagtccgggcgcgctagtgccgagctggcaattncggttctagaacgcgctgatngacagatngtgagtgacanaatgagtg

SEQ ID NO: 25422 - DNA, 268 bp, Oryza sativa
ctagctagctgtagtagtgtacagtacacggccacatttgtacagatctgcaacaagctggtcaaatactcctacatgagtgatcatgctgcacgagaaacgtacaccccaaatcagaactcacatgagcatgagcagactatactgatctgctgctctaccagagcacctcgtttccaatacgctcctgttccctcaacctttctgtagtatatactaagatctcaaaaaaaaaacattctgaatactatctctgtgactgacttgt

SEQ ID NO: 25423 - DNA, 395 bp, Oryza sativa
  unsure (1)..(395): unsure at all n locations
agcttaatgtactatttgagaagatggattatttattcatgatagnactcattgcactccggtttagacatagtgattaaaatggaatttctccaaaactaaatctggcccattgcaataagtagaattcacactgaacattaaaactttgcagctaagtttgactgtgggacatgcctaatgtatctcctaccctttatctgctttaccatgcaggtggcactttcagattgcctatgctaattcatttcacgctgcatatccaaaatggtgaagctgacaatgatagcacgtgttactgatggccttccgttagtggagggattagatgatggtcgggatctgaaggatgctgacttctacaagcaacaagctaaactggtgttcaagaactt

SEQ ID NO: 25424 - DNA, 265 bp, Oryza sativa
tcgcatgactctcttcattgcatcccaggtttggggagtgttatttggaatggaacgaacaaattcactccaccaaatggattgcaaatcagtgaactcactagtaacagccctaacacgtttattctcaggaaaatcatggcaagcaaaattctgatcaatggctaactcccaagtaagatatgcatcagggtcatattttccatcaaagcaaggaatggtaaacttgatcttgcctaaagaaatcatcattatcacgtacctc

SEQ ID NO: 25425 - DNA, 416 bp, Oryza sativa
gcttggcaagaccaccatctatggcttcttttctctctatgcctttacagcaaactccgccaaatgtatctgctccacttaggccccctcaacataggccacatccaagaccataccatgctcctgcaatttcgcacccacagaatgcacttttaacacagcagcagcaaaaactaccacaacatctacatttgcagcaacagcagcagcagcagcagcagcaacaaaaactacagcaacagcagcagcagcagcaacaaaaactacagcagcagcagcagcagcagcaacaaaagctacagcagcagcagcagcaacaacaaaatcagccacaacattcctcgcagcatagtcaacagactacaacactcagaaaccagcaacaaaattctcagcagcaaactgctcgtacccct

SEQ ID NO: 25426 - DNA, 463 bp, Oryza sativa
  unsure (1)..(463): unsure at all n locations
gcttaaatactttggagaatgaatgaaatatgtatttaacaccatatcattnggctttaggagtagaaaatatctagaaccctagaatagtcttgcggcatccaccttcaggggaaaaattgtgctctggtgatcttgtcttctgaatttgttctactcctaggatctgacatttcaccaaccggagcctccagcagcatcatgaaaaccaagctagaattgcgcttagagcaaggctaataatatagccaactgcttattgtatagatctttatagcctatctctcaactcactcatataagtggtagctcttcactataaatatatggtccacctgtctgtcttacagaatttcttggcacatatgtctaagccggctataagcttacagcccgcttctcgtgcttccctcttcttcctcattcacctaacattaggcttcttttaacctctattacccaa

SEQ ID NO: 25427 - DNA, 459 bp, Oryza sativa
  unsure (1)..(459): unsure at all n locations
agcttgcagtaagcatacactcttaactctttttataatatgngcatgcacatctgactaagattaagaaaaatgcaggcgcaattcatgaatcttagctgatcaaaccaaagaaagactgtaagccatatatatgggcccatgattgtagcttaccaggaccacccctttaatgatccctttttcttagattccaaacaagttgtcttcaagtttattgtggcagcagtcacattagagaggcacatcaatggaacaatctcaataattaaccaaatcttgtgaagaccaatgaaaccttagaattaacgaatctagttaacataggacatgcatttatgtgagcatttcanaatcacagttgttcctctattatcaactcttnnttgtgagtggaatttctatctttttgcgtgctgtgctattactattntgactggtaaccacaagcatattcat

SEQ ID NO: 25428 - DNA, 289 bp, Oryza sativa
ttttttttttttcgcacaaggcgaaggcaaaaacactacgcaccaactagaaacttttaaactgggccattttgggaaagaaggggacctattttaccctctaatgttgtggtctaaaaaaactccacctcaactatgcatgaccccaccataggggaactctggggcttcgaccctgcctgcaaaattgggcgacaacatccacaaagtgagggacgtttcagaaaggaacttcaatggaaaaaccaaaaaaatcaaactgggaatatactcctgaaactaagcctta

SEQ ID NO: 25429 - DNA, 331 bp, Oryza sativa
cctctttcatagaaattaaaccatcaactaaccgtccactgacgaaatgggtataaatgggtatgttagggactaaaacaaaaatccaggggccttcaagaaagtgagcaatacttatgggcgcataagaaattatctgaaattttaagagccgtaaagaattttcttcaagaaatgatagcacctgtgcatgtacagacattcattatcacaatcccaataccgataaaaaccgctcccgagtgctatctatgaatttcgtgaaaacctttgataactaaccagattaaatatgaaaaaatcatattaaaaatttaaattcattattaac

SEQ ID NO: 25430 - DNA, 455 bp, Oryza sativa
  unsure (1)..(455): unsure at all n locations
agctttcgttcgattcgccggaataaaataattgtcagtgtcaaaatgagataaagggcaaaaaaaaattagtacaacgtatcatcggaagaaaaaatataaaatataattttctaccgtataaaataaagcaaaaatccatatgtacgtagtactatctatctatctattatattctaaataaaatctattaaattctaaataaaatctattaaatttcctacaaacacttccaaaccgtcacatggcatcctaataaaatagagaaatctaaccatcgatattcatttaaatcggtggacttcgttagatctatcttagaataccaaaacctcccatgtccccatatccgtgtaccacgcacgtatcaatttgtaggctccctgttcctttctgttnttatccctatcataattaaaaataaaaatatctttatggaaaataatctcataaat

SEQ ID NO: 25431 - DNA, 436 bp, Oryza sativa
  unsure (1)..(436): unsure at all n locations
ctatatttccattaaggggcttaactcttcatctttttttccaattgttctattggcctaatgattctgttccattctttgtttcagcaaccgtgtgttggatctgattgcccacatggctcttgtcaacgccaagcacnttgattgtgaaaatcctcctccgatagtatctagctaggaaaggctgcaatgttgacggtctctctctgttgtcttggaataagatgtaaacttggaaacaaagcaaaaaaagaatggacattgatgtccatgacattgtttgtagcaggcggttgaaattactctgtatcgacctgngcaagcggaactgttgagtgaaccatatgtcggcaacctgattgattcattgagtccaatgctatgccattctatatntactttaaacatgcttgtntcatgccagaaaatgtcaaca

SEQ ID NO: 25432 - DNA, 374 bp, Oryza sativa
  unsure (1)..(374): unsure at all n locations
gtgtgttcatggtgatgactgatgaacacaaatgcatatgtatgttctgaaaaactatagagatatgacgggggtattctggatattctatcactaccatccttccttcttattnttttattagcactacgatcatccttagactttgaagtcagctatatttaggaataaaattatcaaatgttacacgtaaactatctctactaccataaaaacgaagcccgtcttctcttttccatatatctnctcatgtaaaaagaaagataaataatcacaacaaaaagtattccacaaaaatcaaccatcgaacaaaccantagaggaaacctaacccataaaacattgtccgatttctctaaatcatgttcaaacat

SEQ ID NO: 25433 - DNA, 454 bp, Oryza sativa
  unsure (1)..(454): unsure at all n locations
ctgaagaaaaccaagaaacagaaagctgccgctaccgatgacatgccatctattgacctatatgtggagcaattcttggaggatgaagaaatagaagaagcttgggagaatgcagctgcttacatgagtgagatcagagagcaaactgcaccagccgatactcctgctcaaagaacttcaccaccttcaacacattctacttataagcccagggtatgcattcattttcaatcgattgctcaagtcctttatgccgattcttaacttgtactttgcagaagaagaagctggcttccaagaaaccaagagcacgaatttcatcggtgaaacccttataattcttgaaacttttctttttactntataaacagccgatgctaacccanatntatcctttttcagcctcctcgttctccaactcctttccttcatgaatcgagtgagcatactccat

SEQ ID NO: 25434 - DNA, 493 bp, Oryza sativa
  unsure (1)..(493): unsure at all n locations
ctcagcttgtatggcggctcgcgttatcggggttaatgcttccatctttatgatactttaaccctgtctatgtaatccggcgagttatcatatacatggtgcaatctatgctagtttcgctatatagcttgttatcggctggttcttattattatggaacaatcggtagagttatatnttggtattaatctagaatgtatcgtgtatttaccatctcttgtagattntcgtcatcttggttagatatcatacttgtctntatgcttaatggctgcatcggtgagttcaatctattaagtgttatttataattataatatctggctcgtttatgattatgaatagagatagtatcggggtttcagccgatcttacctganttagccttatgtcttacatgcttaatngatatgctaagtctgttctttatattaagatcttatngcaataaaagatattanggctttnngttgatatattctatctggtttaac

SEQ ID NO: 25435 - DNA, 351 bp, Oryza sativa
  unsure (1)..(351): unsure at all n locations
atcgcggagccgccttcgcctcttgacttgtccgccgccgncgtcgncgcagagaccggnctcaccggaccgaatcgggaaagattcatgccggaagggagaggacaggaaatgggccgcaacaaatgggaagctcctgatctgaagaacgttgatgccgcnaagatggatctcatggcgcaaatggagctcatgccggaggatttgtagagttagcttgattgtgggaggcgccgggaatatctttttaacctaaatttgggatgacgagacaatttggtangtgagaatgagatggcgggaataaagcgtggcagaattcgaatctagttttgaaattttgggagggaa

SEQ ID NO: 25436 - DNA, 420 bp, Oryza sativa
  unsure (1)..(420): unsure at all n locations
actaagcttatatctcgaagaaaaaatgtacnaagaaacccttcgtgtatctcacaactgttggagaaagcccgcatttttgagaatatttattttatggaaatcgcaaaatagggtcaccggggaaaatcccaaaatatgtcctgtcgaacggtcaattcaataggccctatcaacagcagaacgcactggcgagagatcggaagctgcgtcaacaggactgtcaacatccccgtcgaaggcaggctgttaactgccctgttcacaggggtgttnaactgcctgttcaangatatcttcaaatgggcaatcgacagtctcgttctcattttttcatccttttctttacatttgtgtttttttctcacctgagacctgctattaaccttctatgggatactttgttgtgttcatattttt

SEQ ID NO: 25437 - DNA, 366 bp, Oryza sativa
  unsure (1)..(366): unsure at all n locations
gctgttttgtatgtgtatggtgaanaaattttatcatattatgcaggtaaattcaaatntgagcgcaaaacctattgtgaattataaaaaagaaaaaagattaaatggaatgggccaagtatgcactgttcacgaggcccaataaggcccacaatgggaagaaaatatctttggaagcctctgcttcgtttctctggcgaatcctaaccgtttttccctctctcgcgtagctgcgctcaagaccgaaggggcgacngcgtgcgcccgcgccagatccgncgncttcacgccggngaggccggtttcctcgcggtaagcggcggtaaccgcgcggtacgagaatggtaaccgctgggtcgacgggca

SEQ ID NO: 25438 - DNA, 336 bp, Oryza sativa
cataagttctatgtgccactgaaaatattggttaaaaaatggtcctttggtgacactcactaaccatttattcttgaaagactgatagggatgcttgccgcattatgtgagactgcgctatcatatgatgcattcgactcgcagcagctatgcttgatgtgaaaggctgctgcagctgcttattaacacagctgttgatttgttaaatacgattttcttttgagctgtactactatttgttataacatatatactttgtaaattcatttataataggccgtaccgacactgtgactcacatagcctgaacgttttctttacggtatatcttgtgta

SEQ ID NO: 25439 - DNA, 282 bp, Oryza sativa
aaaaacctaagatactgcaattttcttgaacttacctctataaaaaaaaatgctttttatattatagacggtggagtatctagaaaagctaagaaagttcacacattaatttgcagtgtaccttgtacgaggcacagagtgcttttatatggccaagtcacaatgaacattacttctactataaaaagtaatcagattgtcgggccattaccctcttcttcttctaagtggctgatacctctactagacaaattttaccctcaatttaacaacatatttgta

SEQ ID NO: 25440 - DNA, 235 bp, Oryza sativa
actgagctgcttcatgaggaacaaacatttattacttatgagttctaacacaaatagcacttcatacactgatataccaatgtgtgggacagccggcgcgaacacgccgcgctcgtgactgggggccggtgtgactgactgtgcggcacccgcacttccttggcgatgccgcgcgcgcgacacgggcggaccgggcctcgagagagagagaaaatagagcgggaaatctcacaga

SEQ ID NO: 25441 - DNA, 420 bp, Oryza sativa
  unsure (1)..(420): unsure at all n locations
tagacatcaaaatgaaacagtggcttctgaacctgatgacacgcaacattgccattgtgcctaacttaatcgtcttcatcattggagggtctagtggcgccggtcgtctcatcgtcattgcatcggtacaatcttttactacaaatgaaaatatcagtttgcccataagaacactcattnaaaaaaactgccatacaatcaaccatcttctaattttctcaataattagtaagttatttgctaatcgaaatgcttctttcttcacaaaatggacggtatgtaatttgttgacctcattcttctgatatactgtaaaaagaatcaaacctaatgcttngttggttggctgtacgtttatacgatgatctatccttgactacattgcttgatcctctttcagttcacacacagcacagatgg

SEQ ID NO: 25442 - DNA, 466 bp, Oryza sativa
  unsure (1)..(466): unsure at all n locations
agctttccacgccacgagtcttgataaggtaacttaacacgcggaatatcgntgtctacttttgtgaaatcggagccgaatgtctgcccttctgtagttacccctgcctgccaagtattatactagtctagtgtatgcaggtatatatggcagtggcagattttgttttaaaccttatggcgtgcagaaaatgaactttctgagtggggctagggcacttactacttctgctttagtaaaagtttacttgagtgcgtttatgtcggatattttaattatccggcagttcgcagctgatggtgtctttctatatatcttggccatacatatggcatgcttcctactaaccagccattatatatcgacaaaaagatgtacttgtcgtagtagaagtagccgttgcagttgttgtatggtaaatattgtagcaaacagttccaactcttcaagtttttgtaattcaaag

SEQ ID NO: 25443 - DNA, 456 bp, Oryza sativa
  unsure (1)..(456): unsure at all n locations
ctaagcttgtcgtaacatggctgattcgaattagcctggntttcttgaatatgaccaaaatgtagccagaacacaatttatcttaacaatttcaacttccatgtgaatatgtaactatacatttcgtttggtaagattttttttttagtcccaaactccaaccggtgcgtactcttatcctactctctgttataaccattgccagaaggttttagttggctaaaggcatgtagcctactggttgcagtgacctgagtagcaccccaaggtcctgagtttaaatcttcatatgagtgaatntcaaattagattgtttgtggngataacttcccaatttatatggctgcatatatccgcgtgaatgtagaggccatgtaaaatatacccttccctaaaaaaaagagaaggtttagtttatcaacacctgaagtagcctggacaaatagaccatactag

SEQ ID NO: 25444 - DNA, 441 bp, Oryza sativa
  unsure (1)..(441): unsure at all n locations
agcttgccattggcaagtatttgcccggaataataatctctgtcagggagcttaatgccgaaattcagctcttccctcgtgggcttaagagcgacaattaatggcgagtacatctctctcttcgtggggatgaagaacgaccccaaaatcagcgtcatcttcgaagctctcctgatgggcaaagatggcgcaccatcatcatcctcgcaccatgcagacaggtgtacgcagatcatcaggatccaatcatccaacaaaaccgaagacgacggccgattattctgagtcgtactttcttagtctttntttctttggtcttttgtttcccttctctcttggcataagtcggtctaccttaatgcgttgtgaatgaatattcttatcttctaatatattgacgtgcaatccctttgcgcgtcgagaaaaacgaccgattattct

SEQ ID NO: 25445 - DNA, 460 bp, Oryza sativa
  unsure (1)..(460): unsure at all n locations
ttgtggagttacgtctggcattaatatattntgtgatagtcatagtgcaatatgtcttacaaaggatcaaatgttccatgagagaacaaagcacattgatgtgagatatcactttattcgatgtgtgattgctgaaggtgatgtcaaggtatgcaagataagtactcatgataacccagctgatatgatgacaaagccagtttctgctactaaatttgagctttgctcaagcttggttggtgttacaatatagtcctagagacctattggcgcgcggtgattntacctacatgaggtatntttggtgatngatgtttttatgctacaagaggaaattcgtctcaaggtggagatngtaaatatgtgatccgaattttgggcccacaatatattcggattagtttcctagtaggaattcctattangtgtctntctatttcccctacatatactctttata

SEQ ID NO: 25446 - DNA, 469 bp, Oryza sativa
  unsure (1)..(469): unsure at all n locations
agctntcttgatgtcattcttctttntcattttatttctcctttcgaactttctctttnttttgctttttcttttctccgtggagtgatctgaagtgcttgtgttgtatgcttccactatttgcaagatcagagatcatagaccatatataagggtcatgtgattatgaaattatatagtggtggcaataatgctcgggnggctttggtgtgctatcttgttctgttttggggtacaactttntaggtacatgcataaaaggaaaaaaggtatcaagaggcacagatggcatattggtgttatgctcttcacatgaagcttattgaaagagaaatagtgacattctctttagcgagttagctacttcctccatttcacaatgtaagactntntaatattgcccacatacattgagatgttaatgaatctagacatatatantgtgttagaatcattaacatctatatat

SEQ ID NO: 25447 - DNA, 166 bp, Oryza sativa
  unsure (1)..(166): unsure at all n locations
ggtgatggctgcaaaggccgtggatgcggatgtggcggcaataatggttgacctggcacaatttctctgggaggtgggccangacgaggtggatgtgggggtggcaaaagtaaaccangtgctcctgctatgttagcaagcttatgtggaggcggtggtgggggtg

SEQ ID NO: 25448 - DNA, 276 bp, Oryza sativa
caccgggcggcgttttttttttacgccgaccatagggcggggatactccgacgggacatttacaccgacagtgacagtcgtcgagccgttgcccaccttcttgcggaacgcggctgaccacagtctgaatcacctgtgacgttcccacatttagctgccaaactgcagcccatcaagagtcaaatgcgttatgatacggcattaacgatcgacgtggttaggcccacagcctatatacgtggacctgcatccttgagatgaattacgcggattcgc

SEQ ID NO: 25449 - DNA, 490 bp, Oryza sativa
agcttacattacttaaagagatactagagtgcttctacaagaggtggaacaaccaaatggagcataagttgcaaggccgaggtccatgttcattgatgttgtatgaaagatggtgattgaaaatgaaatattcttaggcaagccaatgattatgacatatcagaaggtgattgcttttcaaaaccgttggcaacaagagatagagataaaaaaattcctagtatggtttgtataactaattatctatagttccttattccttctccttttgtcttctttgggtaactatgtttattccttgttttgggtaactatatttattgtatttcagttctttggtggggtgtaggactatcaacaagccgagctcgagcgagcttaccaatctatgcttgagcttgatagagactcgaaccgagctcaaggcgagcctcgtcagactttgagcctcaagacaggcttgagctcgtctcgttcgagcttcgagctt

SEQ ID NO: 25450 - DNA, 505 bp, Oryza sativa
  unsure (1)..(505): unsure at all n locations
atgaggaatctaanattccatacatgtatgaatagatttataatgagttagagacgacaacagntagtttccttataagattgattcatttcccttgtctaggattgtttcttaggtgtctaagacaagagggataatgtgcattattatcaatcaaggaataattgttgatccttttctcaaagttcaattatcagcctttatggtcctatgttctccatccctcccctttagccatgctattatatggccatcttntgcacaatagctaccctgatatgaaccaagagaggatccatgctntacaatttgttcatgtntacaatatatatcaatattatacctatatggaaaccttcagataaatgaagttgtatcattgttctattctattctggaacattatnttcgcacaaatcaatgagtatctttatctgcagaaatngngccttggaattccttcgcgatcacctgatgctgcaccatacttacnntctcatcacac

SEQ ID NO: 25451 - DNA, 398 bp, Oryza sativa
  unsure (1)..(398): unsure at all n locations
agtaagtcggggagagacacaacttctttcatcgacaacaattctttgctgaggctgtcggtgcagagaatggttggtgctgaaggtattattgctatgatttattgcagagtcaggtggagcaggaggagcattggtgttgtggatgatattgtcgatgttgctattggagctgactagctgatgagacaaccgtagggttgttcgttggatntctgcggtcttggtcaacaacacactgagttggcaatccttgtgcacatggtttgtaccttcgcacagaaaacatgtcaccttgcgggtgggacattcacctggtggatggtcttcctcacaatgagggcagagtgtgagacacatgctagcaacgtgtccaatttctccacaacgggtgcatg

SEQ ID NO: 25452 - DNA, 322 bp, Oryza sativa
aaccactctcctatggtttagtcaattgctattattttgtctttagataatagcaggcagtatctactattattatggcacagtttatttgaagttaacagacccacgacttataaacatgcttcatcctccactgacaatccacccactaacaatcctcctatatcaattatctactatgaatcaataacatgctaccgagaccgtttaaaatatcctgatcaaggcacggacaccaatacagtaatctccaccgcatgcgcaaggataactatctcctctacccactacatatcatgggtcacatatcagtgtctataca

SEQ ID NO: 25453 - DNA, 275 bp, Oryza sativa
aagattggcctaatcagtgactttgctagcaaaagatcctaatcctaagaacggacagctcactgaaaatggctgaacatatagcctagccaaaaatgcttcaccccttaaggagagatgaacagctccatataacctttcaggaaaaccaggtactattaaagcttgatcgggatatcttatgatactcaataaatacattgatcacggcagttcgtgtaccacggatatatagcccttgactaaattcccgactcatctgtgtgttcaacagc

SEQ ID NO: 25454 - DNA, 459 bp, Oryza sativa
  unsure (1)..(459): unsure at all n locations
agcttcaagaatggtaatctctcgtctgctgaatcttgatattcttccacgaagagcattgtgcctgcccatccggaagaaatttgaatggaatgccgatgagcgcttattccgggatttcaccgttgcacggttgatgtataaccactgttctgctctcctgaggagggagaacggcaacagttggagtctgactcttctgacggtatacgtgctatagctcttcaggaattgctgcaaatgagcacttgcatactccttatgcttntcacagaacaggcaagcctgcgccatctgtaatttagttggtcttcaaatcaaagtcaccatctccnctgctgacttgtgttccaattggatgtactagcagagggagtaggaacatgaaaagtgcttctcagcatatcgtcaattctggggcgcggaatggctgtctaattgcgatgagtaccttgtgat

SEQ ID NO: 25455 - DNA, 342 bp, Oryza sativa
  unsure (1)..(342): unsure at all n locations
aacactcatgtttagattgcgttgttcgctgatcntttttttttttggtgttacccccttgataattacgccacaagtttggcattaaaggctcacctggatccatcaaaattgaatagttgggttgactggtcaatgattgtttcattaaattaataatgcacaacatgaaaggaattatatcatttttataacttgaagttgctggtacctaagaataatatggctgaagaactatgcctggttctagtgtacatagttcatattgngttaaatggccacagtgcatatacacataaacagataatgtagtcatttatagaagacaatacaagtgacaca

SEQ ID NO: 25456 - DNA, 225 bp, Oryza sativa
ctgcagctaccgcgatcgtaagagccattccattatgattcttaccacattggatttgtgtatgcagatatcacaaaacacacgtagtttgttatttagaatatgatctaaaaaaaaaccacattacaagatcgatcacaaatcaaagctacccattcatggtagctaggctatagctagctagctaaatgggagacgtggtgacgtatgcgtcttactcgatga

SEQ ID NO: 25457 - DNA, 332 bp, Oryza sativa
  unsure (1)..(332): unsure at all n locations
taagtcctctctcttcctaggtcgatggttcaacttcctttagccgtattagtgagtggcattattggtaaaaaaacctaagattactgcaattttcttgtaacttaacctctattaaaaaaagaatgcctatttatatttatagaccgatggagtatctaagaaaaagctaagaaagtatcaacacattaatttgcagttgtagccttgtagcgaggcacagagttgcttttatatatgccaagtcacaaatgaacatctagcntctacatataaaagtagatctagattgcgtgtccaattaccctctcttctcttctgaagttgtctga

SEQ ID NO: 25458 - DNA, 406 bp, Oryza sativa
  unsure (1)..(406): unsure at all n locations
agcttgcataaagtcgcgatgcatgccgccaactgtttggttctcgcttttcgccatcttgttcatcgcagaggccaggagctccgacgtcgcgtgaggcagtggtgtttgttgctagctgatcccgtgatggcgtacgagatggctcgcgcgcgcgatcgtcgtcgttggctctgttcgatcagcggttcaaccggagctcctctccatcacctggaggaaagagacgcgcatgcatgtgtcgtggcactgtcccctcgagatcaacgaatgacccttgaatccggtcgtgtcaaccggccggcacgagagaatgtgaaaaaataaaaagaaggcagaggcgttttatgagccccgtccgtgtttgcggngtgttgatttctgtaccttcgtgttcgctaaagcg

SEQ ID NO: 25459 - DNA, 454 bp, Oryza sativa
  unsure (1)..(454): unsure at all n locations
atgtctcctggtttctactaacaatggcacggatacgccagataattgnggatagctgtgctcaacatcgacatcttcgtcgagacatgatgatggatcaacatgaccattattaggtaagtgatgatgttctaggtaagatcaaatctgcactgccttaattcgagggaaactatgaacctcgtgcttacattaattgngagctagctgttgatagtgaatttcacaagcatgtctttgtcggagaaacaaaacagttatgtgtgcctctagttgtttaactaaacatgcttctaatgattggaaacatctttgtaggcataacaaaataccacatatcttgtaagacctgcaacgatatcttagagattgttatgtcntcatgtattatgctgatattctgctcacacactgcaatgttaatacaagataccaaaagtgtacttatactatc

SEQ ID NO: 25460 - DNA, 396 bp, Oryza sativa
  unsure (1)..(396): unsure at all n locations
catgtgaggagcataattaatcagcgcactgtaatagatttactatagcgcataaactgtttcctctgatcttgattggatggtcttcatttctcctaatgtcaaatgcaaaggatcctgattcctcgacatcatacagcaggaagtgtttttacatatacattccctttgctgtcttgtggttctgaatccaatcattcagtaattaaggaatacacgtgttgcttttttttcttcagataggctaaagtttatcccctctgtcccacacacacccgaattaacctgcaaaattagagtcgtgtccaatcttaagcttcaggccttcaattctgacagccaacgaaggacacgatggctctaaccgacgaagcactatatgactctntgtctcta

SEQ ID NO: 25461 - DNA, 348 bp, Oryza sativa
  unsure (1)..(348): unsure at all n locations
aaaactcaagcttctgcggggttnccatacatgtaggaattgtgataagcttgcatgtgaactcacatcagatgacatggcagattgatcgacttcagtaggtcagttccccaagccctaactgttgattaagctaaatagaaataaacatcttagcatcaatctacattctacttgctgcgcccacctcgtctataattataagaacaaattccaatactactatgacaataccttcaacactaatcttggtatcatgccatcacaggatgcaaactttaagtatgaaaacctaaacatattcactttgctaggtccatgcacagtgactttctccagaaaataaat

SEQ ID NO: 25462 - DNA, 452 bp, Oryza sativa
  unsure (1)..(452): unsure at all n locations
agccttgagagccaatgggctccctccgatgtttctgatgagaacttgaaggatatggtggcgcacgacgttcttccggcaaaggagatcatcggctggcgtccagcgtgtggcgaagcattcccaactcctgacatgcatgaggtcgtggtattctcccatttcttctacgaatggttttctcttccaactttgaaattcttcagggggattcttgaagtttatgggatcagcttgcatcatcttaaccccaattccatagtccacattgccaactttatccacacctgtgaagcctttctagggattaggccacattntgtcctgttccgccgcatcttcttcctgaagccccagccaaataagagcaagccatgcgttgttgggggtgccgtgtttcagctaatgggcactctgagccagaaatatttctctatgcctttcataacatc

SEQ ID NO: 25463 - DNA, 478 bp, Oryza sativa
  unsure (1)..(478): unsure at all n locations
agctnggatatacagtaagtttgttcatcttatatttaatgaacccgttggaaaactaaccataggcgcctngcgagcttgcccgatcaacttatacaatcaaatgctaataatgggttagaatacaataaatgagctttcctgaatggtggtatcttcacaaccacttgagatccgtaatgacatgatctgcaacacagagagttatattgtcttggagattctaaattaagtgcttaccgtctgacctagtacatttgtaaatacgattactacttcctctgtttgatatatattcgtctttntttctttaaaaagtacagacgcagacgctcataatacacggacacttatccttatgagcataaacacatgtatcttaatcttaagattgataaatcatcacagacgcctagctattgacggtatgtcaccaaccactgttggaataattaattgtaaatatgagcacccctgc

SEQ ID NO: 25464 - DNA, 404 bp, Oryza sativa
  unsure (1)..(404): unsure at all n locations
tcaatcactttgaggctgtgttccataaatcaatatgtcatcgacatataaacacaagatcactccctctcccncaccatagcgatagtacacacatttgtcaacttcgttcacaacaaagccagcagatgtaagtgttgtgtcaaacttctcatgccattgcttaggtgcttgctttaggccatacaaagatttcaacagtttgcacaccattccctcctgaccttctagtacatactcatctggttgatccatatagatcttctcctccagctctctatttaggaaagctgtcttaacgtccatttgatgaacgagaagaccatgagaggccgccagagcaagtagtacttgaatcgtggtcaagcgggctactaatgaataggtgtcaaagaagtcctcgc

SEQ ID NO: 25465 - DNA, 470 bp, Oryza sativa
  unsure (1)..(470): unsure at all n locations
agcttgtcaagggacgtccattggataacctgtattttctgcaatggttgaaaagatattgtgattctgtaaatggtggaatcatgaatgagtatgtgccttggttatgctgaatatgtaagataattgcattctgttgctaattatggagttgagatttgagaaggcttgtgttcaattttcagaaactacaatcctgtagagaggaggtctaagggttgcatagaacgcatgctcaaaggtttcaacaagtcgtccaaatcactacaagctaatagattggctagtgcaaattcagctgatggaggacatttgaattgtttgatactatgtgcatcactaaagtattaataagtgagacttcatgtgtgcctttatggttcataggagtacttngctctcatactgtaatgattaaatcaattcaaggccttaagagaagctggatggtgccaccagtctctcatcta

SEQ ID NO: 25466 - DNA, 361 bp, Oryza sativa
atagtcaaagtgcaatatgccttacaaaggatcaaatgttccatgagagaacaaagcacattgatgtgagatatcactttattcgaggtgtgattgctgaaggtgatgtccaagtatgcaatataagtactcatgataacccatctgatatgatgacaaagccagtttctgctactaagtttgagccttgctcaagctaggtgggtgttacagtatagtcctagagactatttggcgtgccgtgattatacctacatgacgtatctttggtgattgatcgttttatgctacaagaggaaattcgtctcaggtggagattgttaatatgtgatccgaattttgggccacaatatattccgat

SEQ ID NO: 25467 - DNA, 472 bp, Oryza sativa
  unsure (1)..(472): unsure at all n locations
agtcgcttatgtcgttactccactcatccaggccatgttcttcaataacgccggttcgagtacacttgatgctaccgaaatctttgacaagctgagagtcgctccagatacttatttcaagaacatcaaagaagctggaagtatgggagcaagtctggcgttggcgatgaccaaatccctntatccaagggttgatatggatgccattgatggctttgcaaacgggacgagcgaagaagctgctcttgacctcatcagtgatgcgcagaaagccgctgacaagattgctgctgatgtagttgagagattccaagatatcgaccttcggctgactgggtctgataagtctgatgatgaanaaactgatacttatngatataacaatggatttgatgatcaatgacggtggagggctcaattgacaatactgatgaattatgctatgctggtngtccatacttacttctgattc

SEQ ID NO: 25468 - DNA, 186 bp, Oryza sativa
  unsure (1)..(186): unsure at all n locations
caactgacgactngacaactctcattggctaatctcaagacttcgaagccgatgctgactctaagccgatgactactccgggcttatcaaattcactggtacacgtccaccttgcttgttatcacgggtgaaacaagcttataaagcattgttcctccaaccatgctacttccgggttaacccttt

SEQ ID NO: 25469 - DNA, 476 bp, Oryza sativa
  unsure (1)..(476): unsure at all n locations
agcttaacatttgcaggcgaggttcttctactacttcngattcatatataagacgcattcaccttttctagctaanacttcttatatttgatcaagcttattagaaaaatattacaaattntacgatactaacccagtttaatcaaatctgtattaaatatattttgatagaatgtctattttatgttaaaaatattgctatgttntactataaactagaataaacttacataagtaaggagaacaagtaatgctctaaaatatgagacggatgaagtagtagagatttggtacggtattttgcttgcatggcactggccccgtcctggtgacaatcctgctccttgtaatcgaagctcacggcatgcatgcctgcatgctcaggatggagctgcatactatcgctgtcactcctggtcatcgagagcgcatttctctcggcgttacttggcagaaactaaaaagcggtttcccag

SEQ ID NO: 25470 - DNA, 500 bp, Oryza sativa
  unsure (1)..(500): unsure at all n locations
ntagactatagaaattaacttattttagaatgaaaggagtaagataatgattctaaaccacaaaacaattgctcatattttcatatnttgctttttttaaacacattacaaacataagtgctcacaaacacatctacactcaccctataaacgtacatcgtacccctacaagcataacccctataagcatagagatcagaccaacgcattntgagattgacaaaatcatcacaaacgcctcattatcaacatgtacatcgtctagcattgaaagaataattagttataaatgcaagcaccgtgtcaaatctaaaccttaaacccaaacaaacatatttcaatgtttcaccccaactccacaaggacaaacaaaatctatgctcaatgcatcatggtttgtgactgactacgttggcagcttgagaccacttcacacgcaagagagaaatgaanacctatgggtgtatgatctggcaagtacntttgtgctgtatacaact

SEQ ID NO: 25471 - DNA, 484 bp, Oryza sativa
  unsure (1)..(484): unsure at all n locations
tcgcttcattgatatcatgacgggacctgtttcttaccagaaccaaaaccatgatgctctggtcatcgaggatccacagattgaagaagtggaagccatggcacatcacccaacgcatacccatgatgttcagcgatggtcgacgtcaagcgttcgccctcgattccttaacattcctattgcctctgctccacttcccaccacattgaaagactatcatgacatggttgaagacctggtgaacaagcggctgaagcaaatctccatcgagcaaacaccccgaccaatggagagtgagcttgagaagccatatgaagcttggcatgatttagtacctttcctggcagggtggcacccacccaagttccgtcaattcaatggaaccggagatgcaagagaacatcttgcgtactttgaagctgcatgcggcgacactgncaacaacccctctcttctcctccgtcacttctcggggtccttgact

SEQ ID NO: 25472 - DNA, 388 bp, Oryza sativa
  unsure (1)..(388): unsure at all n locations
cttcacttctccatttattccatcctgcaattacaatgttcattggataaaaatccacanacttagagagactgagagcaagaactgaaattgctaagaccagtacctgagatataaatagtggaaactttgaagccactgatgtctgatacctggaaaaattattaagaatcattaggtcagaagggtattatacgaacttaagctacatggagctcacaatgggattcatatatggattaggaagtaaaatgtgtaattttccttgtgacatcgcatggacaatntctgagataaagacattatgcattcatgcaccatgagcagcgtggcattaacaatgcagcatgattccatgcataactttcacaggtgatatcgactgagt

SEQ ID NO: 25473 - DNA, 193 bp, Oryza sativa
  unsure (1)..(193): unsure at all n locations
taacgtatcatagaaattgcattccatgccattcctgattgcctcactattggttgggacttgcgagtccagaaagaaatacgtgctgcgtatattgcttatacgttcatcttaacgctatantggttctctctactcggcagtanacgcgttaacctttaaccccacgacgaaccatttgcacacataacac

SEQ ID NO: 25474 - DNA, 96 bp, Oryza sativa
tctgttgcgacagccgctctttatctcttgcgggccttaacccagggacggtcatcccagcttcagcgctctccttcttctctctctgatcgactc

SEQ ID NO: 25475 - DNA, 507 bp, Oryza sativa
  unsure (1)..(507): unsure at all n locations
agctnggtccaagcatggctaagttatacgcgagcgtcatttataacatggaaattaatcgcaatcggataacaagctgattccaggaaacgtataacgcaaggcaaaatacccaaggatgttcaccgactccgaaattattgacgtacaaaacgctaagcaaacacatcttataattttataatagtagagatatgaggatgtatgaatctaaattaacattcgctaagcatttgtcatataaagtacacaggaattacaagtattaaataatcaagcgaatggcatataataagtaggagattcttatagcatgtaaatttatttgaaataacacaagttcacaatagattcaacatgcccaaagaatagtgatgacttgccttgctcacagacctttctgttcctgatcctcagtcagcaactcagcaacttccttagaatctaatnttacatgcgaaagaatacattgaattcaatagaatcaaataaattgcaaaatcatac

SEQ ID NO: 25476 - DNA, 385 bp, Oryza sativa
cttgaactcgcttccagattgcgtctgtctgcataataacagttttgtgtataagattacacaacggggtattgacctgatgttagattaattaacggatatcgccttacaaaaccccagttcgtctattatatttacaacttgcgtgtgagtcaacctcttaacaagaggaaaatatggggatgaagggccagccgatttcaggctactcggtaatatagattcaaataagaaaagttagattagagccatgccttatttacattttttttgacagatcttaagacatctgagttactaactcacaaggataacctaactatataccatggttcaagaattatggtttattcaaggtgattcaatgcaactgtaccgcagacgt

SEQ ID NO: 25477 - DNA, 301 bp, Oryza sativa
gcacgcgctcactggaaaaacccttccgctctttttttcctgggaccacgagataatcgcagacaaaccgcgcaagactgtctacctgctaagcacatgctacctgggtgcgttcttttgaagctatacttgcttcccgtgcttcgggaaactggccgaatcaacacacgttggataagcttttctctgaacttcttgaacacgctacgagatggaccccataaagcagctgtcttgactagacataccgggtaactcatgactggggatagttgccttgggataccgtttcccacaactt

SEQ ID NO: 25478 - DNA, 493 bp, Oryza sativa
  unsure (1)..(493): unsure at all n locations
gagtactgatctcggagtgatctttgttgttgttatttgttaccggcctgcacccggataaaggcggatcgagatggcgtttcttgaccgactgtactgcggtagctgcggccggaggaggatggctactacagctaatggcgccggcgcaaggatgccgctgtcttcagcggcggtggctgcgccgcggcctgtgaggcagctgtactggaagctgaggtctaggttgctgtcgtcgtctctaatcggcacagctgcggctgctcggcggcgatgttctggtactaactttagagctattcccggaacttcgacgacggcggcctcgatcgatcgtctccggccagctaccgcttctaggctcatgttactaggtagctagagaagagtgcctctgcatttgctggagacttgagagtgcaatatattctggtctacctgcataattatgcangtggtatacgtgtagatctactttgaattgtagcgttgt

SEQ ID NO: 25479 - DNA, 331 bp, Oryza sativa
  unsure (1)..(331): unsure at all n locations
caacaactacatgagccgcaccattccgccggacctcggcaagggcatagccttgcagcacgtgagctttaccaacaacagcttctccggcgagctgccgcgccacatctgcgacggcttcgcgctggaccaactcacggcgaactacaacaacttcaccggcacgctgccgtngtgcctgaagaattgcacggggctataccgggtccggctggaaagaaccacttcaccgcaacatttcgaggccttggctgccaccgatcctgcatatttgacgtctcggaacaagttaccgtgagctgcctctgatggggcagggcccaacctacta

SEQ ID NO: 25480 - DNA, 500 bp, Oryza sativa
  unsure (1)..(500): unsure at all n locations
atcttaagtcacctgcggcatgcaagctngtagctggggattattgctntatttgttttattcagccttgcttagcctgatataacatttaaaaggtgttcttctattatgtttattctacatattactacaaaaatcgaaatatacacttatctgagaaagattctccatcgccatggatctgggagtttcccagttattgttatagaaatcatgcttgatgacaacttcgttntatcactgaatcacttcttttccaggacaaccctcatatagtaaaaggggttttagttctagtagcttcatctgaatttcgttgcatcgtgcatagatctgactagactactagataaccatgtgcacaatactactgattatctgcatataatcatgaataggctttctaacagtttgattgggtagaaatcttaantataggttttgcagaaataatgtcatatgaagaggcaattagagccttaacatatcttactaccttg

SEQ ID NO: 25481 - DNA, 446 bp, Oryza sativa
  unsure (1)..(446): unsure at all n locations
tggctgcacgctgagcttcctgaatagcacgtctcttgcttataaagcttctgtntttgttgaactgtggctggagctggagcaccttcattctgtgtatcaggaagaccttcctttgattctaaaataaagagcagaagaaaaatatgtacagcttgtatatggtcattctttanaatagtttttaaaggaatgctgatcggtaattctcagccatttgcatctaactagcttgtgaatacttaacatanatatacagtgaaagccacatggacatagtgcaataatgcaatacccatagatataaacaacatgaatgacaatctcaatctcctctttgtggccagcgttgtatgataattcatccatcatgaataccgaattctttgctaacaagttaacattgatttggcatcaatttcgctgcctgaatttacaatattagt

SEQ ID NO: 25482 - DNA, 513 bp, Oryza sativa
  unsure (1)..(513): unsure at all n locations
ggaccttaagncacctgcggcatcaagctttataggaattgtttccataggattgatattcttcaaattccctacacttttcctacgaatcagagggggcctaaaggatttacataggaatttcatatgatttaaattctagaaaattttcctattttgccatttgatctaaggaactgaagctttccaaatcatatggaatgactcgttatatgtcgatttcaaaggaaacttagcgagatctcaaacctcttggaaaatttcctttgactatatctctcttatccgattcatgtgtttttttcatgcggtccaattaaacgattatttctgtgttttgcgtctttctgttatacactcgcatttctgtcagaattatatgtttttcatattactctgttttttaaccctacgaatcanagggccctanacatttcacatttttctcctcaaactatttggggactgctantgaacgtagaataanatatcatgacaccttatatccaaaat

SEQ ID NO: 25483 - DNA, 363 bp, Oryza sativa
  unsure (1)..(363): unsure at all n locations
accatgtaccttctgtaaatcttaaaatggatagctgtgtctgggtgaactaatgagtctgttgcacgttcatgatgtggatcgtctgaatgctgctcaatgattattcctttttcttttcacaagaactgggagatggtgtgccatgcttaaatattttcatttatgtgatgaatgcagcggagcagtgaaaatcgtgaatgataatgtaaagtgctgcttgcttgatgcgacagttagtggtgagattaaatagaaccgctggatatggctgtttggtttatacatgtggcttcattatgacaatgtttaantatgttggtggtcgatcatgtgagggtcctaaatcctagtaactcagta

SEQ ID NO: 25484 - DNA, 454 bp, Oryza sativa
  unsure (1)..(454): unsure at all n locations
agctntgtgggtgccaaatctcgtagtgttgtttagtataagcatcaatcgtcctggcaacacgatagtgcacacgaggaaattcctaatataattgaaagcaaacaacttaagtaaaatgtatggcacacagaagttnttttaagccaaaagtttcttaagaaaatagacacccaaacaaatattagcaaaacacaacaaaataaaatttgaatgactcgataagtcgtcaaatagttcttttactttnttagtaatatttttaatggaaaattgtaagtatcgggtttcaaattcttttgctaaaatagcactcactcagcacgccatatacccaagcagaatgccgactagccctgtcgacacgtggcgtgctgaanaggtggacatgtgtccggagtggccgtcaccgagacaggtcctcttggcanaaacacatgcttgacaggtcata

SEQ ID NO: 25485 - DNA, 504 bp, Oryza sativa
  unsure (1)..(504): unsure at all n locations
tacanaagagaagagaaaagctactagagccatactctaactctttcgaaagcttncggactcctgatttctactctattcctattccaccagctagatactactaaactaaacttgagagaaatgagagagctattgcttgaggtgtgtgtgtgaagtgagaaggtgaagtccttttataggcaggtatgaccattgtaaccactgcgaaatgtctgaagtaccccgcaaccgccatcaggagaagatctggagcgtcctgccaaaccccacatccaacggtggagaaggaggttcggctgaaccaggggccaacccaacctggcccataatcagcaggtggcctcctccgttgcttcactttgtagacttgtgaattntggcccaattcatgcataagtctaattctcgatattggccgatggattatcgtctgtgtgatgtcgatctcctcacttagtgcattctcacaaaaggtatatacctanactagtggatatgata

SEQ ID NO: 25486 - DNA, 466 bp, Oryza sativa
  unsure (1)..(466): unsure at all n locations
gctttggtcatcgtcgctctcgcggtcttgctattgaccctacgtctattcttgcaaacaagcaggtttctcagacagaaccaatatgacagcatttgataccatctttctcttcattgctgatctcggatgcatcaacaatcctgaatgtgctgtttcctgtacctggacattcaccgaatgcactaatatacattcttgtagttgtatcacgagatatgtcttctagctggttatccttgcttatggatgtactgagcttcctgttactgccatgtagtagaacaatttttctgaagcggcaaatatgaagtgcaaaatacaagacagttcttgtggttgatcgatttaccagcttgttctttctttcctgcangtgaaagttaatgacactgaatgaaggatcctgctannggtagctacttagcttgctcttctcttcgatggatagaaacataccaactct

SEQ ID NO: 25487 - DNA, 466 bp, Oryza sativa
  unsure (1)..(466): unsure at all n locations
agctgcgcgaagccatcactagagcgtaagctagcttttccatttcaatgtaccttgtcttcgctccttgcagtgcttcggagacaaagtagaccggtttctatccggactctgtttctaggatgagtgttgcactgactgccaccggcgaagctgccaagtataatagcagttcgcttcctgggggtgggcttatcagagctggcgggctttgcaagtattgctttagctcgtcgaatgctgcttggcactctggtgtccaattaaactttcccgcgccccggagggtcttgaagaaggcaaacctctctcggccgcctttgagaggaatcgactgagtgctgcaatttggcctgcaagactttgtacttcatgtacgcttgatggaggcttcatttgctggatggcatcgantttctcgggattcgcctcgatgccnctttcggaaacaaggaaacctaacaac

SEQ ID NO: 25488 - DNA, 443 bp, Oryza sativa
  unsure (1)..(443): unsure at all n locations
tcgtggcttcgcccgccacatggagacgacggacttacggatctaaccgagaggagcacatcgagcggtgcataagcgaacaagaactgttgccctgtagcaacccaagacgcactgagattcatcggcggactgtgtacaaaaactaaggatttgatatgatataggtagatttgatcgaagggttcaaatctacttctactatcacccaagttagcggtattagaaacacgaagaggtattattgtccaaaagaaaggtgtggcagggtataattatcatttagtagtgactatattnnttttctcttttttggattttttaatgaaaatgagtgtactagcataatggataccagatatcgatctatcaagaaaataacttaaatgataaggttactctactcactatattagtatattactaatctgcccttaataaca

SEQ ID NO: 25489 - DNA, 425 bp, Oryza sativa
  unsure (1)..(425): unsure at all n locations
agctntgcaggagtagtgtggagtatatagaatatgctctcttcttgctcctccttctcttccttcttctgctctggaccaccgggttaataggagcccccccatccctcttggttntctgcaaacacgcanaactctaataatcctgtctatgtttctctctctccatagcacttactctttgtgtgagtgtgtgaaggagagatattatatnggaggccattaacttatcttcagcaagaaggcatntttcttctctgtttttgctcatcatagaagtttttttttcttgagagaaggcaatgtttgctggttgctgctgtcttcttcatgttgtatgtatgtccctgatttgaggactcttatgtgccagatctgtgaggaggcctctcttgtgctngtgttggtggngggagccgcacttg

SEQ ID NO: 25490 - DNA, 135 bp, Oryza sativa
  unsure (1)..(135): unsure at all n locations
tagganacanactacgacggctaaaacacaaactctaagcagtaggaagggcccgagccacgctacactcccaacaagtctctaaaagcgacaatgccagctaaagaccacagatgatcctccgagtggatggac

SEQ ID NO: 25491 - DNA, 490 bp, Oryza sativa
  unsure (1)..(490): unsure at all n locations
agcttgtgcctgtttggagagatcatcatatattattaaagtatgccgttcgcggtacataaaatactcagccagggctgctcccgtataaggagcgaggtattgtaatgtagcangggaatccgccatttcagctactacaatagtgtattccatggccccctcttcatggaaagtagttactacttgagctacggaggatgctctttgaccgatagctacataaacacatattacatcttgcccttnttgatngagaattgtatctgtagctactgctgttttgccggtttgtctgtccccaataattaactctcgctgaccgcgcccaatangaatcatcgaatcgatagcaataagccccgtttgaaggggttcatataccagaacgcctgaannatatacccgagcangagattcaattaagcgagattccgaagctacaattntcgcctctccatcaatanngttagccagaagcattataaca

SEQ ID NO: 25492 - DNA, 494 bp, Oryza sativa
  unsure (1)..(494): unsure at all n locations
tattaggacctatgaaactcagcttggcttgctgctgactaaaacatccctttcatgtcttcggatacaacccacaaaggcttgcctgttcttagtgcataaacccttgtgatcatttcgcgaactttgtgtaactcttccacttctagtaaaaattctggtgttcttgcccgataataagcactagcaggttggtgaagcataatcctcgcgtggnggaatgctatacgcttggtgggttctccttcaagcagaatgaaggacgccatggacgcggctattccgaggcatattgtatatatatctggtgtcaccgtttgcatcgtatcaaanatcgccattcctgagattaaccacccgccggnggagttataaacaaaaaaatatcgctaatccatcttctatactgagatataccatgagacctgtatatgattcgtgacctcgcacgaatctcttgactaaaaaagtgtccttctcgatcataacatgat

SEQ ID NO: 25493 - DNA, 450 bp, Oryza sativa
  unsure (1)..(450): unsure at all n locations
aacaaagtttgagcaccacatctagcaaatgctagaagcttcccatctggcatagtagtacatggtatcttctacctaggatttgtagaactgaatggagtgatcaagcggaaaaaaaatccagaananaatacatatganaaatattatgattntctaaaatttaaaataaattagataatgtctattaaagtcctctgaaatttatgtgttataaattaactctaaataaataggacgaacaatgcatgcaccaatagaaaagggaaaaaatgtacgattataatcacataccctttatttcatcaattatgtttaaaataataataaatttattgaggaaaagtcttgcattcgaacactttgtctcanaaccaggtcacacatttaaataatatataaatccatcgattattagttcgttggctattgattataacaatgattatc

SEQ ID NO: 25494 - DNA, 369 bp, Oryza sativa
  unsure (1)..(369): unsure at all n locations
ctgctgagaggggcncgacgctcttagctggtgaatcatatatactttttaatcatgtctgacacgtttatatttcttcatgatacaggttgaagttactccctactgggtgcataacatgataatatatcttattcagaagtaccagacatcacgaagatgaaattggagcaaagaataacactctactctttgtgcctataatctttatttgatcaaataactgaattcttgtgctccgtatatctgcaagttcacctttatgtggcttacccaacatatttgtaccttttctgttgggagctacatgttgattcacgcatcttgtttgccattgaagtatntgtgtaccgataaacttgaataagt

SEQ ID NO: 25495 - DNA, 496 bp, Oryza sativa
gcttcatctgagagagaggtaaacaacaagaactgttatatctagctcttcagtgaaaatggaaacagaagaactacaataatcaaccctaatcatgacaattccattgataaaaagtaaaacatcgttcttttgcagaaacatccattctcaagttccctcttttatgatcttccccttgtgctatgtcggcaaacaagagaaacaaactaaattaaagtctttggtttcctgtaacttttgggtagtttcagaataagatacatagctattcttctcttgagcttgaagatgaaagattccatgccagaactttcttgaccaactaattaatctggactttggtttcattccattccttattccatatgagtacagtagtacactagtactggtctcctttcctggaaaaaaaagaggagattcagaagttcagaacaataggcaaacaaatctccaatctggtggtgacacgtcactccttcctcatggagtc

SEQ ID NO: 25496 - DNA, 177 bp, Oryza sativa
tggacaattcatggcataaagtacctgctctctacaatccgaacaaaaggggacatcctcttctggtattggaagctcatcgaccttggtggcataagctcgatcaaacacataccgattttggtcctgactttccaccaatggtagctgtggactaagctacatgcttgaatggac

SEQ ID NO: 25497 - DNA, 380 bp, Oryza sativa
  unsure (1)..(380): unsure at all n locations
gcttcggagaagatgtcttaagtggagtcctggttttactctagttgagcgcctgtgaagatggagccgtatgcccgctagtccgctgctggttatatttgtttgacaagtcttaagcgcctttgtaataatggaaatattatcgatgtaataaagatgtgtcttttatatcatgtntgtatggtgtaccccggcttttcctgggacggggattaatacactagcgttcgggaaaaggcaattttcccggtcgcgacaccaggccgctttcggagcatgagggtgacgatgcagagccccacgctgcttgggaggtcactgcagtgatcctcgctggctctcccgagcggacttcgctgacagtcaccgcgggtggagac

SEQ ID NO: 25498 - DNA, 437 bp, Oryza sativa
  unsure (1)..(437): unsure at all n locations
actagagcgtaagcaagctnttccatctttatgtttcttgtcttcgctccttgcaatgcttcggagacgaagtataaccggttctgtccggactctatttcttggacgagtgcagcactgactgccaccggcgaagctgccaagtataatagcagttcgcttcctgggggtgggcttatcagagctggcgggctttgcaaatatcgctttagctcgtcaaatgctgcttggcactctggtgtccaattaaactctcccgcgccccggagggtcttgaagaaaggcagacctctntcggccgcctttgagaggaatcgactgaatgccgcaattcggcctgcaagcttttgtacttcatgtacgcttgacggaggcttcatttgcttgatggcatcgattttctctggattcgcctcgatgcctctttcggaaacatg

SEQ ID NO: 25499 - DNA, 429 bp, Oryza sativa
  unsure (1)..(429): unsure at all n locations
agttatgtgctgacaacccacgcatctgtgttcgtgtttcaaggctatgggagttcgctaatccaaatgatgagacacaattgctccaccttggtttggttntgattgatcaggaggtcagttcttcagagcacttagcacccagctttctgtagaaacagattgctttactaatgtgcttttgaaacagggcactagcattgcagcacagatatacccttcctgtgatctgcagttcagagaaatcatcactgaaggcaaagtgtactatcttgagtactaccgtgtgagggaatggagcangcgatacangccagtcaacaacagcctgtcaatttgttntacaaggtggactaaagttaacagggtgcagatcccgcagctgatttccctttgacacttactcactcacaccatatggtgggactc

SEQ ID NO: 25500 - DNA, 464 bp, Oryza sativa
  unsure (1)..(464): unsure at all n locations
tcagaaattctgaaatatcataacatattccaaatccatcggagaaagctgaactttccagattcacgagacgataaaagcgtgaaggtctctgcgctgatttttnttttcatctttcaatattttggaaaacttattctactaatagaaaaaaaaacttattttagaaatagttctttttcagtgtcaacatcaatggtgccgtgggctaacttgacatgctaatgaccttggtgtgcgtcccctcgacctccggtgatagctaagntactaatgtgaaagggggtggcgcccatatcattgatatctggacttatttgtaaattttggtaaaaatgacttgtttgtcaaanaacttatttgtaataaaaaatattaccattggcccttgatttagtgataccgacgcgaagattatttgtaatgttttgtacaatagactttctactacaatggctttttta

SEQ ID NO: 25501 - DNA, 484 bp, Oryza sativa
  unsure (1)..(484): unsure at all n locations
agcgtacacacaaacacatagtatattttatgtctggcctacaagtagntagatacaacaaagatccagtcatacttctatactccttttgatcaacagtttcaccatcttcatcgggatccaacatagctgttgaaccaattgatgttgaaattggcttgcaattctccatcttgaaccgtctcaaaatattcttggtgtactttgtttgatgcgcaaatgtatcttgaggtgtttgcttaatttgcaatcctaaaaagtacgataactcacccatcatgctcatctcanattccctacatatagtctcagcaaactccacaaccaaagagtaagtcgaacaaccaaatatattatcatccacataaatctcaatgaanagttgattatcaccatgataaagtacagaagaacgtttgtccatcttttccatttgaanaccttntgcaagcaaaaagttcttaagcctatcataccatgctct

SEQ ID NO: 25502 - DNA, 456 bp, Oryza sativa
  unsure (1)..(456): unsure at all n locations
actcagctgacagaacgggattttacacgacatttgggatttgctatttgcatggataaatcactacaacagttatatgccagaacaggcccgattctgcactggtttccatctcaacacctgtcgttggacatcagggtgatcatggctganatctcgtagcttcgctttgcagtgccaaccaggtgtcgctgaggcaatagcaactnttggcactangcaagtggaaatgaaggtaccactagatcactgtgagagcaattttgtcagcgctggaggtggctcaagtgcctaatcgttaagaattntaaataggaggatagataaatatatcaagtacctgagcgctggaggtggctcaagtgagaattacctccccaagaatgcatcgcctagcagactcncgggttggacatcagcctgtaatttgagccaagaaatcgttcatgtgattat

SEQ ID NO: 25503 - DNA, 479 bp, Oryza sativa
  unsure (1)..(479): unsure at all n locations
agcttagatcctgagcatctgatcttcttctttctcncgtctgctttnccctccagatggtctacaccaggactggtagccgcgcaacaggcgagggcagcaacggcgaagaacgcgctgatggtgtgcaccccaacagtgattccggcaatggtccgccaccacttcccgagaatccgacccttgcccaagttatggcacatcagactcagatgatggcagccatgatgcagcagatgcagcagcagtaccagcagatgcaccagaggatgctgcagcacgccgaacagcagcaccagcagtttggtccccctccccctcagtccaagttgcctgagttcctacgtgtcaggccacccaccttcttcagcaccaccaaccctatggaggcaaatgactggctccatgcaatagagaagaagctgaatctcctgcagtgcaatgatcangagaatgtcgcttttccacacaccagcttc

SEQ ID NO: 25504 - DNA, 314 bp, Oryza sativa
tgctcagctccggcgagatatggcacccttggttataggtgacattcgatgggtacttcatacatctccgccgactagaaggagggaccgcggcggccgcgatggtgctggccttgctgcgcgcgacctcgacgtccacgtttccgccgggcacgcgcttacacttctggccctggtcggtgaatgctatgcggcacgccctgtggcgggcgcctagcgcccaggacttgaacaatgcgtactcgtgcatcacccaccacgtgctggcgcaccgcctctcgtccgcgtggtagatgagcctgtgctattcaaca

SEQ ID NO: 25505 - DNA, 451 bp, Oryza sativa
  unsure (1)..(451): unsure at all n locations
gctgcttgtactatggctgatgcaccaccctctactatggtggttcatgcaatgctattggggagaagggcaacatctcatatgctttcaacagctactatcagctgcggaaacaggacgcccagagctgtgatttcgatggacttggcatgatcacttaccttgacccatccatcggtgactgccgctntcttgttggtatagatgacagtagaacatctacaatctattcttcaggtgactgttctcggaggcgctttggattgtggatcttggcgttcttggtaattgggttccttcagattggggtttatttgtgattttggttgtcgagagtcgactntaaacagctcccttgggcacacttcccatgtccttgtgaagtagcttcgtcaattggtggcttctagatgtaggaaaggggggacactgttagatgtacatgatcact

SEQ ID NO: 25506 - DNA, 482 bp, Oryza sativa
  unsure (1)..(482): unsure at all n locations
agcttgaagaaatgtagagatgagatggcatgtttctctctctttgcattaagaagattcttgcgttcgccgcgtcgcttacacggcttccggatgcgcccacgcgaacagataaatctatcggtccggccatgtgtgccggttcagtnttcacgggacgtagtacatggggttgtggatcttgaagacgcggtcgccgacgtagtcgccctgcaggtcgctccactggtcggcgacagtgccgcggatcctgtagccctccttcttcaccagccgcttcctcatcgccgacttgaacaccgacgagctctgtccccggtactccgggctcctgcattgtaccatgatattgcacgatcagatatctcactttctgaagtttaaccatgcaacctatgctactaacaaagtagtattctgccatgggaatgtatatcttgtgcagatcgtcatctgaatgttcagctcagctggcagtatca

SEQ ID NO: 25507 - DNA, 381 bp, Oryza sativa
  unsure (1)..(381): unsure at all n locations
tgatatatatgtaagtttcctcacccttngnngtttgacttttgagtgttaacatggaaaattntcacctattgatgttgctatgataaacctttttatttgtacattcttgtttttcagttgccagctaatttttcacatgttgcggatgatttgttccttttcagagataaccgccttgtgaattgggactgcacacttctgacttcaatttctgagatagaggtctgtggaacattnnttttgtttattataaacgaattaaatctacgcatacatgactaagatgtctttcttcattggaaaatgctgttttttcaggttgatcatattgatcttaaagaagaaacaatgttaaagatcccttgttatgctacttct

SEQ ID NO: 25508 - DNA, 505 bp, Oryza sativa
  unsure (1)..(505): unsure at all n locations
agcttcggcaatctcatcgctaagactcttgtgttatgctcgtgtaccgctgactacaggatctggcaaaactcttacctgctcgtatcccatatgaactcctcgaattctacttaacaagaaattgattgtccgtataaatatatagcccctaggagagatcaaagagcatcgaatcataagccatagccacaagtcacatcgaatatcaatcaggaggaagtcaatagctagccgatgattctaagtcgttggattaattcttggtgaatgcttgttggtaggctagattagctagcttgctcccccattgtaatcagtttgatacattctagagatattcatataaactggattatggctattacccacatcggngcctgaatcaatataaaaatctctgtctctcgtttactntacggcaatctcgcgtatcctttgataccaacatcttctatactntaananaactattatataccgtcaacaagtatattctctacca

SEQ ID NO: 25509 - DNA, 486 bp, Oryza sativa
  unsure (1)..(486): unsure at all n locations
agcttcacaaagcgaggttgagtccgcgccgaataggcgcgaagatgatatcctcacaaaggcgctcggaaccaaagaacatcctggccggactaggggaattggtagcaatgtgtccttgaagcatggactcccgtagtacagctcccaatacaggaaacgaaaagtcaccaaggaagagagggacgctcgtttgaaggccgaacttaaggttgaggtcattcaagaactagaagctagcatgaatgctagggtggaagaaagggttaacaaggtcctcgccgacatgaatataccccgaggcacaacacctgctgtgcatccaactcctcgtgcacaacacgacgcgagtccgttacagcataggagtagttgtgcatccacagaggtgccgtcccctggtctcccggtcacaccactagctgcagtggaccacatagaggtaatngatgttatccaatccatatctaataaaanaacctttac

SEQ ID NO: 25510 - DNA, 371 bp, Oryza sativa
  unsure (1)..(371): unsure at all n locations
tcttctncttcttcttctccgcttctagtagacttctagtagtagtaaacttggcgtcgcgatctccgcgcgctccgggtgcttcgcttcggaggtttgggatgatggcggaggcgtgatgtgaggtgaaggagtgtgagatcgcggnggggcaatgtctgtgctgggcgcggagggggcggcgatgggcttcctcccggccgcggagcacggcttcgcgcgctcggcggcgccgtcgccgctgcgggaggaggaggaggtgctcgacgacgacccgaagctgccgccgttgcggatgcccacctccttcgccgcgttccctgggtccagctncggctccgactccgactccttcctcagcatgagctcca

SEQ ID NO: 25511 - DNA, 422 bp, Oryza sativa
atccgttatcagtctttctggcacgaaggcactttgattaaccgagatcaactcattcaaaatcgaccgaagtctgtttaccaagcatttagagacgattttatatagaacgttgcataagctgatagggcgaaagtctttcagcttcacaggctgatcaatttttgggatcaacacaatagcagtttcatttgccccttctggcatgaattctgaatgaaaaaattccttcactggcgccaccacatcagacttgatagtagcccagttcctttggtagaatctcactgggaatccgtcaggcccaggggccttcaatgggccaatctggaagagggcatcggctatctcttcatctgtaaattccctgcataagttctcattcatcgctgcagtaaccctcttctgaacaactggacaca

SEQ ID NO: 25512 - DNA, 481 bp, Oryza sativa
  unsure (1)..(481): unsure at all n locations
tagcatcatntaccttggtatgggtcagtcctcagtggaaggcaacatgcatganaacaaaatggacacgctaagtgttgattgtgaagtgaaagaatctgatgaattgtgctctttgatctttcagggaagtgctaggaggctcataaaggcagctttgcaagaagcagccaagaaaagagaaatgaggtactcagatctcaagaagatngaccgtggtgttcgccgccacttccatgatgacataaccgtcatagtagtcttcctcgactccagccttgtcagcagggcgagcacctacaggggcccttctgtttctttaagaggcggcggcgtgaatctgcgcagcaacacacttgcaccttatgcatctcanatgtgaccctgaatgcatggtggaggcaacacacctgactgaagaaggtttcttcccctgtggtaagtaaaagccgtcatttcgccaagatcattccctcatgat

SEQ ID NO: 25513 - DNA, 427 bp, Oryza sativa
taactaaattgacagttgaggaccatatttcactgttatttagctctgaaaaaaatgtcattttggtttatatttctgatttttgcgtgccattcaagctattaaaaacatataaaataatgatcataatatagattttatcatcatgcataagcttataataattaaattacgtctacaatcatacaagtataatgaatatactatgagtaatgttcacaaaatatgtagttagaaagcaaaacttatgctacaaaataagcaactataacatctaactcactctactaacatgtgatgaacttacgtctttagattatgttacatttaaagacacatatctaccattatatcgatcttgagaagaaatatgtcacttctgggctatatattctgtttttcgatgccattcaaccattataaatta

SEQ ID NO: 25514 - DNA, 298 bp, Oryza sativa
  unsure (1)..(298): unsure at all n locations
atttcccccactggagagaagctgagctacgtattgtggatacatttntctgcgtcccattacgtggcggaatatgacgcgcttcttcgtggattaaagattgcgatttcttttgggaattcggcgtctggattgttcgtggagattctcagttgggtggtaatcaagtcatgacagagtggctctgtcttgatgataatatgactgcttatcggcatgaggtacgcaagctagaagatatatntgacggtcttgagctaacccatgttcttcgacataacaatgaggcagccgacag

SEQ ID NO: 25515 - DNA, 505 bp, Oryza sativa
  unsure (1)..(505): unsure at all n locations
gcttcgtagcaaagcaaagcatcagccttcactctgtccagagcccagagaaaagggatccccttcaagctgctgttcttcatggccaagaaaggcaagaacaactctaccagaagagcctctgcttcttcttcttcttcctctgccgcagccgatggcgattgatcgccatggctgcggctgaccgccttcgccgtgctcaccctccactcngctttctctgcatatctggctagagatgacgcgaggctggtcgccctcgtcgtcgtctgctacctcctgatgctggtgctgctgttctatggcctggccgtgcctgtccaacagaagagagactaaggtgaggcttcagcaatcagtcctcaagcatgaacctgccttgggtttttttcctttntgctggtantggtttctcgcatggtatgatcttggtattgaactatggatgttatgtacaaccctgtacatgctgatcaaatgtgtatcntgtatgttaatattgatg

SEQ ID NO: 25516 - DNA, 316 bp, Oryza sativa
  unsure (1)..(316): unsure at all n locations
ttggaccaattgagcctccatacattacattcatgatcagtcagaatcagttctttcatcatcagaagcttcattactccgctggaggtccgttgtgcgaaattgctctacaacatcgctcgcaattntgtcggccgcattttgcgcactgctgattagatcagnggcaagctcttcacttgtcccgtctgcaaatccatcaatggtgtcgacttcaattctcgggtacaaggattntgtcatcgcccaggccatgccagctcccatacttccagctttcttgatattcttgaaatatacttcccgagcaacactc

SEQ ID NO: 25517 - DNA, 460 bp, Oryza sativa
  unsure (1)..(460): unsure at all n locations
tgcaagctgctactcttggatgttcttctcatagacatctatgtgtcgccccaaccttcttctcttgtggatagcccaggaaagtttgtgagggcaatgctccacctccgaaaggaaatggagtacccgttgagtggatactaagctagttgttaggaggttgntttggtagagcactcttcactagaggttggtactcggtcatacaagttgggatctcaatggtcacttggaaatgaggtacatctaggtggttgcttggaggctaaagttccttcttgattactcacttggaggcttagggtcaaaagagatctaactccttggaggaactcaatggaaatgtgggatcctcaatggaggtattggtccatagtggctcagtgtcaaatctggcaacaacatgctcaatgtcatcatcatttgtggtctctgctagaatcatcatggtagatggtat

SEQ ID NO: 25518 - DNA, 248 bp, Oryza sativa
ctaagcttgcccgtcgccttgtgaacgaccaccgggttcgccaccacttctgatgtattatctcacggatgaacccggcctccaaaagtctagccaccttctcgcggatgaaggcttgacgttcccgggcttgccgccgcactttctgccggaccggccttgcgcccggccgcactgcgagaccgtgctcaatcacctccctggggaccccgggcatgtccgcttggtctcatgcgaagacgtcagcg

SEQ ID NO: 25519 - DNA, 492 bp, Oryza sativa
  unsure (1)..(492): unsure at all n locations
agctngatcgtcctgaatcctgacaaagaattacatatattatcattacagngaaaacaaacctagtaatatttacagtgaanaaaccctagtaatataaagctaaccgaacctagttggatgaaaataacgatgttcttgccgtattatagcttcctttggtttaacgcattattatacaagtgtaaaacaacaagtactaaattacaaagctgaagtaaaatactattctngtacttagtaatatttaagaatgcaattggccttccttgaaaatgcaaattgggagaatggaaatgtataatgctctcacttcagaaatatagaatgcgactatacgaatagcataagacatgaatacctgttgcgatgcgttaggaaaagcattngaagcttattctcgatattggaanatcagcagactanatcaaatgaagtaactgtgctttagctctacnnagttcaaaanaaatgtgatcaatataaagagca

SEQ ID NO: 25520 - DNA, 317 bp, Oryza sativa
  unsure (1)..(317): unsure at all n locations
tcctgtttcataactcaagagctgtgaattaacattatatattgaaactggagcaatccttgccgtggccatcagtccttcaaccgcggcgtcgaattctgaatccagcccgttgatgatgtacgccaccagctccttctcatccagcggctttcctgtagcccgcatcttgtcngcgagggacctcatcttcgcgatatattcgctcatagacataggtcccttctatgtggtgttaaggcangagtacatgattgaacccgcttcgactngcacgagaacatgtcataatcatgttcatgcctggccgcgtctac

SEQ ID NO: 25521 - DNA, 455 bp, Oryza sativa
ctgaaatctaggttcagatatagctatttctgaacaccaatgccagattataaagtaattgaataataggcatggagtcaaggactttgggtaaattgcaataaaatgccaaaacgaaatggaatcagcatttgtaccacgtaacaaaattttgcccatcgatcatggaagaaacgtgcatacgaatttgtggctggtcaataaactacataacaactgaaattattgacaactatgaagagagaatgccatgttacttctttcttatggaacatcccctcttgctcaaaacaaagtcgtggaagagacatgcacactgcagctggtgcataaatgtttatacacacaaaatgcttggtatcagtacgatctaaccatgaaaggaatctctcttattcctaatggaaacaaccaatgattgctgcagcgataatattgaccatctcatagccata

SEQ ID NO: 25522 - DNA, 434 bp, Oryza sativa
  unsure (1)..(434): unsure at all n locations
tggacttanagtcaacagaagccaagtccatcggcttttcatgctatgcaaggaacaatggagttggatctgtgcagccttacgaaaaagtggctatggttntgatgcaacatcatgcaatattaacattgacccatcggagaaggaagcaaacaaacttggtgtaagttattctatgattgcacactagtttgagttataattcatacaagaatttgttaagttggttatttctaaccatgcttcttctaatgacagacaactaaatacaactacttgactaagcctataaattcttccatctctttgaagaaatatttggggctgtcaaaactgatggtctcttgcatggaccagtactgctatactatagtgataggatggagtgtagcataaggagtggaagataacatttcactgcagatgtggaatga

SEQ ID NO: 25523 - DNA, 468 bp, Oryza sativa
  unsure (1)..(468): unsure at all n locations
gctgcaactactcgattccaatttctagtacaggctgtggaagcagaacaccatcgtccttgtcttacttttccttgaactcatcctcaagccagccaacttcccagtattntcaggttttcaaagagcaattcgagacgaaataaatttcacacttaattntcgttatactactattcttaaccgattaacatgtgcacaagtcgaacctgaactagcccgtttccttctactactnttcagtagagaatacccttgaaccccttttgtttcagaccaggatgtgcccaggtcaagagaaaaaacttaactacccagctgttgctgtgtctgcaactctgaatgcaatcaagacatcaagatcagaagataccgtgctgcttntgaaggtgatttactgagttctgacttgattagcagtcgactacgtactgacttagctatccagtgggaaggaagtcaacacac

SEQ ID NO: 25524 - DNA, 420 bp, Oryza sativa
  unsure (1)..(420): unsure at all n locations
acctatgatttgtttctaaatatctcactaaatttacctctgttttgtcttggtctaaatattntaatggtttttgttttttattatccagtaatgtagattcggtttctgtgcaatgtaaacaaaaattgaatgttttttgcttgtgcagttgtgtggatctttggtttacctttctgagcaaagctataaaagcaaataaaaatgatgttctgttaaaatctattttttaacttccacagcttcaatattttgaaatgacaaatgaacgatgaagtgatgctttgtcacctcatgtcaaatagaanattctgaattaccattagttgatcttgtgatctcttgagcctatgacgtgaaananaaattcactttactgangagaactacaatctccaccatagctgcttctcgagtcta

SEQ ID NO: 25525 - DNA, 355 bp, Oryza sativa
  unsure (1)..(355): unsure at all n locations
gcttgagtactattattggtttcttcttctttatggctgattgtaccatttctaagacgagaatgaagttntcatggatacatatgtcttttatgaagcctgattgcatggagtcaattaacttgattatttccatctgtaacctgttggttaaggtcttgctgagaagttttggtacactgtgtagcacggatataggtctggaatccttgatttgaactgcttttgctgtttttggtaaaagggtaatataagactgattaactctagacaggtcgatgttattgtcaaacatgtcttgaaagattacttgtagatcaggcaataacttattgaggaaacgcttgtagaattc

SEQ ID NO: 25526 - DNA, 366 bp, Oryza sativa
  unsure (1)..(366): unsure at all n locations
gatatgcgtttggagaagnttgaaaagcaaagtggtgagagaactctcaccaaatggaaaagaccaagatcacctactatgaagcgatntggtcactcaccaagacgggccgattcaccttcatatcatcattcacaagacatgtcatggcgtccttattcaatgctggcgccgggatatctatatcctttattacatgccatggggggcatcactggcaatgttcaccatatgcctccaatgtaattaaccaagggtgcggaggaccaatgacgccaatcatgagtgtttgcttcacaaacaatggcagtttatggaagaaccggccagtgaaaaagaggaaggagcgattaagggatgcatgac

SEQ ID NO: 25527 - DNA, 516 bp, Oryza sativa
  unsure (1)..(516): unsure at all n locations
tctcttactgaannggggagaatgatagagcaagtatgatttcttcctctgtactcagcaagccacaccggcagatgcatgattaatgcaagggggtacaacgggataataataggggttagggtttgcagtaaacagcatttaaaagtcacttaggtgcccaaagctattttataaagatgatcctagagctacacaatattattaatcaatgccgtggacccacacgaacctgccttaacccaaggcctacgatgattcagaccgaactggcaacccgacctgggtcccagctcgttccaagccaacccaggccaaccattccacaatttagttgttgagcaaattttaagaattaaaacactgacttgggtacattgctaggctcgcccatatccgagggctcggctattcgaatagatttactctgatcagaggtgtacatctttacccacaagacacatctttactccgcattccatggcctttgaacccgttcgaaacatgtgacataac

SEQ ID NO: 25528 - DNA, 421 bp, Oryza sativa
  unsure (1)..(421): unsure at all n locations
atatctagatatatgctacctccgctctagagataaacatattatatgttattacataaaagtaaaagaaaaatctggatagaatgtactatattattatagcatctccagtagaaaccctaaacatagatcctaaacaactttaagagattaaggccaaaaaaataaactctagcagagccgctactttaaaccccataatagaaaggctctcaaattccctccctcagcccctatcttgggggctctacaccacaggccctatcgaactttttttctttttggcgcgaggaatatntacacngacacgctccctcccgcgcgaatcacagacgccgtcggtcatatttgcagtgactgctctgatccagccatcgctatgatatggtattggtcacctgcatgaatgcacgcatgcatg

SEQ ID NO: 25529 - DNA, 382 bp, Oryza sativa
  unsure (1)..(382): unsure at all n locations
gcatgagctctttcccacagaaatctccacctttcaaaacatcagaagtgaagaagccaggtcttccaccattcggtgtcatactcatgagattacctctcatgatgaacagcatttcatttactggatcctcttcacgaattatgcagctaccttctgtataaagaacaggctttatgcggtcgcacaaggcattcaagagtngatcatccatgtgttcatacattggtacctgaagcaaagacaaaagaactggaatatcataacggcgggagatggtctatgtccatccatagcacggagatgaatgatctacattcacacagcaaagatattaacacaacggttactgctgaacagattcangggttccttgaacatg

SEQ ID NO: 25530 - DNA, 362 bp, Oryza sativa
  unsure (1)..(362): unsure at all n locations
actcactcttgaattgatagacaacttggattatcatgtttcctagcaaggagcgtctggatttcagttgactgaaatttatgaaaattcagtctctttntcattccttagataacaattcaatgattctaggtaccctgtctatttttctccttatatgtaaaaggttgagcattatatttgaacatacagaattacaataaataaacatgctattcataaaagttataatattacatggaaaataaatccaaacttagataaaaacaaagtaaaactatatctatacctaattaaaacataagcaacgttccgtcaaaaaaaatccgtccgtctntttttatttatcgcccttattttct

SEQ ID NO: 25531 - DNA, 494 bp, Oryza sativa
  unsure (1)..(494): unsure at all n locations
gcttggagattacagtcccatcttgataaactatgcttattttataaactaacaacccacanaaattgaacatagggggcaaaatgacaaatgcctaatatcttcctggatttttttttcaagttttagtaattatagaaatgtccaggccggacaacagcttgcctagacatgctccgggtatgccgagcatcttcaaattcgattcatcatatctcatatctctccctctatatatacgtacattgtcaagctacaagtttgatgaatgacattatgacatacaagaatagaaagcaaatatatactaaaatgatgatntatggaggatatgtgtgccataatctatatatggtggcatactgaacaagctggttggtagataaagcgtgcttccatgcaagtagagactagagagtgatgtgtaataaggcatatattggaccgtatggngtagagtatatacgcatgtgcattcgtattaatgagtgtat

SEQ ID NO: 25532 - DNA, 275 bp, Oryza sativa
  unsure (1)..(275): unsure at all n locations
gagtttgctctatccctctaggtttttttactaaacaagtggaaattcctattaaaattagggccacatttataaaatgaagcttaatgttaaaaaaaaaggagccaaatccttatggtctctgaaaagtanggacgaacacccgttaatcatgttaccagagcacataccaaccttcagtaaaaatgagccaatccaaaacttcaaagatagggatacaatctaactgaagattacaaatcacaagttaaacaaaggtaaatcctgctgagtta

SEQ ID NO: 25533 - DNA, 345 bp, Oryza sativa
  unsure (1)..(345): unsure at all n locations
cactcggtcaagatgatccgagcggtcaaacttgattgcaatctctgaccatcgaagatactggggcgtgtcgggctgaacagcattgatcttccgttcagtcaacttctgcttccgtttagactcataagccagggggccgccgaagatatggttgagcttcttgcggtgatcttgaaatcctgccggtgcgtcgccatcgtcctttcttcttgacgtgctntgttcttcgtcagagttcttccgtgcagtcttggtgtattgatccgcgaattgcttgagacgaaacaatctttggccacgtggttggagttatgatggtgccggcatttgnngagtcatgat

SEQ ID NO: 25534 - DNA, 446 bp, Oryza sativa
  unsure (1)..(446): unsure at all n locations
agcttaacatcatttattagatgttcattttcaatgataacgtttgctgttcctgaaatatgtcttgtgttgatgtcatcagcatctttttactagataactgatcgtctcaattgtgcatggtcatttacttgcagatatacagcgtattctgagcttctacctatcctagcagttggtgcagcaccattgttcaaagtcgatgagatatcgcaagaaattgacacaaatagcatgaccatagtcaatgcctcaactatctcaagtccattcgcttcgttttctttcagtgccactgcttcttttgatgtacagagtccatcaaggatagaggtacaaaattccttgctatnaaatgaatcttgtgcttctttggattcagtaccatcaatcttgttggaatagaagctgttattcagtcatgaatatangtaatctaaaagaat

SEQ ID NO: 25535 - DNA, 320 bp, Oryza sativa
  unsure (1)..(320): unsure at all n locations
gacgggtgtccccacggctggggattggattttaatgtcgtgtgggtaaagtgtaccccctctgcagagttaacaaactgttcgaacagccgtgcccacggtcatgggcggatgtgaggtgattcctaacgtagttttgtttgacaactgcttgtgaaattactgttgtgaaaaagggttcgatgtttgaaaaatcacagctgacgggatcagctangcccgggtggccgtttgaaaagctgttggccgggtgccaacctttgtttaagatctaaagattgatacattgcacatactccgaccggacgggacgcactgtc

SEQ ID NO: 25536 - DNA, 458 bp, Oryza sativa
  unsure (1)..(458): unsure at all n locations
tacgctgagttatacaacagtcatgaatcanaaatttggaagcaacaacatggttatattgttgattcaataaagttttctctatgtcctaaaactgcctgttgaactgttgacttctaaacagtatgtcaaaaataagagaaaatagagtactaattattccaaagttttaccttgtagtcctgcataaattcataatgcagtacagtctctggttcactggcttgcagccttcaaaacttgtcaagtccttcacgggtaccattgtccactgtgaatatttactgtaagccaacgttcaaatatatcctccgtgcaacacagtaattacanaattcaagatcaactaattcagttatcagttagtagttaccacagtttgtcccgagcacataaagcttttccaaaccaagatacttctcaactgatctcaaagctgttgccacattggataatat

SEQ ID NO: 25537 - DNA, 477 bp, Oryza sativa
  unsure (1)..(477): unsure at all n locations
actaagctgtgataatacactgctcaaaatgcctcgcaatgagntgtattgcctctactattcttggtgagcagagtttcacatgccttacatttgaccttattttccatttctcctttcttcttctttgatggcacagtgcattcttcaaagaaatcccacaatggagatttctttttcctgtgggctttagttgggtttccctcttggccctcttctccccttacttcacctagtactagctgctgnattcggtgtgcttctggtgctgctatgccatccctattgctcggtgactcgatctatatagatagctgtctttgcaggtttacagacatctacaaaaattaaaaataccaactgctatcaatatatattctgcacaagggaagggatcaaacaagtacaacaagaaaagcattgccattcaattaccttggcanatggcanacacacnngtgtctgcaaccttcagtc

SEQ ID NO: 25538 - DNA, 482 bp, Oryza sativa
  unsure (1)..(482): unsure at all n locations
agcttcgccagcgtcttcttccaggcatgtgttgttgtttgttgctcgngactcaactctcggtttgctgcagtctagtgtgtatgtttgttccatgtttcattatcttttggttagatgttgatgtgcaatattttttctttgatgttccacacaataggctctcgatgttgcaattacattntttcaatgtcacatatgtgtgaaacatttttttactaaacaatgaaacatntntcactgagtaatggaacacctgaaacaatntttttgtaaaagaaggaaaaagctttcctcgatatattgataagtaggagagaaaaatggactgatattccatgtgatttgcttagctttaattcnggtatcatcttcttagtgaaggaggggttatagatcacaacccctttactcaaacacaaaccgtaatgaaaaatatcatcgataggtttaatatgatctatcaatttaatgtacgtgta

SEQ ID NO: 25539 - DNA, 408 bp, Oryza sativa
  unsure (1)..(408): unsure at all n locations
actaagctatattagaatatgctcctccgtctagaatatacatatttctgatctccatagacggagatcaacatctggatcgaaggcactatattattatctgatctacagtcgaagccttaaacatagatcctaaacgactttcagagattaccgccgagataagttactctagcagagccgctactctaaagcatataatagaaaggctctgaaattccctccctcagcccctatcttgggggctctacaccacaacccctatcgaactnttattctctatggcgcgaggaatatatacacgacgcgctccctcccgcgcgatcacagtacgaccgcggtcatcattgaagagactgctctgatccagccatcgctatgatatggtattggcacctgcatgaatgc

SEQ ID NO: 25540 - DNA, 483 bp, Oryza sativa
  unsure (1)..(483): unsure at all n locations
agcttccgcaacgcctccatccatgcatgtttttttttgcatgctcgcgactgaactctccgcttgctgcaatatactgtgcacgttagtgccatgggacatcatctattggctagacgttgatgtacaatatatgttatntgatgccccacacaataggctctcgatgatgcaattacattntttcaatgtcacatatgtgtgaaacattttctactaaacaatgaaacatttctcactgatgaatggaacacctgaaacagttctattgctaaacaaggagaaagcttcgcctctgatatattgatatagcatgacagttataataggactgatatatccatgtgatctggcttaactatgaatacaggcaatcatcttcttagcgaaggaggagtatatagactcacaaccccatttactcatgacacgaaaccgtagttgaagatatagtcatcgataggcattaattatgatcttatc

SEQ ID NO: 25541 - DNA, 167 bp, Oryza sativa
  unsure (1)..(167): unsure at all n locations
agctngtgggtaanggtntggcggagagggtgnatagtatcgctggacccgcttgtcagaaacaccactgccatcgcctccattggatctgcccgcgggagccaccgacaccaccgctgccaccagttctgccacggaagaaggttatgggcggagggggaggggga

SEQ ID NO: 25542 - DNA, 389 bp, Oryza sativa
  unsure (1)..(389): unsure at all n locations
aaactcaagctgtcagctcgataccacggctatcgcttatgctctcccttcgatcgtctctgtttgcctncggctcatgcctttgcttatgtccttcgtatcggtaggcccggccgaaggttctcgtggtatacctctaatagtttgatatgtctaacatcgcaacgaataaatgtacttagtgctccgaatcgacgggagcatgcaacatatatatctgcattctatcagcaatgttcataagtcaacaacctcaacgaaatgataacaagccgtgcactctcttttggaagaagcggagccgactgctggcatgctcgcgtgctgcagggtggcacatcgggtacagggccgtaccttggaatttgacgctcggtacacaactgcat

SEQ ID NO: 25543 - DNA, 501 bp, Oryza sativa
  unsure (1)..(501): unsure at all n locations
agcttatcataaagggcttcgacaaggggttttattctttcttngagcaaaaagataaagatcggatagattccaaccgcaattgcaaaggtaatcactactatgccagcccaaatcatgatcttcaccaacttggatttggttctctcgcgaaaatcgcgagttgcagagatgagaaccatgaaaagcaagatcccgaataagaaaacagaaaccgaggaaaccacaagagtgaagactagtagagtctcgtcttttgtcattctttgctcctttntcactcaatgattcattcgaatttcccgaccaanaattctatatgtctattcatagggcctcgttgctaagtgctacaagatctagtgcactggaactcgtggttatggacccgaatcctntagtatggaacattgtctttttccaagtaaaacccncagtatatgaaagaatgaaaggtgctttcgttcttttcttgtggaataagaagccctcgtaccttat

SEQ ID NO: 25544 - DNA, 508 bp, Oryza sativa
  unsure (1)..(508): unsure at all n locations
agcttctatagatgatatatagaaatggtagctataattgtcacatgcaaatggcactggaagaaaaaaaaatatgagtaaatttcacaaaactacatatactttgatcaaattaccacaaaactacaaattttgatgtatgacaaaactacagatttaacaataaatttatcacaaaattactcacaaaactatagatntagtaacaaagttatcacaaaactatagagtttagagtttaaatccttagcactagtgttatgtttgagttataaacgtgtaagttttgtgattaaattgtcactaaaactacttgacaattntattactaaatctatagttttacgatactccaacttanatcttanataggtagttttttgagaaatntagtgttaaatctatagttntatgatatatcaccctaaatatngtagtttgtgataatctggtcaaaatatatgtngttntgataaatntactcanagaatattgtgagaagtcttta

SEQ ID NO: 25545 - DNA, 420 bp, Oryza sativa
  unsure (1)..(420): unsure at all n locations
ntggtntctctagatgggattgctagttcgggacctcctgctgttactaatcctttgcaggagtatgagaatgtatttccagctgagataaccctaagattgccacctatgagaggaatagagcatcaaattgatttgattctggaagcatcattgtcaaaccgtgctgcttatcgaaccaaccccaaggagactatggaaattcaacggcaagttcaagatcttttggaccacgggtatgtatgtcaaagccttattccttttgcagntcctgtcattntggttcctaagaaaaatggttcttggcgaatgtgcattgattgtagaccaattaataatattactattcaatattgtcatcctattcctaggttagatgacatgctngatgagttgttgtattctgtaattntcacaaag

SEQ ID NO: 25546 - DNA, 445 bp, Oryza sativa
  unsure (1)..(445): unsure at all n locations
accatgaaactcatgctctatttgtgaccatgtagaaattgaattaggagcaagcgaactaaaccatatagatgcaaatcattactaccggccttacctcattgatcaataaattggccgatatgctccattgttgttctagcatcctcacctgtgaattntgtgaagttgggcacctcanaaccttgcgggtatgggaccgaatctacatgttcaggatacagcctttgatatgtatgcataactatnttagattctatctcacatactatcccgcaagacattatcattattttttccaacatccacatgaccgatttttgattcggtcttaggtgacaatgctatttcactttcacttgtgatataatccaaaccgtcacttagttcggctatattntcaatgatgtcattgtctaaactagcaacacaatccgaaccacta

SEQ ID NO: 25547 - DNA, 458 bp, Oryza sativa
  unsure (1)..(458): unsure at all n locations
actcagcttattgattcantatatattgctcaccgagctcataggacagattctcaatccacattcataatgcgtacaaatatggtgttggcactaattccttttctaaactgggataaattgccttttctgtggcagtgaagctaatgtgataaaaaaatagaccacaagaaagtgtatcaattaatatcataaaaatttggtgagtacaaggaattgccacacaaatattgcatcttcactcgaaaacataacatcangatagcagtgttactgttaatgagagataataataaacttccttacctgttcttcttctctgatcttcactcactagtgcatcctcgatcgatncgtgacatgcccggagctgaatcgacatgcctttctcttcatcatcaccttcngcnctcatctggcccatcactataactgggctctgaataccgatctcagca

SEQ ID NO: 25548 - DNA, 418 bp, Oryza sativa
  unsure (1)..(418): unsure at all n locations
agcttggtagtatgtatctttggatatagaaagataagtacttttagcactgatgttcactttgtgaccatgcacaagcacctttttagcacttgtattttgcacaatattgagatttaaaaatttagctatgcacaagtagtggtactgtaatagtacagttactaacgtatgttctcttttactgcaatttcgtcatgatgttactgcaaaagtgcagtaacgacctataaattttacagtaacgatctataaatttcacagtaacgtatcatgttactgcacttctgcgataatgttactaccgaatcatagtaacaaggtatgatttatacagtaacatgatggatttgtgttcacaaaatttgaatagatgtacatagaanacaaacaatgatctcanatcacaaagtgtcat

SEQ ID NO: 25549 - DNA, 464 bp, Oryza sativa
  unsure (1)..(464): unsure at all n locations
tgagctgctaaactatcatcacgagcaacagtggatgcattattatctggaggaagngcgtttgtgactcgagcatatccaactaaatgagcatggtgcttcctgccatatacatagataattgatgtgtcatgagaggatggacatgataacagatgaagaactattgtgtctgactggatggcccatgtaatttggaagtacgtgtacacaatgaatggctgggatcgcagcagtgagcacttttggcccgcaagtgaactcaccaatactccagtgtcatttctttcaaccgtgtctcaagtctatggaaaagtcccgtcttctcaaaatcttgtttatcatgagtaggtcttattgaagttgccttcaaacccctagcatacnagtatttgttcagaacagaaatcatgccactaatagaatattaccaggaaaccaagtcaaaactgcatataaacact

SEQ ID NO: 25550 - DNA, 505 bp, Oryza sativa
  unsure (1)..(505): unsure at all n locations
agcttacacaaaccagattgcagtatatcagttttttatattacctcagtagcaacattgagatttccttttctccctgcttttaccttttccaaccttaactggtcaatcaataaaaaaaaattcagcacgtagaaaatatatatttgaatttgctataaattgtccctagaacccattactttaaaacggatattcatgcagatagttgttaggcaaggggagcataccttgtaatttttcttctgaacatcaaatcctagaggttntgcggcttcctcaatcttgcggacaatttcttttggtggacatnttgatgtgaaccttgtttctcttttgaattcctgaaatagtgtgaacaaaattaaagtacagcagaataagttgcanaactataacanagttatggcagaattatgaggtgcanaaatcaaaagacattctgaccaatgaactactacatatattctgggacttgtgacatgcagcattctccaaccatatg

SEQ ID NO: 25551 - DNA, 474 bp, Oryza sativa
  unsure (1)..(474): unsure at all n locations
ntagtatgaatntcttcaatatagnattatcaactcttgntatcgtaaggggaactgaatgaaggcgattcattatacattgcacgcagagtctttggttggaaagaacaagcctagccaagtgctacttgctatcatcgagatcattaccgatagcatgggaagaccatcccctgaaatggagatggatctccttacccgattccaggtacgcgttccaacctactgtagcaatgtacaagataanattaacgttagctcatttgtttgtttcccttntgcaaagataggtatatatatatatatataggtaacatatctcatgcacacaaaccttcacgtgtacatatcatgcacaccaactaacaaatattactaanaattctataaaaaaatggtacatattgaaatactntcaatagtattatacatacatgtanagcatcatcnttcaattcattttacatatagaga

SEQ ID NO: 25552 - DNA, 436 bp, Oryza sativa
  unsure (1)..(436): unsure at all n locations
tattgggtctagaatttagactggcatacaactgcctgtctatttcttcagaagtcggcagaactctagcttggtgaaattttctgaaaatttaggaccattaaccagtgcacgccatatatgatggattcgtggtcggtttcaatggttgaagccatgaaatgtctctgctctcgacgtcttcatcgtgcgcgtggtggtgtttcttgacggctctagtggtcacacggtgactcgacgaactaattctgaaacaggatatgcacatcaaacaaagtcgttgatttgtagaggttaaagcgtaattaatcctgaattccgatgtaacacgtatgtgtactctgactnggtttttcttgttacattttcaatagtactggcaagtcaagagagggtatgtaagtgtggatgagattgcaatcacanagtgctaatg

SEQ ID NO: 25553 - DNA, 191 bp, Oryza sativa
  unsure (1)..(191): unsure at all n locations
atctaatgaattatccaaaatgtaaaaggtctgtnctataaatattcttatttccaaactttattccaaacttccagtgactgaccatggtggttaagattgaatttgctttactacacagattattttttcttaagcacaatcctatgtaccattngacaggtgggccccgctgctcttctctcgttctt

SEQ ID NO: 25554 - DNA, 376 bp, Oryza sativa
  unsure (1)..(376): unsure at all n locations
ctgcagcttgcctcttcatatgtgcatgcatgcgctttttgntttcctgaacatacgctgagtgatacagcagtcatggatccacactcgggaagccacaccatggttatatcggtgactcaataaatatttctctatgacctaaaactgcctgttgaactgttgacttctaaacagtatgtcaaaaatcatagaatatagagtactaattaatgcagagctctacctggtcggcctgcataaattcataatgcattacagactatggatcactgcttgcaggcttcaaaaactagacaagtccttcactggtaccattcgccactgtgaatatgtactgtaagccaacgtccagatatatcctccgagcaacaca

SEQ ID NO: 25555 - DNA, 379 bp, Oryza sativa
  unsure (1)..(379): unsure at all n locations
actaagctgtgatatcacactgctctanatgcctacgcaaaggctgtttgcctttactattcttggtgagcagagttgtacatgccttacatttgaccttattntccatttctcctttcttcttctttgatggcacagtgcattcttcatagaaatcccacaatggagatttctttttcctggtggctttagatggggttcccttctggccctcttctcctcttacttcacctagtactagctgctgaatcagttgtgcttctgttgctgctatgccatacctatagctcggtgactcgatctatatagatagctgtctttgcaggtgtacagacatttacgaacattatgaataccaactgctatcaatatatattct

SEQ ID NO: 25556 - DNA, 410 bp, Oryza sativa
  unsure (1)..(410): unsure at all n locations
aatacacaggagactaacagngctctgattntcttttctctcgggctgaaacgcccttgccgagaaatatcattatatatgtatcgaaattatataataatttgattagatgcacattgcgacagtacaccattggaggtagaagtcaaattaatcataatgccaacaaattaacaacgacggtgtacttcaaagagataaatatagggatctagctagcttacgaacatatgactagcacaaattattcaatgacactactagctaacgatcgacaactgtcacgctcggaaatcactattatttccaacttattgtgcataaatctcgtcaggatcagcgacgacacaaactgacattaaatacaatcatcatatatacgtaccatacaagaagaaacgcgcgattac

SEQ ID NO: 25557 - DNA, 408 bp, Oryza sativa
  unsure (1)..(408): unsure at all n locations
gcttcaagatgttagtttcagaaaatcagaattactctgttttagaatcaatcagatatatttgttttcttactaacattatggataatttgaacatatcaaaggcaatggtcacaatgtcatctggcagatgtggtattatcaattccattataagacgcaatgagaaggtaaaaagatagtaaattgttctcttcctgaagtatcattggtgtttgctttaacacttgatatattttgaaattnttgtttgcagtgcaaaaaaacatgcgcatgtgctgagttatgtgcatttggaattgaagattccagttatctcgaanaatacaacgaagagcagcaatgtgcaatgacatgcattatgtcgaaagtaggttgtcaccacaaccattcagttgatcttgtatg

SEQ ID NO: 25558 - DNA, 487 bp, Oryza sativa
  unsure (1)..(487): unsure at all n locations
gcttgtgatgagaagaaagtcttgacaaatgatggtttataccttggtataaacatgggtgaatcaaatggtcacaagtgttgatctcgactcaagcttgaccccaagatggatggcgcaaggcaaaggtataatgtagctaagaatgttttcttagtcttttcccggtcttggtgtttggtgtagatcggatttgctagataggcgccgtactatcaagaggggtctatgaagcgagcttgtggatgatcttgtgccatattagttcatatgcatgtangtgtatttggtgggcttgtctagccaagtgtggtgagttntctcaagtcctaaacaaagatagatgtgggcaaatcctatnaggttgggtagcctcatgtggttatgtccggtggagtatttcttggagtgtgagctctttctccctgagaananngtgtgttcttgatgaattgtcatgggtggatagccccttcatagctttcat

SEQ ID NO: 25559 - DNA, 328 bp, Oryza sativa
  unsure (1)..(328): unsure at all n locations
aactaagcttaatcctttgaatcaagggccaaatacgagaatctcctatattgatttttttctatgaaatntctacataaatccttcgattcaaaggggccctaagctaataaacctaagattaaacaaagagggccataatacccgatgtgacacgccaaaactttacacccctgaatctaaacatcccattagtggcttataggagaagagtgtgacaattgcgccaatcattttatttagaacaaaaatattaataatatcgcttagcatccatgttatgaaaataacgccagcaacctatctccaagcccgggccgcgccggcc

SEQ ID NO: 25560 - DNA, 355 bp, Oryza sativa
  unsure (1)..(355): unsure at all n locations
aaactaacataaagtgcaaatcttggtactgttctatataagattttccagcaggtagctgtgtagtttaagtgtaagtagacgaagacaaaactgtatcagaaatactaagagttaagagtacctgtatagtgacaagagccaactgtccagggtaacttgaaacaattgatcgaaatgtggatngtgcatttgttgaaacaaaatatctgacagaaagaaacacctgcgtcattaatgctaattgccaaaatatagaagccaaaaagtccaaaacaaaattacaagagtaccagattaattcatattagtggtagaaataaataaaaagatttctcagaagaaccttatattt

SEQ ID NO: 25561 - DNA, 424 bp, Oryza sativa
  unsure (1)..(424): unsure at all n locations
acctcatctcaatgatctnttgtttggctctccaggccttngcatagcttatggtgacttgaatntgttctcgatgtgcctaataattgattttggttcaaagccaatgttaccaacaacactgctgtacatctcacttgccacaaaagctgaagtgatgtttcggtgatatttctccaccccttgtaagtagcacttatgctcggtcacaatgctaactttccaataatcattccatttacccttatatgcatggacacgccacggacaatcttccttcatgcacctcacttcatacacataatttgttgacttgaccaccctaaactctctctgcaatgaaactgcccaatggcttcaccgctncttcatctcatccttatgagcataccttgcaccctcaaattacctcgtctccttatac

SEQ ID NO: 25562 - DNA, 402 bp, Oryza sativa
  unsure (1)..(402): unsure at all n locations
cgcacaacctctctccgagtgttagcggtgacgacngngagccgaacccacgccgtcgagctcgtactccaccgccccctccacgccaaagtcctaggcgggaggaggcgctcgagagggtcgaaggatccgcgacttcgacatccacgggtgatggggaagggcggcgagatggngagcgtcacctcctcgtctacggcgacggcagcacgccccagggcgcgctccaagctgcgggcgcgctcctacgtcacccgcccattgtccctgacccggagtctccagcccaacgttggctggacgacgtggccaacttagtcatgacggcacggcagcgcctaggtgctggtgggcggtcctccgccaccaagacctctggcgctgctaccaccggctccgtgt

SEQ ID NO: 25563 - DNA, 404 bp, Oryza sativa
  unsure (1)..(404): unsure at all n locations
gcgataatgtgatatgtggctcccccattctctcttttagaatccaccacataagattgagttagccttttgcaccttaatggagtattgaagtctcttggtctatcatgtagcctatatgcaaagtactccaatggggtcattatggtgcgtttaatggcttgactacgcgctgatgtattgtacgtcagtttctcatgataaccatcctctccatatgggaataaaagaggatattgcattgacatatactcgcaattggtttcatttatctgctgcaaatttgaagaacggtcntgtattattatatcccgtcctatatcacgtgatccaatatcacccacaattagaccaacaacttcagaacaaccggagcactgtnaatatctncatgtgcatacctt

SEQ ID NO: 25564 - DNA, 502 bp, Oryza sativa
  unsure (1)..(502): unsure at all n locations
agctngatacttgatcagtaaattacatttttttgcatggatcagtaaattacttagactgctgctaaaaacagacaagtatgaacgtttaaaaaggaggctaataagcagttccattcttgatgaactttctgtacgttaaaaacgtatttgactatggtttcctaagtgtttttgagtttatatagtactcttatccatattaattgactccgtgggctgtaaaaggtgcacatgtcactatgtaatatactccaatcttgctcttttttcataagaacatatcaatatgtatttactgtagtctcaactacaactccaaactttcttcatatatttgagttgctctcacttattaatttattttagcattcttggcacannacattttggaaacaaaatatntcgcagcaacgcgcggngtatcatctagtatcttaatctcttcttctcccttcatcntttatccttacatttatagtggtatactaatactatctta

SEQ ID NO: 25565 - DNA, 382 bp, Oryza sativa
acgcgtgctcgacatctaacgatcttaaatggaaattaaaccaacatggatggagtagtttagcaccaagcatagccggatactcactcgcgcacagcagaggatagtaagccaagcgcatgcgtagtacgtgcctgggtaatcgacacgactatacgtataattaacataaaaaagtgcgagaaataaacacatattatatttatagatagagaaattaaataggttcacagtcttcctgcttttggaacaccttgccttgttggctaccctgtgcgtgttgttggacaggagcgttaggttgatcgggcatctggagcttgtcggacaacgtctttgtccccttgatggagaggagaagccagacgaaggagaggaactc

SEQ ID NO: 25566 - DNA, 409 bp, Oryza sativa
  unsure (1)..(409): unsure at all n locations
tcatcttcgatgcagtaaccaaccaatttcactaggtgtggatgttgaaggtttncaagataatcaacttctgcctgcaaatgaaataacgctagtttaattgatgatgcattagaagacagttgaataatattttgtggtctgtatgctgaagcaattcaaaacataccacccactctntatggccctgcagcccatcatggttaagtgtcttgacagcaaccgttaatcctgtgccaggttttacgggagcagttccgttctcctcaatccaacctttaaagacacagccaatacctccttcaccaatgagactctcaggccggatgtttcttgtggcacacttaagttcattaaatgtanacctacggagttggaaagctagtttaagttcctcttcgactatgga

SEQ ID NO: 25567 - DNA, 444 bp, Oryza sativa
  unsure (1)..(444): unsure at all n locations
tagacttatggacttnggnttaaaatatcttttttttatatatattatataagccggtgaatntaaagttgtaagtttaatgctggagtcatgtctccgtctcaaataagccaaaacgtttctccaacctagctcctggattatggattaacactgtatagctcatgactttagaaaagccaaacaaaaaagatcataagctaagcttataagcctaaacaaaagagggtctactatggtcctttgaactttgcttcgggatgaatttacccctgacgtgagctagtttccaaagaactccatataaaatttgttatatactccgtactagctttctattggttcctggatcgacctaaagcgtcatatggactntggcatgctatccttatatgcangatcaatattaatatgttaatntacccttatatgtagcacagagaa

SEQ ID NO: 25568 - DNA, 392 bp, Oryza sativa
aactcagcttggcatacaagtcgtagtatggcctgtacagtctatgaatgacaagatcagattgtcagctgcaacttaggagaagagaccccaaaatagtccctgacaaaccaaacctatgacaggaagaaaggtaagatctctctggcatggtctgaaatttattgctgcaaataagtaaattatctttgaggttcctagcttgtggagaggcctcagcatgtgtatcatgaaagactagacctggtaaatcccctgtgatgatgacctgtcatggtatttcatgccaaaattagaaacttacctcatgtatcagcagaccataatggtatagcagtgcatgttacccacagttgtgatgcaaggatatctgaactgtgatcacttagagt

SEQ ID NO: 25569 - DNA, 389 bp, Oryza sativa
  unsure (1)..(389): unsure at all n locations
actacccaattctcaagcacaccgactattgttttttccattaagttcacatcctagaagaagcagtcgaaacccgcatcactcaaattaaactaagcctattcctggcaaacataaattagacaaaacatggcagagcactatcaaacctacatacatgaaagctctatgtcataggaaaggctatttgtagtctcaatttcagcataaagcaaatcttagttcacaaaccatttgcaacgtaatctaaggagaacattttagcanattgggaagcatattaatcatggcatgatatcaacatatatagatagacatcattcccttacaacacaacgggaagtaaggaatcatatcacatatatcaatcttatcatcaactcatatca

SEQ ID NO: 25570 - DNA, 212 bp, Oryza sativa
  unsure (1)..(212): unsure at all n locations
ttgagatggtatttaagcgaatgaaaaattctgtattaggaataagtgaggatatgaactagtatagagtatgttgaactgttaatgattttgaaggtgcagcatattagcttgttcactggtacagcagggaaggcagtggttcactttggataatgcacatngatgtccatgcccatctgcttggattgaacaaaaaactggatggtatg

SEQ ID NO: 25571 - DNA, 449 bp, Oryza sativa
  unsure (1)..(449): unsure at all n locations
cggaagagaaatgccttatatgcgctgttttattgaaccgacacatatatggcatcaccagttaaggattttgcattatgcagtactgaaaatgaaagttcgtcttttatattctcataggcgtatagtttcaccttgaaaaccaccatacaactctatattcttttactggagggagtattatggattcaataaagaattactacctctcatatttaatgtatgacgccactggcttnttatccaacatttgatcattcatctgattcaaaaaatttatgtaattatcatttattttattgtgacttgattcatcatcaaatattctttacgcatgacataagtattttcatatttgcacacaaaaattgaataatacgaatgaatcaaacgtggtctaaaagtcaacggcatcatacattaaaatatggagggagtattagcatata

SEQ ID NO: 25572 - DNA, 344 bp, Oryza sativa
  unsure (1)..(344): unsure at all n locations
accatatggacatagtaagctttgtntgtttctgactctgggtagaaatgccaccttgctgatccaatcctggattaaatataaccacattacaagcattatgtagtgaagagaaaagccctacaagagcacgggtcgttgccactagcttttgttttttcaaaacaagtaccgtagaccgncgtatccacatgtgcaaatgaaattgtgaaaactnttgctaggcaaaattgttccatgacatcgaaatatcctaagaaatggtttactaccaaattattcagatatacttaaataccatccaaagatataaacatttataactgtggtgctagtggggagga

SEQ ID NO: 25573 - DNA, 442 bp, Oryza sativa
  unsure (1)..(442): unsure at all n locations
gacaccttntaagatgcattgttctctacttctaaaagttgaataactgcggtataaaagatttaaggtattgggcacttgatcacgcgcactttggcctaagcaaaaagtgcctaagtccctaaaagaacatgataggccacacctgaaaatatgggctgcagacatattaggcctaggccaaaaaatatgccttcgacaccctttaaaggatgacgcatgtaacatgctcccgagtaatagatcttccgggtgatatagaccaagtgtagcttatatgaatagcttctgatctgagtgattatcccttatgggatactccaaaatagatataataattgaatcctgactgatgcaagtattcgggtgataacccttacggggaataataaatagtccagtctttgagcatagaanatagaaccatgatcatgaattcatg

SEQ ID NO: 25574 - DNA, 259 bp, Oryza sativa
gagtgggctccgcattcttcttcatggatatctgttagaagcacaacgccttgttcccgaggaatgcacttcaggagggatccattatccgcgcgccgatagagggtcccttctaccagcacataacgtttggagatgcgatggacgcgttcactcctttcgcggtcctcgggtagagtcttatctgtgaggtatgcttggatctcggcgatccaagcaatcaatctaagggagctgggagcactccccttcggtcccg

SEQ ID NO: 25575 - DNA, 495 bp, Oryza sativa
  unsure (1)..(495): unsure at all n locations
tctatcaagataaatgttggatagctatgtatggtataagacatcacagtaaaaagtaggtatgatataagacacgttgaatagtaactaacaacaaaattgcgaactttttgtaggacatacctcatcaagtattagaataggagagtttttcagaagagcacgagcaatagcaattctctgcaaaacaacaaaataattgtaaagtagtaatgataacaaacaatgaatgtattttctaaaacaaatccaacaatactgtttttgtattgtgagtttatatattntaacatatacccagggacaatattttgaaaccttgagcatatggaccccaagtgaacatatatggtcaaagagagtgtttacatgttaaggtatcctcaagtcacanagtgagtgatatttgngacactgacatagtgcccaagaaaactacaanacttcactggtatatatctacatagagtaataaattacagtattataaaagag

SEQ ID NO: 25576 - DNA, 390 bp, Oryza sativa
  unsure (1)..(390): unsure at all n locations
ctaagctntggcaccggctcacgtatcaagtgcgtcagaccatatctgtctcngtttctttcctaacctttcttttgttttccctgaagggtgtgctttctgtgaaatcagtagaggatgtaaaccatggntatattcttaatttctggttggtattatcgtagattatgataatttcgaaccatgtgaaacaactcttatttaaaactatgttacatactactctccgtctacaaattttgtcanggactataatatnttatgacctctcataaaatacaaaaattatttaggtacttcctcaactgatcgcttggcgcattaaaccctannattttggatactttacccctattctcggtaatcactttacttcttatggatattctt

SEQ ID NO: 25577 - DNA, 457 bp, Oryza sativa
  unsure (1)..(457): unsure at all n locations
agcttcacgcatgggccatctnctccacgcgcttacctcttttccaatgggccagcaaatcaccaagcaggccgtcgctcgtctgggcctcctcctgggtcgggtgttccagcacaagccgacgccaacacaacagtatagcacacgcaagtacgcagcacatgcatgcaacgagacatgcatatgcaccacgctacagtaccatgagtactggagcaaccatatactccgaatttcctcaaccaatttccttcgcgaacaccgacacttgcatgcacacctcgtgaagcctattacgaagatttctcccacacgatgtccatccaccgtatactatatcgtatccaacttcgttattcggtatccttgaccgtctggacctcaactcctccctgagtttagtcctgatccccaccgttgaccaaagttgatcgacctctaagaatctgactctagt

SEQ ID NO: 25578 - DNA, 441 bp, Oryza sativa
  unsure (1)..(441): unsure at all n locations
tcagaaggatgctatcatttcctgaatgttttccagctccagctgccaaaaggggaacactgccattcagctgcatccaactgcatcctttctccttcaacgtcccctggacttacattactctcctcacctccttaagaccttaacataattctagttgccatatttgataagagcacatgcgctctgccacgatgaaacaagagcaaaatcatgcttgatgaaacaagctaagatggtccatccttaactcctttctgcanaaaaggactttcgctcagagaacaggagaataatctgggatgtgttatntaaactgataaacatggaacaatgggtgcacaataactgaagttataagctggtgctgggttcgatttagccaatacagtgtaatgtgcataaaactttgtttagaagttagaagatacctatgaaact

SEQ ID NO: 25579 - DNA, 466 bp, Oryza sativa
  unsure (1)..(466): unsure at all n locations
gcttgaattgcgactaaattgagagatttttttttcagagtaaccgagaaaagaaagcagtatgaggcgagagaaaaccgatccaatgatgaanaaggggatctagccgatggtaacttacctcagcgtattcggctgatggtgcggcagatgggctggcggaggtcgacatcgtcgcaggcggagatctggccggagatgaagtcgcctggggatcgtcttgcgcgtcggaggaatcgccggagagagagagggtaaagtttcgcttaagcggcgaaaacggaagtcacggtgtgagaattctcagggataacggttagtatttgaagcactagagtaacaatcgggataacggcagagtgcgaaacttgctcggagtctatacacggtaaatccggaacattaccaaatatcccggacttgnngggcatgtgtacgaaccaaattggaatatagcatcggagat

SEQ ID NO: 25580 - DNA, 430 bp, Oryza sativa
  unsure (1)..(430): unsure at all n locations
gcttattctcactaatatgtagaaccaactgtgtgtttttcatccaggaggtttatttgaagcatcttcgcttgacttgatttgtacaccaagaaacagagaanaataagtttttttttgtgtgaggaatgattcttagattaggaaattcagggggacagacgaagcagctgagtgaaaattcatggtacggtaattttttcccttcacaatttcattgaaatttaataactatattgtacataattgcaaaaaccaagattaatagcaatgtatattacctgngagatagaaggggaatgcccaggggtagaggcaaaccaaagaacaaaaaagacaagaagggataaactgaagaatctgtgtatganaaccaaagcctgaatatagatgataaaattagctgatgtcagtgaataagaaaataact

SEQ ID NO: 25581 - DNA, 163 bp, Oryza sativa
cttgatgtccaaacagttcgcactttttttgattttttgtctgctgagcaccattttgattcccattctctggattaaagactatctgactattgggcaatttaatgaaggtattattttggctctctaaaaatttgcactctctttctaaaatttattgtta

SEQ ID NO: 25582 - DNA, 457 bp, Oryza sativa
  unsure (1)..(457): unsure at all n locations
agcttcatgcgtgatggctacgtggatttattcttctatataatgagaatacgagatatgtactgtattgcttaatggacggcctgttgaatgcgttcgatcacactgttgagtgttgagatgtcctcaaatcctgtgatcgtcgaatgtaagtgtgtgtgatggtgaccgcctgactcatgcatcgatgagtggtgacagtataacagcatcattccaccagaccacctacctagtaagtgtgaaatcacagtgatgactatattgcaacagataattagataaaatgttaatagcaatagtttggtgtttcgaggtgctatggcagctttggtttgaccggcgtggaaaggactatgaattntcgctttgaatatgttatttntctctgaatttntttctttttgaaacatactgcacaagacagtgcgagtttcatgtatttgcttttgaatgt

SEQ ID NO: 25583 - DNA, 384 bp, Oryza sativa
  unsure (1)..(384): unsure at all n locations
gagagatcatcataaattattaaagtatgccggtcgcggtacataaaatactcagccagagcttgctccgtataaggagcgaggtattgtaatgtagcatgggaatccgccatttcagctactacaatagtgtattccatggccccctcttcatggaaagtaggtactacttgagctacggaggatgctctntgaccgatagctacataaacacatattacatcttgcccttnttgaatgagaattgtatctgtagctactgctgttntgcggtttggctgtccccaataattaactctcgctgaccgcgcccaatangaatcatcgaatcgatagcaatanagccccgttgaaggggtcatatacagaacgcctgaaaatata

SEQ ID NO: 25584 - DNA, 343 bp, Oryza sativa
  unsure (1)..(343): unsure at all n locations
tgacatggctgtcaccacctgtcgcctacctttgctttgcgtggggcacacaanatanaggttaccactaacctagactccacgtttatgttatcaattactactctagcctcagtcaagaactttcgccttatccagactcttagtactagagcaataagcataaatactaagcgatgaacccgtaacgatgagaatctgtctcacttagataagaacagtaaataccaaaagatatcccaaatacttattgatgtagaagaagtatccatcgaggtacaagatcgataagagtgccaacatctatgttngacacttcctctagaactcccatggagtaaca

SEQ ID NO: 25585 - DNA, 317 bp, Oryza sativa
  unsure (1)..(317): unsure at all n locations
ttatctntgatcaacgtgggcgcatccttctttgggagcagagtaatcaccgctgtgttgagagagtcgagattctgatgattcccagagtgaaatttcgtcagtgccgccagcactttccctttgatgacttgccaacaccggtggtagaaaagcccggtgaatccatccggtcccggcgccttctcgtttggcatctcttttatcaccttccaaacttcctcttcagagaaaggcacttccagctcttgcaggttcggcgccggagggaagatttgattgaattggagctcagccgagtctggatccgccacacc

SEQ ID NO: 25586 - DNA, 134 bp, Oryza sativa
tgctgtaattacaatgctgttagtgtgacagtcagaaattggacagaagtatattgaggagggcaaaataaccatctcatcagccaatgatataaattacacacatatccggagggaggaggacgatgctacaa

SEQ ID NO: 25587 - DNA, 403 bp, Oryza sativa
ctgagctgcagcttctagaacaagctagcttatattattgtttatgtgagcatcactcaatgcactctggtacttaactcctaagtaaacgtacaaatcacagcagatatttcatgggaatcattcctttgacattaacacgttataagcatcttaaatactgtcacaagaagactatctggtcttcaacttatgaaacaccaaaagttaatccagatcatacacaagttaacagaaaaaaaaactgtccctttgcaaatgaaacaccaagaatagatcaaatcttagcagatagccacatctacttccacatactactcaatgaagttcagaacacagctaatataggaatcatggaagaacaaatcacttcagctagaccatgaactcactaaagaacact

SEQ ID NO: 25588 - DNA, 494 bp, Oryza sativa
  unsure (1)..(494): unsure at all n locations
gcttatccagactctcggngtaaccaatcatttttatcacatgnggctcactggattaccttctgcaagcctgcacgcaaacaaggactttgaggtattaaacctctcagctcttgcttggtcctcaatcatgttacgtagtctcgtgattatcgtatgagcattcaatgcctcatattgcctttgaagctcaggggacatagtagcaagcatgggacaacttatatcaatataatcattgcatcgcttttcatgctccctacgttgagcagcaggagcattgttgggcaagttagctggaaaaggctctgtaagcacaaactctntatactcttgcctgagaacaattctcaggttgcgataccaatccatgaagtttgttccagtcaacttctctttctcaagaatagaccgcangttaanactggatggtgcangagctgccatgatctacaatagaaatatatgtatgcanaatcagcaccatgtntaca

SEQ ID NO: 25589 - DNA, 404 bp, Oryza sativa
  unsure (1)..(404): unsure at all n locations
ctcagcttcaagaacatttctaaatcggtctactggagttctgtactcttaataacgaaggtgctgacacactctgtctcctggcagttaggagaaggcaacatttctatttagaatcaaccttggcgtgatcttaacaatgacatttatcattctattaaatctaatcctttgcccagtcagttgcctgttaaagttgcagatctctggactgagactaaagaatgggatagcaacgaacttaattcctttattgaagaagaggcggtgcacaaaatcatgcatgtaccaataatgcataacgatgcagaggataagcttntctggaagcacacaagatatggacaatgcaatactaagagtgcttaccagggaatttacataggagagaaccacacgattca

SEQ ID NO: 25590 - DNA, 230 bp, Oryza sativa
ctccacggacctagcacgagcgcactttagagaaccgcggagacctgttggaagacgagagacgagcgggcacaagaggaaaatccccgcggggaggggagagagataaaaccgtgagttggccgaagaagggggcatctacatacaacgggtgttcgggaaatattcctgctccccggctaaagttaactatgtagagtccggatcccctgtggagacggtaaaccgga

SEQ ID NO: 25591 - DNA, 169 bp, Oryza sativa
tattattttcccaaatataaacatatcaccatcattactccatttcatatcaattattatcacattcatcacattttacaccaactaatatgctgaacctaacccaccattatcattcaactccacattaggaattatactctcatcatattcaacttacctaaaaaat

SEQ ID NO: 25592 - DNA, 347 bp, Oryza sativa
gctacctgcccgcgcgttcgcaagaggcgatatatcggcaaaacaatacctgtcacatagacaattaactttatttgcaggaacaatgtaagtttcggcatgaacatccgtcgaaagggggccccacataccataccacatggtttgcacgggctctgccgaagctccaatctcacccttgccccggaggggcttgttggcgggatggcaatgaaggctataaaatagtccatagggcatgaggcccttcgaccaaacctgccgaagccatgcgaacagtggggattcaagcccgagacatcaaaggtagtcagggcgaagaccccccatggcgaaaactatggaat

SEQ ID NO: 25593 - DNA, 393 bp, Oryza sativa
agcttcaaagaaaaataaagatactcacgagtggaaacatcttctcggttgccacctacctcgctaccgccatgcccaattggcacaataaaaccattccgaattccattcttcttgtgcaagctcttccttactgctggccccgcaccctacttgctcacctggctctatttcccactcttcatcaagccttgtagcgggaacaacgcgcaaaccaccagcctcaccgaggagcaacctccccatggcaacctccatggcgtacaccggccgcgacggctcgagctcgacgaccgcgcacttgtgcagcttcaccgtgcgcccgtccgcaggcatccctggggctagcacccatatctgccccgcggagagggacagcagagccacggcgtt

SEQ ID NO: 25594 - DNA, 364 bp, Oryza sativa
  unsure (1)..(364): unsure at all n locations
ngatatgaactcatgagcattgcttgccttagcaacagctataatctcttcttcggttacttgtcctttcctcccgtatgctatgttggcatgaatagtgtcattgaaaagtattggttcttggcttaccaatcccatttgatctcttaaccaactcaattttaagtttttaagttctactctgtctagtgagattgtgccagaatgtgggtcatagaatcgctccagcaaagcaattactgtggactttccactgtcgctctctccaacgagtgcaacagtctgcatatgacaatttggttatagcatgtcagtacaagtttaattattaagggaaaataaatatagagaaatctggattatt

SEQ ID NO: 25595 - DNA, 256 bp, Oryza sativa
  unsure (1)..(256): unsure at all n locations
tattattttccaaaataaaacatacaccatcatctactcatttatatcaattttatcacgtcatccatttacccacaatttgctaactaacccacaattattaatcacctcacaatgntaactacacttcatcctatctttctagcaaaaaaatatcaatattatattttcctattccacaaacatgacttctccaacctctgtttctaattacttcttcaatttttattcacactctattatcttctcgataata

SEQ ID NO: 25596 - DNA, 418 bp, Oryza sativa
  unsure (1)..(418): unsure at all n locations
tagctttgggtgacgttcaagacgcgctcatgctatcgcttggngtcgtggaaaggccccgacgacccgtcgtcggggagcttctcgttcggcggcgacccggacacgttcctgcaggtgttcatctggaacgggacgcgcccggtttcgagggacgggccatggacgggctacatggtgtcgagccagtatcaggcgaactccagcgacatcttctacttctccatcgtcaacaacgaggaaaagagatacataacgttcagcgtcttcgagggctcgccgtacaccaggtatgtgattacctacgccggcaagtaccagttccagcgctggaacatcagctcgtcggcgtgggatgtctcggagtggcctatatgggactgcaactattacaactactgcgggccgaacggctact

SEQ ID NO: 25597 - DNA, 391 bp, Oryza sativa
  unsure (1)..(391): unsure at all n locations
tgactatgaaaaggtcaaggaggtcacatactatgtctngatggttataaataacaacctttattaaattacgcaggtgttatcttctattgttggatattattcattgagcatgtatcgaagcaacttacaactgaactctattttccagataggactgcttgttggtgcagctttagcccttcttctgtttgcctcttttggtagaattgcagaactgttctccaaagatcctatggttctacaaattgttgggagtggtgttctggtatgtgccccttttttttgtcatactacaataagatcttcagcactgtcaacgtcatctttacccgttctgtatttgtttttgagtttgtagtgccacccaccattaatgccctacttttat

SEQ ID NO: 25598 - DNA, 391 bp, Oryza sativa
  unsure (1)..(391): unsure at all n locations
agcttgcccgcaggtacaccgtacacgcacttatctgggttcagctntatgcgggcggagcggagactctcgaaagtttccgccagatctgaaagtaaagtttcttggtcgcgcgtcttcacaaccaagtcatcgacataagcctcaacattacgtcctatttggctacccaaagaaattcgagtagtacgttgaaaagtaggacctgcattctttaacccgaagggcattgtcgtataacaataagttcctatggtgggaatgaatgtagttttttcctcatcctccctagccatgcgaatctgatggtaaccagagtatgcatctagaaaacacaaaatgtcgcaccccgctgtggagtcgacaatccgaactatgcgaagcagggggt

SEQ ID NO: 25599 - DNA, 363 bp, Oryza sativa
cgccttgggaacgaccaccgggttcgccagccacttctgatggatgacttcacggatgaatccggcctccagaagcctcgccactttctcgcggatgaaggcttgacgttccggggcctgccgccgcactttctgccggaccggccttgcgcccggccgcacggcgagacggtgctcaatcacctccctggggaccccaggcatatccgccggtctccatgcgaagacgtcagcgtttgcccgcatgaaggagacgagcgcgtcttcctatttgccatccagaagaccaccgatccgtgtggtcttggatgggccgtcgcgccagggcaacctcttgaccgggacctcgtcgcatgtgacaat

SEQ ID NO: 25600 - DNA, 417 bp, Oryza sativa
  unsure (1)..(417): unsure at all n locations
agctttctagttatgaatcgggtatagaacctctggggggggcttggttacaattccgaatacgctattacatgtttgcgctagtttttggtggttttgatggggaaaccgtctttctctacccttgggcaatgagtttcgacgtattgggtatatccgtttttatcgaagctttcattttcgtgcttatcctaattggtgggttaatttatgcatggcgaaaaggagccttggaatggtcttaacttgatattccgacaaaaaaaaaaaagaaggaaaagaatccattaagacagttatgagtttgattgagtttcccctacttgaccaaacaagttccaatttcgtatttcaactacactaaaagatctttcgaatnggtcaagactctctagtttatgggcccttttatatgga

SEQ ID NO: 25601 - DNA, 406 bp, Oryza sativa
  unsure (1)..(406): unsure at all n locations
tacacagcatanatacaccagtattgtacaagttgaaccttcatttgttacattcatactcagtcagaatcagctttttcatcatcagacgtattactactcggcggaaggtcggtattgcggaattgctctacaacgtcacttgcaatcttgtcagccgcgttttgagcattgctgataagatcaagagcagcttcttcgcttgtcccgtctgcaaagccatcaatggcgtcaatttcaatccttgggtacaaagatttggtcatcgccaatgccatgctagctcccatacttccagcttttatgatattcttgaaatatacatccggagcaactctcagcttgtcgaagattccgttgcgtcgagtgcacatcgaccactgttattgaggaacatagcttggac

SEQ ID NO: 25602 - DNA, 401 bp, Oryza sativa
agcttcccatcattcaaggccttggatgccttgtgcatgtcaaagtgcattctgtccattcccctcatcacggcgcacatgtggccgaaggtggtgtcgttctctccggctgtagggcggaaggtgctggcatcgttgccacttgctcgacaagggtggaagtggtacgccgtgttgcataaaatgtagtttgggcgatcgcggtgcctccagatgcctcaaccaccatgttagcgaggcaggtgcccacatagccatgaacctccagacgaacatggtgggtaagctcgccactgagtggcggaacggtcgagtactccgtcgcgttggggtagcccaccaccagggtcatgcgagccaactttgccacaaaatcgttcatgcctattccgcggtggtta

SEQ ID NO: 25603 - DNA, 344 bp, Oryza sativa
  unsure (1)..(344): unsure at all n locations
ctatatcactcatcatattttactattctgnnggnatatcactcggatcatgttatatggaggattcacaccgcatatgctatatattgatatcaagtcacttggttgattacgaatatcaaaaccactccgctggttggaatatttaatccttgactatatgcttggattgtttaaataaccacattgtcaggggctacacctaataggtgcatctagtcggtgcacctgactttattatccagccctccacagtcttcagatnntggtaaagtactcgggagaccatgacaaagatgattgaagcactcggctctggaagaatctggctcgagagaagatta

SEQ ID NO: 25604 - DNA, 425 bp, Oryza sativa
gatagaccgacgaatttattttctagtagaataattgcgcactacactatctattactctatagctaggtaccaaaccatcaaaagaacacttaaggagacgaccaggatcacatagaactccggctacactagttttggagccattggggcaaaaacatctctcccaataggcgtcaagggaaatatccagcgaaaacccctaaaagctctctaaattaatgaaaatattacagatatagatataggcaggaaatccattaccattcaatctccaaatcttaagtacacacttgatttgggagtaagaaaaggataaattcaaggtgaataaatcaagatgaataccaatagaaagatttagtaaaagttactcgtgcctcttccttctcatggttcagtcttcactacatatcggatatatat

SEQ ID NO: 25605 - DNA, 334 bp, Oryza sativa
  unsure (1)..(334): unsure at all n locations
acaactaagttagaactcgtaaacactcatacaaatagtctgctaacgaaaaagagcgaatactcaccgatattgattgaactgggaatggctgtgacgaaaaattgggattcaagctaagactagctatctgattgacactgccagcngtcttgcttgtacatcggaggaggtcgtctatgatccagcaagtcaagacttatcagattgctcaaaagaacagttgcatctgtgaccattgaccactgatgagtgttctggaagatgatccctcgtactaccatacggaaaatgcagctgaagaaccagagcatcatcgacatgcaaaacacat

SEQ ID NO: 25606 - DNA, 434 bp, Oryza sativa
  unsure (1)..(434): unsure at all n locations
agccttttgttttctttcagaaattagagaaagcgatggaaaagagtntcagcctaaaattatccatctttaaaactgccttaaagcatgcagagaccggaaaatctgcttttaaagcattgtaaactgtgattatttgaccggatcctttttatactccctatcgggcgatagactaccggttactgacttttgctatttatctcgcatgtttacccctttaaactaaaaaattagacatgcactgaagtaaagcatatctttcaggccatgtgttttccatcaacactaatacaatacatgcactcaatacatgcacccaatataattaaagatctcgggagtgcatgatatagaacatcataatttacggaaggataggtgctaattaattgtataatggatcacgtatatattagaaacactttaaaagt

SEQ ID NO: 25607 - DNA, 432 bp, Oryza sativa
agccctaaacaaaacgggtttattaagcccggacctattgttggcaatggtgcgggagttgaagttggagatgagtttaattttagaatcgaattgtcatttgttggactccatcgcccatatcaaggaggtattgacagtacaaaggtgaatggaatcctcgttgctataagtattgttgcttccggaggttatcatgatgaattgtctagctccgatgaactcatatatacgggttctggaggaaaggccatcgggaataaggcagctggagatcaaaagcttgagcgtggtaatctagctttgaagaattctattgaaactaagactcccgtccgagtggatcatggattcaaagggtcatagtaaggtgaagctagccattctaaatccaagcaaatctcaacatatatttatgatgggctgtacatg

SEQ ID NO: 25608 - DNA, 442 bp, Oryza sativa
  unsure (1)..(442): unsure at all n locations
agctggcgcacacgaaagagtgcgagagctcattatattcctcgcagagccccctacctggcgcgccatatgaccgagccgggggctcctcaccgggagaccgcgcaggcccccctttgccggttcggccgggggccctgggtgaggttctaagctcttggtctgtggaaagttcgcgagagtgaaatcacacaagacacgggcgatgtatacaggttccggccgctgagaagcgtaataccctactcctgtgttntgggagatctgtgtatgaaggagctacaaagtatcagccagcctctcccttgttctaggtttctaatctggaaaagtccaatcccccctctcagtgggcaacggcctccttttatatcttaaggggataccacatgcaccatttctctctttttttgtggggacttacccccccccccctttccat

SEQ ID NO: 25609 - DNA, 309 bp, Oryza sativa
  unsure (1)..(309): unsure at all n locations
aataaactcaaatattatatttggctgtaaattaataaaaattcttacactattaagagtactttttatccttttggtgatctctaagcatgatgaatttgcaatataaaacattccacatagattgtaattctactggaagcacatgctangaattaaattaatccactaaccctggtgcctctattacagtaattactgttaagcactggaaatactttctctgcagcgagctgacgtagccgcccaagaggacgactgtctaccatgtaaatgcaatgtacgccatgatcgtacatgtgaatttga

SEQ ID NO: 25610 - DNA, 445 bp, Oryza sativa
agcttaccagcccgaccaagcagagtaaccatacttgcgtaatgctccatcctcggagaaattccatgcttgtgctgcatttcattaaagtaactacgccccttctctgtcaaccagcttggctgcaggcaccaaagacacaagtgaaagggactaggtcaagcttttctttggaactctgcatggatcggaacaaccgcacagcattctcagcctctccatgcatagcataaccaccaatcattgcattccatgaaaccacattcctatatggcattgcttcaaagatcatccttgcatccctgaccctgccacacttggcgtacatgtccaccaaagcactccccacataaatgtcatgatgaaagcccttcctaagagaaaaacagtgtgcagaacgaccatgcatcagagctgcaatatttgcaaaagctggcagcacgca

SEQ ID NO: 25611 - DNA, 425 bp, Oryza sativa
  unsure (1)..(425): unsure at all n locations
atgtaactggcgttaagttcactgaattatggtatgcttctnataacataanaaaattaagaattaacgagctctgggtacagtgttgggataacagcagtagtgatctaaaatacaactgtatcgagcatggtttctagcgtctgaactatgtttgatgacatcaaattggagacatgctcttccaagtgcttcttaacatcttgccgtcccacatatgctatcgctaatttctcaggcggcagctcatcctcctcttgcaccggcttgttgtacttgatagcaaggttcagcatttcctgcaaaagataacacataaatattataaatgantaaaactacagagatgaagtttcaacattgacttanatgatcgtcaaaatagaaatacacacctgaacagtntgctcaatggtctttgaatg

SEQ ID NO: 25612 - DNA, 441 bp, Oryza sativa
agcttcctctggtatgaactgccatgcatctgcgacatataaaaaagaaagaaagagttgatgtgagaaaaccaaaatggcgggtatgtttgggcgctcatctaatcaccatagaacaaaaactgatcttgaatctaaatataattacttaccagcgattttgctgagtcccaagtgaagaacctagtaaaaaacttgggctcacttccttctgtaacaataaaaattggtgtgtcttgcgagagattttccataaggaaatcatgtagaagaaatttctaacatagttacagtgagaaaatgaattaagatgccaaacagaaaacgtgatttctaattagaatagacggatcaagtaactttagttaatacctcaccgatgtccatcgctggtgatctcaatttggcatccacctcctgtccacccaaacaaacaagtcg

SEQ ID NO: 25613 - DNA, 359 bp, Oryza sativa
  unsure (1)..(359): unsure at all n locations
ctttacttgttaaagcattaagaanaagaggtcatgttgatgctgtgactggagatggcacaaatgatgccccagctatgcatgaggtttatctctcgactaatgttccatcatgttttgaaagaaacaatcttcatgttcaacaaccataatccagtctttcttatgcaatgctgaacttaataggcagatataagtctctccatgggcatccagggaactgaagttgccaaggagagttctgatattatcatcttggatgacaattttgcatcggtcgtgagggtatgtacactgtgttctgttattggccttcatgactgcacttatagtattcttttctctcgctttaagttgca

SEQ ID NO: 25614 - DNA, 445 bp, Oryza sativa
  unsure (1)..(445): unsure at all n locations
agcntttctaaaatattcaaatactnatttttatgtttgcagtacttaatgcttaacttatatagtaaagtcacccaatttcatatatcgctaaagaagtaagcccgtaagctcataagaacgaaggctatcagtttggaaagcgtgtcacaaatattaaaattttcatccaactattgtgggagagacgaaacttntattggagaaacgaacgcggcctaagctggaagaaaaatttgatattcgagacacgcttttcattccggctaagcggtttgttaataagaaaactttctatatggaagttgctctaacatattagataaatatattttggcaaggtgggataattaatactcaatntatcgtacagtaagaccacatcgttttacagtatacaaatgatcctctatcttcatattacctacatgagagctaaatacca

SEQ ID NO: 25615 - DNA, 432 bp, Oryza sativa
  unsure (1)..(432): unsure at all n locations
tctgcttctagctgcagcttatgtgcatcgtagcattctctattgctacatgatngatcacaccgagataatcagaaaaaagaaaaggacatcattttgagcaataaaaaccgaggcaaattatttgccttagagatcatatattgttttgattccatgaattgcctgaccatcaaaaaggatcgtcaaaatgttggatccttcgtctatgaatggatgagctcggttcatattgaaccccggcattcgcatgttcagacaattggttgagaatattcgcatgtttagttcaatcattatttccatcttcttgcagcgttaagaaatccttttacgtttctggctataaaataaggtctatcagtactatgtttcttctctatcggtacacctctaaattccctaggtttccatgcgcattccctagcctac

SEQ ID NO: 25616 - DNA, 441 bp, Oryza sativa
gcttctatgcctaaagcaaaagataaagatgctctacatgagcttaaccatgttcttcatattgaacttaatctaaactataatgtaactcgtgtattggaaactactatctcaaaagaacgaatgcaagattactgtcattactatttgtctccccttgagttgaacatcaaattcaaatacaccaaattcctttccttccacaaattttgagcatgcatgttctttatgaacatattaatagtataagtcatatatgtgcgtgcaaatgcacatattgacagtaatacaacttcttgtgtatcaattctaacaactaaacatgttgcatctaggccaaaattgcttcaaatgcaaatgaccaatttactcaaaataatgtacataccatccataaaacaatacttcatttgtaagtcattatacgtggaagatgacaaa

SEQ ID NO: 25617 - DNA, 421 bp, Oryza sativa
  unsure (1)..(421): unsure at all n locations
ngaaaagatagttnggtccttcactcacatggagaagctttcatgggtccgtaagctgcagagtctcacacacctcgaactcaggggggaacgtgcaacccgcagaatctggaataacttgaaagaaaagtcagtgaacacagcaatggtattactttcacgctcaaactacctgagaatcaaagtcagtgaacacaacaatggtggtattactttcacgctcaaattaccttcgatcgtcaaggataaggattgttgatgctgctcctcctgcttgggaggtatttctattacagtgcttctactatgaataaagatganaggaacttgggaggtatatctattacagttgcttctactatgaataaagatgaaaagatggtacagttgcttctacctatgaataagataaaagatgtac

SEQ ID NO: 25618 - DNA, 451 bp, Oryza sativa
ccgcagcatgcaacttgttggcgatttagagaatttattgtttgttcatctacaatattaccaaagaatagcttttgcaagatggcagtccaaccaacctggttttctggaaattttcttctcgactgcatggcatatctggaaacagcgtaatggactcatcttcagaaaatttcagccttccttccattcttggaaatctctcttcacaaatgagattcttctgcatctttgcagaatgaaagatcctctgaagcaatttgtttctaattggttacaaactttatacgaatttttcattctcttttgtacttcatgtaaattttactggtattattcttttaataaatgaaaatcacactgctgggcaaagacctggcagtattatcagtcaaaataaacaaatcttccatgtagagcaaactgacgtaacacatgataatcgcgattc

SEQ ID NO: 25619 - DNA, 327 bp, Oryza sativa
atctgtccaacatgttcttctttgacgttaaagaatttttaaatgagggtgagggaaataaccccgagggagctcaaataaccgatgaagttaaggccctattggtggaaatcgccgatcggctcaatgcctctttggacacccttgtaacaaactgtgggccgatctgacaacgcttccatgagatccaggatcgaattccagatgatttatccaacaagatagcctcggccgccttcctggagcaatatgagaagcaatgtcatcgggcccacaagaggatagccgatcctcacgaagcccaggctttggatgccacgatcgaca

SEQ ID NO: 25620 - DNA, 427 bp, Oryza sativa
  unsure (1)..(427): unsure at all n locations
agtcttgagagttactatcacacacgttgtatatgtgcaagtnttgtgcaagtggttttgggggttcatggagaacaattctcattcctggatacccgatttcaggttgcagcatctatgcgaaaggacgcagatgcgcaaattccaagctatccaaatcttccatcaaagctgatatgcatcctccacagtgtcaccatgcttgtaatctctgccactttgagcatcagtaaacaaaaaaagagctccacgctttattagtgctctattatgccaataatttgaacttctgtactgacacatttcttgacaaaacatgacaggctgatcctgacacaaatgaagtttatgcttcaatgactcttccaccagttagcaatgtatggtgcaatttcccaaattcagttagatctcttggatatgtgat

SEQ ID NO: 25621 - DNA, 363 bp, Oryza sativa
ctaagcttagacaattaaacatgttgggaaataggattttaaaacctgtggggtgtttgacataaactttctcctgtataaaaccatttagaaaagcacttttcacattcatttgatacaatttaaaaccttttgaagcaacaaaagccaacaaaagtctaattgcctcaatgctagcaacaggagcaaaagtttcatcaaaatccaaacccttaacttgagtaaaatcttgagcaacaagtctagctttatttctcacaatcaaaccatcctcattttggttatttttgaaaacccacttggttccaataatattatgttcaaaaggtggttcaactaaagtccaaactttgtttctctcaa

SEQ ID NO: 25622 - DNA, 442 bp, Oryza sativa
  unsure (1)..(442): unsure at all n locations
agcttatcataaagggcttcgacaaggggttttattcgttctttgagcaaaaagataaagatcggatagattcgaaccgcaattgcaaaggtaatcactactatgccagcccaaatcatgatcttcaccaactnggatttggttctctcgcgaaaatcgcgagttgcagagatgagaaccatgaaaagcaagatcccgaataagaaaacagaaaccgaggaaaccacaagagtgaagactagtagagtctcgtcttttgcattctttgctcctttttcactcaatgattcattcgaatttcccgaccaaaaattctatatgtctattcatagggccctcgtgctaagtgctacaagatctagtgcactggaactcgtggttatggacccgaatcctttagtatggaacattgtctttttcaagtaaaaaccctcagtatatg

SEQ ID NO: 25623 - DNA, 327 bp, Oryza sativa
  unsure (1)..(327): unsure at all n locations
tccctggatctgggaagtatctctttcacggtattgtgatcgtttgatcgatttccttgatcgctacttatgggcgtgcgctcaaaggatacaaacagggattcgcaaacaaaaaggggaattcgtagtcactttttcctgtcgcgtaaaanaaaggctttacgcgagagcaatagaggttgggatacatctatctcttctgagcaacctcttttggattcttaagaccacccttgcagtangataccgtctgctttgggttctttattatattatctccttcgagggatttttaggatcgttcacgctatatttagtctattttgg

SEQ ID NO: 25624 - DNA, 425 bp, Oryza sativa
agcttctagaagcccagcccagcgcggcgcggtgcacgatgtgcgggatcttcgcgtacctcaactacaatgtgtcgcgggagcgccgctacatcctcgaggacctcttcaatggcctccgccgcctcgagtaccgcggctacgactcctccggcatcgccggcgacgccgacgttccctcctgcgcttcttcttcttcttctacagcggagccggcctatgccggggcgtccccgctggtgttccgccaggagggcaagatcgagaacctcgtacgatccgtctactccggtcagtgccttttccctcctgattatgctgaaaaatgggttgaattttggggtcttgggatggagttttgcacgatttccatgtgctatgtgtgctgactgggctgtatcacttggaaaagccttggattttga

SEQ ID NO: 25625 - DNA, 394 bp, Oryza sativa
ggaccccaagatggatggcgcacggcaaaggtataatgtatcttacaatggtttcttagtcttttcccggtcttagtgtttggtgtagaccggatttgctagataagcgccgtactatcaagaggggtctatgaagcgagcttgtggatgatcttgtgccatattagttcatatgcatgtaggtgtatatggtgggcttgtctagccaagtgtggtgagttttttcaagtcctaaacaaagagagatgtgggcaaatcctataggtttgggcagcctcatgtggttatgtccggtggagtatcctttagagtgtgagccctttctccctgagaaaagttgtgtatcttggatggattgttcatgggttggatagcctcttgaataagcttccat

SEQ ID NO: 25626 - DNA, 433 bp, Oryza sativa
  unsure (1)..(433): unsure at all n locations
agctcgccgagtactaanaatctaatactgtgaagggcgaaaataaaacatggtgcatcgagtagatgcacctaattaggtgtagcccctgactatgtgattagttcaaaaactaaatatatagtcaagaaccgagtggttctatagcgaatcacgcatggtacttattaacatacccagccgactgcttcttaatttgaatatatcaaggacaaaaaatatacataaaaggccgagtgacatacactcaaaaggccccaaaatagatatatttggtaggaatccgagcaagaaactcttaatatgatccaccaaacatgacagaaaatcatggtaattaatgagtctaacagcctatgctgtgacccttaccataaccaaaataagcatattacatgcttnggaaatgactactaataaaccagtcatttca

SEQ ID NO: 25627 - DNA, 442 bp, Oryza sativa
  unsure (1)..(442): unsure at all n locations
ttatgcctctcagtcaaaactcaacacaaaanaagttctttatctcaattntggagctataatatctagacacgattntgaatggtgtgtattttcgtcactcatcatggctaaaaacattatagtggtggtcactaatttctgtaagtgctgtattttagtatgttaatgggcttctaagatgtatgccataaaatggactaccttgatgcattattgaattatctgttataagtctgttattaattatatgtaaactttttactactattaaacatgagtgaacatggttaactcttttggtattgcccttctatatttgagtgatgcactgactcctcgcacgcataaaaagtgctactaacttgtcattactgaaggaaatgtataattaacacacccaaaggatattaatcatgaagctctaacttgttgcattttt

SEQ ID NO: 25628 - DNA, 351 bp, Oryza sativa
gcccattaacgccgccgctgccgtcgctgttgctgcaacttcaactgcctatcaaccgcaacggaaggcaccattgtcaccacccgcggggaagcgggaaacgagcggattcgggctcgtgtgcaccgagggctgatacaaccagtcccgtcggggtacagcggctgagattgcggcacgcctgcgcgtgggaggagattgccatccgttcgctggagcttagtcgtggcttagtgccgaccaactcctcacccatcctcgcgcgcggacatcgagctccttgctccaatccaatgatgaggaggggacagctgcgggctggatttgcaccgcagctgctcgaggagacct

SEQ ID NO: 25629 - DNA, 366 bp, Oryza sativa
  unsure (1)..(366): unsure at all n locations
tcagacatacatgtgtcctatatatcttggagtcagttgaaaagaattgcgtcaaatctgggtacacttcctcacctagtgtcctgttcctaggtccaaatgtttgtgttatgtaactcattttaggtaacagaaatcatttgccatgccattttgcaatgcatgtcaagccagctgatccagcgtgtcatcccagagcttcgcaacttcttcgctaatgcgctaaggccaagccacaggaatgcgcagccatgagtccgtgcccctttcacaatccttgacaccacccacacatctgacagtcgcttcgggagatcttgtacagctaanagtttcttnttctggcgttggacattggcattcgat

SEQ ID NO: 25630 - DNA, 310 bp, Oryza sativa
  unsure (1)..(310): unsure at all n locations
actgatctgaacgaaactganaagaatacctaccactccaatcattcattatcattatgccaaagatatgttcttcaacatcattaatatcgataggtctttccaattcattccctggtccaacaatggcttgctgaaagcaacaagccaacatagcgttatgatatatttgatccagtggaaatgaanatatctataactaattacatacggccagaatttataccacaatgacaaccaacagctcaaatttaacaaacatgcaacaggtatgtcaataacagttcaagaataccaaatactgtgagtc

SEQ ID NO: 25631 - DNA, 446 bp, Oryza sativa
agactgcacaatacatatccttcacccgacattgatgatgagatatcggcgccgagtcttatgaccatctggcactaattatttcccaacatatcagtgtcaggtcttttaccactaataagcactgatgagtcacgcatcagtgctatgtcttgctagctggagtacgatgactacacttttgtcacgaaaagacatcgatgccagatgtttagaataccggcaacaatgccactcatatcggtgacggatattcctatgatctagcaccgatgaccttaatcttattagtgcttatttcggatatatgaacttaactcttttatacaaactcgaattgcaacaaagtttatatggaaattgtagttctcaacgagctacgattttatagtggacaaccttctcattttaattcttctaaatactcaaatcaatgaataaactct

SEQ ID NO: 25632 - DNA, 398 bp, Oryza sativa
tactcagcttctgctcaacatcagtgatcctggtatcgcttgcttaacttacttgattaagttgatgtctctaaggctgaactccataccagaattaacttcaagtgggcttctcttgttagctggtggttgcaaggctctatcctctgtctaccttaacgattgcaagggaattgctggcaacactgagtgtgtggagcatcttggcgctaacggatcattggaagaacttgcaatgaagaattgcataggaatagggcagtatcactttataaagttcggctcacgatggatgaagcttccgaaatttgaagttgaaaacgagcaaggcttttggagttttttcaccgagatgggatccatcatacatgctgatactatacgtatgatctgtgtgc

SEQ ID NO: 25633 - DNA, 438 bp, Oryza sativa
  unsure (1)..(438): unsure at all n locations
gctgggccttgggcatttgcttgcgcctgtgtgtgcagcaccgctggtacagagaagctgacactcggaaccagtctaccgagtactccctcttttcctaaataaaacaaacctaacttgccaaggagcttttaaagagagaaacaaaagaccacaatgtccttaattaatatgaatgttgtattgaataatgggtaggtgagggggattgaagaataaaatttctcgtttgcggattggtgatagtaatatggtagaagttagtttattttggaattaatttgaaatctaaaaattgatttattctaggacggagggattagttagtagtagctgcagtatcatgccccacgcaaaacatgcgtggtttggtttgtcgntgctcgctagtgaaatcaataagcgcgagttcgagctcgagcagctgtaaaaccactg

SEQ ID NO: 25634 - DNA, 385 bp, Oryza sativa
  unsure (1)..(385): unsure at all n locations
tatatacttttcttgctctgctgtcttgactgacacatctatatgcaaaatggcatgttcctaacttcctttcattgttctaatctaatgacaaaatggaacatgccatgagctctcaaagcatgccatgtacactatgacttgggaatctaaggaagatcaaaagttgcatcaaccaacaagttttcacagtgtttgcgttgatttcacataacgaaattctactgtagttaatctgattagatgaatgttattacagggatgagtgtattgaaaccatctttgcacaacagtacatgtaaaatctttcatgttcgaagatgggcgaccatgcctttctgagaaaagcatatgcacaagttattctaccaagcacncccatacg

SEQ ID NO: 25635 - DNA, 376 bp, Oryza sativa
  unsure (1)..(376): unsure at all n locations
gcttgtaatgttatagagctcttgtggacctatttaatgttatgcatctgactngacaccgatgccgtctaataaggtacatattaatacagagcctggtcaaaattcgatatgcgacatacattctaacataaaaatatcatgtagtgaaataaaaatgtttgaaacgtaaccttcgacgagaatgcttacaatagggcgcccgaatcatgcctgctagtatactgttaactggagggaacctacgatccggctgttatcccgataaatgcgtgccaaaatcttgcgctgatgtcagcacgatgtctgtgccaccatgcttgccaacccgcttgtaaactaattcttttcttaaattatttatgccaatcattat

SEQ ID NO: 25636 - DNA, 363 bp, Oryza sativa
  unsure (1)..(363): unsure at all n locations
atcctgcacatcaaactaagcttaatggccnctgcagagccaccacgatcactgcaacggtgtgtgctttctttgctgttcaactactcatcacgatgaatcctccattgctgttcagatcatgacgtttcatagttcatataatgcggacgctggaggctccatcgaatcgatcggtttggctcgatcgcgatctgcaggaatggatcacgttcgacaacatcgatcacctccgtgtccttcgcggcgggacactcaatggcaatggacaccaatggtggatcaactcttgcaagaccaacagatccatggtacttgcccactgtactcgcttacctctcatgaacattttctcgacatgat

SEQ ID NO: 25637 - DNA, 436 bp, Oryza sativa
ggatccttgagtcacctgcggcatgaagcttcttaactggtgggccatcccgggcttggccaggcccgcgaaagcgggcccaccgagcaggaagtccgtactgttgctcctgtgaaagtccgtgagcacgacgcggacgcctgcgttactgcacacctctgcatttctgcatctcatcttttctcgcaaaaaagaataatataaaaacagggtgaataacaagtgtgaaaggatcaaaggacaaaaacacaactgaaataaatgccatttatatagtaatagtacggtttagccactttaaaaatcaagaaatcttatgaaacaaccaagtctctttcagaattttttgtacagaggcttcatttggtaaatggagcaagttagaattaagctcttatttggccttcgaagcccgcttgacactggtttttttttt

SEQ ID NO: 25638 - DNA, 399 bp, Oryza sativa
ctcagcttttgggttacgctctagagacagctgcgttcacactgaacatggttccatcaaaatcagtggataagacaccatatgagatatggataggaaagcgtcccagtttgtctttcctaaagatttggggttgtgaggtctatgtaacacgtttgcaatcggacaaactcacacctaaatcagataaatgcttctttctggggtatcctaaggaaacgaaaggatattatttttataatcgggaagagggcaaagtgtttgtcgccccacacggtgttttcttggaaaaaaaagtttatttcaagaaaggatagtgggagcatggtgcgacttgaagaaattcacgaaacaccggaaaatgcttcagcgtccacacaaccacaagctgagcaagat

SEQ ID NO: 25639 - DNA, 396 bp, Oryza sativa
agctcgggatcgacgtacggcgacgactgagtttctggcggcgacagcaatgatgtcggcgcatgagacagtctgcctgcaagatgcctcgagttgcatcttaatgcttgagatgacctcgaatcccctcagcgagttgacattagggaacgcaccctgctccccccggaaggtggcattgtcggccagcagtatcgacgcgtcgcatccctatgaaattggtaagaaaattaagtctatgacataagagacatgctatttgaaaaaatgtgaataagccataacggttacactgaacaaagtataaagtatatgtctaataaactgtgacacaaataaatgtggtgtggaaagtgtatcgtgaccaaacccctggctgtaatacaactcctccta

SEQ ID NO: 25640 - DNA, 356 bp, Oryza sativa
tgtccaaaaagagcatgaaattaactggcccacaatacatatgccatccgagctgttgaagctccaaaacagtctacgtggcagggcttgctcaaacaagaaattatctgcgaaacaaattaacaattatcaccaagaacatctatctttttgtagggatccagaacagatgccatataatcaggttaactcaaacaaagagtttgagactgttggcaaatccagccaattattgccacgggtacagctctctcttcataacgacagaagccttacagcatctacttgtcagtcctcattccctgtgacaaaaggatctactcaattcaacgacttggagatgccttcactagaaa

SEQ ID NO: 25641 - DNA, 371 bp, Oryza sativa
catacaaatgatagttccgcatctttcttaacaccagacggagatggcggtgttgggcttcctctgattgggagtatatcataatgtcattaatgaaaaccacaacaaacttatccaagtattccatgaacactttggtcatcaagttcatgaataaggcaagtgcattgggcaaaccgaaccacattaccgcgaatacatacagtccatatctcgtggtgaatgcggtctttcgaatatctgtttcacgaatactgaattggtgatatccggaacggagatcaatctcggagaatacagtggcacctttgagttgatcgaacagatcatcgatcccgggaaaagggtacttgtttttgatggtgacttca

SEQ ID NO: 25642 - DNA, 333 bp, Oryza sativa
  unsure (1)..(333): unsure at all n locations
tctntatgttgtctcagagcatctncaacaacctctccaagtgactctctaagctaaattntagctattctagccaaaagacgtctttcaacatcctctccaactggatggctaagccatccggctagccaaaactctcaccctccctccactagtcaaattaggaagctaaaaatcactagccaaccatgggcctcatacacattccacctccatctccttcggctcttctccaggacggcgcaggcggccacgacctcgacgccgccgccgtgcaccgctgcaaccaccagcttccggcaccgctcgatggctgtgagcgctacctgcatc

SEQ ID NO: 25643 - DNA, 436 bp, Oryza sativa
agcttagagaatatgttgtaggagattgggtttacttgaagcttcagccttacattcagtcctctgtggcaaggagagctaatcataagctttgctttaagtactttgggccttttcagattcttcataaggttggcaaggtagcttatcagttgcaactccctgccaatagtgcagtccatcctgtattccatgtttcccaactcaagcatgctgttggttttaagcaccaggttcagcctcgattacccaccttgtccacctttcaagtacctgtgtctgtgttggactctcgacaaatcaggaaaggtaacacttctctgactcaagtcttggttcgttggtccgatgatgggtatggtgaagagacttgggaagacctggtggagttgcagcaaaggtttccaaatgcattgtgttgtggacaagccaaatc

SEQ ID NO: 25644 - DNA, 297 bp, Oryza sativa
tagtactctgtttcttgtacaaatagagagacatgtaccaacatgcattgttcaaagctgctcattgctaacttggcagtggtagctttgcaactcacccagaatcaactatcagggatggcttgattttataagagaagtacacattttctgcaaggaaaattgcaacatttgtccttaagcggaaagcacactatcccacacatatttgtccttataagaataatcattccctctagtaatattttcttccctcatggtcaccatttcaagtgcccgacgcaaaatatgagacta

SEQ ID NO: 25645 - DNA, 383 bp, Oryza sativa
acttgaacggcgaattcccttttttacctacttggggatgataccttattggaggcttggagcaagagattgatctaccaaaagcgtgtggtttttatttgtgtttgctacatcctctctttgattgcttccgcacgtgtaccaagttatacgaacatcatacatatgcctacctcaccctcatggcctcacaccggtcaccaatccatcagggcatagatatttctttgaagcatgaatatgcataaggtccaaagcacatgtaggatgttcatgtacatgttaattccatcaaaaaggggtttccccttcaaaagatagaaatgtccttgaaatgtcatacaggtggggtctgttattcttctttatatagttattttctc

SEQ ID NO: 25646 - DNA, 478 bp, Oryza sativa
  unsure (1)..(478): unsure at all n locations
tgaatcaaagtgggaaggaccatacctcatcaagaacaagtctatgatgggatcctttcgactggcgacactggaaggagaagagttcgaccattcctggaacgctgcctctcttaaacgtttctatgtctagaacaggtggcacccaaatcgccaatttgtaaaaacgtatatatcgttatgtaagcccttcggcactatgtaagcctttcggcaaagaanaaaaagaaaaaaaaagaggaaaatggaaaaagacaaaaaaaatggatgtagggctattatccatcacggaggcccgaaccagtataaaacctctgtgtcctccgccttctttntatttacttgtgtgattgataattngtggaaaaactccaaggcaaacgcctgatcagcgaataaggccagggggcgaaacgaatcggccgaagcatcgctcgccgaatgttgaaaccgcaacagcttgtttcgggaaacaact

SEQ ID NO: 25647 - DNA, 414 bp, Oryza sativa
aaaactcagctagctcaaattgtcccggaccatttttttttttaatcaaccggcccatatttcattatttgcacatccacgcctttcataccataaggatgtgtaaacaagcagccttatttccagcacagattcaaaaaaaaagcgagtgatgatatattggcataagccctgcgctacacatcaataacgatgaaatgcttaccacatgactaactgatggaagccctcattccataaaaatacctcttgcgaagaatgagcgactatgcacagctgtatatagtgcagctgggccatatgggatatattaatcccatttttttgctgcaaggaactcttgagcatagatttgtttgatgtgaaggaatccctagattatatcaactacaaagatgcccatatagaaggggg

SEQ ID NO: 25648 - DNA, 355 bp, Oryza sativa
acgactcctccatcaacaaaagtgttttcttctgaggtcaatgcagctgcaacacattggatagttcaaatcaaaggttccgaatcaaggcatgttgcataatggttcgcaaggtcatgtgttcctagttcctaccattgtggtagagctcatcatgcaagccatcaatgttgaagaccgacaggaaggagtcaagatgaatcttggcatcactccagaagttcataagcctccaacgattctgtagcgtttgttgtgtgcacacaaccatatcagaagtacattttttttaaataaaaaatgacactgacgttgtacaatgcatgctatcgtattaacatgccttacaatctaa

SEQ ID NO: 25649 - DNA, 451 bp, Oryza sativa
agtcacctgaagcatgccagctcgcacccatgcatgtgttcgctggcatccttactacgacaaaatattcttaaatctaatcgtctgggaggatgctctctaccttttcttttcctttctctttttcccaatttatgctaattgagttggtcgatttgggatagattaaaagttatcacaaattttattgaaaataatttctataaaatttgattttttatataattcaaatttaatactcttaactgaaaattcaaaacattcaaatcaaacttaaaacttttaaatattcaacttagaattgaaaaatttaacccaaaatttcaaaacttttactccaagattttgaaactttaaactcaaaaattacaaactccgaacttaattatgaatgaatttactaatatctaaaatttgacgggaaatttaactttaaacttcatttaaactt

SEQ ID NO: 25650 - DNA, 452 bp, Oryza sativa
  unsure (1)..(452): unsure at all n locations
tctaagctgcctcatcgcttacatagttatttggcctgaggcttgatttcatggatatcangcctacaggacctggtgaacaaagagattggctctaggagcaaaaaggcctgcaaatacttaatctccctctcccaccgtacaagctgaaaggcactattctatattgtctatccatagcaatactgtactttactgaattgctggttttcaccttgcttacagaagatatgctataggtagcaagcaagaacagttccattttatatagtcttatctcagtaactttgtgaactatttatttttaagaaacagctggctacttgaccgttgataattaatgagcttatgtgatcatctatgcagngtctgttcttggcaaaagatatgcaagaagtaaatgagaagagaggcaacaaccttgtcctccaccagtagataatttgctggat

SEQ ID NO: 25651 - DNA, 410 bp, Oryza sativa
agcttcttcgtattcctggaatacagcaacattgataagataatgacaaggaaatgatgtatcacaaaatgaaaaacttggaaaaatttatttttcttttctgaccttgagtgccatgtgggcacatcctttgcgaaagtaacctttagtccactcaggcttgagttttatgcaatcattaacatccaacaaagcctcttgcgctgcaccacttcttagatggcaaaggctcctgtttgaatacagtgtggcatctgcaggatcaagtttcattgcctgcatcataccaaactgtgataagaccaatctgtgattccagaattaacctaaacaaaataacagttccctattaatcgcaatttgatctacagacactgacgtgaagagggaatttgctcccaagttccaac

SEQ ID NO: 25652 - DNA, 490 bp, Oryza sativa
  unsure (1)..(490): unsure at all n locations
taagcttcttctttttgatattagagacattctgggttccagcataacactttaagatggtacaagcatatggtcagttccataaaccacaccgataagaagatttgatccttggtcaagttccaaataacaacacaaaaagacttactcttccagcacttaagagggaacagctaggaggagacggatgcccagcatttgcatcttgacctgcaacattttaatcagtatggcacattggcatggtgggctatctattgccagaaattcatacaaaataactaatgaatttcaattgcaggtgaactaaaacaacaattggtttatttatttagaacgcctcctgaaacagaanacacttgacacaaaaccacaagcatnntgcacgccttaaaacatacaatacattacaagcagttggcaactagctacaaaccatccgagctctcccaaaatgattgcgtagtggcaaatatacaatgatatccaa

SEQ ID NO: 25653 - DNA, 405 bp, Oryza sativa
tctctattttgagtaaatgcagaatacactttgctatgttttgtaaatgaaataaatattataactgtgagtgtggaagttcatgaaatataataactattactgcttagccacaccaaatctctttgattttggaacttctaactttggagtaggaattgcactccattgttggattaaacctaacagcgttgagtaatgcatggttctcatttatttggaactcttaagtaggtatgattttattccctatttgagatatcacgacatttgcctattctagatagttgatgctgttgtcgctgcactcattttaatgcacgcctggtgttccaaatagatcaagatcttttggaagaatagtggataaacttagacacctgtaaatataattatgatctttat

SEQ ID NO: 25654 - DNA, 421 bp, Oryza sativa
tcaactctgagtctctcacaaatctctgagatgaccaccttattgttcttaaagattcccttatgcataccttggctagttgcaagacgttcctgttacgctccgcttttcgtgaggcgttaaaaactaatttggctaaatcctaattgcgaaaattttgttccttgtgtgcaagtctaagttgtgccgtggatctcaattcaaatctgtccttgatccctctcgtcgccataaatccttcttctcgaagtccctatttccgatttaagtatttcgaattcaaatactctcttgaaaccttgccaatatttttccgactcaaatatcaaattccattggcattcaattcaacttctatcaattttctccaatagattccagtaaagctatttgctctctgttggatggccgattcctcata

SEQ ID NO: 25655 - DNA, 448 bp, Oryza sativa
agcttaacatgcaaccataccacatcatcattcactataaactgttacatttaaagctcatgcaagcatgacacatcatctacaacttattacattctatagctcaacacactaacatgtcaaatcatcatctcccacatattttctataatatttcaaaatgtatccatccatcatttcaacaatactcaacattcaatcatccatatatttcaaagcaaagcatgaggcaccatctaattacatagaagttccaatcccttattgttgtcaacttgaaccaacatcatttgaccttctcaagaagtacttgtaaaattgggtacaataaaagattttatagtcctttcaatgccattgaaataatattcatgtgagcaaatatcatgtttatggaacagtatcaaagttcagaatgattacaagctacttgttacttaaaataaca

SEQ ID NO: 25656 - DNA, 401 bp, Oryza sativa
  unsure (1)..(401): unsure at all n locations
aacaagcttattgactgcttgtttggaacattaggttgcttgaagttccaattctcagcttgtcaaggggctaatgagtagaactaaagtaaagaaccctgcaccttaggccctagctctgtttttaacggatcaacctgtgaccttgtcataagagtgtatgaagtaattgcagtaaatcagttggttcacttgcgtcaatcatgttgattttgttctagtggcaatcagttgtttcacttacgtcaatcgtgcattataaaaagtttcatcctgcagttctgttatgtccatttggcatttggcattngccatgttaactttcttgcttaattaatgcctacatgctgcataattattcaattcggtaagtatatgtccctatgtatgtgcctctatat

SEQ ID NO: 25657 - DNA, 442 bp, Oryza sativa
  unsure (1)..(442): unsure at all n locations
agcttcaactgatgaaacatcaacatatccctactaatcgaagtaagaaagaatatgtaacatcaaaagaatttatacataaatattntgatataatacaaagaaacatggtaaacatatatgggatgaaacatggaaaaaatgacaaaaaaatatgccaatccaaatctaggtccttcttactctccgatggctggatctaagattccttcgatgaactcgtgcctatgacgacccagtgctccttaccttcgatgatcttgccttcctcattgtcggagtccacagcaacggccatctccttcattgctggttcgccacgatggggtcatcctcctcctcctctccactggtgacctcctagatgtcttcttactctgcccgccacaacagtcgttctccccgtcactatcgccaccaggcggccatggaaacaacaata

SEQ ID NO: 25658 - DNA, 430 bp, Oryza sativa
  unsure (1)..(430): unsure at all n locations
actcangcctggctgatatangaggaacaaatggatacattgcactattgtgtgttcctattattatctctcttcttaactatgtttatttgatgatataactgcagtaattcaacgttgcaattaatttgtacagagtatggaatgggcagtcaaatctcaacgggaggcgatgtgtatagatttggagtgctacttctggaaatgcttacaggaaagcagccaactgatgatacatatgcggatggagttagcattcacaactttgttgactccatgttcccagatagagttgcagagattctatatccctatatgacgcacgaggagcaccaagtgtatacagcagaatggttggaggcctgtattaagccgttatgtgcacttggcctgtcatgttccatggtattcttcaagacagaccctgaat

SEQ ID NO: 25659 - DNA, 431 bp, Oryza sativa
gcttgtatattgtgaataaagaaattttctatgtttgggcatacgccatgcgcacactgctttaacaaatgtacttaagtccctagaagacacatggtttcaccacacctggaaatatatggcatatgtggtgtaaaatccgagtaaataaactcataaaggatataccaaccgcctataaaatgaccacaatatataatcagcctaagccataatattggtcaataaaaatgcacacttacgtggcaaaaagcaatgatattgtatccaatcaattgcttaaaaacccaaacagcaccatgactatataaaaaagtcagcgggccagctatataaaagcttactgtttgacaccttttaagatgcattgtaccaacttctaaaaagtaagtaactgcggtataaaaggattttaaagtattgggcacttg

SEQ ID NO: 25660 - DNA, 395 bp, Oryza sativa
tcagcaacacacttaactgtatgaattatggtcacggccggacggcggcatgagattgattgaaatggtaagaaggatttatgagtcacagccagcggtgagatttatgagtcacagccagcggtgagctcaagtggtggcgggagaaagcttggccagaggacggatggccggatttaggagtcacagccagcggtgagctcaagtggtggcgggagaaagcttggccagaggacggatggccgctatcgaagaaataaggaatgtagtgacgacgatgatgatgatgatgccataggttggcctggtttttcaaacctgtccacctcagttaaagtcgtagattgatatgagtgctcgtatttattaactaatggtattttagtggtaagcat

SEQ ID NO: 25661 - DNA, 351 bp, Oryza sativa
ctcagcttcagacgagcaactttttctgcttgggcaagacatcttttatcttgtttggcaaaagtttaaggagagacaaatgaaaatattccttggactccaagattatttctttgatctcttagaaggaagagaaagaaacccagccataagagtaatcatatatatgctccctctcttaaggctagatgaccaggcaatctctgacccatcctatagattcctggttcttaaagctgagataaatatccaaagattctggaatctacccacatacaaccatgaagaaatatctctccaaaccattatagatcatggtcttgtgaattccatctatgcgaccctcgatca

SEQ ID NO: 25662 - DNA, 439 bp, Oryza sativa
  unsure (1)..(439): unsure at all n locations
agcttatccctaagtgaccgagtttaaagaggatgctgcatggcagtttatctattaattaggaatagtttggtagtttccctttatctttaggaaagtgtgtttagtgtccgataagactttatatttttccttttatctttaaggtagtttctttcttgtccgacaaggacttggatcaacccatgggtataaatatgtacacctgnggtctatgtaatctatcctcacgatcaatgcaattcggcgcatcgccaccttntaccttttctactttattttatcgtccggcgggacttggcacctgacgcggggctgcatcagtgttcgatctccggcgaaagggtaagtccaatggtccgtcggcctatgcaattgtatcatttacgtcggcgtctgtcaaggctgcatcagtacattcgacctcttggattgctct

SEQ ID NO: 25663 - DNA, 420 bp, Oryza sativa
  unsure (1)..(420): unsure at all n locations
ngcattctttgcggngagaaccattcccgtanagattgcatcatgtacaatgtacggcaagatgccacaggcgctgatgttcgtcgcgttccaaaggggaagtcgaagaagaaaaataatccttagttcgctattatccttggtggactccctactttgaagatcgttatcgttcaatttatgtttagtgcgtctgtaattttaatttgaactttcttgcacttttattacccgaatctatntgtaatggccttgtaattttcattttgaactgcactgcacttttaatatcgtcatgtatttgtattggtggactaatttaaatttccaactgcactgcacttgtaatatcgtaatatatgtgtcgtgggccggtaattttaaattgaaatggactggactattcttatctgtatctat

SEQ ID NO: 25664 - DNA, 445 bp, Oryza sativa
  unsure (1)..(445): unsure at all n locations
agnctgaaactagaaatatcttggagatatatttatatgctttgcacttttcctatcttgcacttattgctagccctgcattgattgcaaaaagatcatggaatggacctgcagtattgatcgatggagctagtacatcaccaacatggtacttgcgcttgcggtcctgcaaatgtggagtactgtacaactcacacctatctgatctatctatctcagctccttttttgttaaccaagcaactgctctgctttcaattaatgttgatcaatataatcttccacattattgggcagatggatacatatataagggagttgtttcacataagtttctgcaaatatcctagttccccgtgtatgacggctatcaagtatactcataaagtttcagcattatatattacgaggactaattaattatttaactatatgacaccacactg

SEQ ID NO: 25665 - DNA, 280 bp, Oryza sativa
  unsure (1)..(280): unsure at all n locations
ttgtcgcataattccctctgacatgtaatgtatttgctgcgagaacgtccctatccctaggtcaatgcctcatcagaanaattcataacatggaaagctgctgggtaccgcccaaagctttggtttttgcatggatgatgcttgtacctttctaaacccctgcctctcttctgcattatgctattaaaacactggcattattanattaagcaacagcatgaccatctctaatccattttctcatatgctgaaaaaaaataaatattgggaacagcaaaca

SEQ ID NO: 25666 - DNA, 431 bp, Oryza sativa
  unsure (1)..(431): unsure at all n locations
agctncaacattgcggccgatctgagttgaataacacctctgaatcatgcattggtaggttgctcctgcgttctttagtccaaagggcatggtgatgtaacagtaggccccaaaaggcgtaataaatgaggtcttcatgcagtcggattcttttagtcggatctgatgatatcccgagtagcaatccaaaaaactgagtagctcgcagccggccgttgagtcaactacctgctcaatgcgaggtaacccaaaaggatctttgggacaagacttgttgaggtcggtataatcgacacacatgcgccattgccccgtctttttccgaaccaagactgtgttagccagccactcgggatgaagaacatctttaatgaagcccgctgctacagcttggtaattctccttgatcgcatcttcctgcctgtgcaaat

SEQ ID NO: 25667 - DNA, 461 bp, Oryza sativa
  unsure (1)..(461): unsure at all n locations
tngccatgacaaggctaatgtgtatggcacgtcatggattgctggtaaagcgtacatctactgcagtatgaatattcttaaaaactattcgaatagtcgtgctcacgggtatcgggcattgggactcacaatggcatcttggttagaaacataattccatattttattaaatactattgcattacaaacatcatagactntatacttctacattctcaagcctttctgcagtaaacctagctctacacagatgttaccatntcatgcattcattgttgattaatataatagcttgctgagtacgttgtactcacccttgcttcaacccctctttttcagagtctatttggagtttttgcgaagctgggattcaatcacataggtagtncattctacttaattccaaatatgatagacagatggttaagtctataccaaacattgagtaagtcttctatact

SEQ ID NO: 25668 - DNA, 430 bp, Oryza sativa
agcttatgttattcctccaaatttctatgttctgaggttttgagccaatcgaaaggaattgcccaggatttttgcatagctattccatttatacaaatgaccatataagaaaatttttcaaaggattggattcctcccaaaatcctttgttccaaagcagggttttcaatttcgaaattggattctatgccaggggtgaccgtaatttcgggaatttctggctgaaattatttgaaaatttgactgaatttgaataaaatttgaccaaattcgtaaaaaattacaaaaaaacaaacatttcgggcgaaatttgaacatgccggtaggggcgaaattattgaaatttcataaatttcgaatccggatttcaaaccctgttcaaagtggtttaaaatgtctgctcttaaggatcaccaatgatatgacaagt

SEQ ID NO: 25669 - DNA, 356 bp, Oryza sativa
gtccgcctcggctgctcgcggggcgccggtggtgggtctctttcatgccggtcgtcgatcacgctggtacccaccgccatgctgatctacatcggcatctgtacttttctacaccttcacccactacatcaacaagcacagcattgctgccgacacggcgacatgtagaaacaactatgaaattaagggcctctttgaatcacagagttgaaaaaatggagaaataggaaaacacaggattctaataggaatggaagtgtaaaacagaggattgcaaaacacaagaaaaacacaggaatggtcgtttgattggagcgcagaaaaaacgcatgaatcggatgagagagatagactca

SEQ ID NO: 25670 - DNA, 417 bp, Oryza sativa
ctcatactggctcgaagcatgaattacttcttgaacaatgagagtggtgagcacggaggcaatcagtgacggtgatcggcaacgaatctatattagaagaaatgggttgaaactcagatcgactactcatacgcacggaggatgtaatttcagtgctaagtggatggccttttgcaataaaataaaatatggggtgaaatttaaaagtagagcgacaattggataggttatgtaattgtgccttttatttttccggttaaaattcctggctgggttggcttgcgtgcgctgtgaccggaccaaattaacatgcacccgagatagggagatatagccagaatgtgaatcataaacagcatttacatggagagtattaacccctactagtacagatccttctatctgtgacgggctcta

SEQ ID NO: 25671 - DNA, 344 bp, Oryza sativa
cacctctgcgggcgccaccctcggcacgtcttcgcgcccaccgtaactggacacctccccgcgccttgcgcggcttacagccgcctgtcggggaagatgactcccccttccttctgtcaccttgagaggccttccactgtctccgagtgagatggagcttcccgccgatggtgatgggccccgagagaggctgtggctcatcaccatcgacgaccttgaggcgacctaacgcctcctctatcgacatcgtggagaggtccaacagagattcgatcgagcgagcgatctgtctgtactttcatggacgcaacggaagagcttttcgacagctctcttctcgtcgt

SEQ ID NO: 25672 - DNA, 464 bp, Oryza sativa
ttaagtcacctgcagcatgcaagcttatatatttctcttcatttctatcacaatttgatggactttacccacgatgagaatggatcaggtattaaatcttggatggaaatattctttacctattttcctgtgcaatctcttattaacaacttccttccaacttgtttcactatataatacgataatacattaacagtaagaatattttcaacacacaagtcctctcaaacaagagaaagaaacatacctttttcatagatatttcgaaatatgttcctatggcaactgggatcatgagttatggtcaacaaacaatacgcgcagcaaggtacattgttcaaagtttcataattaccttatcccacacaaatcgtttacctataacgattcactacccctattgaaaatcaattacatcggagcgttttcgggggcgaaatcactttgaattgataaatgattgc

SEQ ID NO: 25673 - DNA, 415 bp, Oryza sativa
  unsure (1)..(415): unsure at all n locations
agaaaagaagaatctacttcaaccgatatgcccctaggcacggncattcataacatataaatcacacgtggaaggggtgggcaattagctagagcagcacgtgctgtatcgaaactgatgcaaaagagggtaatcggcactttagataccatctgggaggccgttggtatccaaaactgttagcaacagtcggacaagtgggtaatgttggggtgaaccaaaaaagtttgggtagagccgggtctaagtgttggctatgtaaacgccccgtagtaagaggggtagttatgaaccctgtggaccacccccatgggggcggtgaatggaaagcccccattggtagaaaaaacccacaaccccttggggtatcctgcgctggaagaaaactangaaaggaaaaatatagtgtagttta

SEQ ID NO: 25674 - DNA, 404 bp, Oryza sativa
  unsure (1)..(404): unsure at all n locations
agctntggtgaaactgagatgggagataactgttgttgaattgttggggaggagggttgtggtgcctataattatctgggcttggagaatcttgatttaagaggttgttgaaacttctgttggatgaatccgcgatgatnatgaggaggtgtaatatgaagctctgactattttgtttttatagggaacatggagctcaagctatcgagcaagttttgtagccaacatagagctcatggcaaaagtaacttcaacggttaaccttcaaccaacggatacctgtcgcagagtcatgaatcaactgcttttgtttttatattcatttccaaatagtgaactcaaaaagtaataaagtaatatattgtattctcttgtgggcagcccatagccatatggactacttt

SEQ ID NO: 25675 - DNA, 433 bp, Oryza sativa
  unsure (1)..(433): unsure at all n locations
acaaaatcataatcgctcaagctcattaatggcattttctttttacccaaaaacagctcttaagttcaatttgcaaccgcacgagcaatattcccataggaaatactcctattcaacattattaatagctagtctacaaattaaactcaagtatttaaatctctggctaagcgctttagtggttaggctcttcgatagctacgatcagctatagctggctatacctataggtaagtctaagtcactagcggttntgcgaaaatagacataaaaatctgcaatttttgtacagtacatgttggaattaatagatagccttagcctattcgaagataattctttgaagaatcacaanagcccacctcatgggatggcatggattgagagttgagtaccacattaattattctatggggagaagaaggggacacat

SEQ ID NO: 25676 - DNA, 446 bp, Oryza sativa
  unsure (1)..(446): unsure at all n locations
aagcttaaacggtgccatctgtagactggccttgtttctgttgntgtacgagaattccgcatatggcaagcttttgtcccaagctccaccaaaatcaagagcacaagctctcaacatatcttccaagatttgattgactcgctcggtctgaccatcaaattgcgggtgataggccgtgctgaaatttaaacgggtccccagttcttcctgtagcttctgccagaattttgaggtgaactgactccctcggtcagatacaatctttttgggtactccatgtaggcacatgattctcgaaaggtaaagctccgccaaccttttgcccgtatatgtggtatgtactggtatgaagtgagcaaccttagtgagtcgatccacgactacccagatcaaatcgtgacccgatgatgtntcgggcagtcctgttataaagttcattccaatct

SEQ ID NO: 25677 - DNA, 406 bp, Oryza sativa
  unsure (1)..(406): unsure at all n locations
tatatagctgtcccgctgactnttatatatataagtcaacgtgctgtttgtgtttttaagcaattgataggatacaatatcattgcttttcgccacgtaagtgtgcatttttattgaccaatattatggcttatgctgattatatattgtggtcattttctaggcgggtggtaaatcctttatgagtttatttactcggattttacaccacatatgccatatatttccaggtgtggtgaaaccatgtgtcttttatggacttaagcacatctgtaaagcagtgtgcgcatggcgtatgcccaatactttggaaatttcttattcacaatatacaagcttctttatagctatttggctatatcactcatcatattttacaagcagttggtatatcactccgatcatg

SEQ ID NO: 25678 - DNA, 312 bp, Oryza sativa
tgaagcgaggaacccgcaagaataaaaacctcaacggatggaattgtgttcaccacaagaagcgagcaatatatcacttactgcgcttaggtttacactgctcatgtcaaagtacttaagttgaagcagaatggttaaccatgagatatctactgagtacatatcagcatccaagaaaccgaagttaaggtggggcatatctgaaaggttaccaagctgaagaagcactctaccaaacaatatggatgtttcagacacatcaagatatcttaatgtcttcattgaaccaaagtactttgggacatggctggc

SEQ ID NO: 25679 - DNA, 363 bp, Oryza sativa
  unsure (1)..(363): unsure at all n locations
tagtcactcttgacctcttcaataatagcattactggacaggtgccttctgaaataggtatgcaaacaaatctgaggaatttgtacctacatttcaataacatgaatggtaccatcacagagaagcactttgcgcacctgacgagcttgaagtcgatatatttgtgttacaatcatttgaacattgtgatggatcctcaatggttaccttccttcaaattagagaagtcttactttgcatctattacgatgggtccctcattttctagatggcttcaatcacaggttgatattgtcgcacttgctatgaatgatgctggcatanatgacacatttccagactggntctctacaacatttttaa

SEQ ID NO: 25680 - DNA, 481 bp, Oryza sativa
  unsure (1)..(481): unsure at all n locations
tagtcatcttagtannaaatgtgtaacaatattaatctcttttcatacatgcctctagccatgcatgcatcagctgtgggatggactcttagagaagaaatggtaagaaaggctgatagatggttgattcgtttataggaaatagctaaatatagagattgctaacaattgtcataagacttttagtagaaaaatacagtacaatttgtgtgtaactataatataactatattataattggtattatattaaaactacgtatattgtagcttatatataacttatgtatgagaagttacgtcgtaattttaatacttatatacaagttacatagaatctataatatagttaaagtacaattatactatacattatattttgtaaagtttcactaaacagactaatggcctttnttagagtcacttaaatattatatgtcctaaatatatataacagatagcttaaaaccacgtctataaac

SEQ ID NO: 25681 - DNA, 373 bp, Oryza sativa
gcttcacatgaaaatcgcaggatcaccccatattagcttaattcacagaatcttccaaaaaaagagggaaatttgtttttgtttttttaaggaattggggcatatgattatgtgaactttggccgagtttagatccaaactttttttttaaacttttaactttttcatcacatcaaaactttcctacacacacaaacttttaattttttcatcacatcggtccaatttcatccaaacttccaattttaacgtgaactaaacacaccctgagtataaactctgggcatacaaaccgaacttccgacagcgcgtaatatacctctttggcatatgagctgggaatcctcgtaatattcctctttggcatatgggc

SEQ ID NO: 25682 - DNA, 395 bp, Oryza sativa
  unsure (1)..(395): unsure at all n locations
cgaattcgaggttctccatacattntactaattggaacacacaacaactatttctttgtactgagttgtgttcaatgggtgaaaaataataacaagattaagtttcaactgatctaatataatatataaaaaaagaaacaactagtcatcttggctgaaacttctttctacgcactacacaaaacatagaaccacgtgaggaccatnttaagacaacatttaccttctgagtgtctaaaccaaaatagtcattctctaccaaacaattctgaactgaccccacatgaccagcaggacaaacaataacaaaagggatagagcctcgggtttcttcaacctgtatcaagcaaaagatatatcaattttcttcaaacattcataatgaaatagagtct

SEQ ID NO: 25683 - DNA, 441 bp, Oryza sativa
  unsure (1)..(441): unsure at all n locations
agcttctagacaatgctacttgaaggttttttgatcaataaagaatttgggttctctagagaatgttgaggacaactggtttgatcaaagttaaaaatgggagactcattntcctaattctgtatgtagatgacgttctactggctagtagtgatgtcaatctactgcaggaaataaagaaattcttgtcctctaactttgacatgaaagacctcggtgaggcttcatatgttttgggcatagagattcatcgaaatagaacatagtttgcattgggattttctcaaaaggcatatttatagaaaaggtgttgaagaaattcaatatgtacagatgcagtgcttcacctgctcctattgtcaaaggcgaaaagtatggggcatctcaatggtccaaaaatcagtatgagctcaatatgatgataacaaagccatatgcgtc

SEQ ID NO: 25684 - DNA, 383 bp, Oryza sativa
  unsure (1)..(383): unsure at all n locations
ggctttaatctgactgcacttaagctaactagtagtattagtataagtataaacatagagaatttgttttcctttttcaaaagcaccagcctctcctggcttgtgtgcagactgtgtaacaacgataacaaaatgtggacggctaaagcaaactttttgttggaaggctcacttttttctgctgctaatttcgatatgatggaatgccattntctcacatataaaagagcagagaaaaagcgacatatattatagattataccagcgtgtatcgtcatcactatgtatgtctacatggaattagtaggaacatactcgaatacttagattatccaaataatgtggtgatttaaatgtccaaccatgtcaactgtacatgaaaa

SEQ ID NO: 25685 - DNA, 129 bp, Oryza sativa
gctctaactagatcgcgcgggtacgcgaactacgaactgacgaacatatacacgagatatcaagctgattaccaagagtaagagataacaccaaatgaacttgcatgtgctagttggaaacgaaatggg

SEQ ID NO: 25686 - DNA, 291 bp, Oryza sativa
acattagtgtaaagtatgacatgcttacttttttttaacactttgacagattggtaggagataaaagatacgaagaggtaagatgtgatttcaaagcaacacagagtacactgaagctaaaggcggagttgagaatactaagagatgtggcagaagtttatactccagcagtctataagagatttgaggaagaagtaatgcagactttgaattgtgacatattctactgcggtgatgttgatgcagaaaaggtgtacaaaataaaggttagtggaaagaatcatgaacatg

SEQ ID NO: 25687 - DNA, 419 bp, Oryza sativa
  unsure (1)..(419): unsure at all n locations
agctntaacctatcttttgagtggctntaggcgttgtttttggttgagtcgggtcgacctctgagtgagctttccatagagtccaagatcataaaaaacggactcctgagcgaaaaggtatagtccgtttactctgtgcttttcggaagttccgaanattatcggaagttccaaaaatggctgcaaaactgagtttagcttatgtataatttcgtaagtttcgaaaattccagtcttttgcctccaacggctagtttttgaggggctcgggtatataaactcctccacccctcctatgagtggctgctgttcttgggcaacattagatacatccaaacccaaatagctatccccatttcccatcctttgtggtgccttcttgtgagggggatttgagaaaggaagagagttggattgag

SEQ ID NO: 25688 - DNA, 304 bp, Oryza sativa
  unsure (1)..(304): unsure at all n locations
tagaantatcatttactgcgcaaactatgtacttatgcatcacttgttgcacctggaatcttgctgactagaatacgggccttttctgcacgtttgagattcacgtgagcacctcggcctgagttatacctggtgtcatcctgcaaaaggaatatcatgctcagtacttcatagcttcagaatataggtgggataacacgtttcactagtagtcagaacaaccatactctgctatagtctttcagccagctttcctcctcgcatgaggatatccatctctcaactttatctaatagttcttttc

SEQ ID NO: 25689 - DNA, 389 bp, Oryza sativa
ggagagagctacttcatcgagctcatcaatcgaagcttgatcccaccgatgagtgtctattatctgttggatgatggtgaggcgcatcaatgcagagtacttgacatggtgcttgagctaatacatcagctgtcagtagaagaaaaatttgttacaacgtacttatcaaatggtcaacaatcaggtaaacatacatgtcagcacaaaagaagaagaatcgcccattatctctccataacaacaattaagctctatgcctcaccagaagcaagagaacaattgtccaaagtaaggtccattactatcttcggcaagggcgactcgataccacccttgtcgagctttcatgtcctgcgtgtgttacagcttgaggactgcagtggaatgga

SEQ ID NO: 25690 - DNA, 400 bp, Oryza sativa
  unsure (1)..(400): unsure at all n locations
tgaatcgggagataatctagcatgatagtgtcattggtgcatcctacgataaataactatataaattttgtagtgtctttagcatataaattttgtagtgtctttagcaaggacgacttttaccaaatggcacagttttggtatcttacactttctccgtttcgtaatgtaagactntttaacattgtccatatttatataaatgtgaataaatctagacatataacatctatatgaatgtgaacaatgctaaaaagtattacatcataaaacagaggaagtagcaaattttacactatatattaaataacactctctccatctcaaaacatatcagtcaattacttgatggaaaatcatttagtacaacaaaatttccatattatgatattttaaaata

SEQ ID NO: 25691 - DNA, 295 bp, Oryza sativa
gctactatagccataaccgaactcttccgaagactttcgaactcctgatttctactctattcctaatccactagcttgatactactagactaaacttgagagaatatgagatagctcttgcttgaggtgtgtgagtgaagcgagaaagtgaggggtttatatagcctccgaatgactgttgtgacaggtggaatggtcggaaataccctccaaccgtcattgggggctatttcacactgtccagccgcaaccctgcattcaaaggcgctagcgggggtttggccgaacctcctgg

SEQ ID NO: 25692 - DNA, 356 bp, Oryza sativa
  unsure (1)..(356): unsure at all n locations
tctncctagatcctcgtaaagccaaactatgtttactaagatatttcacaacaacaactgttcttaccaatacatgtctcaagcactcattttgatgaagacatcactcctttgtatacacacaatactcctcaagttgatgcaaggtccaatcactagagcttatgcacgaaattgcatttgacaggtgagcttgttcctatgtaatactatnttttattttcgatcttctcaataagggacaaaaaatagaaaaactatatgaagaagcaactcaagatgatgtaagatgtgacttgtcgaaatttgggagcgtagtttaaagttcgtgttagaacttcngagctcgataactc

SEQ ID NO: 25693 - DNA, 418 bp, Oryza sativa
cgtcccggatctctgatcgactgaagctgcagctttgacctacactgaagttagcagatcttctatgtcatcgtgttttcgcatcaacagatactcatgatccaagataggtctgaaagggtgaaagctaacctttcaaagagtggatggaaacatttaaatacttgacctaccgcgaaattagtcattactcacatatgtgaatatcataggttttgataagattgatcagaactttaatccacacttctcatattgtgagaaaggggattgaaactctcgatcaatcctctgtcctggcgaggagcacttgatcagaacttccaatgatctccaccgggactttccatcgtcccttcacaataggcatacagctatgattggagattccaatttcaactatcagaagttccaatat

SEQ ID NO: 25694 - DNA, 388 bp, Oryza sativa
cggcacatcataacggaagtggaagaagatggacgttctattgccccggccgaagccgccaagaactatgtacgtcacagcgtgtgggttgtgcgggataacgtgcatgtcagtacggtgtactagcgaagaacaagggcacgcggagatcatgagagctttgtcccagattcggagaaagagatgctgtggaccacaatgctcgagacattcacccttcctgcgggtacagaggacaaagtgaaaaggtggactctgaagaaaatggcagaacagtttcagagcttcaagggagatctgtaccagaagtatatactgaaggggcagacaccgaacttcgacacattcccaaagctaagggatcactgggacgagttcgttgcatata

SEQ ID NO: 25695 - DNA, 433 bp, Oryza sativa
agctctcatcctatatgtaacaaaatagatgttgtttgcattgcaagtgcaccataatatgtgccaactgcaaccaaatagactaattttaaatggtaagtttaacctatattatttattaaaatttgtgaaaataatcaaacaataaatgatgatttattacaaattctggtttaaagataattgacttgtacaaataaggtcacataatagtactagcatatacgcactagtggctctggttaaaaacaaaatggacatccatctactacattcccttatattaggcatgtatagaagaccatatacatgtaatattgctcccaaacttacctcacagtaattgacgtgggtgaagaaaagcttttaaactgctctaaacttacctgcacactgatgtggataataacttgacacacccgaaaaaactcca

SEQ ID NO: 25696 - DNA, 300 bp, Oryza sativa
cttatttctttcactctgttaattactctgagtataaaagaagtatcctttgagtaacttagctttacctgtgatgaatatatcttggctagttcctaatcagcatgtaggattatcgttcactataatccagtaaaatatagtgattgctttagtgcgtagctaacattaaagtaagttattaattgcttagacgcggtgtctaggtagatgatatccaagtgttgcttcgcataccacaatacgtgtgagatgggtgtagaggtggtgacagccctcgagatcacctaagttctccct

SEQ ID NO: 25697 - DNA, 446 bp, Oryza sativa
tgcttaccggcagggttatatctggcctactgcattgtccgactccgacaaaattgtgcgcacgtgcgaaggttgccaatttttctccagacaaattcatctaccagctcaagagttgcaaacaatcccgctgtcttggccgttgccgtttgggggctcgacatggttggcccgtttaaaaaggcagtcggcggttacacgcatctctttgtggccattgataaattctccaagtggatcgaagctaaaccggttgtcacaatcacagcggacaatgctcgagacttcttcatcagcattgtgcatagatttggagtgcccaatcggatcatcaccgataatggcacacaattcactggcggagtttttaaagacttttgtgaagactttggaattaagaattgctactcttcagtggcacaccccatgagcaatggacaggtgga

SEQ ID NO: 25698 - DNA, 346 bp, Oryza sativa
  unsure (1)..(346): unsure at all n locations
aatcggtaaattactgagaaaatgcaactattgnttcaacgtactccatcagtggattgcgaaatggaagcagccaaaaaaacccacaaaaaaaaatttcgcaccttggttatccctggatgccgagagggtttgggtgcgcgccgctgcaacctcttcttggaaggaaatggaaatggagaagacataagaggatggagaagaggtgttgttagcaaataccgtatgatgtgggggtgtttatgtaaaatgcgatttatccatatctactgatgagccactgacgggtggggccagttgactgacatacggtggtaagagaggccacgtgtgcgtccaacaagtg

SEQ ID NO: 25699 - DNA, 435 bp, Oryza sativa
gctttcatgcaattctctccgcgttgagtcccgatgagttcaacaaggttgatggacttgaggaggccaaagagatatgggatactttgcaattagctcatgagggatcacccgccgttcgtgaggccaagattgaattattggaaagaagggttggaagaattttgatggatgacaaggagacaccacaagagatgtatgataggatgatgatccttgcaacaagattaaggacttgggagtgaggacatgacacatcactttgttgtcaagagacttctccgtgcatttggtccaagaaatccctctcttgtatcaatgatacgggaaaggaaagactttcagaggctcactccaagtgacattcttggaagaattgtgtctcatgagatgcaagaagaggaagctccgtcagtgagccaaatagtgaagaat

SEQ ID NO: 25700 - DNA, 334 bp, Oryza sativa
tgttttcttagtcttttcccggtcttggtgtatggtgtagaccggatttgctagataggcgccgtactatcaagaggggtctatgaagcgagcttgtggatgatcttgtgccatattagttcatatgcatgtaggtgcattttgtggacctgtctaaccaagtgtgatgatttttcttaagtcctaaaccaagagagaagtgggcatgtccaataagagtgagtgacatcttgtgggtatgtccggtggatatcctttggagtgtaagccctttatccttgactaagatgtgtttctggatggtttttatgggtggatggcctttgatagcttt

SEQ ID NO: 25701 - DNA, 402 bp, Oryza sativa
aagtcacctgaggcatgcaagcttattttcaagccttctgcttgccttgtatcatatacatcctttgctttccccttgatatctctcttccttcctgggaatgcctttaccacaaactttttcttgggcgcacttttatctttgagctcttctacagcctcttcttccctctcttgtacaacctctttgtccctttcttgaacaaccctttcttacctttcaagctctgctttatcaagcattggctgctcaagctcttggtgctcaagcattggatgtgcaagctctggttcatctgcgtgcttttcaggctgattggattgctttgcaagctctggttcatctgcttgtttttcacgctgatcgacttgcttttcaagctgatgccgaggagatgcatct

SEQ ID NO: 25702 - DNA, 365 bp, Oryza sativa
  unsure (1)..(365): unsure at all n locations
ctactaccgcctgcgtgcctctctgttccagctactttatctttcacagtagcagaagcaaagccattcagctacaccaaccagtcaatgtatacattggccgtgtttagttcctttgcaaaaaaaaaattaagtatacggatatacatttaaagtattaaatataggctaataacaaaacaaattacatattccgtctataaactgcgagagaaatctattaagcctaattaatccgtcattagccaatggttactgtagcaccatattatcaaatcatggngtaattaggctcaaaagaatcgtctcgtaattacatgtgaactgtgcacatatttttttcgcatttaatgctctatcatgta

SEQ ID NO: 25703 - DNA, 277 bp, Oryza sativa
catgacagatataatacgaggttattatgatagaaaagaatacttcgtataatgtacacaaagtatcgcgtctcatgcaggaatatacagggctacaccatcacataaactattattcctaatagcaagcatgaagaatgagatctctcttctggattaacggaggtatgagttatatctcaagaactatatggcgcacacaattacgtccattatgaggcggctggagaaagagaaattagctacagaaaaaattctctcatgagatgatggtgaa

SEQ ID NO: 25704 - DNA, 369 bp, Oryza sativa
atgggtacgccaatacagaagaattgaggctagtagttcactgttcacactgtattggcactccgattcttcctacatatattgcaaaacctatataaactcgaggtatggtatatgaaattaggagcaacatgtcttgtttatgcattccaattgcgtatcgggatatatcgaattggcgaaaccgcttaaaagtggctagtcgcacgcctctcctcaagcgtatcgcagacacatggcgcgcgcagagagggagaccgcggtagaacggcgcaggagcgccacgtgcggcgcctttctacgatattctctcgggtatttctgtcttatttctgggtttatctgatttcctttgggttttaacgtata

SEQ ID NO: 25705 - DNA, 441 bp, Oryza sativa
  unsure (1)..(441): unsure at all n locations
agcttgataccttgngataatttagtgtaaattttaattatctttaggcacttttcaagcatagtaaagtttctctaattttaactaatggtgatcgatcgatctcacacaatgattttactgctgcttcttccagctcgtagtggatgccaaagcaaccgccgtttgcctcgacaacaaataccgcccaacccgtgtgttcccggagttgtcgacaaagttacatcagttcttcctgtcataaacggctctttgttgctctcatgacaagaagtggatgaaccttatgtgctctaccggtgtacagagcaaggcacaatttgtttgatctacattttttntaccagaattatgaagcatactgtagtaaataaagagtgaataagttagtgctgaccggcttagccgtgagccgctttatgtgaggatgagatgtacata

SEQ ID NO: 25706 - DNA, 359 bp, Oryza sativa
  unsure (1)..(359): unsure at all n locations
atgtgcatcgactacaccgaccttaacaaggcatgttctaatgacccttacccnctgccacgcatagatcagattgtcgactccaccgcggggtgcgaccttttgtgttttctaaatgcatactctggttatcatcagattcgcatggctagggaggatgaggaaaaaactgcattcattacccccataggaacttattgttatacgacaatgcctttcgggttaaagaatacaggtcctacttttcaacgtactactcgaatttctttgggtagccaaataggacgtaatgttgaggcctatgttgatgacttggttgtgaagacgcgcaaccaagagaccttactctcggatctagc

SEQ ID NO: 25707 - DNA, 422 bp, Oryza sativa
  unsure (1)..(422): unsure at all n locations
agcttgacatgcatagggccacatacttacttactgtagttatattataataaatctaaatatccattagaaccatacatgtcacctagatataatatagacacattagatttttctcatgtttggtatataacaatttatgtgtcatatacaataaaaattttaaatcaccagatatcaagcttaaaatattatctttttatatattataatttcttttcttaaagcttttttctacatatttctaaatttttccgctgcaacgcgcggggtaatcgctacacccctggtttgactttttacttaatcaaactttgttaaatttgactaggtttatagataatntagcaataatcaaattagttttattaaatataatatggatatatattgataatgtgtttgttctacgttaaaaatac

SEQ ID NO: 25708 - DNA, 278 bp, Oryza sativa
tagctcgcattttggcagaggtgaacgtccttctctttctatcattagactttctaactttgttcacattcatatatatgttaatgcttctaagaatatgtgggtgtctaggggcgttaacatctctatgaatattacacaccgcctgaaattctcatatcctgaataggagggagtataattaagcagtaccggtatgaagtaggagttagttttcacaactagtatttggcagaatgtagtgttcctcgatgacctggatatgaaaaatttttcat

SEQ ID NO: 25709 - DNA, 448 bp, Oryza sativa
  unsure (1)..(448): unsure at all n locations
gactgcagcgtgcaagcttgaggggggtgtgcttaccgccgccatcatctttctctcttcactggcgncggcgcccgcttccttggcggaagctgactcccttcataaagcttcaacgcaccagatccaccgatgactaacagaccccaaccgcagcatcacgccgccctcttcttccatcaaccttccttgccattgccggcgccgccttccttctcagttggcggcaccgcctcccttctctgttaccagcaccgccttcttctctctccttcaactgctatgcagcggaaagatgcggggaaattaactattcgccacttttagaattttcacttatccaaatacccgtatgaggtttgtatttaataattgagagaatatattctatgccactgaatttgttcgaggtcaacaattgtcatcgaccttctcttttataataata

SEQ ID NO: 25710 - DNA, 283 bp, Oryza sativa
  unsure (1)..(283): unsure at all n locations
ntgtagtaattcttaattggtgggttagagaagtcgtctttataagtaattgatttcaagataaattcagcagcagcgcatcagtagaataaactatcagatgccctattaccccacataatgcatgaaattaaatttctttatttctgagtagcctccagatcataatgaatgcattggacaatatgtgggtttttaagcaatctgaaaatcagttggcccaaacacattggcatacacttaatacttacctatgattgacacagaaaatgattgatgtact

SEQ ID NO: 25711 - DNA, 321 bp, Oryza sativa
ttacccctccatgaaaaggtgagcgttgctaaattatttacctgactggagagtatgtaaaaatcctgctatgccaatagggcttaactgcacccatgaatacctttctgagaagttgctatctcatggtgttttatgtgaaccataacaaacttatggtgttaatgccctacaatatgcaggtttactacaggttcaacaacatctctctactcagagaaccgaagatgttgataactggctgtcttctcctcttcatggcctgtattggttacatgcgcactgacatgtcaatctctaagaattcttcttcttatctgg

SEQ ID NO: 25712 - DNA, 445 bp, Oryza sativa
  unsure (1)..(445): unsure at all n locations
cgcaacattctcttatgcgcttctcaatgggagataccacaccacctttgcttgggcctccctctttgacttacttncttcaccttcactctttgctcgtttgtatcttgatgccccacagatagggcagacatccaagtcagcgtattccttgtaatacaaaatgcagtcgttcggacatgcatgaattcttctgacctccaggcccaacggacataatacttgcttcgcttcatatgtcgtctgaggtaaattgttcccctctggcaacagatcctttaacagctcaaggagttatgtaaaactcttgtccgaccagccattactagccttaagcttcatgagttccaacacgcatgacaactngctgtgcttcgacttgcattcatcatacaacggcatctgggcaatctccaccaacttactaaacttctcataatctctg

SEQ ID NO: 25713 - DNA, 305 bp, Oryza sativa
tggtgaatctcctggacggcatgtctttgtctcagattatcgaacacaacagaaagtcggttcaatattttcaagtgaatgctcacagttaaagaaattagtaagccatcttcaaataactacgaatccgattataccataccaatttgacagaggcctaatatgtgcatagccttctactagactatgattatgattcttgtccccaccaccagtcccacagatgcaaggggaaaggaaccaatcatattcatatatggatatttcttccgttttgttcggtttctttccttgactggtttacc

SEQ ID NO: 25714 - DNA, 349 bp, Oryza sativa
tgcaacctcaactatttctttactggcttctctcttctcaaaggaacgctaatatccggagcatataacattgctccctgctaagtatcacattttgaaggagccttgcaagataatacattgttgtatctaaattgatcaacaatgttgaatctagaagttcttctgctccacgggaaagaaataacctgtaccccaaattctggcattgattattttattagtgttggcaaaaatgagtcgattgtgttgaaatcgtgaacttgccaaattgttctgcttaccttttatctgcttgtattgaatgacaagcctcacatctgatttcaaagaaaactgtgtctcttta

SEQ ID NO: 25715 - DNA, 438 bp, Oryza sativa
  unsure (1)..(438): unsure at all n locations
acgatcatgtangaattgtcatggtatagtacccgctagaatgtattaactaagctgtgtaatcggaaattggttttcccaatttcatggcttggggctaagaactcgctgcttcagcatagtttgttataagatttaagctgcctttgtgaaaatacgattttccataaagacagctaggggctatgaagagtacagcaaactccgtttagctaagggcagctntggcgagagtactattntattgtcacacacagatttaatttattttcaatatgtttgattcatattttcaatntagattatntaactcccaagcgttcgctcanggtcttttctatctggtggtttgttctaactaattgatttcaagaaagtcaaatatctgagaattgtcgcatactctatacctgctcggctatcccgatatggttggat

SEQ ID NO: 25716 - DNA, 294 bp, Oryza sativa
ccagagtaaactctcctggtgggaccaagggggcaagccctcctccacacaaaatgaactggacatcaagataatcaagcaattccaacggcgtatgtataagacaatccatgttcacacccggagaaggtccaactcttcaattgccaccaccaagaattcccctcccaggccccccacgccataggaaacaacacctatggatcaccgtcatcatgccagaacctgaactgagaactacagcctggaaaactacccggaaagcaccattgggatcccctgagggaaatacgg

SEQ ID NO: 25717 - DNA, 254 bp, Oryza sativa
gtgttcgtaataattaaaatttttacaacaagatctcacatgattatattttgataaaaaatcacaaattacttttatgatatgtctaaattacttttagattaactaagttacttcttagatatataaaagtaaattcacgtaagcctaaaagtgatttacatatattatagaagtaacttattagaagagaaattaaatttaatttatgcctttttcattgacaaatatatattatatatataatatactct

SEQ ID NO: 25718 - DNA, 226 bp, Oryza sativa
  unsure (1)..(226): unsure at all n locations
ggaccaaanacgagctcagcgggcgaacaagggaccattgtttaaccgcaacaagatggctagaattgcaaacgggccccaaaacattacaagtgggagcacatgggcagaggaaagaaaattgtaccatggaccagaaccaacaagcaaaacagagcggtcactcaaacgcggcgaggagagggcaaacgccaagagcctgcgcaaccggcgcaagcgaggaaga

SEQ ID NO: 25719 - DNA, 419 bp, Oryza sativa
  unsure (1)..(419): unsure at all n locations
ctaagcttcatgatgctacttntataatatttgaggaaacccgttcatcttcagaccacatctgtcggtcatgggatatcacctttaatatactgtgatggcttatgaagcttgaagaatggtactgcctattatagaaagccagcatctatgccgtgttagttaccccctatcccaactttcatccataaattacatcaaacttcctacaccataaacttcactttttctaactccaactttttcgactttcaacttttcaggactaacacaccctcatatacattccacctacttgatacgacttgtgatgacatgccgtatgcatgccacttgctctttgaatttaatactaatctactagcaactcctatgggatgacagaccgctttctgctcatattaattattatcaaaata

SEQ ID NO: 25720 - DNA, 385 bp, Oryza sativa
  unsure (1)..(385): unsure at all n locations
agcttctatcccgtgtgggatatacatcgatgctcatcgtcgtcgtcgtcgncgtcgcagacgctaaccgtgtgtgtcggctgatgccgatgccaccggtgccgcgaccatatcgccacgcacgaattcatcttcaaagacaaaaaataatgaactaaaacaaaaacaaaccaacaaaaacaaaactgcaacggcgacgtgctttgtcccacggtcatgcacgctgccacggacgatgtcgcgtttactgaaacagaagacgcgcgcagcacacatcttttgcagtggaaattctacagaagaacgcagcaatgtgcgttacagtagaaaaaccttataaaagttgtggacattatctctccgctgtgtatgtgttcaatgtgca

SEQ ID NO: 25721 - DNA, 354 bp, Oryza sativa
cagtgcaggtggtcattctttgctgaataaggattgcgaacttgtgcgatgaggctttggcacagtctacaaggcagttttaagagatggccagcctgtggccatcaagaagctgacagtgtcaagcttggtcaagtcagaggacgagttccaacggcatgttaagctttttggaaaggtgcggcaccataatggtgttaccctcagaggcttctactggacttcatcactgcagctcctcatctatgactttgtgcctggcggtaacttatatcagcacctgcatgagtcctcagcagagagatcggtttcatggatgaaaaggttgacatattaatcggcgtacccgagcct

SEQ ID NO: 25722 - DNA, 437 bp, Oryza sativa
gcttgcttcgatgtggacatgtgcacgcgcatgtgtcttttgcttaagagctccggcgcggacgactgctgcggggctgctcctcctgctatcgcgcgcgtggagtgcgacgtgcatgcgcatcacctggagggctgcctcggtgcgcggctactcttggaggcgatcgtctcggtcgatgatagaccagtgcataaacacagtagatcaatctgattagtaaaaaacaaattgatctagcaaaaatacttacccggatcaggaacgagcaaacttgtgctgataacgggttgaataactagtgacctattcactgatccgaatagaagacgacgatctcatgcacacaatcatatattagatgaacacgaatatagggaggggcatcacagctttattgctttaccatatgcgaatacataactaacatctcaacc

SEQ ID NO: 25723 - DNA, 335 bp, Oryza sativa
tctatccacacttaagagaagtttatcagcagcccgagcacgaatggaccgacctcctcggtcagatcattacatctcggctcccagagccattccacctgagtaatcggttcccagagcccttaccattgtctcggactaccagagtcctgctgcccggcagcacaacatccgcttacactcgggaagcctagactatgatgcccacagacatcccgcatcacaccagatcgttctgaccactcacgtcatccatctgcacatacgctgattctggtacgaatccacaccccaacaactttccaaacacagcgaacaaattacccacgggacca

SEQ ID NO: 25724 - DNA, 357 bp, Oryza sativa
  unsure (1)..(357): unsure at all n locations
tgacggatgtagaacatgcaaaatgtctgaaatgccatgcaaccgccatcatgacgtcatctggagcgtccatgctaaaccccagcctgaacggctgagattggggttcggccgaaccctggcttggctcaacaaacccaaattttggcatgttgctcattctcagcctaccttcttcatttctccggtagttaggcttatttaaaacatgatgttntaatggagtttatgagccccactcttgtatggatagaattcttcttcactttagtctaaatttcctcccaactttgatgggttattatctgcaatccaatatacaccaacactcgtggaaaatggtagaattaaattcta

SEQ ID NO: 25725 - DNA, 427 bp, Oryza sativa
agcttcagtactgtcaactagtataatgtgtttatagatcagagatgaaatgacaagatcttgattacaactgatcaagatataaacttgttcaatccatgtaggaatggaatggagatttcacggtacagttgattagataccttgatgtcttgctgctctgctaggtagatttttccgaacagggtttgcctcatcagattctgctcactgaaactgttggtatactgttgcaaggatgcaactgtgaagattgtgaacttgaattgcaaaggatggttttgtaaactctcctgaacattcttctgatatgaagaaatgctacccttggtatccttctcttcagcaacttcagtgatcaacacaacaaacaaaatgataaaatgtagatgagatactgcacaagctacgtttatgacttgaattt

SEQ ID NO: 25726 - DNA, 124 bp, Oryza sativa
  unsure (1)..(124): unsure at all n locations
ctactgctgagatagaacctgatacattntatactagcattgagggcttgaagaagtaaatgttctttggagaagttctctccaaatattactgtgataactgatctatcatcctgattagcct

SEQ ID NO: 25727 - DNA, 282 bp, Oryza sativa
actcagcctctagaatggacttctacactctgtgatttgaatcatttatactgcgaatcttgttacatggaaaatgacaaaggcacctttcaccggtcaaagtgaaagggcaagtgaactattgggactagtacatactgatgtatgtggaccaatgaactcaacttgcagatgtggttttgggtactttattacctttaccgatgactttagtagatatggttatatctacttaatgaggcataattctgagtcccttgaaagttctaggaattcagaatg

SEQ ID NO: 25728 - DNA, 311 bp, Oryza sativa
  unsure (1)..(311): unsure at all n locations
tctcccatgctgcgtgcgtcgcaggggatgatctttgttacgacgaccttgcactctacccagctgtactcgatgatcaaagccagcgacgccgcgctcgcgagctctgaccccgccgtcgcgtacgtaccattctttgaacacgtgaaactttctttctaatttgtgtgagatgatatgagatcgaattgaactgattcgtgtcaaaatcatggcaaanaaatctgtatggtttttcaagtcgacttgccactcagcacgcttgacccggagaaggtgaagaacaagatcgtggtgtgcgtgcgtggcgg

SEQ ID NO: 25729 - DNA, 398 bp, Oryza sativa
tccgctgcattttcttcctcaaaccccagcccaataaaaacaaaccatgtggtggtggaggggctggtttccaacttaggggaactttgagccagaaaaacttctctatgcccttcaaaacttcaaacaaatgctggcatgccaactgattctatgtttaaaaccctgagcctgcactccccgagaactcctgtcttccttcggtctaccaagacacatggaattcgctgcccatgggagatgaagctgcccaagctgtagaactgatggaacatatgctgaagctcaaagagctaggtttgcaaggggagcagatcactcggcatttcatcaaaagtcggctagctccaatcaaagagagatcccccacggcttttgaatttgatggcaaacatgaa

SEQ ID NO: 25730 - DNA, 439 bp, Oryza sativa
  unsure (1)..(439): unsure at all n locations
actaagcttatattttggaaattgaggtcttgagagtacaaacatacattttttagtcaaaaattggcaccgtattggagatatcgagatgtatcgaaatttagaaaacgcggtaccttgcattacctcctcggaccataaaatcacttcaattactttccgtttgtaatataatgtaaatatcaggttatgtgaaagttgtgaaaattgagttctactacatttaattttcttcaaataatttgataaatttcatgatattctntatcaatgtctaatgggtgtatattatataagggatattagcaaatgttcatttgcatataagtttttatctaatattgtatattatataagggcttgcacatgaatttttatgctaaagaataatatgaaattcanatgctaatttatcattatttacttatataatatatta

SEQ ID NO: 25731 - DNA, 412 bp, Oryza sativa
  unsure (1)..(412): unsure at all n locations
agcttagctagttccttgggcgcttacattctcttcatgcgctccgcaattgggagataccacaccacctttgctgggcctcccctctttgacttacttccttcaccttcactctatgctcgtttgtatcttgatcccccacagatagggcagacatccaagtcagcgtattccttgttatacaaaatgcagtcgttcggacatgcatgaaattcttctgacctccaggcccaacggacataatacttgcttcgcttcatatgtcgnctgaggtaaattgttcccctctggcaacagataacttaacagctcaaggagntctgtaaactcttgtcgaccagcattatagccttaacttcatcagttcacaccatgacacttgtggctttacttgatcatatacacggattgg

SEQ ID NO: 25732 - DNA, 423 bp, Oryza sativa
  unsure (1)..(423): unsure at all n locations
cgacatcatttattctatagtgagctntaaactgatttatcaaatgtagggaataattcagtccacgggtagtcaaccaagaaaattctcttccggctagtcaaaccaaaggactgcaatcaaatgttggttacggatttttatttgtttgcaaggagcagcttccagctgcgtgcgtatgcatgcataaatttgcagtcacgggatgagggaatctcctcatcgtactttcaattgtactaagaaatgaacggcgcacctactaaaacaattatacttttgcgcctttaaattaatgtgctgcatttatcaatacttttgggtggtataagacttcatttttttctaataactagacggaacctgctatatgtgcaaatcttcttacattcatcactttttaaatgaatggagatttaatta

SEQ ID NO: 25733 - DNA, 439 bp, Oryza sativa
  unsure (1)..(439): unsure at all n locations
agcttatagtaggcttatagcttactattatacttgctctgatatagtagcaacgaccagtgtatggtttatattaacaacgcgaagtgagggcggtggatgggtaattgatcaatagttagagaataaggtggtgggcaaggacaacgctaaccgaggatagtggcttggaggggctatccaaaacaaaagatgatgggggcacacacaatggctacaacagcgactaccccacacgtacgtattactctccagtgcatcattacatcatcacggntttttttgaatgggctagtgggcctcagatggccttttatgtgcatgttatgtcgaatactacattcagcaaccaatgacaactaactgattcaatactcatcttcatttccattaggaacaccacaacgtgaaacacatttgaaacgacaacatgagatga

SEQ ID NO: 25734 - DNA, 247 bp, Oryza sativa
  unsure (1)..(247): unsure at all n locations
tatatcaggctgggagaaagcgctaccttgttaagctcctcaagcgctcggggccgtttacttggacggaggaagctgaacatgccctcactcagttaaggcatatctcagctctcccccggttctagtcgccccggagccaaatgagcccctgctactntacttagcggcgaccccccaagtagttagtgcagcgttggttgtggagcgcgatgaagacaatcctcatttcgtgcacccccattct

SEQ ID NO: 25735 - DNA, 361 bp, Oryza sativa
ttatcctctaacgcgtaaaattctatagtacaaatttaataaatatcctaaggcaggaaaggggctccaacttcttggattcacgccccccgaacaaaacgaacaatttaacagctgacagaacaacctctcgatttggcaagcaagtggttggatcaataaaaacggtagccactgacttcacacgccaaatcacgagaaagcgtgcacgacagcacgagagatatagccagaattcattttaattaaattaatacatacttcctcctgtttataaataaaactttttagcattacctaaatacatataatgaatctaaacacatacatatgtctagattcattatcatttaaataaatg

SEQ ID NO: 25736 - DNA, 422 bp, Oryza sativa
  unsure (1)..(422): unsure at all n locations
gactgcagcgaaccgaattcaatccctacactactgtgttctgaagccaccacaggtcgagttcactggtgaaacggcgggctccaccaatgagagaggtagatcattccaccataaaatcttctaagacccaatccagacccatcgacgatgatggtccgagaaactaattcanattccttgcttattttctaatacatgtgtagatttatgctccaccatacagtanagatatttctctaaataaccttactttgttctcaaattttacgtcaaatgatataattgtttaatgacacataacaaaatttgtatagtcgtgcanatgcgtcactttatagttcaataccagtgaaagatctagtaactcaggtgctctcccttcacgtggtactacacgtgcccagtgagtggttacatat

SEQ ID NO: 25737 - DNA, 437 bp, Oryza sativa
  unsure (1)..(437): unsure at all n locations
agcttggccggcttgtggatcagtactgatctttttatgataagtgttcgtctccgaacgaacctttcttaattatgaaacaaaatcacccatatttcaaacaaaaccactaaaaaaggtaccaatgagttttttcttcatgttcaaaagtgagggtggttttgtatgttatggtaaaaaataaactaatattctaaagctaaaaaggtagtaaatgcatagtaagaagaggtatacatcgcactagagatttaaccactaaaaacgactganatatactaatataaaatgtaaatattttactgtcgcaagattatcaaggtattttntttaacctgagaacagtgcggcatcccacggtatattaaaaatatatacatattattatgtacagaaagaaaagttacataatatcaatccatatcaatccatgatat

SEQ ID NO: 25738 - DNA, 327 bp, Oryza sativa
ttggccatcttgtcattgttctaaaacataatgtgccggatccatgaatatattcttgacctcaattattaattgtgtagtatcaatagatcaaattatcgaccttttttatcctggacattttgattaccgctcatgggagtggattttgaccctgagtggatatccctcgttgttctatgtcatcaaatgttataaaaaaataaaaaacataagaagatgtattaacgcggatatattactactacccaaaacatcaagttaaattcaacttttgatctcgcataggggacatgaaataacagggacatcccttgaggaataaat

SEQ ID NO: 25739 - DNA, 438 bp, Oryza sativa
  unsure (1)..(438): unsure at all n locations
agcttcaagcttttattttgcttgttctcccttctcttgtgcataagccgggctgattgcggtgcgtaactataactttttntcttctaatatattgacgtgtaatccttttacacgttcgcgaaaaaattatacaaatttactctggttattttcacgtattaactggtggctgcactggttggaatattgtatagagatcagttcagatcgcccaagggggaaatgagaaaaaagctgttatattctaaaaggaggtgctggcttcattaaatctatagttttaacacttttcgagttgttcattaaataacttggtattcttcgaattgaagtacagagtctgattgtgttactatgcatgatcgatccatccacctagaaagaaatgcaagctcttttcattattctcgaatttattttggttatgccccataa

SEQ ID NO: 25740 - DNA, 373 bp, Oryza sativa
  unsure (1)..(373): unsure at all n locations
cttattntacacatgttgtataccgagttcgattcatctttcttttgctttggatagaattggttatttttagtacatatctaacacctgtgttgtaatgataccatgcgtaacctaaaacggctgntggtttacttcatttggttttctttgatgtttttgaactaaccaacgtcaaataaaagaaatggagggaatacttantttactgggagcacttgtggtttccttgacatataatagcttatgcatatgnttatagaagaattggtatgttttgatggcatgatgccctggcacattttttctgttttcaaatattgttaaacattctctagcaattattactcctgatctgaataacttttgtgca

SEQ ID NO: 25741 - DNA, 402 bp, Oryza sativa
agcttgacattactgaccactgggtctagtattcttgggtaccgccccgggtggaccactcggtcaggatgatccgagcggtcaaacttgattgcaatctctgaccatcgaagatactggggtgtgtccggctgaacagcattgatctcccgttcagtcaacttctgcttccgtttagactcataagccacggggccgccgaagatatgggtgagctccttacggtgatcttgaaaacctgccggtgtgtcgccggcgtccttctttctcgacgtgctttggtcttcgtcagagatcttccgtgcagtcttggtgtactgctccgcgaactgcttgtagatgaagcactctttggccacgtgggtggagtttggatgatgccggcatttggagctcatgatc

SEQ ID NO: 25742 - DNA, 337 bp, Oryza sativa
  unsure (1)..(337): unsure at all n locations
tggacttagagtcaacagaagccaagtccattggcattttatgctatgcaaggaaaaatgtagttggatctgtgcagccttaggaaaaagtggctatggttntgatgcaacatcatgcaaatttaacattgacccatcggagaaggaagcatacaaacttggtgtaagttattctatgattgcacactagtttgagttataattcatacaagaattgtaagtttgtttatttctaaccatgcttcttctaatgacagacaactaaatacaactacttgactaagcctatcaaattcttccatctctttgagaattatntgtgggcttgtcaaaactg

SEQ ID NO: 25743 - DNA, 438 bp, Oryza sativa
agcttggtgtaaaggtataataaagattctgttgctcactcttttattaggcatatcacgctggaatcattcattccatcagctaaattctgttctttgattattgaactcagattcattctcatagggcatctggggtgggatgcttggaggaacatgcatgcagacggccattcttgtctgggtcaccttgagaactgattggaacaatgaggtacccgtcactggacctatgcagaaaggaaaactttttttttctgtttcttacattgggattaattaagaaaatagacgtgtgaactactccctagtaaaatattataatccgtatttcgattttaaaaacccacactacattactgaaattacaaatttatttagtatatataagtatgcgaatagtttatttcattaatataattaaagtctaatcttcaa

SEQ ID NO: 25744 - DNA, 408 bp, Oryza sativa
  unsure (1)..(408): unsure at all n locations
ggacattcctaatgtggccatgacttatttgtgggaccaaaggagagcatattcgctgacgcggaggtgacattttaattaatgtaaacaaatattatcatgcttatttcagatctaacttttagttattcatggtaaagatgaaatttgtgtacccttctgagacgaagcatcttacaagagactggattctaatgaaagttgataaagggtggagatcttacaaaagccgtttgaagggaagatactttaatcctgatgtgaggactctaaacgatatattaaaaaatgtcccaaaaggtgtcaatggatatcaatggcgtggtcatgataaaatatggtatcacgatatacacanggtngacctctcattttaatgctaaacatacagtccaaatttttgtttct

SEQ ID NO: 25745 - DNA, 346 bp, Oryza sativa
  unsure (1)..(346): unsure at all n locations
cagcatgcaagcgtgancacaaactaaccctcatactattatgtcttcaaattaacgccagtgttagtattgatacctaatgattataataacgccgcggcggcggcggtgcacactcaacaagaggagaacgccgtcagtcttagcccgctgtccggcaagctgtatgcaacagtggacatcgacaaagcccgcgtcgcgcggacgcgcacggaggaaccgactggcacgccgtggtggaaggagtcgttccacaactactgcgcgcactacgccggcgacgtcatcatcaccgtcaaggccgagaaccccgtcggcgccacactcatcggtcgcgcctacctcc

SEQ ID NO: 25746 - DNA, 415 bp, Oryza sativa
ttgatgattgaacctgacgagtagataacttcttgcatttccatcatcttcatgcatcttgtgtgaatatcagattggacttggtctaacttgtctatctcttcagcatcagaaatatcgttcaactttcccatgctttcacgtgcagcccttttagcagccttttgtccgattggccatggcgtttcttcaacatctgaaggtcctgatgcttgcccaagcatctctctgttatcagacgacttccttttacgatctctcttgagtgcatcattatatgcattccacttaggctgatcacagcatgcgtaccatacatctattaggacgaaccgtcctaattttttcttatcagcctcatagaacttatgggccatgtcaatccacatttagttcagagtaaccactagtatat

SEQ ID NO: 25747 - DNA, 433 bp, Oryza sativa
  unsure (1)..(433): unsure at all n locations
ctgcagcttgccttgaaagcactgattattctttattntgtaatgcaggattaccgacgatcatgttcctaggaaggaaatgtaaatctttttagaacacgtatataacggaaatgagaatcacgggtatagtagagatgaggtaccgatgcggaacctgtgtacctagaactatgaagacaattatgcccttctccatcttaaaaaaaatatccttttacacttactacctaagtacctatatcagtacttaaatatcttttaagtggtatcttttattatggaccattagatttttaccaaacaccgtaaaatctctccttcaacatatagggaatgccttggctgtactctcgagcttccgttccatgaagcggccgttgtagaacaccggcctcgtcgtcactggtgatgaggacgcctattcacccat

SEQ ID NO: 25748 - DNA, 374 bp, Oryza sativa
ttttgcatgtggagatatatattcgaatgtggttttttatggccagagaatgcataatataagcagatcggcacaagtattaccttgttgatgataacctctgtttaactttccgacaatcagatcacaataaggcaatatgaggacaccacctaagatgtatcggacatcagaatgatgttttttttttttgttgagatgtacccaagcagtctaacccctgcaatagattgaaaaacatacagagtgagattgtttctttgcaagacacatttttaccatcatatattttaattccatgatatagcataaggacagaaatgattaacagttgtctgtagctaaactcttgaatgtctttctttttgatcccc

SEQ ID NO: 25749 - DNA, 349 bp, Oryza sativa
agcatgctcacttaccgatcagagtggttggtttcgtattgcgaatgcctaaaaaggcctatatttaagagaggatttgaaccttctatgtggcatgaggtaaccctgagtcggctggaaaagcttgtcgcaacttgacccggcatgttggagaagtcggtcttggggaaagtgacctctttgtgagaataataactgatcgaacagccgtgcccacggtcatgggctgatgtgaagtggttcctgttgcatatatatgaatgcacgtgctttgcaaaagaagtagggggtgggaatcgtaccagaataccctatgtggcagatgaagacctgagggtcagaaaaacat

SEQ ID NO: 25750 - DNA, 423 bp, Oryza sativa
  unsure (1)..(423): unsure at all n locations
tgatacagataactgggtcnacatcgatcatatgcacaattcttatatttattaacaatgctcgtgatcatggggagccatgtgagtgtcgtgggtgactctggacttggtccatgtagtatatatttttaagtttgacaatgaggataagttataaatattactaagttggacataccacgcgctacatagtttaacctaattatctaaaaaaacatagtttaacctaaagtctatgataacgtaagtgaattgttcgtttttctcgtcagtataaactttgtgcaaattcacccctaaaacatcgtggctatgttattntagctattcaacacaagaaaaatatgctttagaaagacactcacattactgccgctagaaccaagtttttcttgggtgtgagggaggttatttatcggttga

SEQ ID NO: 25751 - DNA, 420 bp, Oryza sativa
gcactgtgcaagcaaaattatattctatatccattcatatgcacacaaaagtcacagaataaattctttattttctctcgaataagcccgcttcggtgaattcagttccagaaaatattgtagcaagttctgattcaagttgaacacctgtgatggatgttcttttttgccacacatgatgcatgcaactgtgcaagaagctttgctttcatgatttcatcacacgcacacacacacactcacacatacacagagagaagataaataagaggagctcaagaggagaaaaggagatgcatgataagatgggcagatggcattggtggatgaggaatattatcttgaagtggcggagttgtctttctttaacgaagggggcctcctctactctcttgaactccactctcactaatgactata

SEQ ID NO: 25752 - DNA, 342 bp, Oryza sativa
  unsure (1)..(342): unsure at all n locations
ctgcttacatttggcttcacaggtgcaccagcataacttctattgctcanagaagccagatcctcagtagctccttttctcgtacgctggaaggaacacaaattcacagagatatgggctcagtgattatgtagatttagaccaacagtatgtattcgaaagtaggttcaagtcaggaagcatataaccttatacgtatgggtatagtgaccttaatagtgaatagatgatcaccacgaacagatggtttatttaatgatggaacaccttgctttgctagaaccactacatcaccaggttgggtacctggaggtattcctagttcactattntcatcaacag

SEQ ID NO: 25753 - DNA, 429 bp, Oryza sativa
agctggtaagcattcgccaattatagtcattctcatatcatgagtggtggagagctcagtttcagcacatatgtttcgtcaaaccagaactctgtcatagtgtaatccttacttgacctagatccacgatataatgtcataatgcaaggcttactagctgctggcaccctcaccgtgccgcaagctgggcgcgcattgcccgggctaccggctcccagctgcaatgccccgatcgcctaaccgtcatgtctctatggtgattgcctgctagcctgctaacgactactccctccgtcccaaaaaaaggcaaatcgagggttcccgtgccaacgtttgactgacccgcttatatgagattttctataaatagctatttcattgtcgtagatgataaaacatgattaacacttaatgcgtgacctatctttc

SEQ ID NO: 25754 - DNA, 392 bp, Oryza sativa
  unsure (1)..(392): unsure at all n locations
gtggacataattatttcttcactcttatatctaactattattcgcgtatctncttgctatttgatgatcttacgatggtgggaaaatatatcttgtataaagtactgtcgaggtggtgacttacactcataccttcagcagcataaaagggtttctgaaacagttgctaagcatttcatccagcagctatgcaagcactttctcagaccctcagtgtcttgcactatttattgctttatctctccccagagccaaaatcacattctcttctttatgcagcatctggtctgcagatgctgcgtgaaaacaacgtggttcatcgagatctaaaaccacaggttaaattaattaatttactggtattgagtggatatttccattatatcttcata

SEQ ID NO: 25755 - DNA, 424 bp, Oryza sativa
agctgcggtgcttcagagtctgcttgttgtggctaggcctcccctgctagtttaaacttataaaatgtactcctatttcataagcacaacattttgcttgttaactactttggtaggtctcttgtgattgaacctgcctattcgagtttaaattctaagcttgacacgagcgcttgtatttatggatatttattctttcaaggatagaagatataccatgtaacaatgagacgttggaggagactttgtcattatcaagatatacaagcctggcctttcagggcgcttataaagaactagagatatgctgtgtgtttataaggataagtgcccctaccaatatgaggaccctagtactgggcttcgtgccatagcggtcaatattggtgggaaatgctatccaatacatatgaggtgtccaaga

SEQ ID NO: 25756 - DNA, 333 bp, Oryza sativa
  unsure (1)..(333): unsure at all n locations
ctagactcggcatntaatcttgatcctgctgaatggcatatattgagatcaactgaagctgaaccagacctcaatctatatgcttatggggtatgcatttcttcaatacccctcacacccaccccctctctcgtacttcagcttttcatttgtttgctcaaggttatgcctggacttgtgctttattttgcattatatggtatgaactgtgctgtatggcttaatatatttacagcttttaagtatggcacattgaagtaatggtgagctaccaaacctccaaggcattaattaagccttgtacacctaaacaaaaccctgttaattcttgtt

SEQ ID NO: 25757 - DNA, 434 bp, Oryza sativa
  unsure (1)..(434): unsure at all n locations
gagctgaccaggcatctaccatgacaagttccatgtcatctatatcctnttctcttcatagcttcaataaatggaggatagcttttgacagtagctccacattcagcatactccatagcatcctgtgaaatatagaaatttgaactgagcgctccaaaaggttctaaaaaacttcaaaagaaaaaacagttcaagctgtaatacaagcataaatatcggaaaactaataaattgtgtcctacaagcaatgacagcaaacaattcaagctggaatgcaagcataaatactgganaactaagatatcatgttctacaagcaatatttgcagagtaaatttacatgttgtcttgaagaaatctcacagactaaatgattggataattgggacacaacactcaaaggaagggaaaacaaaactaaacacatttatttt

SEQ ID NO: 25758 - DNA, 446 bp, Oryza sativa
  unsure (1)..(446): unsure at all n locations
tctcaactacgagtgaatgatcaccctgcttacccaaacactcttatgtgtccaccactgtcacgagcttggggcgctaagaattggccaccctaaccctaaccacgtgttgatgcaaaaaaacacatactggcctcagagaaatagttagctccagtgtaggtccaaaggttatatgcggcgtgccagccacgttgatcctacaattgacaagacatgtcaacaacatatcaaatagctgattggctgacaagccggtggagtaatctcagtcgatagccgatgtcaatgggggtttgagcaatcggctatatatcatatgtacataatgatgtaaagacaatcgcgctgtgatactangatatacaaataatatagtccaatagaaaccaatcggctaataataatatgagagtgtaagtacttatccgaaggttaaagcatac

SEQ ID NO: 25759 - DNA, 468 bp, Oryza sativa
  unsure (1)..(468): unsure at all n locations
tgcgtcgctntcgtcgcacatgcatatgctattagnatataacttaatctggagagatcctctctcacaaaagatctgtatacatgggccataaagttaaaaaacaccaaaggggacgaggataagagggttgaaagccacgggaaaagagcgaggaatctattgactcttattttctgactcttattttctcagtattccctccatttcatattataaatccgcttgatttttttttcctaatcaattttttaaaaatctgatcaaattgatagaaaaatttatcaacgtctataacactaaattagtttttatcgaaactaatatttaatatattttgatagtgcgtttgtttcatgttgaaaatgctattatattttttttattaacttgatcaaacttaaatgagtttgactagaaaaaaaataaataatttataatatgaaacagagggagtagttacagcga

SEQ ID NO: 25760 - DNA, 303 bp, Oryza sativa
acttaccaccattcatgtgtataacgggaaggatacactgctatggccttttaatgataagcttatattattgataaactaacacatgttgaaaatgagcctaacgtgaaaaactatgttcaaatataactagagagcatgcgcgaccggccccatgttgtgacatgaaaaatctcacgccatctcgtaaaacgagccataagctagaacttttatcatgcaccccataagtgcttatgccgggattctgatcctcgcggatgagccgacccccagttcaacacgaaaacacggatgaaagct

SEQ ID NO: 25761 - DNA, 301 bp, Oryza sativa
atgtgcattacataagagggtccgtgaacaagtgaagaatatctttaccgtagtcccttggctgcttgaggcagattttctgaaacattcattcaatgaagcagaatcttgagcaacactatattgggcgacagcagctccaatgcctacaccatcttgaacagcaccaattggaacattctcagcccttgcaaccccagcattctcagtctcagacccaccaacaacagcatggacttgggctatatatgggatctcattccgtggatggaactgaagacaatcaaagatgaaacatagt

SEQ ID NO: 25762 - DNA, 453 bp, Oryza sativa
  unsure (1)..(453): unsure at all n locations
tcggtggctcggtggaggtgaggttctgcagcaacgactgtggtgctgcacgagcttgttcgcattgcagtgcgatgagtaccatattatgtgacgatgatggcttagtagtgacgacttttggccgagataagctgcagcaacttggtggaggtggtgctctatggcagccacaacatgacgcgatggactcatctaagctacatgattgtgggttgtttgggtggtagggtgggctagctccgcgcatctctacgaagtttgaagccttgatgcgaagagaagcnttgaaattgtcttttagtcttttcttttcagttgttgttttccttgtatctcagttctgagatttggaatgtatacacttgttatactagcatttggctatgtatatctatttttggatatagaggacggatntatatccattattaaaaagaagaaataaccatg

SEQ ID NO: 25763 - DNA, 466 bp, Oryza sativa
  unsure (1)..(466): unsure at all n locations
nggtatcgtgcgtattcaagcaacagtgccagggtgcctccatcgacagcgtggtcttctccttgaccttcggtgccacctcattgtcgcatcatgcctncgcaaccttcaacaccacagtatcccaaggctttacatgtgaaaggagctgcacgaggaggctaatcgccgtcaggattgagctcccccttcaccatcccctttgctccaccattgntgccgtcagggtcaagctccaccatccncataccgctctgctccaccaccaatgtgtgaaggggaagttgctgccggagttccatgacagtggtgagctcggtctaattgcaatgtcagtgtttgctacgcgttgagctctcccgcacctttatgaacgaattagagaaaataaaaggaatatcacatagaagacagaagaccacgantanggtgaaaaaaaaagaacgcanaatacatttacttccca

SEQ ID NO: 25764 - DNA, 381 bp, Oryza sativa
  unsure (1)..(381): unsure at all n locations
ctggctggtcggcaagcatgtcttttgccagntgaccttgcatttccccccggtgatatcccccgtaccagcccaaaggaagcgacgtctctgcttgtcaagctgctccagggattccttcatcaccttcaaggcagtgaggagataaattggctgtgctgaaagcacagactttacaagcgtggttctcccggctgctgccatgtttttccccctccaacttgcaactctccctgatattntgtcgaagaccggttgcaagtccgtttttcgcagccttcccagagcaagcgggaggcccaagtattttagtgggaaatttgcccgcttcgccggaacgccttggaggacctcttccaggtctatattgccgcatcttat

SEQ ID NO: 25765 - DNA, 454 bp, Oryza sativa
  unsure (1)..(454): unsure at all n locations
tagcaagtgtgagttctggntgtccgaagacaaaatcttatgtcacgttatatctgctaaaggagttgctgtggaccccgaaacagtgaccgccgtcaccgattggaagcaacccaagacagtcactcaagttcgcagtttcttaggtttggaaggatactatcggagattcatcgagaacttcttcaaaatcgctcgacccatgacacagttgttgaagaaagaagagaaatttgtgtggagcccgcaatgcgagaatgcgtttcaaactctcaaggaaaagctggtttcctcgccagtgttaatcttgccggatactcgcaagacttcatggtgtattgtgacgcttcacgccaaggattggggtgcgtgctcatgcangacggtcatgtggtagcctatgccttacgtcagctaccacctcatgaanggcactaccctacacatgacttgg

SEQ ID NO: 25766 - DNA, 426 bp, Oryza sativa
  unsure (1)..(426): unsure at all n locations
tctacaagaattagntggctccttttcttggtcacccncaatttctaccatcaaacatacaatgtatgaaagtaggaaggtataaaccaaaagagtactgaaacgctccccaaacaaattttgcaaaatgacaatctataaaaagatattgaatagtctcatttttcatacataaacaacatcttaagctgccattccaattccgttttgccaaattgtctttgttaacataacccctttaagcaagtaccacataaaaatcttaattntaagcggcatcttaagtttctaaataatcttatttctctcaatgtaaccattattaattaaggcttaaggctagatacattgaccttacagaanataaaccattttgatgataattccatctaaaatagtcagtagatnggatcaactgaatatgta

SEQ ID NO: 25767 - DNA, 494 bp, Oryza sativa
  unsure (1)..(494): unsure at all n locations
tcttctggaacacccacttgcaccccacaggtttacacccatatggtttctctgtcacctcccaagtcccgttagcgataatggaatccatttcactacggacagcctccttccagtagtctgcatcaggagatgcatatgcttctgaaattgacttaggagtgtcatccacgaggtacacagtgaaatcatcaccaaaagacttagccgtcctttgtctcttactccttcgaggagcttcactgacatcctcctcagagacaagttcatgtgtatgttcagtttgttctggtggtgtgattgaactgggaattatttcagagggttggttcgaaccactatgtgtatccttcattgngaaaaagctctcanagaaggtagcatcacgagactccataattgtaccaacatgcatgtccggtacctcggattaactattaaaaatctatatgcaatgctatgatgagcatatcccagaanaacacagtccacag

SEQ ID NO: 25768 - DNA, 458 bp, Oryza sativa
  unsure (1)..(458): unsure at all n locations
tctctctggtgaattcctgcagtagctattcttctagcaacctaactattaaatagttacattggtatggagctcgatatagtgagagtgagcaatacttgcacaagtagcacaactagcaatgctaattggacccaaacatttttttgttgtaccttttgtaagtttgcaagaaggatgcttgaatttagttgatgagcatctttaatcagttcaagtaagggacttctatttcttctaagatgcatatttgcatctacacgtcttcctctacattcaacactatattttatgttgcttgtggtaaacaatgttacatctgacatcttttctttatacaggaaatgggacagatacaggttgggctgattataattctgtccctttctcatatgggagtactgctggntcagatgatccanataattngagcacatattatttgccatcttttcccg

SEQ ID NO: 25769 - DNA, 416 bp, Oryza sativa
  unsure (1)..(416): unsure at all n locations
tggaagcttctctgaccaaagctggttccagcaagaaataatcacagttttgtttctaccatgacaaccaactttgacagccacaatgtggcactgaatttgtaaggaatcattgataatggtcctatgtagcattatatgaattgtgactttactatcatacttcaaatcacattgatagccaatagacaagccactgcttattgtagccatgcggaaaaacaaggggcatgattgcatgaaggtcccaactcgaaatgaaggataataaacaactcaccattgaggccagacaggctcctcaacatgagctaatgagcagcacnttcatcttcaaattatcagagattgcaatccaaccttgtaaagcagataccaattaatcacagcccaacaaaattacagaatcaaagact

SEQ ID NO: 25770 - DNA, 439 bp, Oryza sativa
  unsure (1)..(439): unsure at all n locations
acttctctacgtgcacaagctngtgattgtgctggattgtatcttctatgtccttatgctcccggcgattggctaacctctgcctggccttctccagcttgaattggtgttgctcaagatagacggctggagtaaaggcgtcggctaattcatctgggagtagagcttggatatctgtgaaccttgcccggatcgagccacagttgatcaccaagttgtctagtgatgcttctagccgatgagagatatcctcaagcattctcttcacatcatccgacagaggagctatggctttactggtggtgtcttcctctgtttcatcgagataatcctcgatgttgaagaacagatcggctaaaaccttgcagagataatattttgaatggttaaggatcaaaacatgattggccgatctcaaatttgtgtcaacaaaacttac

SEQ ID NO: 25771 - DNA, 436 bp, Oryza sativa
actcaagcttggcttgtgggttcttcttcatgcaagaattgactaatatcaaaagagaacatatcacctagaacctgaaaggaaaaatacattgatgattgtaagattacgaaaggatgacagctgatatttctgaagttaaagaaaactacttacagggacagcaggagctggtgctattgcttattcttcttctatatgatggctttctgcggccgatggagtattttcacgtgattctgggacaagagttggaggtcgaggaggctgaatatacaaatatatgttagcatcggttgatttaaaattgaagcgaagagaactgatagaatcagagtcaaccgatggagcttgtgctcgtggctacttggcagcagcctttttctgtaaaagtgtgaaatcagaaatcggcttcaaagtatagatccaatggatg

SEQ ID NO: 25772 - DNA, 398 bp, Oryza sativa
  unsure (1)..(398): unsure at all n locations
gggatgaggtatgctntgctcaattgtaagcagtagcttgctatgttcaacagaaccatgagtacaagcagcggaaggatgcatcaatctacaattgccataggtgatgtaatgctctcaaatttttgcaaaagaaaaaaaaaacctgaagcggtgccacccgtaatgacatttgtgcaccaagtatttcactgtagttntactgcaatattcaaggtttgcattctagaaattgtggttttttccgtggtgggagggggcgaaagaaccaaaatcactgaatttatttgaaaaattgacgaattttgaatgatttagaataaactttgaccaaattcacaaaaacatgaaaaaaggagaaatttcgggtgagatatatgcttgccggtgggggggga

SEQ ID NO: 25773 - DNA, 244 bp, Oryza sativa
aataaataaataataaattatatattttattaattatatataaatatatatatttatattatattttatatatatttattttaattttttctaaaatttttaatattaatataatattaaattttattttttataataatttatataatatttaaattttttaatattattatatttttttttaaacaactacataacttttatttaatttaattattaataattaataatatttattaaatta

SEQ ID NO: 25774 - DNA, 191 bp, Oryza sativa
ggtctttgttatggctatgacctggagctcagacatgttgaagatgccacgtggcagaagaccacataagctgttgtcttgaataacgagtagcgtgagacccgacagagatgctatgctgtctggtattttccccgagaggctattgttgccgagggtgaatacgctcagcaatggtgtggtgttgaaaa

SEQ ID NO: 25775 - DNA, 377 bp, Oryza sativa
  unsure (1)..(377): unsure at all n locations
nggactatcccataccagcacatgtggtttacgaaggctttgtgttataatcaaaaagtggtactagagttctaacaaggtacattatggagaaattcgttctaacaaggtacattatggtatatatttttgggatctatggccaatgatctatcttggttaagcccacatttacaaaattttaaaaattttggacaacaagcacaaaagctaccaattttaaaaataagcgggttgcttgatggcatgtatggatggcaatggggacccgaaccctgaaacccggtggggaaaaactctattaagggctcaaaacgggagcatatcatcccccatggggctgttaacggggaaaaacgtcccccatcgggttgagt

SEQ ID NO: 25776 - DNA, 434 bp, Oryza sativa
  unsure (1)..(434): unsure at all n locations
tggaattgcgactaaattggagagatgctactagttcaaagttaccgagaaaagaaagcagtatgaggcgagagacaaccgatccaatgatgaaaaggggatctagccgatggtaacttacctcagcgtattcggctgatgatgcggcagatgggctggcggaggtcgacatcgtcgcatgcggagatctggccggagatgaagtcgcctgtggatcgccttgcgcgtcngaagaatcgctggagagagagagggtaaagattcacttaagcggggaaaacggaagtcacggtgtgagatttctcggggataacggttagtatttgaagcgctagagtaacaatcgggaaaacggcagagtgcgaaacttgctcggagtcgatacacggcaaattcggaacattaccaaatatcccggacttgggggcatgtgt

SEQ ID NO: 25777 - DNA, 307 bp, Oryza sativa
  unsure (1)..(307): unsure at all n locations
aaaaaaaaaaaaaaatatttanatnataaatacanaaganaaaattgtgttttaaaatgggggattaataaaattattataaattaaattaaaaaatttaaatatataaattttcagaattaaaaataaaaaatataatatattaataaatcaaattaatttttataaaacaaaaacatatattaataaaaataatttaaattatttaaaattatttttataatattaatatttttatacacccccccctaaacttttaattttaatttaaataaaatataaaattataatataattataaaaaaat

SEQ ID NO: 25778 - DNA, 238 bp, Oryza sativa
tacacggactacagcgtcggatgcgagggtttgtccctcggctcgcccgcgtggaaggcggtcgccgacccaccctacctcattaagaccaaaacgtcgccgtgcattctcggcggcatctactggatcggccgcctaccgtcgccgttcaccggcagctgcaccaccccagggattgtacgcttctacgtgtgcagcgaggagttcgccagtttcccgtgcccaccgttcatggagc

SEQ ID NO: 25779 - DNA, 445 bp, Oryza sativa
  unsure (1)..(445): unsure at all n locations
ataatgtatcttataatgttttcttagtctttntccggtcttggtgtttggagtagaccggatttgctagataggcgtcgtattattaataggggtctatgaagcgagcttgtagatgatcttgtgccatattagttcatatgcatgtangtgcattttgtgggcttgtctaaccaagtgtgatgagttttctcaagtcctaaaccaagagagaagtgggcatgtccaataggagtgagtgacatcttgtgggtatgtccggtggatatcctttggagtgtgagccctttatccttgacttaagttgtgtttcttggatggaattttcatgggttggatggccctttgaataagctttccatagagtccaagaacgccaaattccgagacccgagtcaagagatatcgctgttttactaactgtcggttgagctgaaaagaacct

SEQ ID NO: 25780 - DNA, 473 bp, Oryza sativa
actaagctggagagagcaggtgtttgcaatctttattcgattattctttatatcactaagcgatttatttctttctaagtttgggccgaaaagagacttacgtctcgtttcgaccttaagagatgtttttcaacagctcatttggtaatgtaccgacctcccgggtcagatcattacttctcggctcccagagccattccacttgattaatcggctcccagagcctttttcattttctcggactcccagagtccagctgcccagcagcacaacaatccgcttctactcgggaagcctagtctatgatgccctcagacattccgaatcacacagattcgtttctgaccactcaggtcatccatctgtcacataggctgattctggttacgattcccacaccacaacaactttttcacatagcacaggcaaacatatctacgcaacgtggaccacctcacattcggccatgaccg

SEQ ID NO: 25781 - DNA, 55 bp, Oryza sativa
caagagagcgctgcgaagcgctccgcaggaagggaaaaagaacctccccccccca

SEQ ID NO: 25782 - DNA, 359 bp, Oryza sativa
  unsure (1)..(359): unsure at all n locations
tccaggagaagcctgaggctaacctctggtctntntctaacagctggcacgaaaaagtaaggcgcggtgggggtggatggcatgcatacgtcaccggactccagactcgatggcccacatgcagtgaaacaggggtaggattgttgggtgtaaaggttctaaatcgaactgtgcgtggccgttttgatccgacggtcacaatcaactggaagctaatcggacggcccatacgatcgtgtggcacagcgctcgaggatacaaatcacgccttcaggtctcacggaccacgcctcttctcttctcttctcgcanactcctctggactactggtttaccctcttccagtcttcccttcccca

SEQ ID NO: 25783 - DNA, 304 bp, Oryza sativa
  unsure (1)..(304): unsure at all n locations
cctataaaactcagcttccccgcccatttctgctgtcccgctcccgtcttctgttgatcaacagaccacagagctctaccgccctactacccccgcgacgagcgaaagcggagataaaaaataaaattccccccctccgagacctacctcttctccgcctcctcctcggtgggagacttcttcttcttcgcggggggcggngggaggtccccggcgtccgcatccgcgtgcgccatggcccggatctcacggaacctgtgggggctcgctcgccgccggcgtcgagatgggggaggggagggga

SEQ ID NO: 25784 - DNA, 378 bp, Oryza sativa
  unsure (1)..(378): unsure at all n locations
cgattaattggctcgtgtagaattaacttgacaatttgactgacatggatgatagccatagtggtgtcccatttaagccaaattattggttaagacaaggccaagtaaggttttgggtgttttatgagtgagatctgacctggctgggtttagatcatcctcttttagttcgaacgcccaacaggcaacaacaaaggcgtgatgtagcagcatataggaactactaataagcaaactaacaagttcagatgataacggcgattggctaattntggacccacggtatgtagtcattgcttgagaaatcgaacttactcngccccaaaatcctggacatttagttaagatcttatggtctaagcgtcgtggaatgacata

SEQ ID NO: 25785 - DNA, 432 bp, Oryza sativa
  unsure (1)..(432): unsure at all n locations
tatatgttctaacccgatcatttggcatgattaatcttctactatgtttgttatgggttgcatagggggtaaacaccgctgggaggatagctgagcggcacggctgctatggatgagagagggacttgggtactgtttatgtttttgttgttttctgtggacatgcctgcatttgtttgctcaatttcagaacacacagcagttggctgcatttacatgactacatttttgttgaaacaatttcttttgtaggtattgaatagatgaactattgaatatgtactggttctctatttcatgaagntntaatcggagtaaccaaatgggtcatcccagcaacgatcaaatgatttgatcatgagataatccattctatgccatcgtcaaagcatgaattntacaatatgccactgacaaaactttagttcaata

SEQ ID NO: 25786 - DNA, 403 bp, Oryza sativa
  unsure (1)..(403): unsure at all n locations
gcttcgtggcttcgcccgccacatggagacgacggacggactgtttgtaccgagaggagcacatctagcggtgcagaagcgaacaagaactgttgccctgtggctacccaagacacactgagattcattggcggactgggtacaaaaactaaggatttgatatgatataagtagatttgatcgaagggctcatatctacttgtactatcacccaagttatcggtattagaaacacgaagaggcattattgttcaaaagaaatgtgtggctaggtataattatcatttaggagtgactatattttctttctctcttttggattnttttaatgaaatatgagtgatactagcataatggattaccagatatctgtctattccagaaaaataacattaatgataaa

SEQ ID NO: 25787 - DNA, 286 bp, Oryza sativa
gccactcctaaagtgccctcactaactaaagacactatttatgaaactcatctctcaatagaggacacccctaatgagttcttcaaaatctgaggccatttgatgaagatactttatcccacaatgggtgtccccgcccaaggtagtcctaagtgaagagatcttatagtaccccttcctgcttgtccatcagcccaccggcgtgctcctctgttttcctaccctctcctcgactcttcttgtcttctcttcttcactcacgtggattctccctctctacttcacg

SEQ ID NO: 25788 - DNA, 422 bp, Oryza sativa
tagagatgagttgcaactaatctatctctgctgatctatactttgacttgcatatgatagtaacatggccagaaatctactcgaaaaagttcgcattttccatgggctgggcctagacaattaaagtccagactgttagatcgggccgaaactgtaaaggtagtatgacatgggccaggtttattgactagaggcctgctaagctctgatttgttagcacagatgaaagcaagggctgtgtaaaatcaactcgtctattaacaaattatcggatcatgttgccctttcacagcagtagaacagtgagaataactgtgtcatttccttttacggtaaaaaacactgcataaatagacaatgcacatagatataaagtgaacctctctcttattacagtgtagagctagaaaaatatttttgct

SEQ ID NO: 25789 - DNA, 482 bp, Oryza sativa
tatcatatctcataatatgatacactcataaggcagaagcacttgtgataattctgatgcagcagtaatggattctgctcaagataatcaacataaacacaagtgatgcagtcagttgtttctagttgttgaaaaagcaagtgacagatgaaacacaatggcctagtaaccccccctgtagagatagtggaatagatgcctcacacccaatgtggggaggtgatctctcatatatagctgagttacaatcaatgctagtgagatacacaagaccaaaggtctaggagataaacagcctatagactaataaataattctaatacccccaaatcagaagaaaacttgaggaacaaccatgtagtagtagcctagtacgaggaaagtatgaaaagtatgaatggagagatagacagcacaacagctgtaaattaacgcaagcttaaactatcttacacacatgagaaaaaatgtggacaccagac

SEQ ID NO: 25790 - DNA, 428 bp, Oryza sativa
  unsure (1)..(428): unsure at all n locations
gcaataaccaaatcctccattctcattttctgttagaatataatatactagttacagttggactaagagctataataggtggtagggagtggagttagagtcggactttatgagccaacaatataaccattacgactacaatgtagcgtatacacgcagagagataatgacagcgtggccatggacttgtagtggctaagagctatattggttggggaggagcgcccataattagagccctgngatgtaggcttcggctgaacctcattaacaaatatcgtgtgtttctgtatcgtcatctgctgtatctacagtcttcaattaagttaatcgccgttccgctgtatcgactaacttttataataagtagtaacacgtagtatcagaacccatgtttggaacccggaacaattttcatcggtcatatg

SEQ ID NO: 25791 - DNA, 309 bp, Oryza sativa
  unsure (1)..(309): unsure at all n locations
tttatggcgcctcttttaaaaatctcactctttggggggtcttctacccacatatttgtgttgggtttaaaacactctgtccaccaaactgtcccagatggggaggcgagnttaacttactttatctcatcatggtctcccgcgaagagaatatacacacgggatttttctcgaaaataccaccactacaaaaatatttccactctcttgtcgtttatattgcggaacaaagaattgcanacttctcatataccttatgtaccacccccactatatttttccacctcttatgttcccacatatatatca

SEQ ID NO: 25792 - DNA, 361 bp, Oryza sativa
  unsure (1)..(361): unsure at all n locations
tcatgagataacttcagttgtttctgcaagattntgcatccatggtgtctccctgccctcctggngaatgtacagatgaagcatgcatcactctntggnctttagcagcagcctggtggttatcattctgcatggcaacaaagaactcatgactttgctagccatgggaagtatgacagcaaacaaatccgagcagtgagttaaaatggaacataaactaacatgtgactttagtgaagccgcttcatcaacagctccagtgacatgctctgatggctgatggaaaagcaacagagctatggaccgatcaattggatttgtctgtgtctcgatgctcccaggatcaacaaacctaccaaac

SEQ ID NO: 25793 - DNA, 435 bp, Oryza sativa
  unsure (1)..(435): unsure at all n locations
tcatagagtggtagatatnctatataatctaagccatctttttatttaacctaatcggctgcttcctaacgatagatattagccgattggaggttagataacgatattgtcggagattatataagatacatgataactcgacaacttacataaaccagattagagtatcataaagatggaagcactaattccgagaacgcaagccgccatatacaagtttacctctagttgaagatcgaaaccgatgcagctcaacctgaaagcaagaactcgtcgaaacaaaatgaaagtaaaagggtggcgatgcgccgagattgttgttgaacgtctgttgttgtattacatggggctcggggtctatctatacccgagattacacaatatgtccttgtcggacacgactctatctctaacanactctacataccataaatc

SEQ ID NO: 25794 - DNA, 443 bp, Oryza sativa
  unsure (1)..(443): unsure at all n locations
tggttactccagtacaggaaatactcatgtagcttcatgagcatgtgtttcatccaattttattttctattcttcatttgcagattgtaaactggagaagtcacttgaaattccctgaagaggcaaagctttctcctgaagctaaggatctcatcagcaaacttctatgtaatgttgagcagagacttggaacaaaaggagcccatgagataaaagtgcgctctcttctatatgtacaatatctttattgctctcaactgtgtgcttaattattatcgtcatatgctctactttaggcacatccatggtttagaggtctcccatgggaaagatngtatcagatgaaagctgctttcataccagaagttaacagcgagttggatactcagaattttgagaaaattgaggaggtaaatttcagtcgttttccattgtctgatcat

SEQ ID NO: 25795 - DNA, 308 bp, Oryza sativa
  unsure (1)..(308): unsure at all n locations
agagatctagccgctcccgacgccgccactctcttgttccttctctctagtncgcttcagccgggggcggtagctcaatggtttcaactttaattcttagccggatttatgggtgctggtgttatgtttgaactttgaatcctcaacactcaattttctttccacttcttttttctcccttacctcacgtgaagaagttaccttaacaagatgagatagtgaattcagcatcctcagcatgtttctttgccgtctgccggggaagttgagatgggggatgcctggtggtgggtttataagggaagaat

SEQ ID NO: 25796 - DNA, 363 bp, Oryza sativa
catatgggaagaggagtatctgatgtaaatataatactcgaagatataattcaaggattttaaaacgtgtataaatatatatttctcctcttgtcgatattgagttccccgagctgatgactcattacgtttaaacactctgtccgactagttatagcccccaagcaccggaagtcggcctatgcactttccaaacatgcatatgagtgacatgagttcgtcattaatggaataaagcttcacgaattataaattaatactcgggtactcttgcaattgttaagagaagaggaaaaattatctttatctctatgctgttgagttcttccgagaaatacttagcaccttgcggtactcggtcta

SEQ ID NO: 25797 - DNA, 370 bp, Oryza sativa
  unsure (1)..(370): unsure at all n locations
cgtgaggtatagggtganaacaaaaatctgtgctcataacatatggttgtagtagtgacaagttgtgctatgcacacacttttatggggaaaaatactagtggatggcaacagagcattgatggagatgtagaaaactgcacaccataccatagagtagtacaagcttttacaaggcagtaatataggctacatggtaggtactacatgtaggcactttgagcatacatgtgccttcgttgtgacatgtcttgggtagcatagcatttagacaaataaaaaaagttcaagctaagtaacaaaagggtctacggtactgactaacactaccatgcatgagtgctgagctcgacgagctattcgagctcagc

SEQ ID NO: 25798 - DNA, 376 bp, Oryza sativa
tactatgctgcatatctcaaagatacaggtgcaaggtatatgtactctctcttagcttaaataatctttggcacggtggcttacccttacccctgattcccacgagacactgcttttccttgccttgagcagttgaaagacagaacaataattagagcaccaatcacccaatctttattcaactcttattccagaagttttcaaatgattttgtaaaagaaagccaagtttctcaaatgattcactcagtctctctaagtgcatcaaaatgaattcctcaccaatttgcctttttgattcctactccaagggttgatatgtggagctcgatagggatcaaacatggcatacttgcatttacatttattactaagtc

SEQ ID NO: 25799 - DNA, 401 bp, Oryza sativa
  unsure (1)..(401): unsure at all n locations
cacctacaacagaggttgagtggcttgagcctggtagtgatcgctgccttgtgaaaggtgtttgtggtccgaatagcttctgccatctcaccgtgactggagagacaagctgctcttgccttcctggntttgaattcttgagcactaaccagagcacacttggttgttggagagcattgccaaccggtggctgcgtgaggaacagctctaacgatgagacgagagtgacaaccacgatggtcgaagtgaagaacactacttggttagagaacccgtatgctgttctaccagccacaactagtattgaagcctgcaaactactttgcctctccgattgtgcttgcgatatcgccatgtttagtgattcctactgctcaaaacagatgcttcccattagatat

SEQ ID NO: 25800 - DNA, 475 bp, Oryza sativa
  unsure (1)..(475): unsure at all n locations
actaagctttactctataaagctatataaaatctctataagttgctgtcactttttcggcacaatatactgattcacactnttgaacttaaaccgattccaagtctaaggccctgtttagattctaattttttttctttaaacttttacctttntcgtcacgtcgaactttcctacacacacaaacttccaacttttccgtcatatcgttccaatttcttcaaactttcaattgtagcgtggaactaaacgcaacctaatttattcggtttctattacaccgtatatattctatgggaaacaaagtgcaatttatacaaacttgtattaaatcttaccgtcaaaatcaatacgtactacgatccaatagttagtttaattattatctttctgaaatttataggcctccgcanagagcgtgttgcgtcttttaaatattagtcttatatataatactctctgtcatggtctatctc

SEQ ID NO: 25801 - DNA, 462 bp, Oryza sativa
  unsure (1)..(462): unsure at all n locations
ttgagttcagtgactcactacgttggttgctgcgcataccctttttgtatttccatctggataggcagctgcccatttctcccttagtcgggacatcagagcgatccattgtccatttcccgtgcctccattctccttaaaatcagcccaacggctctcgaactcctcttcatccatactctcataaattaattttcttagctcgtcgagttttggcttacgaaggtgacgactcatattctcctctatatgccaagtacacaatctatggtaagcacccggcattaccttactgatagccttcgccattgctaggtcgccatcggtaattaatgagtttggatgcacttgacgcattgcctccaaaaaagtctcaaggagccaacagtaagagttgacagactcattngatagaattccgcaccccaaaaatgttggacttctgtggtggtaactcctatg

SEQ ID NO: 25802 - DNA, 147 bp, Oryza sativa
tcttacacaaagttttttaaaagcacagaaccaataatatgtggccataatctcttaataaactgaaaagaaccggtaacacaaactttatatgtgcaacaaaatttttcaaggatctggctggcttactgcaactaccgtgggtag

SEQ ID NO: 25803 - DNA, 429 bp, Oryza sativa
  unsure (1)..(429): unsure at all n locations
ttcagcttttgtctatgtaaggggcatttaaaatatttatctatttcatgaagctctangaccatctcaagcctgtcgaatcggaataaatgatggaattaacatctattgtggtggctctatactaaatatgctatttgaattttacaagacttgatattgctgggtaaaagctgtgatgcatggggggaaacaaatgcattttagtggctcttagtgcaatgtgcaacgatctatcagcttttctttaactgagtacatcagtacatgttagtgttcttcatatgaagctgacaattgtatttacatggatgtagctggcagaagtcagaaaaagagaaaaacacaggtactttacttagcaacaatgatcnagggatttaattngaatgtcgcccattgtttactttgctgattgcctttccctca

SEQ ID NO: 25804 - DNA, 467 bp, Oryza sativa
  unsure (1)..(467): unsure at all n locations
actcaagctttatgtaaaagttgttgctttcaaatatatttgaaattttctattttaaatttataataataattaatactcaattaatcatgtgttgacgattttctcattntgtatgcctacacttaatcttacggccttatcttttcgcttgtgcttatgcttattcttatcagccaaattttgatttttcaatcttaaatttgaagttgattttggggttttttatcgaagtttattttcagcctttgattttatatcgctaagaacacatatatataaaagtttatttataattttttttttcgtttgtaaatacgtcgttttgcgatggggctgttaatcttcgtagtatacatttacgggtcaataaatttgataattcgtgtatgctgtagtgtgtcgtagcccgtaccacatccaacacttctcacaattgggctggaaatggaaaaatctcttttttt

SEQ ID NO: 25805 - DNA, 468 bp, Oryza sativa
  unsure (1)..(468): unsure at all n locations
ntcttattntcttcgccatatataaaaatggtgactctatgttatataatttttaagtaatgtatcttctcaacgatccaaaaattaatctctacatatattttctttcatttcgatatagaatgatgcctatattggctgacaaatttcttccaaaattacacattctacacaagccaagtcttcggcggctgtcagaaatactatacctaccttgcaacctactccatgtggctacttatgatccccaagataccatgtttggttccatgtgctaaatagtagccctccaccttttagccctgaattagccctcaaggatccaaacaggtgggctaattnttcgctaaagtgaattaaccccnncccccctcaaaacattaaccccttccaagggatgctaatggcgctaattntgtgtgggaaccatcaaaaagcagnnctctctctccttctctctnctctctt

SEQ ID NO: 25806 - DNA, 388 bp, Oryza sativa
atttatttctttctacagttgggccgaaaagagacatgcggctcgttccgactcttagagatgttcttccacagcgcatttggtaatgtaccgacctcccgggtcatatcattacttctcggtccccagccattcacttgataaacggctcccaagcctttatcattttttcggacttccagaggccagctgcccagcagcacaacaattcgcttccactcgggaagcctcaggtatgatgcccacagacatcccgaatcacatagattcgcttgtggcactcaagtcattcatttggcacatacgctgatcctggtacgaatccacaccacaacaagctttgacagagcacatgcagacaaatctacgcaacgggaacctccttaca

SEQ ID NO: 25807 - DNA, 456 bp, Oryza sativa
  unsure (1)..(456): unsure at all n locations
ntggagaagaagtcttaggtggagtcttggcttatatcccattttatcgcctgtgaagatggagccgntggcccgctagtccgctgctgtttatttttgattgtcaggccttaagtgcctttgtaataatgtaaatattatcgatataacaaagatgtgtcttttatatcatgtttgtatggtgtaccccggcttttcctgngacggngattaatacactagcgttcgggaaaatgaaattttcccggtcgtgacagttgttcaaatgtggttgggcctatgcaacatgggtgtgttgtatggtgttacttaatattgattaattattcaactgtttttaccattctcttaaaatatttattaaatgttgnttctgcaaatgagctatattatgccatcctttgntatcctgtgcacttgcatatttgctgtgtgactngttgagtatgtcatatg

SEQ ID NO: 25808 - DNA, 342 bp, Oryza sativa
  unsure (1)..(342): unsure at all n locations
atatgagctgntttgtggataaatccaaattatttactgctaagctgttaacctgtgaataattttgcatttgagcctccaaatcttgcttgttctgctgaatcctcacaattatttgtttggtaatactatggaacgtttgcagacttgtcttgtgtgggtatcagtatctttcaactagttagctcgagttgttttttttcataattttattgacccgttagtttactgatngtttatactctttgatgtgactagattttggagtactggcctgcaaggggaatggtacagatcttgtaagtatcctggaggaatttagattcctattccttctattat

SEQ ID NO: 25809 - DNA, 416 bp, Oryza sativa
  unsure (1)..(416): unsure at all n locations
gagtagaccaaagaatcagatgttgatacttgatcgtccaagcaaagcaagacaaataagtattgatgagttntgatgcaagagctatttaaatataccatttgttccagtgagtctggcccactcactctcgcaccaatccctgaagtccattgcctctgcagcaaaacgcaaacagctgttagacaaagtagacgataacaaatggttttcagaacccgagtagaaatgctaccatacctgtttgcctgtttgctgcctctgctttccctttaccagcgtggttggcagtaggagcagtagaaaggggcagtctgctggcctgngaattttgacggttcattggggactggtctttaatactggagcttctagtctgacttgaaagagttgggaattctgacctggttaacata

SEQ ID NO: 25810 - DNA, 495 bp, Oryza sativa
tttggctggcgttcattaaaggatccactgaataaaagatacatgctatatcataaaaaatatgcacctcctgattgtgaccgcgggtgtgttttatgtggacatggaattgtggagaccatgttgcatctaaattctgagtgccccttttcaagatttgctgggccgttgttaggattttctggaaaacatcagacaatttggagaatataatggttggtgtctatcttcgctaccgagaaagatgctttatcgagaaaattttaatggtgacttgaaaagtttggaaagtgagaaatggtttctattttgaaagcaagccagtttccatgttgtcttggaggtgtctcttataaggagatcttctactccttttcagctatcagagagagagagagagataaagatgtagccatgtattggatcagtgtcttttaatatatctatcgtaattacatttcttcttatatattaaataaagcatgcaataacaac

SEQ ID NO: 25811 - DNA, 411 bp, Oryza sativa
  unsure (1)..(411): unsure at all n locations
tcgtgcaggagcgagaagatcagttcacagtcgtcgttctgctaatatcaagtggagttctcccgaagttgacctatacccaatctttcccagaagagtagttccgctagctttctagatcgtgtgttgtttgcttgcgtgtacgggtatggtttgcatcattggtggggatgcgaccatactangttgtttgcttaagcaacttgaacaataaaagtctactcacaacataacagtaggcaagtggtttagtaccttatctttagcaacccctctcttncacctctcttccgtcctggcagcggatggtcagtgtcagagataacatcaattaaagtcaccaatcaatggttcagttgaaagctacaaggtatcccagtgccagaagaaccctgctcgtgatccacattt

SEQ ID NO: 25812 - DNA, 461 bp, Oryza sativa
  unsure (1)..(461): unsure at all n locations
tggaaattttgaatggattattcggagttgcggtggtactccttatggatgcgatnttgcttattntcacaccattcggcgctatacaaggcaaaactcccaatttgggtgtgttaactctatgccacgcttaaatcgcggttgtccttggccagttgtctctgttatgtggaccaaatggggaactcattggcagtcaaaatggttctatcataagattccagcagatctgaaaaccatggaaaaatgcccttttgtgttttcttgtaaatctttgagtgtcatctcagatccagctgttactttgtcaaaagactttgctgacattcgccctcgaattgaagaacttgtctctaaatttagtgttcgagacttggtcgaggagttcatttatcttggtattcgacctctntctgccaactggactttatctctnggtgaaattcctganggggtctagt

SEQ ID NO: 25813 - DNA, 381 bp, Oryza sativa
  unsure (1)..(381): unsure at all n locations
ctctcgctcanggtccttggtaaggattgaatccctgtttgaagacgtacacttgaaagtcatcgtgcagctgctgcatcatgttgttgatgttggtgaaatgagcatcatcagtctgctgccattcttgcgtctgtgctatgtgctcctcaaggatgtgttggatctctcccgtctgcaaatcaagggtatccattcacctagtgatttcacccaagtcccaacgagaggaactcgagcaccattcaccgggagatggaggcataccacttgatctatgggactaattgcatcccctgttggcttccaacctgcctcatacatctgcacgggaatagatgatgatgaaccattgngacattacttgcatgttgcgtgtct

SEQ ID NO: 25814 - DNA, 176 bp, Oryza sativa
  unsure (1)..(176): unsure at all n locations
ntactgttccctgngattgggcttgggcctttcctgcgcatcttatgttgaaagcgaagaaagcccccttccgggggggcccgagccatcagtgagataccactctggaagagctcggattctaaccttgtgtcagacccgcgggccaagggacagtctcaagtagacaagttcta

SEQ ID NO: 25815 - DNA, 394 bp, Oryza sativa
  unsure (1)..(394): unsure at all n locations
tgtgtgagttctgattcccttattttctcatctgttccaaggttctacttctgttgctgatggctangtaattcttttggttagttgctgcctctagtgcanttgagatgctatgcaattttcctgttcagtaatttagttgtttgaaacttggacggaagaaggcgagaggcaatctgtgtatagctgtgtgcataaaatggtctatttttgtagtttagctccatgtcagttctttttaatgtgcctcgatgtttaaattctgagaaaaaagacaaagaacttatatctgtaatgtataataatataaaatgtgtagtgaaatttctgcaactgataacctgcaaactgttccttgtaaaataaaaacaataagctaaacatgtgttntcat

SEQ ID NO: 25816 - DNA, 481 bp, Oryza sativa
  unsure (1)..(481): unsure at all n locations
tactaagctgagtcatggtatacagctntttgccattatggataaatacttcttttagacttcaataatatggtctccatatgttntgttggttatttttatcttgatacgctagttgctattatttttggactacacttgttttgagtgctagattgtaataatgggctgtagctcttttgagcaaagaccgggatattatattccattatctaaaaaaaatgcgagcattatttaagcgttttgattctacctcttacaaacggatgatagttggtgcctcatggtatatggtactagatatcttttcaagaatggtaaaaactctttntaagtttaagttgatatgaaaagccgcccaactgcaatagtaaaaaaaaggttgtcaggacgacatggaatangcctgatcggctgacgatcgacacacgtagttaggtcgttgatttgggcgatcgtgcacgggcattactccacaatt

SEQ ID NO: 25817 - DNA, 451 bp, Oryza sativa
  unsure (1)..(451): unsure at all n locations
actagttgtggcactggcgcgtttattttctataccctttcgttaancctaaaaaagaaaacgagtcctttagattagatactttcttctttttntagaaaattggtatttgcttctgcaattccaattatatcaatactttactcctaatttattactcctagaagtttctatctatggggacagacaataccccaccccaagaatagctgatttgatgatgatcaatttataggatatgttcgccgtcttgcttcccgccctttgtttatggcagtggaaagtattcttccttttatcttaggaattctgggaacatttcaacaaaggaggtctttcacaggtcanacgagatctaagacttaatctacaagaaattactaaactgaatctattcctattaaaaaaatctgattataaaacccgatcaaaaggcgagcgaataagtgat

SEQ ID NO: 25818 - DNA, 398 bp, Oryza sativa
  unsure (1)..(398): unsure at all n locations
atactaagcttgtatggcggcttgcattctcgggattagtgcttacatctttatgacactctaatcctgtccatgtaaatcgtcgagttatcatatatgctatataatctagatcgaccttactatctgatctcgtcggctagcctctatcatcaaaaacagccgataggatccgatattatcgtcaaattagattatatagcatatccaccatcccgaanagggcttcattggctnttntagatcttatgtttctctntatgcttaatgctgcatcaattgtgtttgatctactaagcaatatccagagccataatatctagcttgcttcaatctgtgatcactgaacttattcatgaaaatcaatatggtttcataaagcaaaggacaattcacga

SEQ ID NO: 25819 - DNA, 427 bp, Oryza sativa
  unsure (1)..(427): unsure at all n locations
ngacgtcccgctctccgtccactaccctcatggtccttatccttcttctttctttttacatgtaattactagccataaaggctatttgtaccgtgtgtttccttctccttaatacaagtacatcgcgaaggggtttttaagaaggcactacacaagctgtcctcaatctggcattaagtagctagttattatatattagtgaaaattagttctatagcatggaaagttcaccattttagacatatagcaccgaagattctttgttcactttaattgcatccaaaactttctctgttagtgtttttagcattccgtcaactctaccattagtcatcacaacatanccctcttctttcttcctcttgcttcttcttccaactgcacgcgagcaccagatcaagataacttactaataattcatcacact

SEQ ID NO: 25820 - DNA, 484 bp, Oryza sativa
  unsure (1)..(484): unsure at all n locations
actcagctttgcttggcaagctctattattaatagggaagtaatgtttctctatggcatttataatctggaaattggtgctaaggatttcccatataggggcttcagacaattcggacttgatattgcaaatttagcttgagtaatgaatggcccatatcaaacatgtttggtcacaacaatctgcaacgatctgactggcttgatgcacgatagcttgtcagcattcattcaaatgcatatcttagtcgcattattagcttagtgcatctctgttggttatatgttgaacatatttcccaagcttttcgttgatcattttagtcaaagcctcaaaggggaaggaaaactattgtccagccttcacattagtcaatagggaaatagctctcaattgcaatgtattttcatttaaccagataatgcttgcattntctatangctcaagtccatagaagtgtccatacattcagagaagtgcaaca

SEQ ID NO: 25821 - DNA, 484 bp, Oryza sativa
  unsure (1)..(484): unsure at all n locations
acctataaaactcagcttggatgaactctgaaatctgcaagtatttaacgaaacaatatcttagttgtgtaccttaattntattccagtataacagggttgctcagagattcattggacactatacaacaaaaacacagctgcgtatccggatgaggattcgatgatggtaatatagcttatgagtattacaatgcagcagcaggcaaaataatctgagaaactttggtcgagatagaacaacccttcaatatgtttgccttgtaaaacagtctgtgcatttcttctggatggaataatgaccatgtaaatcatcatttgtagagtaaagattgatgagactaatcaatagaacaaaataattaaaaataacaaaaggcagaccagtngaataaaatccagatctgaaaggaaaagaagcaaatgctagattcngtaccaggactcagttttcttttttcagcagagtagtgacctaactggag

SEQ ID NO: 25822 - DNA, 449 bp, Oryza sativa
  unsure (1)..(449): unsure at all n locations
nntcttttgngtttgtgtggcatatacattcangatcttatcttactcgaaacttgctcttgttaggctgaagctggtgacacacatggccctgtagaggtcactagtgcagagggggtagatattgtggatggtatagatgcagcaccagatgcgatgcctatgacaccatcaggaagtgaacttggagctgaacaggatgatgaggaggacgatgactccgaaaggcggaaccaatcaattgggaaaaagctatggtctttcttcactacatgacaattgcagagggctactgaataggttatttctagcgtttctgttttcgattcatgacatgccattcttggacactctaggtgtgtgcttggtgatgatgatgatgtactaatagaatttcccactttcaattatggtctccactgtaattgaaatatatttgtagtagacat

SEQ ID NO: 25823 - DNA, 320 bp, Oryza sativa
tccatagcatagcatctgtgtcctttactgaaaattatattatctcctgattctgggtgcaactgagataacttctgtaagagtgctatcacgtctcaaatttcgaaagaatggtttctgcccgaggggagcgaaataaccgaaatttcggatttttttctcgtaccaaaatatatactctcaccgtcccaaaatataacatgctaaaacttatatgggaggcctacaatctagacaggctctgatacatctaatcccgtcctaagttgctgaagatggattagaatctctctagtggacatcctaagttgctatatatt

SEQ ID NO: 25824 - DNA, 413 bp, Oryza sativa
  unsure (1)..(413): unsure at all n locations
cgcgtgctcctatggtttccacacttcagcaaactagatggctgcttaataaatnagtaaactttttgatccgttccaggctccaggctagctagatccacgtactttgtggcagcaaagacttttttgcgtaggtcgatcgaacacttgtcgtgtatgcatgaacgccatcggttctaattctaaactaacaccaactaatcgatcacgggcttctagctatagataattaattagtactaatatggagtacatgagtaatgtaatcctaacaagaacacgcctctctggtgcctgaaacttcacgctgctcgccactaatcgagtactctatttggtcagaagagaaataaaatggtatagcaacaacacatattttgcacatcggcttctatgacgctttcacagaactt

SEQ ID NO: 25825 - DNA, 450 bp, Oryza sativa
  unsure (1)..(450): unsure at all n locations
cacctacaacagaggttgagtggctngagcctggctttgatcgctgccttgtgaaaggtgtttgtggtccgaatagcttctgccatctcaccgtgactggagagacaagctgctcttgccttcctggttttgaattcttgagcactaaccagagcacacttggttgttggagagcattgccaaccggtggctgcgtgaggaacagctctaacgatgagacgagagtgacaaccacgatggtcgaagtgaagaacactacttggttagagaacccgtatgctgttctaccagccacaactagtattgaagcctgcaaactactttgcctctccgattgtgcttgcgatatcgccatgtttagtgattcctactgctcaaaacagatgcttcccattagatatggcaggatgcctggtaacaccacactctttgtgaagatctacacttacc

SEQ ID NO: 25826 - DNA, 444 bp, Oryza sativa
  unsure (1)..(444): unsure at all n locations
gaaaactttgatagctactattccatttgcttcagagtcaagtatacccttatatactgacccatatgtccctgagccaagcaagttgtctgaagagaaaccatttgttgctttgactaagtcagcatatgagaagttcttcatctccgtgaatgaatggcgatctgattgtttagatctcttactcctcttcaagataataaatgctacacatgacaaagagaccaaaacaagagccacactaatcccaattatctttagattgcgggaagtgtgccggtgtctagatgatgctaagcanagtggcaattgcaacattggggagctagagcataacataatggtcccttggacaaatacctcactagaattctgaaatatccccccttctggcatctgaccttctanggttgtgaaggacangttgagaagcttcaaagaatt

SEQ ID NO: 25827 - DNA, 314 bp, Oryza sativa
aataaaggggtttgggatttagggtatgtttctaattaatagtaaatgtatattaatatattaaaatgaaaaatatttaatttataattaataaaattgtaaatgtatattttagtataatattttgatattgtaatttgtaatatgtatttattcaaatgttatgaaatatgattagattatattagatttatattacttgaataatttttaatatattcatgttggatttaaatttttttcaccccacccataggtaataaatttgaatatttatattgttgaataatatatatttatattataatgaagaa

SEQ ID NO: 25828 - DNA, 410 bp, Oryza sativa
  unsure (1)..(410): unsure at all n locations
tgagagctgagaaggatgtctgtcagtagattgatgaacagaggggggaaccagcangggtgacacttgatttatttatgtaatgaacttaaaacttgctctgtgatcaagccagcggctgggagtagttcccgcgcgcgattcccgcgtagcctccattctncggccattcaaaattcactcgtttttaccgattaatcatattcttggttgtgcctggtcaacaacttgttgaatcacatacacagataaagtgaaatatttctcactaataaaatcacaattccagatcaatagaacttgcaatatcttgacgatgcatatgtgtaatagacatgaaatatttttcgcatgaatattaacacgcactgttntaagatatcaaacataaattatttaccttctcgatc

SEQ ID NO: 25829 - DNA, 434 bp, Oryza sativa
  unsure (1)..(434): unsure at all n locations
tccacaaatggatttcttaagtctgtaccctatatatgacttgtatttccataacaaaaccctcaagttatgttatgtatatttaattgtgtaagtcacaaattaagagatacaaatttctagcatccacataatggagctatgagtcataaatgaggtagaataatcttctcttattagagctcttgatgagctcccactgattgtattatttatttaatggaagcataatatcttatttttcataaacttaaatcacttaattntacttagtgaattatcatctaagtaataatagatgtcagaaatttctaagggtgaagtgtctcgaccttaatgagacgtccattctcccctagaaatgtggccgaataataaggccatagtttcgacaacgtctcataatgattcaacccanaataatgcccttaatc

SEQ ID NO: 25830 - DNA, 340 bp, Oryza sativa
  unsure (1)..(340): unsure at all n locations
tcgtcagatattgctcttgctgcgttgctgatatctctgcatgtgtgtgtgcatgactntcagttaatgcaccgaacaaaccaaatcgatcggtgcattgaatcgatcagcgtgtgtgtgtctgcttcaatggaggtagagatggttactaccactactactgagatactactctcgttggcactggtctactggctgttgcatctgttgcctgcttgttcctggcaggcagtaatagtaacagaggtggtgatattcaagattcttcacgttcacggctgggtttaaattaaatggttgatgagccatgggatgcacggggtctgggggaccggaactc

SEQ ID NO: 25831 - DNA, 469 bp, Oryza sativa
  unsure (1)..(469): unsure at all n locations
tganggcatattcgttgtttaccaacaccaccatcttatcattctctgccaacggcatccgcaatcccttaaatgttttcgcatctaaaatcaccctgatggtctcttatgtacgttagcctaccttcctcaacacaaggaaagcagtcaacctggccttgagaggacaaccgaccacaatataaatatgtattgaactgatcacgacggtaatgacaataataacaatggaattcctgcattgatgcttttgtacgtatagcggttcgagtaagatcaaccccccttaaatttatacctacctganaactgtgttcaccgtacgggaaattaaagcagtgggtgctgtaaagccatgtaagcagggtgtatgctagacacatggtgcaatgggccangtatattcagaataatgatatcacgcttcanggtttctaancgaaaatcaccaacaatcaaacaggcaagc

SEQ ID NO: 25832 - DNA, 276 bp, Oryza sativa
atttatgctaaaatttcttgtgcaaaccttatgcagctcttggccctgtcatcgtcctcccaccggcagtcgccggcgccgccgcgcttctcgccgacggcggcgacgctggcctcgaagtgcctcaagctcttggacacctcctcctcctcctcctccttggagctccagttgatgagcatggcgtcgaactgcgcgccgaggtccagcttggcgaagtggcagtcggcgaggtccgagatgttctggccggcgccgccggcaccgccggcgtac

SEQ ID NO: 25833 - DNA, 433 bp, Oryza sativa
  unsure (1)..(433): unsure at all n locations
tgtttccccgtgcaagttgcacgcaatcttctgaacattttctttgacagtctggtggatgcaaacttgcatggtgaagtgaaactggagcatgttgaaagagtttgcaaagtcgcatgttggtgtattcaagacaatgagtttgatcgacccacaatgagtgaggtactacagtttctcgagggtctatctgaagttgagacacctccaatgccaagattgcttcatactcttgcaggaggtttagattcgaaaataatgtaatcactagttttgatcgttgttcgttcacctaggtagttctacacgtcacatttctcatctgccgtttatatcgtaagcttccttgccgcttcattatgccacccttgtaatgatngtaaccattattcccactcccagcagatggtaaacttacgtgttacatcctaat

SEQ ID NO: 25834 - DNA, 413 bp, Oryza sativa
  unsure (1)..(413): unsure at all n locations
nggaaagaagatcgggagtggatccttcggcgagctctttcttggtcagtagtctatatctttctcatgtttatcttttctgaagaacatgttattattatgtttggaaatggaagatgctcactttgttgatgttttcttttttgttcgcagctgttaatgtgcagactggagaggaagtctccgtcaaattggtattggattctgtccttcatgttcgatgcacctagaagagttctttatctttggnggaagaataatttgataaaatttcttatttaccgtgagatcatgggatgggaatgaacagtgtagtaaaatgtttgtgtcgaatgttggtcctttggtactattttggtactattgcgaannttggtatagtgaaacctttcagacattggtgttgctgacct

SEQ ID NO: 25835 - DNA, 461 bp, Oryza sativa
  unsure (1)..(461): unsure at all n locations
ggaattaatcttgaccttaaaggtntcaaatattaacttatttgttntcaattgtaagttaaaagttttaaacttgagtcaaaagttttcaaattgagtcgagctcttaaattcgatntacaaaattttcaaatctaagttgaaagtttttaaatttgaatataaaactttcaaatcttaagtcaaaagttttcaaaatttcgtcatccaccatcgagctcctctattcctccccgtggtcgccggtaagctcatccccgtggtcatggtgccgatgaggttgagctccttcccgtggttgccagctaaaaaaactcccttctctcttgcccaatagcttacgagcctaacgagctagatcgaacttgcagcagagctgagccaagctagcattctaacccgctaggataacgagccgagctaagctcgtattctattgaacgagccggaccgagctgagc

SEQ ID NO: 25836 - DNA, 413 bp, Oryza sativa
  unsure (1)..(413): unsure at all n locations
ntngcttttccgctggtcgtgtagacgctgcagcttctgaatatccgctcttcgtggaggttgaagccgacgtttgggaaagcgagcaaggcaagacacatcatccttgagcatattgaatcccagtttataaaattattttgatttaaattattgcattatcgctttacttaaattcccgcgttatcactgttttatctagccatgcctatttacctttgntatgaccttattattggtattgttattattaccttgctcaccctaggataaacaaaaccccaactagtgggtactctattcatggttccactagtatgaatntacgtagatgcttcgctgattaattaggcaacattaggtggttttataactttagaactttgggaattctcatatcatttggacactat

SEQ ID NO: 25837 - DNA, 422 bp, Oryza sativa
atttaacacagattatgctttatataggatatttaccataaatgacagctcaagcagagatattacatcacattaaatgggtgcgcgaataaaaaaaatatgtaccacgcactcttttgttaagtggcaactggcaagccgcataatatatttagtaatgtgggcttatatagtatgatttaatatagcatcaaagattaccaccatataggtcataaatctaaatatccagatatctacaaaaatgaaacacaaatttatgaaccatcaattcatggcaacgcattactctataactgtctatattgaacagtagacacccataaacagaagaatttgtgtataggtgtctttatctgatgtgccaaatgtttaacaggagggatctgaatggagttcctatatgatacacatcgacatta

SEQ ID NO: 25838 - DNA, 319 bp, Oryza sativa
tgtacaacaaatattttttactagggctctaaaaaatactaccggggtacaatacagggtcacttcctgagttctttctttcgtacattgagcaagtccctgagtgttgtttgcattacagatccaagatatatagctatcagatggctagaaggcttgacacatggtactttctgagcacgtcttacaaacatcatgagagtttatctgaaggaaaaagcttatggatttaatgaatcctggttgaaccagatcttgttatattacctaaagttttcaaactattggtgggtattgaaaccatactctacaaattttg

SEQ ID NO: 25839 - DNA, 310 bp, Oryza sativa
atagctagctacaaacaatataacagcccctttgctactctggagctatctttgggataactagtgtaaagtatattctgttaaaatctatgttttatcatgtcacagattcaactgacataacattcttaaatcaacactttaaataattcgcctctggaacggatagtttattacgcttaaacatcataaagaaagctaaattgacactctttaccaaagaaatctaatctttatgttcacatactacttacagggcactttacatttcttcaaatgacaaagtcatgtgccatgtagtgggaggaca

SEQ ID NO: 25840 - DNA, 485 bp, Oryza sativa
  unsure (1)..(485): unsure at all n locations
agcttnctggtccagtgagaacacagggtccttgtcatatggaacaaaggagcggatgcatgcgttaagagcatgaacaataccagactattatgccattcccaacccaacaagctgccacctaggataaaaaataatataacaagtgaataaataagaaaagatgcatgagacatggtttctacacaacattcaaaatatcatgtgagataagtagcactaaattntagtatagaatagtggtgctggcattggaagagtagtgtctagtactaatttcctaatgatgtggagtttatagaaactgtctagtgtcttgggttgggaatggcctaagtcagctacaagcatatgtgaaggagataaagagatgagagagatanaaaataggctatagtatgaacttcaagacataatatgcgtatgacatatgggaaatactattaatgatgtagatatnattatagtaaatattgatgaataac

SEQ ID NO: 25841 - DNA, 427 bp, Oryza sativa
  unsure (1)..(427): unsure at all n locations
taagcttaacgcaaccttgtggtttaagtactccactaaaatagatatgtgttatatcattacaanaactatttctaaagggagcccatgagtccgaggcaatagggtcatcacacaagatgctgcacatttgatgaacatgtgaaaagtattatcgcggaaatcatttgtttagaagtgtgatgaacataattgtacattcaattaataaagttggaaaagtggcttatagttgtcatttcacattgattggatatgaaaataatggtttataccaatctttgtgcccatatcattgtttgccaacaatcaatagaacttgatagttacttttggtgttccttttggtatgtactaaaatggctacatattttacaacttgccgtatccttngctgagatatacctgctgtttctctctgtatact

SEQ ID NO: 25842 - DNA, 401 bp, Oryza sativa
  unsure (1)..(401): unsure at all n locations
agcttctcgaaggagatatacaagatcttgatagcattgttaggtgagatcttcatgctgctcagctaaattctagaatggcatgccagtgtgccaccatttggcagttctttaatttctaaaatataaaattgcagggaacttctcaatgcattcaaaagggactccaagatggagccgaagcagctcattttctacaggttcatattctccatgtttgttttttnttcttaattgtacgtgctcctttgttgatcataccgagacactgataattgtcctgtttcatcatcagggacggcgtaagcgagggtcagttccagcaagttgtagagagcgaaataccggagatagaanaggtataagcaatttttttcttttcctggttacgactctccatg

SEQ ID NO: 25843 - DNA, 494 bp, Oryza sativa
  unsure (1)..(494): unsure at all n locations
acacttaaatactaagcttattaccgattaaaatatntataagtaaaaacttaatacacgtgttcttatcaatttaaaagcaaacactgaataattatccacgatgaataaagccaaaatcaactattaattaagtttcaaattttaaattttcgcttacgtttattagccgaaagctaaatgatgggggtgtattcttgacaactatactgatcatctcacactcagcagtatcatttttaaaaatctaataatatcttgcaaaaactacattggaattatgggtaacctgatcagtcaactcccttgttaagcaaagatctactgctcttggtctcttgggcttcattgacatacccaacattccttcatcatgatgcagtatctacagatatgaaagaaccaccatggttattaaaccttgtgcttacaaatagtaatcactccagcatattatcaatttcaaatatgctgaaacggaatgtgttaagata

SEQ ID NO: 25844 - DNA, 383 bp, Oryza sativa
  unsure (1)..(383): unsure at all n locations
ctttgcacattcaaccgattgtttttcttagatcgtcctgaaaggttagcactctgctgaacaaattcacccccttctatgtttaacacaaaacctgtatacttgtcagatgcacttatatcttcaacttgcgctatgtagtgatacaagttcccataaacttctgagtatggctctgagctgcagcaatcaatcaaaaatgtacttaaggtatatccacaactaaacttngttccagtgcaaagaaaaataaaaggagaggagggactataggtacaatgcacaaagccaacctagcattggacagtttcttgaatgcttcctagccattttcacctgtgaacagtacattcatgacagctttcttagatacattattttcg

SEQ ID NO: 25845 - DNA, 444 bp, Oryza sativa
  unsure (1)..(444): unsure at all n locations
agctnttcagactatagttcccactaatccaccctatattcaaacccaactttattacattttctaacatcaaaactcgtcaaatcaaaccccaaagtagatcttgtgggcatttttgcttgacgtgtcatcttagctggcacttgagctggctatagatgatgatttggataagaaaattcataagacgtttaacatgttagccaccttttcctcttttccccttcattgtcgacaganagagctgaagggccaaaagtgggctctttccttggttaaatgtactactactactactactcccactgtttttaaataaatgggcgttgttgactttngacangacnnttaaccctcatcttattttaattttanagcaactatctaaaatatatccatgctaaaataccttaatgtaatcatagattatgatttatgttttca

SEQ ID NO: 25846 - DNA, 405 bp, Oryza sativa
tactaagcttacttgtccgcgcgttcgctttcgcgaatgtcctgcatcgtcgtctgctttgtgggggttcgcccggggaggcaattcactgttgtaaacccagtttgcccggccagctgcttgtcgtgtcagcagctcgctatacttgacgaccgatacatcgccgatcatcctgcgggcttcggcttcagcctggtcgagagtcaacactgcaaaagtaaagggtgtagctacattaaatgtcgaacaaggcaacataacaaagcacaggagtgcatagcgaaataacagtcttactgttcattccctcaagaagaaccaacttcggcaaaccgtcaatctcttcgtcttgatcaaccgtgacttgccatgactgggagaggggaaagatgcgaagcatacaaa

SEQ ID NO: 25847 - DNA, 447 bp, Oryza sativa
  unsure (1)..(447): unsure at all n locations
agctntacacatgttatgttcaagcatttactttattctagatttctacaaaaaaaatgacgttgttatttacataaaaactactccatttggtcaaaatatatatattntttgaaaattcttacaataaacataagttaattttgaacgttgttattatttttatgcaagttgtaggtatatgcaaatgacatagttaagttttatataaataagaaaaacattcatgatactccatgcatgtttataactattttttatttatgcaaaagaaataagtggtcaaaattgtatatcttataaacttctaaaagtataattaaaaaaacatcttttggggtataaccggaggaattatgttatatactgggctaaatgtcttgcatatccttcctattgcttaggttgcaatttattaatctccggataattggtgctaattaagct

SEQ ID NO: 25848 - DNA, 462 bp, Oryza sativa
  unsure (1)..(462): unsure at all n locations
ggctgtgggggcgcatacgctctatagctcgtatcttcttgtggttggcctcgatgcctcgggtatagaccaaatacccgataagcttgcccgcaggtacaccgaacacgcacttatcggggttcagttttatgcgggtggagcggagactctcaaatatttccgctagatccgagagtaaagtctcttggttgcgcgtctttacaaccaagtcatcgacataagcttcaacattacgtcctatttggctacccaaagaaatccgagtagtacgttgaaaagtatgacctgcattatttaacccgaagggcattgtcgtataacaataagttcctatggnggtaatgaatgcagtgttttcctcatcctccctagccatgcgaatctgatggtaaccagagtatgcatctagaatacacataatgtcgcaccccgctgtggagtcgacaatctgatctatgc

SEQ ID NO: 25849 - DNA, 339 bp, Oryza sativa
gctttcatgacaaggcatttccaatgccgactcttgtttaccatatgccgacgagaggtgtcccataccaacaacatgttatgtcccagaccatactgtgccaatgtcacaccctgaataatcaaaatatataaaatgttgtttaaatggaactcttagaatttattctaaaatccctaaagagaagatctaatttttaattaataaattccaatataaaatggggccatataaaacttcattaaatactttgcttaattctataattcctaaaattttctgggatttatttgagctaaggaagtatttttaataaatggaattgcatttcatgaatga

SEQ ID NO: 25850 - DNA, 389 bp, Oryza sativa
  unsure (1)..(389): unsure at all n locations
tgcaagcnttggatggttctctagagggttgttaattgttatatcaatatatctgggtgctggtagttctaccactgcattcatttcttgaaaatcccatgtagacaatggcctcctcttcattctgcgtgtcaaggaacgacccataattcccaccatgttgatatcctggaggatcggcaaagcggcgccctatggatctatgggccacaataccttcaccacgagcaagactatgccagtcccagacgaaactcccagcactgctcaatgctgaagatacagtaactgaggatggaatggccaggacaatagtgtatccacgctgaccaagtatatgcaatgcaggagcaaagtccacgtcaccggatataagcataatggatgat

SEQ ID NO: 25851 - DNA, 315 bp, Oryza sativa
tggacataatgataagcattctcggcttgggaaaacaccaagccaatgacttcttctcctgtaacaactactccacaattatgcattagtttacataattgactttgttcacatcacactgactataacatagtctctggagtagttcgctggccaacacgaaatatgctgtcttgacaatggaagcttacctaacagtgattaataagcttatattccagataattcatatcgcacaaaagatttaataacaattaaaggtctatatccatgaacaccgatactgaactgaatttccaaatatgctctatttat

SEQ ID NO: 25852 - DNA, 242 bp, Oryza sativa
cactgagagcacttagcaacgatgatgacattttttttttcttctcacaatgaggctgtcctggtcacagtgttgtgctcgtgttctgagacactgcttgttcgacacactatctgaatatattctttcacacagagctgctatactctcatcgggtagggtcatcacaacgttatagaggaagctaggactacaacgaaacaatgcatttatgctgccgagcttcagaaaatatcgtgcat

SEQ ID NO: 25853 - DNA, 309 bp, Oryza sativa
tcaccacagttcagtggatcacctcgtatacggaaagggttcttgtatctcttaagatgtccacaggagaaaggaacgcatgctgcgtgttcctgataatcaacatcttcactcttatgtacaagaaccccaagaacagctagtatactcatgctttgaaagataccagtgagaaagagtgcaccagatatggccatggtcagcttcagatattcatgacccaacatgtgtgataaactgaaaacaatacggatgggaatgccgcatatgaggcaattacgaaagtgttatgatgtcgaggatgggact

SEQ ID NO: 25854 - DNA, 451 bp, Oryza sativa
  unsure (1)..(451): unsure at all n locations
ttaatctncctgttcgaaagtgtaccatcagccttacataccagtacattatcgaagttataattgaatcacaagcaaaggtagcaacatctctgatttccacctctgaatcatcttccaataactcctaacataattaacccaagaaaaatgcaaggtaatcaatacatgttagatatagagcacttatgttgtacaaaaggcaagcgatatgttttatagttcatatgaacaaagcaactaaacacacctgaatatttacaactctataccatccaccatcatagagccactagtcattcaatgtagcagcatatataacaccgctctgaagtttctctgactgtactaggacatcatccttccagatctgattgacaaaaataanaatgccatgatttagcttacgcacaaaccacattgactgcaattaagattataacacaacgtc

SEQ ID NO: 25855 - DNA, 300 bp, Oryza sativa
cacctatgtctccagttccatgacccaatatcttgtatctatgcctcgagaggataatccgcgaatagccatggcgaaaatgctccataatcgcggagcaatcgaaatgaaagccgaacatctatggaataatctgagaccaataggctgcctctgaaaaacagcccaagaaagaaaccgagttccagactcgcataggtaaatcaaagcttatccagctcctccaattgatacccgacacattgtatgaatccatcctcgcggaaaaatattcatcataacatacaggggaaaatcccc

SEQ ID NO: 25856 - DNA, 449 bp, Oryza sativa
  unsure (1)..(449): unsure at all n locations
acgttgactggtggcagnggttcgatgtgctggatgggctactgggcccgtactggaaggcggtcggactcgccttcaactgcacgttcctcctcttcggctccgtcatccagctgatcgcctgcgcgaggtcaaattcctttcctccccaactcaaccaaccaaccatcactctcccactgtcacttcgcagcgccagtgtaaatatgtagccgtgctgctgcgcaacagtgtgtcgtggtgacagattgggtttgtgcggatgggctgaaaacctgaccgataatttggtggtggtttcttcagtaacatctactacatcaacgaccggctggacaagcggacgtggacgtacatcttctgcgcgtgctgcgccaccacggtgttcatcccgtcgttccacaactaccggatctggtccttnctgagcctcggcatgaccacctata

SEQ ID NO: 25857 - DNA, 421 bp, Oryza sativa
gacgtccacaatccaatcatctgcatcacaagcttgccggcgttctcccttatctcctgatctactgacatgtgagagcatctaatccaaagtgaaagcttttggtaaaagaaactagcccaaagtgaaaactttgtctttaggatggtccatgttgaaacttatgtaaaaatacctagaccaatgtgcaatttactcaataaataataattctaatttcttaataagacgagtggttgaacagtacaagtaaaatgtaaaaatcccttatattagaaaacggagggagtacgtggtttcaattctctctcttccgttcagttgtgttctctgccgagtgatgacttggagctctctactatcactaaaaataatataaatcgttttgctataaaggtaaatcggtaatttactaatccat

SEQ ID NO: 25858 - DNA, 408 bp, Oryza sativa
tactaagctgccacagtgctgcggcgtcgtctcgtacgcgcttgtggttgtcttgtcaacaccctgtgtgcctctgcgggcgccaccctctgcacgtattcacgcccaccgtatctggacaccttcccgcgccttgcgcggattacggctgactgtcagggaatatgaataccgcctccttccgttaacctgtgacgccttccactgctcccgagtgagatggagcttcccgccgatggtgatggggcccgtgagaagctgtggctcattaccatcgacgaccttgatgcgacctaacgcctcctcgatcgacatcgttgagaggtccaacagatattcattctgtcgagcgacctgcctgtacttctcatgtacgcaatcggatgatcatcttaacagctctctcct

SEQ ID NO: 25859 - DNA, 424 bp, Oryza sativa
  unsure (1)..(424): unsure at all n locations
agcttgatgaggttgatatactgcaatggcagatcagttcctatagtcattatggcagagtagtaccaagagtcattatgcagcatactgttctgtgtgagtttaagacaaactttggggttttctaccgtagtcagaaaatagaacttgaactttgttgaaatgaactgctgtgtgtttggtgcaacgattattaaaatgaacatttgtaacatgatcacgacacctccattcccatgtgcacaactacggtacaacacctaataaaatgttgacgactataaaattatttgcatttctcataaaaattcatatcagtaaacgcgtcatcgatcttattttcttatcattatgcatctaatatattntgctagcattcatttaaatataaagaagaataatcanagtgcattcacagcatgtc

SEQ ID NO: 25860 - DNA, 493 bp, Oryza sativa
  unsure (1)..(493): unsure at all n locations
ctaagcttatttcctcggtcagtaaggggagatcagaagtggcgtctatcgtcatatacataagtggcgtttatcgtcagagacatcaaacagttgatgtttgggaacagggagattatcatcaagaagatacaccgtaatcagaatggttgtagccatattttaaccaataatggtcggtgtgagtattgcaccagaatttggcctgatgataagttgtaatttttagcggccctcgttaacgaggagctagtttctgagtaatataatctccttttccacgcaaaatatacttaatgttacacacacgtttaactattatgtttataatctcgatcganatcctcaaaataagaacttattcagctgtaaaatgctaacgtcgtcgatggaggtattattttctngagaatacgcgaaaaagaactacgcttcataccttcataagaagccgatcgatcgatgcattctgatagctattccaacatcgtcg

SEQ ID NO: 25861 - DNA, 430 bp, Oryza sativa
  unsure (1)..(430): unsure at all n locations
agcttccttccatgctcggactccacgacctgtctcttcttcgcctccacctcctcggcggtcacccaccctttcagccatccctccatctccacgccgacgcccatgtcgtccaccatgagcaccttgttgatcctctgctccgcgtacattggccagcagagcatcggcacgcccgcggtgatcccctccagcaccgagttccacccgcagtgcgtcacgaacgcggcggtggcgcggtggcggatgacgctcggctggngcacccatgtgttgacgacgaggccgcggccgctggttcttgccaagaacccctccggtaggagcgcgtcgaggtgttcggtgctgggtgcccgacgaaccacccacaggaagcggtggccggacttgtccaggccggcggcgatctcccgcagctggtgctccgcgt

SEQ ID NO: 25862 - DNA, 389 bp, Oryza sativa
gctcatcatctgaaagctagagagatcagtgtcatatggttgtgtactgcatgctggctgctgtgagatactaccacacacacttcacaccattggagtagaagaaagtagctagcaccaggaacacctgtcccctgccctgcctgtctgtgcatgcatctgagctgagcaaagctaagctgtttcatcatagatatcatcatacacacacactatatctagctgctgcatgcatgctaatgagatctctttccatccatcaatagatacaccaggactcatctattctacttagtacaaatcttattcatgcagatcatgcaaaggtgaagtctctggagaagagatcttcactgggatctctgctagctctgacgaaccaccactct

SEQ ID NO: 25863 - DNA, 486 bp, Oryza sativa
  unsure (1)..(486): unsure at all n locations
gcttgaattatcatccaaggctcagataatgcttggtgacttcttttaagaaaaaagtgactntnttattaaaaaaaagaaaaaagagagtttctccggtgcttggaaatgaagatgaccgttgatccaacctaatctaatggtttacaatacaaggtacctataaaaaggtacttaaaaactatgccaggtattagcttatagattggttgaaaggttagatcnggtaatttgtctatagtatcatattagatcggtataagaagttcagttgttcttcataaatctgttgtttgggatcatggagcagttctgtatggtgaatggccccggaggcccggatgtattatgaagttcccgttatcgattacagggaacaaacatgcgtttagaggtggaagagaaggccgattgacatactgaaagagctatgtaattgatcagaaatccattaatcacaaactgtgtatatgacaataaactgat

SEQ ID NO: 25864 - DNA, 423 bp, Oryza sativa
  unsure (1)..(423): unsure at all n locations
cgacgagccgagctcgagctgctcgcgagctccgagtntttttgtcagccctacctactgagaccaaccgagagcatgatagctccacatgttaatttttttttgccggacaacgagttctggggccaccattttctattgccatcattttcaaattacttgcctgtacaaacttttagtgattaactgtgccattattttcgattttcataattctccgtttcgaatgataatatatgacactcgaaggagaaatatagctgatattgaatgttaacaaatgtacaactggtactcacagcttaatttatctacagttgtatgaaaatatcttgcttgacaatntagaaacccagaaacttgggcatatccactcttgagatggcacaatgcccgaacaagatgtaaacaataattatgtga

SEQ ID NO: 25865 - DNA, 474 bp, Oryza sativa
  unsure (1)..(474): unsure at all n locations
agcttcaattgaagcanaagatatagttttcacttaaacatggngcaaataatagatggcctactaattaactttggggaanaagataaatttcttcaataaaatgggtgtcagtcctcaaagagggaagataaaaaggtgctggtgaaaattgtggagattggagaactgtagttgcacttcaaattatttacagaagccaagatcagagtaatgacatgttatggctggtactgcaccaatcaaccccaaaaaggctagatgctgcatgaatgaatctgcaagccccttgattccaaaacgattaatagattgactacctattatttgaatgttcttaacccctaaatcagtcgaatttccgattatcagatganaatacaacggattagatttgccccttccaacacatagactcaaacagtaatcccacctttccccatccactgagccgcatcgacacaatccccaatt

SEQ ID NO: 25866 - DNA, 480 bp, Oryza sativa
  unsure (1)..(480): unsure at all n locations
agcttgagtatactagctgttcttggtgttcttgttactaagagtggagctgctgattttcaagaacaaccagcttgcgttcctttctcctgtggacatcttgaaggtatcatgtaccctttccgtttacaaagtgatccaactggctgtggtgatgaagcttatgagctagtctgtagagatggcagagctataattcacatcaacacaggaaaatattttgtgaaagacatctcctataacgagtctagattttgggttgttgatgctaatttagacaacagcagttgccctcttccactgtggaataatcttccctacttcaatgacatgggcactaagctgtacacttctgcagttcggtgggctacatttctaaattgctcacgggcgataaacaatggcatgtacatgcctgttgcttgcttgagtgggaatacttcttnttgttatgtctggactacatcgagctcttactat

SEQ ID NO: 25867 - DNA, 465 bp, Oryza sativa
  unsure (1)..(465): unsure at all n locations
tactggtatcttatatgtggctgtgagtcttgtactgtatcatgttgaaggaaggcatcacaagtgtccttctttctcttgcggccatcttaatggtgtatcggctccattccgtcgggcagctgatccacctgggtgcggcagcaaatcttacgagctggtctgcagtgataccaatgctacaattctcattgacaatgcaacataccatgtgaatgaaatcaactacgactacagacgcttttgggtcgtcgacgccaacatatccggtagcacttgccctcttccgcagtggaatcatcttcttgatcagtacaagcgcatagtctcaggccacaggattgagatcgagttggctcctggtgcatataatcatgcttaacttgtatatgctcacgggaggtgaaggacaatggtatatacatgcctgtcacttgcgcaagctccnactattcttttatctat

SEQ ID NO: 25868 - DNA, 342 bp, Oryza sativa
caatgtttatgactctgctgcagtgtgtattataaagcatgcacaaatcacagtttcttccatataccgcgtatggaacaaacttggcaatgctaactggggcgacattgggactcttcaagttctccttgcaattttccattcaatgatccagttctgtggtgcaccaaagtattctcttgatgaactagctacagagcatagttcccgattacagagccgaagatcataaagacatttggttggcaggcaagctaatacatatgagttgtttcgattccaacagcaaagtcattctcctgatattgttgaagtacaagaagatggagctgttaatgtaaa

SEQ ID NO: 25869 - DNA, 441 bp, Oryza sativa
  unsure (1)..(441): unsure at all n locations
tgtgtctaatcttgatgatgctgatgatggagatagtgtctaacataagttctgaacttttcttgtgtattgacaaaaccatcaccagcttgcatgtaattcatcttccatctgtgatagttttgtactccctagttttcttcaccatgctaatttcaatattcttgtttctgctatgctaagaattgaaaggaggtagccttcttgtcagctagtatggtaagttctctaacagaaaattgattntactacagcttcccagtttatctgccgcaccaagttaacttgtggattcggaggatctctttcttgcaatcctttgtttctacccaaagtttgatggtctaatatatctgtaataaatagtatctcgaaggctatggctaccgtggaagtaccttcgagcagacatatcgctgctaccctgcgtctttcattgac

SEQ ID NO: 25870 - DNA, 362 bp, Oryza sativa
  unsure (1)..(362): unsure at all n locations
acttttatatttggcatagcttaataaggcgacattggcaagtatatatgttcggtttgctgccttattaaatcttggtaatattaaaagtctcatcggttgcctgttttctctaataagccaaaacaacttattatgaataaaaattaatttataggtaaaacttttatatatttgttcgtagcgacttataaccaacaccaagaagaaattacatggaaaatatcttataatcaatttctaaatcaagctcgaaaatttaaattgtagcttttgttttgacttgaccacctgatggggctntaaatcttgataacgctgaataaccagtaataaagtgaactataaacccctccaggagt

SEQ ID NO: 25871 - DNA, 415 bp, Oryza sativa
tgtcaccaacggcgagcacttcgcctgacgcgagagtatcattctctgcggctgagcatggcggagtaacgtgcatggagaagagaacaaagccaagcgatatgtgtagcatggtggtcatggcgaataaaatgggatggagaaagcagagaggaagtatacatatgtgttgtgtgctgctcagctactcggataaggaagagcatggcatatatacaataaaacaagcatgttggtcataacacacgcatgggcatatatgcatgttggattgacattgaagaccatggcaactagccaacgacacatgctatttgcatgtcaagttcatactgatgattcatacaggagtaccaacttggcaacttgatctgtgctgtggtacaaaaccattgtggcaagcagctagctagac

SEQ ID NO: 25872 - DNA, 408 bp, Oryza sativa
  unsure (1)..(408): unsure at all n locations
tatgacaaanattntacctatacaaattcgatttcttagactacatccgaacacggatgaacgatgaacggatccacagtttgccttagtctctctaataaaccaccaccttcacaaaacccgctaaactcatatcttcgtagttgccggagatgaacatttgagttggagaaagcattgcgaataatgtaaccggatggttcaaaacatgtcaatattcttntgttatgacaaaagtgtatctttcccattatttcccgtcaaatgacatttatcacatttgaattcaatctattatatattaaaggaatagaaaaaaagccttcaagttggctgtatggctagaaattccacattatcgagaaaagaaaacagagcttatagaatcatttaatatactgaattgga

SEQ ID NO: 25873 - DNA, 467 bp, Oryza sativa
ccactgcctctctctttatataccttcctccacaccagctgataaccactgcctctcccataaaaaccaggcggttggttaactcaccagctgataaccactgcctctcccaataaaccatgcggttggttaacaaaaaaccagttggatctagtgctatatgctcgatccacaccctcagctcatctcccagtcgtatgggcccatgcaacccatctgtatgggcccatgcaatgggtatgcgtgttactagttaaactaacatatcaccatgacaaccactgcatactcactgatgtcaaggtggatgaccctcacttttgctaaatttctgaattatgaagagaactactggtgtttgcacctaactgtgaagtctggtacttgccaatgactcaactatctattgtcaactggtcattttccatttttaacacactctttactgagtcacgtacccattgcaa

SEQ ID NO: 25874 - DNA, 457 bp, Oryza sativa
  unsure (1)..(457): unsure at all n locations
agcttgtcagtaaacaagaaccatgtctagtgttatcacttggtacactggataggctgtaccattggatagcaagatgatgaaaaaaagaacttcacaaaaggtaagatcaagtacaaagtgcttcgactttcctgtacaaaacaacaaanaaatctgatacgtactcgcagtttggagaggttgtatttgatggttcggattagtataacaaccatcaaagatcccaaagaagtttgatgcataaggcgctcatggtaccaagggacgctcggaagcacctataataatacataatagcattaacactttgtgaataatataaatatatagtaaatcaacttgcttaccaatntgtgtacactagcattgaagggtgaatcttgactgagtataagaagaactatcaatagcatgtatatctgattggaggtctttcttgatgcattggagagca

SEQ ID NO: 25875 - DNA, 453 bp, Oryza sativa
  unsure (1)..(453): unsure at all n locations
tcgntctagtgccctgatataatattccaaagcctttgtatgctctccattgcttgtgtgtataaggcctatgttatagagtatataacttcgatcatagggatcaatttctagtcgcgtagcttcataataattttgcaaagcttccgcataatttccttcggatngagccaacatccgttacggtcgttcgttctattcaaataatctccgttccaaaaccgtacatgatgttntcacctcatacggctcctcccttctgtacatagtactaagcgaanaaatctagagnaataaaatagaattagttccatctcattatggaccgaagggngctggtattttccaagatatctctagccaaccttnccacaagatgtttttctaacaccaatgaatctattatgctaaggaaaacgatagctcaagaattctttgtctcacgcctctatt

SEQ ID NO: 25876 - DNA, 452 bp, Oryza sativa
  unsure (1)..(452): unsure at all n locations
tgtgttggagcatcttcttggtgtcacatctctatcgtgtactccctccgtcccataaaaaacgaatctatgaccagatgtaacatattctantacgatgaatctggacatatgtatgtctagatttgtagtactagaacatgtcacatccggtactatgttggttttttgtgggacaaagagaatacgtgtattgcatgtaagcattgtgaaaccaaaactgaaactatctgtagtcattgtcatgctgcgttatgtgggacgggcaggtacatgatgtttcacaagtgggcaaacatagacctcgacattttgtatgctgggatatagaaataccaaaccatacttctgtagtctgtggaactggatctcctgagactctattgttctatgagcgctgtgtattttctgcatgttcaccctgaccccgttatgaacatctgcataaaatc

SEQ ID NO: 25877 - DNA, 465 bp, Oryza sativa
  unsure (1)..(465): unsure at all n locations
ctccgacgtggctgatccccattggctggttgatccgggttagtaatgtcgtgtgggtaaagtgtaccccctctgcagatgttaacaaactgttcgaacagccgtgcccacggtcatgggcggatgtgatgtgattcctaacgtagttttgtttgactactgcttgtgaaattgcttgtgtggataggggttcgatgtttgaaaaatctgcagctgatgggatcagctatgcccgggtggccgtttgaaagttgttggcccgggtggccgtttgaaaagctgttggccgggtgccaaccttgattcaattctaaagactgatacatngcacaaactccgaccggacgagacgcactgtctcaaccgtgtcgtttgagaagcactcacctagtttgttttagaanagagttcaaaatatatcaattgcaaaaacaacagcctttcttcgaagcctgattaaacact

SEQ ID NO: 25878 - DNA, 494 bp, Oryza sativa
  unsure (1)..(494): unsure at all n locations
tcagatgctcaagagagggatgtgccccgtcatcgnctctcactgtcctaccgaccgcctcgccatcgtcgccttctctggcgccgccaagcgccttctgccgctgctccggatgacgcgccagattgtcgaccgcctccgccgcccatggccatgaacatgccgcatgccgtctgcattatcgactcgctgcgcaatgccaccaatgtgcttgatgaccgtcgcgaccgcaacccgtcgccaccgtcatgctcctctctgacacgcagcatcatcatgatgcgaggaagcccggcgcggtccggcgcccgtcatgcgccccttcggacacgcgagtcacgcacgtcttgtgcgtgcactggcagcatgcggcaacccttggcggcggtggcgacggctcggcggtgaatgtctccctgggcgagaagtacgcggaggatattcgatctgtttggatgatactatcaatccgtaagggatcagtgctcatcttc

SEQ ID NO: 25879 - DNA, 489 bp, Oryza sativa
  unsure (1)..(489): unsure at all n locations
agctngcataggaaccacatcacaatcaacagattctgcatatgagccaatggaaaacaaaaccctgcaaacctgagttacctttgctcttacagaatcgtttaaccactgaatatggtaaggatgtggatgtgtacgtgtggtcaagccaagcttcttgaccaaatcaaaactcaccaagttgttgcagctacctccatcaatgatcacacgtgcacgacgattgttgatgatgaagaaaatctgaaacaaattatggcattgcaacctctcagactgctgcacctgcgtgctgagcacccgctgcacaatgatggtcctgtaggccattgtgtcatcacgaccaaagacttcgccatcctcatcctcaacttcttcttccttctcttnctcttccacatcggaggtggtgatgtagccatcttctgtacaacatatgcccgttgactatggcaatctttctgcacatgcccaaacccttggcaacgg

SEQ ID NO: 25880 - DNA, 471 bp, Oryza sativa
  unsure (1)..(471): unsure at all n locations
tatctgagatgatatgttactggattngctcattatcgtttttattgatgctgacatgtgattggttttgtgaattccatctgcaaacaatgccatcttgggaaaacccttacattgcttaatcagaggtattattcaaattatcagccaatcgttgattaagacagaaagaaatgcatgtttccttgtattcttaaccccttgggcatcttaccaccaactgcatgcttgtaagtgtacttctacactgccatactaacacgatggatatatttgcctgggcaaacagttatgaaataagggaattatggagggttggcaactcttctacatcacaataaatggtctttttggtggttgtaaatagcttctactagcttgaatgctactcattntcaacatatgcctggactcctgnggtagaattattggtattaccagtaataacaactattcctatgtctacttatc

SEQ ID NO: 25881 - DNA, 365 bp, Oryza sativa
  unsure (1)..(365): unsure at all n locations
agcttgagataacaagctgctactcttatatctgtaactctgaatangagaaatctatgaccaagtccaattgaataaataaataatgaaataaatgtagaggagaagatgtgaccttgttgatggcgacgcatccggcagtgttgtcgtcgatctcaacgatctgaacattagacttgttcgtcttcttcttctcctccttggcagaagtatccttgttgtgctgcttgaccttgttttctgctgtcttgtctgccttgtggtggtggtcgtcgtccccgaagacctcctcgacggagtaggcgtgcgaccatgggtggaggaagcccttgcccttgacctccttggcccacttgagcttggtg

SEQ ID NO: 25882 - DNA, 451 bp, Oryza sativa
  unsure (1)..(451): unsure at all n locations
gctccatgcgaagatactcaatccacatatcctctgattctggacaagatctaagaccagtctgcataagagcacgtgctgcagcaacatttaagttctgatcaaattcccatgctgctgcatatatccatagcccatgaaccttgtggtggtaacgaatagcttgtgccatagcctgaaaaataatacaatgaacatgagatatgtaaatttagtaaatagtgagatcaattcaatgttagccttccaaaaatatatatacgcatgtttacatatcatcggaggagaagttcaaacaaaaaaggcatgatatggggcacatatattcacatcaaaagaaggacaaacaggcatcaactcatactaagatgtaaaatganatctacatccaagaaccaataataagaaaagaaaagttcatctctanatagctttcatgctctggccacat

SEQ ID NO: 25883 - DNA, 477 bp, Oryza sativa
  unsure (1)..(477): unsure at all n locations
agctnttcanatcctatgaaattcctatggaatggcacattgcatgtggattntaaaggaaatttagcaagaggtctaacttcttgaaaaatttcctttgagtctacctctttcatccgattcctgcgtttttcatgcgctccaatcaaatgaccatttctatgtttttcctgtgttttgcaatcctctgttttacacttcaattcctgtcagaatccttttgttttactattcctccgttttttctaacctgcgattcanaggggtcctaaatggttctatgaagtgggtccccatgttcgaaaagttaccgattctttgggaaagctggcgagaccaagccgttacggccccatggggccgttcctggcgaatgttaagctccctggctaaatntaacacgtnccatcccatcaccacacattgcatganggctgtttcttgagagctcacctgaacagtcgaatctactgtatg

SEQ ID NO: 25884 - DNA, 460 bp, Oryza sativa
  unsure (1)..(460): unsure at all n locations
cttctccgaatcctagtgatagtgtagctcatgctgacccttcaaagagtagaataatgcttgttgatggaacctcagtaatgtacagatcctactacaagatattgggtaaatgtttcctgattctctctgttacatctgtattggtatattatgtttggcttctcctccttatcaaggtaaatgcatgtttagaaaataagtgttttgatatttatatttaaactaaattccactggcatgattaatacatgggaactgaacatttttattcttcctataatgtgaaggcacaacagaatgttgcaatatgtcctatatacacacagacacatgcacaaagggcaaaagaagttgtacatgtgcccacacttgatgttttatttcatgacatgaaaacattgtctcaatntattctcataatntgngcatgatactttgataaanaaaatatgggcat

SEQ ID NO: 25885 - DNA, 405 bp, Oryza sativa
  unsure (1)..(405): unsure at all n locations
atctcaagttgacttatgtgaccttggcnatganacgaactgtgattacgccatnacagcatcggctgatgcccactctgttctctcaccacaccaatcgccatggcgtaacatgcgacgagcacaccacagtcaccgtggtcacatgctcacagcctcgcaagtgccacttgagagcaagtcttgaaatacagaaaaataatgatctaactacaaatattcgtgcagctagaagtagaaatggtgacaagntttgcataatttctgacagcaactctgcaagattgatcttcccggaaataccggctgaacttaaaaggtgcctctttaatagataaaaggcctatatacagccaactgaacctatccgtggtgtacgcggagaatcttattatatattacttt

SEQ ID NO: 25886 - DNA, 459 bp, Oryza sativa
  unsure (1)..(459): unsure at all n locations
ctataaatgggatcgaaatcatttcttatgtgtcttgtacatgctgaatctggatggctgtcttgcttctgaattctgatagcattcccatatcttttactttcttgatgtttgttttcccttctgaaaggtggcttgatatgatatttttcctttccagatatgtcaaattctcgggttagctggaattgatttgtttaccccttctgatgtggttgagaaaagaaatgttcggaaagtctgtatgtgcatacgctngctatctaataaggctcggacgatgcgcctgactgtaagccctatattcttatgataccatttattaaaaataattcaatcagctaatcattgcacaatacacatcctgaaagattaattggtgtgtttctctctctggcacaggtgcctgatttgatattgcactctacaataccatgcccactcattgtggagcatccg

SEQ ID NO: 25887 - DNA, 456 bp, Oryza sativa
  unsure (1)..(456): unsure at all n locations
atgagcttctttatttataggacaggtatgacgggtatgcctatgcgaaatgacatttttgccctgcaaccgccatcaagagatgatctaaaccgtgcacaccaaaccctaaatcggacggtgatcaccaggggtcaatcgaattcctccttcttcctaatgagaaacggttctcttgcttacatacgcacttatacattntattccccgccacccccccctcccaggccagcaacaatccctctcgaaataaaacatgcaaaanaccattaaaattttgaaaataaaatcatcaatttcctttcaaaatccgtcaaaattagaattcatgttctagaatcaaaatctcaatcaaaataatacttctgaaatcaaattccaagaaaatatntacggaattgtccacttacgatgacatttcccttattntcatctctctcatttccttctcacccg

SEQ ID NO: 25888 - DNA, 471 bp, Oryza sativa
ctcatttctcttggcaaagatgtgctatgaccccatttcttctttatatccaggactttaaggtgatacagcctgcatatagcttctggtagctccatcctgtggcccttgtagaagcagcccagttctagatagcgaagattgacaaatgctgagatgttgcctatcaatgaatccaagtcaaagaagaccatctccagtttcaacacacggattgaccttacctcattgagttcttgccgaaacgtgtctgcaaaatccaagtcatgtggcccaaacagcatcaatgtgcttaagctcctttgttgcaactcacggaaggaattagagaactcttggaggaaagaatcattatgatacacagtgccattcaattgtgttttgtactcccactctgttattacactgacatgacgaacacatggcggtgcattcctatgctcattgccctctatggtaaagctttcgtca

SEQ ID NO: 25889 - DNA, 364 bp, Oryza sativa
agctcaattgggatatctagatatgtctgtgttcttatgcttcttgcacatagtgatgacggacaggaggtgcggtggagcttaacaataaaggggatcccacaaccacatatttcacgagtcacataaaggggagtgtgcccgcagcggcattatcaagcggatgggggaggcgacttcagcgaatgcgacgcggcccctcccaaatccggcggagaggggagctcgggcgccgacagtggtgaatgcggcgccttcccttccctttctatctcttccttctatatacagcagatgccgggggagctcgggcgctggcagcggcgccttttcttccattcccctcccccccccttctagatct

SEQ ID NO: 25890 - DNA, 397 bp, Oryza sativa
  unsure (1)..(397): unsure at all n locations
atgttgagacgtcttatggatgactcatttctatggaataatataatatattctntaaaaaataaaagcaacgtagtataaaaggaggaattataagatattgtatacatggggttaaagagaaaaaataacatatgcaaaaataacaggactcgagctctcaacctatcgcacacaacattaccagcttaaccaagtgatctagaagaggaacttgttggaaagttaagttactcaatatactgcaagtgtgtcgatttttttttgtttcactctttttagagcaggggtctccgatcagatccgattaatatggaaccgtatgtccctttggtggcgggcaataccgcgacggcgactgaggcccttgccctcatgcgacgtgcgccaacgcgcg

SEQ ID NO: 25891 - DNA, 449 bp, Oryza sativa
  unsure (1)..(449): unsure at all n locations
agctntcttactctggacgtatcgtgtaagagtgtcttctcactntacgacttcgatcagtcgtttgagttatacactctccctagcccccagccttgtcatcggagaattcttctcggaagatatggctctcggacctctgacctgcctcggttgaacaagcactgatcctagcccccagccgtgaggttggaaaattaatttccgattacacagcttgtgtaatacgtacggtgagaactcttacacgaccagatcttacatggtcttttgtcttatcttacatggatccgacaatgccttatcggctctatgcgtccccagccgaagttcctttatgttcctcggaggccttgtcaagacggcgtaaagggacatgaggataggtttcaacgctaggtgtcatctgggtaagggatcatcangaaggaatactttgattgtaatat

SEQ ID NO: 25892 - DNA, 456 bp, Oryza sativa
  unsure (1)..(456): unsure at all n locations
gggagcttgtgaacttcacaccatccttacgagtttctatgattatgtaattgctagtgagtttcttcctaaccttctgttcatctttctttgagattctgaacacatggccaagctgccctttttctagcttcaattgcttatcaatagtaagatccagatcagcagctgtatgcttgtgcaaattgttgatgtgattttcaacttcagaaagctcatccttcagcacagccaaatcagaagaatatcggggagatatcctatactcaccattctcaagttgatcaaggtcaatagctgtctcaacaagagaagcatacctaccaaacctatcctctgtcagccactcatctaaagaattaagaaactttgtccttatcagcgcagaataactgccatcatattgttgagaacattcttgatgtatgagactctaatgcatgactgcanaatcat

SEQ ID NO: 25893 - DNA, 384 bp, Oryza sativa
  unsure (1)..(384): unsure at all n locations
tagcttatttctctataatactttgacatctcaaaaaattgtgtttgttagttgaattttgcaagtgccattcaccttgtctctagtccttgctcgattagtcggcgactatagattcagagcccccaataattagtgtgttgatttgccgggtcgataagatctaccacttcaatcgcaactattcctttgtgcttaattccctattcgcaatatttagattgcatcttatcttggtcttgcagtgttctctcgtttgcattgtanggatcatcaaccgcgcgtcacggttggtacgacatcgtttgtggtgtatcgatcgcacggcgtcctgaatttgttctggtttgtagccacatcgcaaacgtcgcactcgatcaaagc

SEQ ID NO: 25894 - DNA, 438 bp, Oryza sativa
atccgcatatctccatataacagcattaaactttttatgatcatatcatgggcatacccgctccgaaccgacccgttcaagtctctcaatgtttgttataacctaaagaaccatgtgctttcttcttatgtattgttattgcttctttatacgcttgtagctttgcttgtgtgcttcgcgtatctttcgtcgttccggaagttcccgatacgtggttcgtggtctgctcctaaggttctgaaagccgttctctctgagcaaggcaagtcacatcatccttgaacatattgagtcccagtttataaaattatgttgatttaaattattgcattatcgctttatttaaattcccgcgttatcactggtttatctatccatgcctatttacctctgttatgaccttattattgctatggttattattacctcgttcaccct

SEQ ID NO: 25895 - DNA, 472 bp, Oryza sativa
acctgcagctgcagctgagcaacttcctatgtagcttgagctcgatctatctctacctaatcgcatcgacttggaataagctgggctccgctcgtcgagcctcgaccttttctcgagcttgctattggaaactcagccacgagcttgctccattcaagagaaaagtagaactgtgatgatttgatggagaaaagtagtactactagtactactttggaaagtaagataagaagtcaaacaaatgctatactctctgatggatttgacagtaccggattgttttgttgatggaagaattcactgaggagggagatagaggggatggataaaggagagaaacaaagagaaggtggagctcgtcgagctattcgagctcggctgagtaggctcgcgagatcaaaggtaagctcgagctcgatttgattatcatacgagcgcgagctgaatcgaacttataacgagccgaactcga

SEQ ID NO: 25896 - DNA, 472 bp, Oryza sativa
  unsure (1)..(472): unsure at all n locations
tgcagctaacactgtattagcgtaatgacgtgtgatcgttatagcccacgcgcttaacctgcacgtgcgacgagaaaaaagaagcggaaaaccaaaaaaaaaaaggagcgtgagaagctaccgactcggaaatgcgcgcgacttgctaatccggccgtctgcgcggattaacaatccccaccttcgggaaccggattggggtgggaggtgtccgggtccggtgatcgccttggagaaaagagaggaggaagaggaacgtcctctgccgtatgtagatgcacgtcagcatcattcggtcgttccatgcatctatttccagagaatccagatgcaacagaactacagatgcgatcgactcgactattccaaacctccaatcagtcgattttatttgataatcggtggatangactggtctgaacgttcaatttttttttttaacaaccgtatgaggaatgcatattttaatgat

SEQ ID NO: 25897 - DNA, 306 bp, Oryza sativa
  unsure (1)..(306): unsure at all n locations
gactgtcccacangtatgatacggccggtcaattgaaaacgaacgaatgtggcggtgctttataaacgatgagaggctttgagcagtgcaattactggcatatatgaaagagaagcgaagaaatctgcacgcctacgacctacgattactagtaccaattatgacatgaattcctacacgacatcaaaattcatacaaattattgtactagtactttgggcccggtaatcagtaaaaggaaacagtaatctgtgccggggattaagagggatcaccacatatgcatctatggagattggatagcaa

SEQ ID NO: 25898 - DNA, 432 bp, Oryza sativa
  unsure (1)..(432): unsure at all n locations
agcttaatcaaagtgcaatatccacacgcctggttggttgtttgcactattaactcataaatctaaccaagatataataatatacctgaatcctcgcatataaaaactgtctgtgtattctgtatacataactactagttccacaaaatgagtgcaaggtaccaatctctgtttcagtacactcaaaccatgtatttcacaagagttctttacttgaacagtttataagaacagataatgcccgctgctcctatgggcatcccctcaactccatacgtggagaatngagataactggataagttccctaagaagcaactttatggtgcaaattatgntatgtgcgcataccaagtttcacaggcaaattcaaccatactatgaataaactggactatgaagttatgcatatgtggaacacttgatgacctac

SEQ ID NO: 25899 - DNA, 399 bp, Oryza sativa
acaataaccatgtctagtgttagcacatggtacactgtatattgttgttccattggatatcaagaatatgaacaaaagaacttcacagacggtatgatcaagtacatagtgcttccaatttactgttcaaaacaacaaattaatctgatacgtactcgcagtttggacaggttgtatttgaaggtccggattattataacaaccatcaacaatcccaaagaatgttgattcataacgcgctcatggtaccataggacgctcggaatcacctagaataatacataataacatcaacactttctgaataatatatatatataggataatcaacttgcttaccaatctgtgtacactagcattgaacgctgaatcttgactgagtataagaagaactatcat

SEQ ID NO: 25900 - DNA, 474 bp, Oryza sativa
  unsure (1)..(474): unsure at all n locations
agctttatgaaatcagggttccttgtatcaaacatttctaggtttctcccttgattcattttcttacctttcatttagtccttatgcatttagtttgatttctttattttcgaatgttctcttgtactaatgctnttgacatgctatttggtgtttaatacttcattntggtttatcgagtgatggttgttttttaattcttgagtttcaatttagtacttttagtttgatttcttccctttggactttaaatatttattttagttctggaaaatcaatttccaatattttgtttgaactaattcttaatagtcttgacaggaacatatttgtgtgcatttaaaccttgcggttttctgtgctctgacgttntaattntggccttataattaaattctagagttatgattccttnttttcgcanaaatatcttggttgcgagcttngacgtcatattcggttgcatcttattga

SEQ ID NO: 25901 - DNA, 502 bp, Oryza sativa
  unsure (1)..(502): unsure at all n locations
gacacataaaactaagcttaagttgtatcgactcgatctcagcgggaggaagacttgatgaggctatgcgaacaatggattcanaaatgttatacaacatgatgtcctttgatcgctaaacatttgcttaatactgcagaaatgtattttgaggctcataatcacaatgcttaccacaagttactctgtgaaaatcgtaagctgcacaatcaagttcgagatcttaaaggttatatgcgaatgaactaacttcatttcactaacagtgatatatttgtactgatgaattgaaacatcttttatgtagcattggtgtatattgtatagcgaaacgctttctggaaatgcatactgatcatagatctaccgctgatcatattggggagaatggtgagataatgactgcgaacactcagtagcaaggaaagggatggcggaagatgttctcattcaacaaaatattctggcctaatgcttcacaatgtacatcatcgacatttat

SEQ ID NO: 25902 - DNA, 429 bp, Oryza sativa
  unsure (1)..(429): unsure at all n locations
agcttgagttgatcagcgatcgctctntgcagttgccttcgtttcttccatctcgagcagtcaacatggataatcctgtcaaatttcttcctcagagatggcgctggattttctgctatcgctctgagcaccgcagacgcacccagtccatcccatccgtcaaagtagatggacttatgtgcagcactgctggtatcctccaagtaagggattagtgattctaccgccgcctcaacactagtcgcatcaatgcgctgcattatatgccgattgattagttgatgtcactctcactccctgaccgcaaataatacataagtaattcctagtctgttatactagctactaatgtttagtttaggtttatatagcatatctatagattgtttttttaataatcaaatatctatagattggtagttatttaaa

SEQ ID NO: 25903 - DNA, 476 bp, Oryza sativa
  unsure (1)..(476): unsure at all n locations
gtgcgtatgaaatggtgtgaaaatcttgtgagttgttggaaacagagtgggaccatgtatangtggcaatttttttctattnttgtcacacccataaaaataatatatgggtccaccctattggtgctgattctaaattagagctagcacctatgagggtgttattggtgctggttttagcaccggcaccaataaagcacttcattagtgtcgcttgacaggtgccggatttcccgaccgactccaatgacgctttatggngtagtgtaagtaccaaaacttttcctttaatttatatcttccagaaacatccctaatgaatntagttatgacagcttcctctcagaagcctgtgactntagttatggcttacaagtanggacaactaattcacatggatatagttggtcctgaaagattcagtcagtngagaagaaatngtatgttctagtgatggtaatgatttctctcaatac

SEQ ID NO: 25904 - DNA, 479 bp, Oryza sativa
  unsure (1)..(479): unsure at all n locations
catgcaagcttatacactaaccctaagtagtggtgttttataaatacagngttgactaaagatgagctatatcttggatgcagaagatcatgggttgaatttgcatccagaaacaggcattttaaattggagtaaagtggtagtagaggagagacaattatgctggtccagcttttaaaagtagattctgttagataatcatgaagactaatttccccaatttcatttcccatgttcgaagtaacaagcatcatcaccatcattactctattagtcatctcgtggacatccatttgttttgcattatctgtgctcctcttttgcacgatgagctgcgtgttttacagcaggttacttttgtgttacagaaatacttttgcaattacctgatgtaaagatagaacaaatgcacgtactactcccactttctacatttgtttcacgtggtatttcagttctctaaccctactattgtagta

SEQ ID NO: 25905 - DNA, 461 bp, Oryza sativa
  unsure (1)..(461): unsure at all n locations
tgacaatcaaaacagagtgaggtagttagctgtgtgctatgcttattggacttcatgtgcatcattacaatttacaatgtcgcataaacacatagacactgtcattatcgttcaccagttagacaattatacaaattccaagcattactatagtagttggacaaaatagaatttgaaggaagcacgcaaaaacaatgtgaccctttgacaagcattactgtagtagttggacaaaatagaccctttgaatgaacctaatgcatgcagcgtacacaataacaatgtgagcaacttgatgatatggtcacatactcatgtttcatgattcatcttgaaaaggtanagtataattaaatttaaatattaaatagtagctccctaatatggccattatagagggatattgcgtgataaganaaggtactggtcaaattacgacaaattataccaaagatcttatg

SEQ ID NO: 25906 - DNA, 471 bp, Oryza sativa
agcttctgtaaattgttggatctgctttatcatcaccatctcttgcctcttgcttttcatttggcaacaaagggttgtaactgacttgcagatatccatcttaattttcttcagaatattctctgcatattttctttgtgatataaatatcccttcagtactatgatgcacttccattcctatgaaatagtgcaacaagcccatatcactcatctcatatgtattcatcatgtcctttttagaatatggcatcatcttctcactattactggtatatatcgtcatcaacatatagtgagagtgtgagacaattaaaatgtccatatctagcctcttgacatatagagtagcctcacttatgctctgggcaaatcctctttgaataaagtacttatcaatttgactgtaccatgctctatggtgttgctctaatctgtataatgtcttcttaagtcagaatactttgttttc

SEQ ID NO: 25907 - DNA, 426 bp, Oryza sativa
tgactacccgatgctcaagcacaccgactaagggtggacccctttttggtccatcctacaagaagcaggcgatacgcgcatcactcacagtaaacgaaacccatgcctgcgaacataaagtagacagaacatggctgagcactatcagacctacatacatgatagcgctatgtacaaggaaaggctatatgtagtctcactattcggcataaagcaaatgattagtcacaaaccatgtgcaacgtaatgtaagcagaacatcttagcaaattgcgaagcacattaatcatggcatgatatccacatagacagagagactgcatccccttacaacacaacgggaagtagggcaacatatacagatagcaatcgtatggcgacgataccagttagttcagataagacgaataccggcccccctactat

SEQ ID NO: 25908 - DNA, 181 bp, Oryza sativa
  unsure (1)..(181): unsure at all n locations
acagaatgctcgccgtcaattgatctccttatgaagagaantggacatgatangaaggacaccaagcatggtgcnncgtaggcccttgattcttacatgacatgtgaggtctgtgcaatgatggcactctggacgatcgtcgataccgtatgactctgtctgacacattcacacacacaca

SEQ ID NO: 25909 - DNA, 436 bp, Oryza sativa
  unsure (1)..(436): unsure at all n locations
cttgcccatcttttggaatgccttccgcttgagcctatcctttgtttcggctggaaatgtgaaccatttctccattgccgtccaagctcgctctttctcggcttctgtgaccttcccgatatctttatggaggatcccgaagttctcacgtgccgctagcccgcagcagttagaccatcttccaatgacagtcctgtgcgccgtgggcctaccactagcgtcaacctctcttataacttgcactgtggtcggtcatatattttgtgaccgcggatttctactagacctacttgcacttgtcccgcccgacatcgacgtatgttgttcctgcggcaattctgcagcacanacagaatgcaatatttgctaaggggtgctagctaaaatctatgtggtcatgtggtgaagatctatcctataaattaccatgaatttc

SEQ ID NO: 25910 - DNA, 471 bp, Oryza sativa
  unsure (1)..(471): unsure at all n locations
agctntgtgctgcttactgcaggccctgcatgatcatacctaanaaaaaacaagttccactaacttacgcctaatgggatcatgtcaaataattagtaccaaagtgatatagcattagtaatattttgcaacctaaacaatagaatagctctggccacaatactgatgaagtgcataattcagattagttcaaatggaaaaaaaaacactttactggatgatatcacagccacacagatgtgctgttgaaagatgctaggataagtacgtaaagcatagtactgtttgaaagattctgaacgtaagcacttgataaaaaaaatattccctctttatactttcagtaattntacaagttgtctatctgaataaaacaagaagagatgtagatcaattaccctacctgaagtcccgaataaaagaatggacactatattcggtattaatagtttgacatgcccgtacaatctt

SEQ ID NO: 25911 - DNA, 478 bp, Oryza sativa
  unsure (1)..(478): unsure at all n locations
ctgatctggcacgggtgtctntgctcatcacatcgtcgatcgtcttatttaatcatttttcttagctagctcgatctcgcctcgcctcctccgggcctccagcgaaagtaatcaatcagattcagatcgatcagcagcagcagcagcagcagcagcatccgctcccatacatgtcgatctctcactataaataacctgccccctctccctttctgcttcaattcctacctcacacttctgcaacaagctttatctccagccaccggaacgagagatcgatacagctcgatcagctagccgcattcgccctcgccgccgccgacgatgtcgagccggaggtcgtcgcgctcctccgtgtcggaggaggagatcaacgagctcatctgcaagctccagttccttctacacagctcccgcgcgcgtggcgccaaccaagtactacatttgaccgttctcatcaccacatagtcacataacc

SEQ ID NO: 25912 - DNA, 441 bp, Oryza sativa
  unsure (1)..(441): unsure at all n locations
agcttcacaagcagtatatatgtgtctgtatgtgcaccatgcatgaatggtcaaatcggaaccgggaacttcatatatatatatactccatgttgtgcatatcaagatcccctagttggtacatcactagttnttttttctacatgttatttggtcttgctaacatttgttcatgttagaatatttgcatctgtagtttgtaacaaaatgcacctgaattctatttgaatcttcactatatacttctaagcacttgctctgaccctctgatatatacctctgatgctggtgggctccaaaaaagattgtcacgtaacttggagatatatatatgcttgtattgggtgtgacatgtaattggattggatgggataggtcagtaccaccactttgaacgatgagggtgatgagatgatgttccagttatatcttgcatgacta

SEQ ID NO: 25913 - DNA, 475 bp, Oryza sativa
catgatgatgaaattacttttacctacttactgtgttgatttctattgtatggcattaacttattatttttttcattccatttaatcctttgttttgcaataattatgacatatcatgtcctgtcttgaaaatagtctcaatggacatgtctgaagctaaagttagatatagcaattttaattttatggcaaaaacagagacaataggatttcaacatgtttttaagaattctctatcagggaagtaatagtgggtttcctttagtatgtagcatcgtagttgtttgaaattagatttcaagtattattttcttgttaggttcgggggagggttctagtgcggcagatatcatacgtatatgttggacgtgagtacgacaagatgtatgctagattgtcataaccagtgacctcactctcatgtcaaagttctgctattaagtgatgtattcttcacttaatcgggtataccaca

SEQ ID NO: 25914 - DNA, 464 bp, Oryza sativa
  unsure (1)..(464): unsure at all n locations
agcttatgtgccgacagtggtagacccaggtatgtctgaggaaaagtttctagtttgcactgaagaatgcctgccagctcttgactatgctctggggaggtgtgtaaggtcaccatggtacttttggtaaagtttatcttcagacctgtcgcttgcgcaaaggagtttagaatagctttgagagctctcagttgagaagcttctgcctggcaaatgatgagcgtatcatcagcatattgaagagtggccccaggaagtgtatttactattgggtgcttgatagtgctgcatctcttgatcatctgttggagggtgtctgccacaagaatgaaaaggtatggggagagtgggtcaccttgacgaatgccttgtgaacaatntatccatcttcctggaatgccatttaacagaactgncgacttgcttgattctagcanagcttggatccattnttgccaacacat

SEQ ID NO: 25915 - DNA, 428 bp, Oryza sativa
  unsure (1)..(428): unsure at all n locations
tttctgctacgttntgcatggcgtgtggttggggcatttatgtctgaaacttaagcttgaagcttctctcgagtctcactacctgagaatgttttccacaacgagagagatcatagatatcagtgtcaatgcttcagggatcttgctaggagtacttcattatatgccctgagctttagctttggatctgtttgagaatgtgagagttaatccaagatccagtagcaatgttgtagagatctcgctgctagtacttcatccatgataagcagagtaccatgctaaggcttgagatctttcttgcgcagtgcatatgcttcatattcacaagagtttgtactttgtagaactcaacaatgttgcatttgtgccttgtgtgactgcttggcagatntttagctgagaaagtgcgggcacttgatcatgtg

SEQ ID NO: 25916 - DNA, 481 bp, Oryza sativa
  unsure (1)..(481): unsure at all n locations
agnctgggaatggcagaacaactctattttggttagaccaatggatgccacaacatctggaatatacctacccagttctgttctcttttgccataaacaaagagtgcgcagttgaatcacaatttagtcacaatacttggcagctacaactccatcccaacctctcctaccaggcagaaacagagttacaagcactattacaaaacctacaaactataagcccctctccagagacagcagacacaagagaactcctgtatcccaagcctttgatctcaacggcaaatgcttatagactgctgactttttcatggatccctttggaatccggctgattacatatggatctacacaattcctcagaactgcaaggtattcctgtggctatgctttagagacagattatataccatagccaatatggtcaacataatatggagtaatgatccccactggccaatcttgctggncctggaatcag

SEQ ID NO: 25917 - DNA, 416 bp, Oryza sativa
  unsure (1)..(416): unsure at all n locations
ccataaccttgactgatttctcttctctacaaataccataggcgggtataggccatcaacagaagtagcttatgaaaggatagtttgatgcctacagggcttggataggccatattaaaacttaatgtgaaagcgcaaagcgaaaactggtccaattgagtgccactactacagagcaccacatatgtcacgtcttaaaccggcgcatgagtgcatttcaagccgctaatggatcaaagttgagaaacgacacatatacccctcatagacaatgtcgattcttaagaataaccagcacatatataatatattatgttttaaataatatataataaatattatatgnggcaagtttttgccggcccgacggatgggaaggggaggacnntcctcttnttaactcctttctctctttt

SEQ ID NO: 25918 - DNA, 504 bp, Oryza sativa
  unsure (1)..(504): unsure at all n locations
gatcttaagtcacctgcagctgcaactatcagtgcagttctggtgtccgaattcaattcttatggcacgtgatatccgctaaagaagttgctgtggatctagaaacggtgaccgccgtcactgattggaagcaacctgtcacgaccggaaatcacccaacaggcgttcctgacgtgcgtgtattattccttgtcccangaggcaatgtacaccaaaagntgatacaattcagaagttaacaagcggaagcgtatatataattattacacggtcaacaacggtccagcacacaaagacaacgaataacagcggaagactatggcgacgaccacaggcacttgacggcatgcacgagctagacaccanagccttcatcttcaaggagctcctcttctggacttgggaaaaattgagcaagactgagtacaaccaccgtactcaacaagacacacccacaaatgcagattaaatgcaatggagtacaagggaataataatatatgga

SEQ ID NO: 25919 - DNA, 393 bp, Oryza sativa
  unsure (1)..(393): unsure at all n locations
aagcctcttcgcttcatatgtgctngntggcagggagtagggatgccgtatatatttcttcaacagaaccaacaagtcagtagaactactttcggaccaaccatgtctggccttcaatctcattagctcaagcaccatccacaacaatgtgaaatccttctgacagccctttgccttcattgccaatatatcattcaatgccttgtttaatgcatcaaatttatccaacccactggcggtcccagcaacaatcttatggtcattgtgactcaacatctcttccaaatctgcgaaattaccatctattacgctgtcatctccatgattggcattattaactgtactgagctgaccattgccaccaacaacatcgttatcataacaagttctact

SEQ ID NO: 25920 - DNA, 459 bp, Oryza sativa
  unsure (1)..(459): unsure at all n locations
ctgcagctttttatagctggattgctatgtgaatcttcaataatgtatccaactttaggttacactcatcatgttctacaaagcagtcggtatatcactcggatcatgttattcagggatttacaccgcatatgctacatatttatatcaagtcgcttggttaactataattatcgaagccactcggttggttggattatctattccttgactatatgcttggtttgttcacttaaccgcatagtcgagggctacacctattatgtgcatctagtcgatgcacctgactntatttttcagccctccacagtcttcagatttggaaaagtactcgggagaccatggcatagatgattgaagtactcggctttggaataatctagttcgggagaagattatctttntgactgtgaaggtctcacgggctactgtggagaatatgggtaccccatacccaca

SEQ ID NO: 25921 - DNA, 456 bp, Oryza sativa
  unsure (1)..(456): unsure at all n locations
ctctatctcacctggagccacttacattagtctacttaaatcccatagctaccactgggattctcacaaggtgacctcggtcccctttcatggtgatctctccaaaactgtatgtgccagtcactgacctggccgtgatggtcgccgttatctctctcgatgcgccagtgagcactgtcagcgctggatgtgagacctccatcgcgatctccggcgacattcttgtcatgatggtgtatgtttcggcctctgcggccacacttgtaactgtccgcttcaccgtctgcgtgcctctaatctgggagatggtgattgangggatgctgagatcataggggcgctgctgcaccttggagctggagctgcaagttgaaccaattatgttngatacatcacttgtgttcacatctgtgatcgaacacaaaaatgtgatgtaatcttgatgagctaccaaca

SEQ ID NO: 25922 - DNA, 436 bp, Oryza sativa
  unsure (1)..(436): unsure at all n locations
ctgcagctangctgttttcataccttgaaatttcatcctttcgtatcgagcaagtgaagagatacaacatcgataatcaacacgacaaagacataacgcacattgttgtaaataaactgaaatagtggttaagtaatatcaattaccgatatcgctaagagaaccatatatttgatcatccatgacagtaatgccctgcaacaggaggaaaaaaagtgtaaagaatctcttactcatggaaaaaatacagtattatgaacttatggtgactatatgtgtctacgcatgtcaagcaaacatatggtcacataatctcaaatgtcactactggtactggatagtggtgaatctattttcctatcattaagcctccacatgatgtataacaatatcagaaaacctcacctctgaatcatttatgctcatcccattggga

SEQ ID NO: 25923 - DNA, 296 bp, Oryza sativa
cttggcatgacgaatatggaatgacaggttaaaatggtgatttttatgaaaaatgagactattcaacatctttctatagagtgtcattatgcaaaatcttggttggagagcagtacagttctctcttggtttataccttgctactaccatatctaatatgtttgatggctggctttcgatggtagataacaaagaagagtaaactcatactcgtaggagcttctgccatatgttgggctctgtggttgactaagaatgatatggtgtttgacaaatcactatctatctcatatata

SEQ ID NO: 25924 - DNA, 319 bp, Oryza sativa
tcactaacgtaaatcactagtgtattatcactagtactctatcctactgattttcaacataaaaaactaacctactcagctttctcctgctcaactcaacaacaggctctttttcgcacctgctctttgtctgtgcatacaaactctattaattaaacaaaaaaggacgactatcgataacactgcgtgtacacccactatgcaatgacacgcgaccctgatcgcccgaacacacccctcactgcgactattattacaaagatgcccccgtaccgctactattatcaaacgccacaccctgtatcaacggacttgcagc

SEQ ID NO: 25925 - DNA, 396 bp, Oryza sativa
  unsure (1)..(396): unsure at all n locations
tagaataccccgttctaaaaatatttggatcacgatgacatcttattcatataactaccattattaagtaacaatgttgttccaaatcgttgtcattcattcaatactacagtgaatggactataccaacccactgtgtcggtagcgtacgaagtacccctacgtggtcgtacgtatgtagccatgtgatgagtggcgtactcctactggcgtgccaccgcagcaacaaactatagtacctccgttacaaaacaagtgcatacgtggatatccgtgcccaacgtttgaccattcgtcttatttaaaaaaaatgtgaanaatttgaaaatatttagtcatacataaagtactgttcatggtttatcatctaatagcaatgaanatactaattataac

SEQ ID NO: 25926 - DNA, 297 bp, Oryza sativa
agcttataagagaagatctaattctaattgggttaatctctatataaaactgggctagataaaatttcattaaatactttgcttaattctataattcctagattcttctgggatttatttgagctaaagaagtatttttaataaatggaattgcatttaagaaataatttaaattgaaaaagggtttaaaaagcttcttttggctttgggccgaaagtcgggccaaaaactatcttctttcctgctcggaccagccggccaatccgcatgcgcgcgcgcgcgttcggtcgctgacag

SEQ ID NO: 25927 - DNA, 389 bp, Oryza sativa
atatgattagttatcttgttgtatcctctgtttgtctgttctatatatctgatgcaagtatgtcatttcttattccctaccctgagatccatataagcctaattagaaaggtaggatgagaaaatgcaacatcaataccttggtgaggaataaacactttgagtgatttgagggaatcaattgagaagtacagtaaaagttatgtttctataaacatcaaagaaaatcctatggtaattcatcaaaagtagtataggggacttggttcgaggactgttacgttcttcaatcgcctaaagatggcatggtaaacacatcaatggttacagcctcaagtatgtcttggaatattcggtatgtcatgtcatgaagcatatagtcattactct

SEQ ID NO: 25928 - DNA, 456 bp, Oryza sativa
  unsure (1)..(456): unsure at all n locations
agctngcaaaagaggaaaggaaagctgttatatccatacccgaactcttccgaaagcttccggactcctgatttctactctattcctattccaccagctagatactactaaactaaagttgaaagaaatgataaagctattgattgaggtgtgtgagtgaagtgaggatgagagctccttttatagcctcccaatgaaagttgtgacagttggaatggtcggtactaccctcctaccgccattgggagccatctcagccgtctaggagaaccctggatcaaacaaagctgcgggaggttcggccgaacctctggccggcccaatccagcccaaattcggctggcagccttctccgttattcttcttggcccattcatacataagtctggttctcgacatcgtccgattgatttatcgcttgagttgatgttgattctcctccactttagtgtcatt

SEQ ID NO: 25929 - DNA, 270 bp, Oryza sativa
ctcttccaaccaaacacactatcctttcatccccgtggtcctgccccctcatgttgtctgacctaccatgtgcacttgcacctactcctcttacctcaccctccccataaatacccagccacaccgtccgctgcacaccggccatatccaccacgaactctccaagctcttcttcctactgagcactctatcttcactgcatctgcttgcagcagcaaccgatacagagagagagatatacactagctgatcgatccagtggaatttggt

SEQ ID NO: 25930 - DNA, 253 bp, Oryza sativa
taaggtatgctcaagcaaacactctaatttctatatttgtgaacacagctgttcctaactcatatgtttttattccataatttacatatactgacccatgggaccggccttgcatggacacaacaggaataagagaacttgcatagatgctaagcatagggaccccacatgcaaaggacgtgactaatacagatctgggggaggagtacattttactgactactgtggggcccactttaacctctctactcca

SEQ ID NO: 25931 - DNA, 446 bp, Oryza sativa
tacactggattcacaccgtataatttgaacttcatatgaaagacttatcatgaagatcaaataatgcatgtcctatgttcatgtgccagtacttgcttatacgctactccctccgtcctataatataagagattgtgactttttacttgcagtgtttaaccattcgtcttattcaaaaatttttggaatttatttattttgtttatgacttactttattatccaaagtactttaagcacaacttttcgttttctatatttgcacaaattgtttgaataagacgagtggtcaaacagtacaagcataaaagtcaaaatcccttatattatgggacggagggagtacctgttaattgtaaaaacaatactttatcatatatataacaatataaatatattgtggacagtatctatattgaacattgtcgttctcaccattctgggctg

SEQ ID NO: 25932 - DNA, 366 bp, Oryza sativa
ctttcgccgatcagtgcaatgggtcctttctccggcattgtctttctcttcttaccacccgggcagacggtgcggttcggcagcctcgacttcatcaccaacaacttcggcaagaattctctcctcgactcagaatcagaccagtcgggagagaaccggctttcggtcccggttggattcccgaacgcggctgaatgctacttcaagaccatctcaaccgaatcggcttcaaaccactcggccgagatcgcatcttctccaacgataccagatcaagatgatggggcttacccaccggtcctgatgaagctgcccgacgatttagcggtcgtcttcaccacgacagcgccttcatccagtaagcct

SEQ ID NO: 25933 - DNA, 491 bp, Oryza sativa
  unsure (1)..(491): unsure at all n locations
ctaagcttacttgtgttagttgaatnggtcatgtcgacgtcgtcattgctatcgctacttgattagtttataggtgcttttttcagagcgcttattntgttttagatgcaagtatcaatcttcggccgaactacctatgtaatagtttgcatttcatctctcctgggaatatatgagtatgctgtatattttgatttcaaataaaactctaacttcggatagtcacattttgcggtgcctgttcaacaatcctgatatttaagacgtggactttatttttggatacatagtgtattgaaatgctagtatattcgcacgaccgtgaattgttagctgtaaatttcttttagtaatataagataacttctcacatagaactgcgattgagcactacttgtcanttttgtttcttggaatggaacgtacatcttaatgtanaatcctacattagtatatctatatactagttctactacatacgtcccaaataa

SEQ ID NO: 25934 - DNA, 367 bp, Oryza sativa
  unsure (1)..(367): unsure at all n locations
ctgtgatgtacccttttactctcattcatatcagcctttgtggcaccaaaattttggtgacattatcagaagcatgttgctcatatttcgaatccaagttccgatgtctgtattgtcaaataaacagcagtgacaaaatagttcaaaatggaataattaaggaaggtatatatgtaaggagacagtactggtgaaagatgactcggcngtgacatcatatacaagcaggatacccatggctccacggtagtacgctgagggtaaatgagatttacttgatcaaaagggtctcatttanacttcacagggtagtatgctgaatggaacaataattataccagtggtaattgtcccgatacgttcttgg

SEQ ID NO: 25935 - DNA, 415 bp, Oryza sativa
  unsure (1)..(415): unsure at all n locations
tatatatgtcctaccattatactaaatagcattagatccaatgttattctgttgatactatgaaagatatggcctcagctttgcttataaattatgcatcaattaccatcatttgcatgaatggaaaaaaagaggaaatcataacatcaatatctattattatgcataaaaaagaacaagtgtatatatgtctctcttatcaatccagaataaagaacaagtgcataaaatctgttcttatgcatataaaaagaacaagtgtagatactctgttcttatccatataaaacaagtgtcgaggtatataaccactgaatcaatcatgcaaattttaaatacatcaacatgcagggcacagatagaatgttatngacataatcaacaacagcgggaattatatgcccagggcacaaca

SEQ ID NO: 25936 - DNA, 163 bp, Oryza sativa
taaccgatgacggcatgaaccagcacatgtagtatacgacatgatagactttctccttgaatatgaactgggcgagatcagacataaagctatgttcatagtattaagaccggagcatcattcgaacagtgacgccatcgcgtcactggttattggtctgacc

SEQ ID NO: 25937 - DNA, 239 bp, Oryza sativa
tgcacgtaatctcacttctatacaaaataccttcattttccggcgaatctacgatgtatggtgagacaattatgcgaacaatactgtggggacacatatctctcgggcatcattacgacgaggaacacatatctgctgtgattataggaactgataccactgcttgcttgtttgaacgcatcgatgcacatactaaatgtttgtgactcgtcaccaggcctgaacgatcggggtgctaa

SEQ ID NO: 25938 - DNA, 427 bp, Oryza sativa
aaagccaacctcgatgtagtactgtctacagtagtctgcagtgcaagaatgccgaggttgtaacctgaaccaacgatattttgagcatcccctttcgaagatgtgcattcaagtaacatgatagccacagctcacggtgatagtacattgttcacagctgcccacttataggaatggtcgttatctgaaatgtgagtggtccgttctctccgtaacaaatttgcaagaattcaatcttctgataagaaccgtacatggatggcgaggcctgactctgaccatcaaccaactgcttgtctaatagcatcactccactgattgccgcgcattcctgcggtcgtgcaaataaatacagctctgacgagctgcaacctgaatggagtaacgaataatcgtatgcctggcctgatagaatttggtgtttatg

SEQ ID NO: 25939 - DNA, 439 bp, Oryza sativa
  unsure (1)..(439): unsure at all n locations
ctcagcttatacaatgctgtttatctcattcccatgaaatgcaactnttcttatgcatactgtataccaccacgaaagacatcataaggaagaagtgaatacctccgtgagaagggaagcttcacgaatagcggcgacattgcattaatcatgtctggcatgttaatgaactgcatgatcacaatctgcaggatccaaaaccacaagttcttctttatcatctcaacaacgtgccttgcaatagcatgcccaacctacaacaaaaggcacaatctgtcatttccaaatctccaatccacacgaactaaccaatatcacacatgatcccggaaatcccaagtcacctcgtgcccaagcacagtacaatctcacatcagtcttgaaatgggtgagcagccagtaaagacacaatcttgccaccgggcatcacattgattga

SEQ ID NO: 25940 - DNA, 448 bp, Oryza sativa
  unsure (1)..(448): unsure at all n locations
cagcttgaaaatagcaacatactgaactaagccttcatatattatgcatgcatctcatagggcacaagcatataaaatctgcaaataatcgatctgaatgacattcacatacacaatcttgaatccagaacgagagcaatctgtgaaagatacaaacggcatcccctgtactgtatatccctaatataaaccctgtacatatccctaaactgcttgtgaaaaacgatcaaagacttccctacgcaacccgcagcggcgacgaataggaatcgaccggaatcaagaacaggtgacccccccgattgcatacgcaaacagattaattccgggcaagaaccagctaagcttgtgctgctgcggctaggtgatgacgaataatcgagccataatggcggnggatgagcgcataggctactgacctctgatgcgcggaatatatacccacagc

SEQ ID NO: 25941 - DNA, 469 bp, Oryza sativa
  unsure (1)..(469): unsure at all n locations
ctacggtcttacatacatattgtctctctacgacttcccaagtaccattagacataatcgagtccatttcactgcgtactgcttccttccagtagtcagcgtcaggagatgaatatgcctcttctatggatcttggggtgtcatccacgaggtatacaatgtagtcatcttcaaaggattttgcaaccctttgtctcttactcttgcgagtatctacaatgttgtcctcctcatgattttcctcangcgtttgatcattgtgttctatctgtgcaaagtgctcatggggcatgacagtttctttactagaagctgtaggtgtatatttcataggaaattcattctcatagaaagtagcatctctggactcaaaaattgtaccatcatgcatgtcgggtacttcagagtttactatttagaatctataacccacactgtggatagcattaccaataaacacacattcaac

SEQ ID NO: 25942 - DNA, 415 bp, Oryza sativa
  unsure (1)..(415): unsure at all n locations
agcttggcgccggtggtcatggcattgtctactttggctttctcatggacaacaatgtcgtcgccgtgatacgctccaacttcctccacgtgacagacgccgaggaattcgtgcaggagatcatcatgctctcgcagatcaaccaccggaacgtggtcaggctcatcggctgctgcctggaagttgaagtgcccatactggtctacgagttcatctncaatggcactctctcctacctgatccatggcgatagcaggcggtatgcttcactgaaacttcgtcttaggatggctcaagaatcagctgaagcattggcatacctgcacctgtcgacgaaccggcctatcatccatggcgacgtggagtctctgaacattatgctcgatgatagctacacggtgaatgtgaccgactt

SEQ ID NO: 25943 - DNA, 382 bp, Oryza sativa
  unsure (1)..(382): unsure at all n locations
ctataaaactaagcttatctcttacgctccaagaatggatcagtcagaacatcaccgaccgtcttgtcttcgccgccgccgactggtgtttccgcctgcacggctggcctttatgccgccgttgttgggcgtctacgtcttcaccgaccggcttgccttcgccgctgacgactggtgtttcacgctgcacggctggcctttatgccgccgntgttgggcgtctacgtcttcaccgaccggtcagctcgtacggcgccgactggtgcttacgcctgcacggctggcctattatgctgccgttggtgggcgtctacgtcttcaccgatcggacgtcgcatccggcgctgactggtgtcaccgtctgcacagctgacttattatg

SEQ ID NO: 25944 - DNA, 397 bp, Oryza sativa
agcttgccaagataccactggtaataccaacatcatggtatgttaatgatgagaagtacagaacgccatttatgccagcaaactgttgcagaaagaaaagggaccctccaatcagtgcaactgcatatacatcagaaattaagctattaatatcatggaaataaagatcataataatgcaaagggaaggaacaaatagaaacaagtatacagacattaagtcgccaccccctgctccccgctaccagcctggtcggcgcccggctcaccaccgatgactgtcgctgcccgccgcctgcgcattcaacgacaagggcgggagttcgccgcatccgcagccaccgctcccgtcgtcgtcgtcgttgccagcggccggatcaacggctgacggatccgct

SEQ ID NO: 25945 - DNA, 424 bp, Oryza sativa
  unsure (1)..(424): unsure at all n locations
catcgacgatgagactatttgctttatcatctccatcgctatattcacttaactccgagcggattntctcgatctgagaatgaatgtcagaaaactgcttgagcctctcctctttcttgccttttaagttctcaagtactggaacgactgccgcaagttgttctttgagtggaacaacactcttgtctttctgcacgagtgtttgaaaaattagtgaatacagcaacccagacaaagtcacagtaaaaaaaggtgcaggtcatctatcaagcagcaattgggttgaaactgttcacagtaaaatgaacagtgtattatcaattggaatccacacagttgtaaagaatgtacttgtgctcagactttaccattggttcttatctttgtagagataagttatactgacattctaatacanatcttc

SEQ ID NO: 25946 - DNA, 355 bp, Oryza sativa
  unsure (1)..(355): unsure at all n locations
ctgcagcttaatcttacttgcgtgtaattggtctgcactataaagtggccgaacctttaaatctccactcatgtttttggtttgaacttttgataaaatagcacacatggttcgcaaaataaccgagctctgaacgctgcagacactgtcaaggacgatcatggaaaaggaaatgtaatacaattacacaagttgtttgattactaacgtatacattntaagttattattaatttgtgatcctaactgggtggtattgctgattccaagtgactggtggtaagttgatggaagcttacgagggttgcatttcaaaactgcgaaaatctcaatctaatcgtcgtaaaatctctctc

SEQ ID NO: 25947 - DNA, 425 bp, Oryza sativa
  unsure (1)..(425): unsure at all n locations
tcctgaagcctgtgctntcttgcttgaacgtgagatggaagcgtacttagaattttactgagcctcatacacactccagatccaacggttcaaaatgaatctttcttccatcggatggtctgtatttaattgatgatgtggcgcactgagatgatgaaaaactttagttttttcactactttagatatgaatctggatagatagtccgtactacttccttcgtttcacaatataagtcattatagcattttcacattcatattgatattaataaatctaaatatatatatatctatctagattcattagcatcaatatgaatgtgggaaatgctaaaataacttacatcgtgaaactgatgaagtagtaaatatcacattcaatcttatgtcttatatactgtaactcctattttattgctgacg

SEQ ID NO: 25948 - DNA, 482 bp, Oryza sativa
  unsure (1)..(482): unsure at all n locations
agcttaactntaatcctaatgcaattcttcatgcactggcaacccgctgttcctaaatatcgctctactacgtacacggacagggaggacttaagtactcttgagggctgtcaccacctctacacctaccttaaacgtgctatgggatacgcagcaaccactagaaattaattacccagacaccgcgtctacgcaattaataactactctagtgcagatcaaacactaaagcaatcactataaataaatgacaatgatcccgtatgctatttatgaactaaccaagagataattctcacgagataaatctaactcaagaagaatattatattgaatntagactaatgaacagaataaaagaaatgagagaagattaccgacaactctggaattcttccgaattcttctactctactctcttcctaatttagatacaatatagtacaatagagcctcttataattcagctgagacttggaagt

SEQ ID NO: 25949 - DNA, 418 bp, Oryza sativa
acttgatcgaagttcgcggcttgaacaaatatccatttcatcagttctaaggcccactttgtgatccgcccgtttgctttgtgattatgaagtatatcgtcgagcggaaacgatgtaaccaccgtgaccgagtgaccctggaagtagtgagataatttcctgacggtaattaaaacaccatataacagcttctgaacttgaggatatcttgtcttggagtcggccaaaacctcgctaacgaagtagattggtcgctggactctctgaacatggccttcttcttcacgctcgacaaccaataccgtgctcacaacctgagaagttgacgatacgtacagtactagcggctcttgcggatgtggtgagggccaaaatggtggagtggtgagaagttacttgacgtcttcaaaggctttct

SEQ ID NO: 25950 - DNA, 474 bp, Oryza sativa
  unsure (1)..(474): unsure at all n locations
agcttcatagagtaccatttctggtatttaactgtataaagnaccagtggtcaacatcttttatagtttatgccatacatcgattaattgcatggtcaatcacttgaagtccttagtcttacacatatagtactcgatcgttgatccaaatacggtgtacggaccaaggtcggcaacatttcttgatttgcatatggatgtatgtacaagtacacaaaacctgatctaagtaatcaacatanacgaggtcataatctgatcatttcttgcatggaagtatgcacagtggtattctttntttcattatgaacacgtttttcctcgattttcattagcacgctatccaaatcgttaaacggtgtccctgtgtaaaaaacttctatatataagttgctttaaaatatcaaataaacctatttttttaagtcttgaataattaaaagttaataaagtatgcactaacatctttctcat

SEQ ID NO: 25951 - DNA, 427 bp, Oryza sativa
ttgccactgacagcatacatcagatggtttactatcatatatgttgttgtgaacacacatgcatgggtcaccattgaatgcaatatatgtacatcataaacatatatatatatatagacacacactagaatagatacccgtgcgttgcagcgggtgaatactattttaatcttattattgttatacggcttggctggggtaaaatttactgcgggaattcgcttagatattttttgtctagaaaatcatgtgctgcaattaagagtttgacattcatctcaagttaacatgcaagtatatttaatgagatttcttatacgactccttttgtatttctaaaagtgaacgaacttagtatccgactcaacatggatatgtatttccataagcatacgaatgtacaaccggctaaacatgaatgaatacc

SEQ ID NO: 25952 - DNA, 483 bp, Oryza sativa
  unsure (1)..(483): unsure at all n locations
agcttctatattgcagtgcaaaatatttcattgttttggaaatacaaagaaataagagcacttgttatagttggtggagcatctggatgaactactttcgtacagcctgctatgaatccctgttcgcaagcagccaggcaaatatatatcctcttgaatataagactaggctggtcagtatctaacttgacaacaactgtactcccaggattactcctcagcaactctaactgatagtcaaagattctaaagtattcacccctggtggactcatatatcttcctgaatacaaatgctttggctctcttgcactgcccaacactaacattngcatacatttcctctgaaacagtggactgcatgctctgtatactccaagttggattatctgtgatcatcttctcatacttctgagcaatcctctagtatgtcactaggtgagtataccttcttggtgggcatgtgtgttcatcaactagacta

SEQ ID NO: 25953 - DNA, 342 bp, Oryza sativa
  unsure (1)..(342): unsure at all n locations
aacgacggccaagttcgccagcctcttctgttggatngaatccggcctccagaagtcgcgccacctcctcgcggatgatagcttgacgttacggggcctgccgccgcactttctgcctgaccggccttgcgcccggccgcacggagagacggtgctcaatcacctccctggggaccccgggcatgtccaccggtctccaagcgaagacgtctgcgtttgcccgcatgaaggagacgagcgcgtcttcctatttgtcgtccagaagaccaccgattcgtgtggtcttggacgggccgtgtgccatggcaacctccttgaccgagacctcttcgcacgtgacca

SEQ ID NO: 25954 - DNA, 480 bp, Oryza sativa
agcttatggataagatggcccacaagtcatgtgtttccggcctggaaaccgctttaactgttataaccatctataggacccacctgatatagattgtaccgaagctggaggcctgttgggctagcctatgttcgtccgaactatgagttcgccggaaccctggtggatcccaatcagcctggccctccacgtgttcgcgccagatgcactctcaatgatggttaaggggcaagaaggtcatttcaccttgtctacaaccgttataccaaccctataaaagaaggagctcacttcacttctcaacacactcaagtaagcttaagattcctctcatactttgtattagtagtttagagctaagtggaagtagtatagaatatgtctctgagtcctcggaagatgttcggtatggctctagtagctcttctattctcttctgaataccttccgaataatgaatactactctattatattctcg

SEQ ID NO: 25955 - DNA, 489 bp, Oryza sativa
  unsure (1)..(489): unsure at all n locations
tcgacgtgtngccatggtgtcggcatggtgtcggcatgattctctttaaattctcgacgtgtgcgacatcaactggtgcaaggtatcggccggctgagtccaagtcgaacccgacaccgatccctaccaaccaaccaagcacgtcgaggagccaaaaatctaccgctggattagtactaccgtgttctaactatgacacgatttctagccacgatctactggtcgacagcctgacgtcaccctgcatgtccctttaccgagccaacacccatgtgcgcacgtgcatgtatattggccgaacagagctcctatatgtattttgatgacacatactccatgtctcccaaggtaattagtaagattaattnttaaatnggtctactaattccgtagatacatccggcatatatctgcaaaggtacgcaatattttatacacaatttaccatacctacttttgcgatctatacgatattatcagatctataat

SEQ ID NO: 25956 - DNA, 439 bp, Oryza sativa
tggcgacgactgaatgagcagcatggcctcgccggagatctatactctacggcgagcttcgggttgacggcgacgatggagctccggtggattctggcttcggggaagtggaggccggtcttgttcttgccgctgcggtgccgaatgaagtggcggcgctggacgaatgcgaccagtgaagactgctacggcggctgaaacggcggtcggcggcggatatagaatgagcgcgcggtgagagcgattccggcgactacggagagagggagagatggcggtcgaaagatgtgagggagggtgcactatatatagccatgggaacccggaatcgagcccacatcgacgggaaaaactcgggaaagttatgattctcgccggtaaaaggatagattgattcgcgaaattggaaaggtttccatataaacatttggtgatttct

SEQ ID NO: 25957 - DNA, 358 bp, Oryza sativa
ccacacatgagcaagagatgatttccttcctaagtgaagatgtatcttcatgctgaattcctattattgtctttgatagaaaatatgtgactatgcttcaattgcttatatgatacattggctcaaaagaagttatgacttgagttatagaaatgttatttaccttacttgcatcatcgtcggaacattagtcttctgagtcaattagtaatgcatccattatgtataatcattggaagagtacctagccgacttgctaaatctacataattgcataagcttgttagttcgtgcatgatgctacaaatttgggtgattgaataatgtatggatgatgcatataactatgtgcttgatt

SEQ ID NO: 25958 - DNA, 421 bp, Oryza sativa
tctaaacaagacaggtcgctccgttgtggtaaatcatctctttctgccctaccaacataccacctcacagttttctctctcaagaagtgggcgaaaaaaagatggacaaatatcatctagggtttctctagacaggttcataatatgcccaatgtggacattgccttatcaattggaagatagtttgcaggccaaataacctatgggccttaacatgattggacagcggatgatataccttgccaatgctacaacctgccttgtgatgaaactgacaagctgtctgtcagggcatcaacgataataaccctatggaatggaggcatagccaaattctggcatgacagatgactaaagggaaatcaccgaagaaactctcaccatcactttaccagctggcgacaaggataaacatgacagt

SEQ ID NO: 25959 - DNA, 476 bp, Oryza sativa
  unsure (1)..(476): unsure at all n locations
agcttgtccacaaccaccattatatcgacctctctcgacattctcgntaaatttcttgtgtagtttgtcttcaaacatatatgctctcaagaaagtggtgaggaagaagggtggcaaaagatgtaagcttgaaaagataatgcatggcttttaatagtaggacggtnaagatgagaacaaagatgattctttatagtaagatggcaaaagtgaactaaaattcctgctatatgtttaaaatcgtaatatatttactgtatgtcaattttgtctatctaaaagtataatgtggaaacaaataccttttgcaacctattattatctgtaccaatctatattatctatgnatatggagaagaataaccaatgaccacatgaatatatatgatgtgcaatntgntctgtgccttatttcaaggctctttntacattatttctaanaggaatttttggtgttaaatgtgtatgatctaatg

SEQ ID NO: 25960 - DNA, 411 bp, Oryza sativa
tattaacgtcaccgctgcggatcacgtcgattttaatgttgttttcgtggtgcttcgccataaattgaccaaccccgccgccgcgatggatgtcgacaccaaacttttcgtcatgttataaccaacagattccgattactgtgaggctaacccagagcagatatatgctttgattaaactccttctcggactcgtgatttgccaaacggacggaaaatcacaatacatcgcccttgctgccttgccgatatcgctttggactacagtacatggcgccaacatctgcatgcactatgacccacgatacagtacaagaactaaaggccttgttagctgaatatgttcacgtacatgcatgggatacatgtgcatgctgacctctgtgtatgcaaattcaatacggtttatcat

SEQ ID NO: 25961 - DNA, 364 bp, Oryza sativa
gaactatgtacgtcacagcgggtgggttgtgcgggataacgtgcctgtcagtgcggtgtactggcgaagaacaatggcacgccgagatcatgagagctttgtcccagattcggagaaagagatgcttgggaccacaatgctcgagacattcacccttcctgcgggtacagaggacaaagtgaaaaggtggactctgaagaaaatggcagaacagtttcagagcttcaagggagatctgtaccagaagtatatacttgaggggcagacaccgaacttcgacacattcccaaagctaaaggatcactgggacgagttcgttgcatataagacaggtgaacaatggcaggcgatgatggaaagaaac

SEQ ID NO: 25962 - DNA, 419 bp, Oryza sativa
  unsure (1)..(419): unsure at all n locations
tacctttntaatgtcttatggaccactgttcttggtctttgcaacaaatgtcaagccaagtgaagttaatgtgccattgttgtgccacaccatgtattattgaacaaatccataccaacagcatggtttatgagccataatttgcttgtggtccacgtgacctggctactttggatgattttgttgtgcacttgtgcttaactacttacagtgtctgcattatgattgtctgtctgtcattcataagttagacctgcttctgttatagtacaatatggaatgtaagacgttatggttggtttggtccttgaaaggagaggctatggttgtaaaggggtggttnttctatcctttaattatttcctagcaagtcttatagtgcatcactaactgtaatgccgtggacttgtggtacatgc

SEQ ID NO: 25963 - DNA, 453 bp, Oryza sativa
atccttagagtcacctgaggctgcaacttaaacctcaggagctaaattgctttatttatcatgtatatgctgtaagtaaataatacatcataaaaccttgggcggtacagaaatgcacaatgataatacctcaggttcaaagtataaagattggagcatgtcaaatccacttcctttaaatttgtggacagattaagattgattttagacaggcgtagataggttgtcattgaagggatgatgactttcttaatatttggacaaccagtacaattcagaacttcaagcagacgatcagacctttcactgatctcttcactcctcactggtgctgaatcaggtggacaaacatcaacaggcatgtcaccagaactgcagtcatctgacccacacaccaactgatgcaggtttgtgcatccattcagattcacattaaccatatttgtacaacat

SEQ ID NO: 25964 - DNA, 202 bp, Oryza sativa
gggcgaaatactccgaggcaaggatgtcactggccggcttaacaagtgggcggcataactatcttcgttcgacctgcgatttattgcacgctttgctatcaaatctcaagtgctagctgacttcgtagctgaatggacaccggcacttgccaccgaccgcgagcccaaccgacagttctatgtgatgtgctctgacggctcg

SEQ ID NO: 25965 - DNA, 397 bp, Oryza sativa
  unsure (1)..(397): unsure at all n locations
agcttagcctccatggcgtcgagagattggcgcttgggagcggattagttgatcggcgccgtggtgaaagactcctccatatccagccgaaccagaaccggatttacagcagccgcacccataggtagccgcctacctgagcatatgaattntaccagcccgatcgaaagaatatgagcctaaatcgaccacgaacgacctgaatctgataccactgttatattcgcagcgatgatttcagaaatagatggggattttgggaagaacagaaggggatatgaagaacagaggagagaacagagaaagttgggggaggatttagttcttccttttattcatgatgcttccccaccgaaggggtccttgcttatagacctacagctaacacagcatgagc

SEQ ID NO: 25966 - DNA, 356 bp, Oryza sativa
ataccagctgctgctacaacggcgcatggctgaggtggtcactggttcgttgtctagaccactcctcacactcatcttttaactgcagtacatccgtctacataaggagtctgatccatcgctgtcctccacatacagaatgtgactaaagcataatctcgactactatataaaaacaaactttgaaagaaactagtcatatataactttcaacccattgatccatactaaacattttactgacacacataaaccatcatggataatatgctcataatcctctcggataagaccaggaggaatagttcgcatcatcatggtaaacgcaattacgccaacatcaaggataggataaa

SEQ ID NO: 25967 - DNA, 413 bp, Oryza sativa
  unsure (1)..(413): unsure at all n locations
agcttggccgaggccatgtngctaatattcctattgttgttgaagctctctgcaacattgcccgttcttcagatgactggcaatacatggctgatgattgtttactttggttggngcaggattcaaatacatgtcataaggtaggacattcttaaatacatcacatgcatcacttanaaggactctacagcacgaaccaattttttttttgtcttgtcttaataacttggggtctactcaggtaattntttccagattatagctattttttaattagggttgcttaagatctacgccagtaaaaaatgcaaaaactatatggaacatatactctgatgtaaattttaggttctgtaatggactaaggaggacacacactgtgtttaactggaatagtatgtgattgatacatt

SEQ ID NO: 25968 - DNA, 409 bp, Oryza sativa
  unsure (1)..(409): unsure at all n locations
tcccttacctaaattccccatttcagctgacgagatgcactgatgcatgcccggttcataccatcagaatatcagaatagtagctgttactatatgttataaaaggttgtgtgtgtgtagcggcacgaacactaaccttctcgatcgcttcagacatttatcattcaagacacgccatatgactacacatgaatacacgatatttggtaacgagattcaatcaaaacctacatccccgaagctctgattatatgcacttctacctaacnaatattagctcttacatctacgagttcatgggcctcgacgccatcattctcctatgtgtctacgctacattgtagtcggtatgcatggttatattataagtacagatcaccatctaccacctattatactctaagctaac

SEQ ID NO: 25969 - DNA, 460 bp, Oryza sativa
  unsure (1)..(460): unsure at all n locations
atcctctgagtcacctgcggcatcaagctatgaaccctatatgccagtgttacatgttatgtattacacaaatacacaatgacaatcctgccactttgcgagcacgagtggaactgaggaagtactaaaaacaatctgttaacttttgctttagaaaagctttctatggttctgccaaaccagctctgtcagtagaccactgagcggtgagcaccatctaaaccgcagaattaatatgcaagccagagccagggatatatacatcacaacttcacaagcccactggttctaatagaagaagcaaaagcttcagtcttcaactaatactggtataaagccctgagacatgcataacatacctgcacttgcatttcctgcactgatacttnctctcgccttcgatcatcttcacgccaccggacctgatcacggtccccttcaaagtgagcagagttcccct

SEQ ID NO: 25970 - DNA, 446 bp, Oryza sativa
  unsure (1)..(446): unsure at all n locations
agctttatacagtgatgaacggcgtatatggtttgctctgatacgggtagaggatggtattctggacatcccatccttgaagccattggcagagagtttatgccttggttacgaccatcttcctctctatctgaggactntgttgctatgttgtagtgtgtaccattggcttgatggtgggattgttcaaaggggccgtttggtcacaaggtggattgctgaatgatttgtttcagaagagaaagcagcagaaggttactttgatgagcttgtcggcagaggatggatgaagcatatagggttgaacgagtatgagatccaccctatgatgctggccatccttagatacaaatcgaaggagtacaattgtgtaacttgtttgggtacgggatctgatacttgtactagtgcatctctatcctactcctctccaacaatggcgattc

SEQ ID NO: 25971 - DNA, 461 bp, Oryza sativa
  unsure (1)..(461): unsure at all n locations
tattgaccggcatatcattcatcctatggacacaagatacatttctgatttatagacgtgcaaaactcacggaattatgcatgaatttttgctgaacaagtccttgacccaaagattcatcgcgacatcatctcatgatcatccaagacttggaatcaatactaccaatgcacgccacctttctgtccatgctggcgaactgagagaatgcgtcacatctgatgaagaattatctcgcgtccgatctctgacaatctttggggatgcaagtgatgcaatntcatattctcgcaagtgcaagctgatacgaatcttggatctacaagaatggaacaatctatatgacgatcatctgaaacacatatgcaaactgtggcatctgaaatacctgagctttgggggcaatatcattgagcttgcgaggagcattgatggacttcattgtntatagacactggatt

SEQ ID NO: 25972 - DNA, 51 bp, Oryza sativa
agcttgttcgcctgtatcatccctgtctcctttcttgtatatgactcgttt

SEQ ID NO: 25973 - DNA, 487 bp, Oryza sativa
  unsure (1)..(487): unsure at all n locations
tatgtactcacacgagaaatttacataatgaagtctacaactcatgctaagtccaaattgtttatgcactagcccagaggcagaggatattctgctcaaatttcttaaatgaatccaactcacctgactaaaagacatgctcaatcctctgctgtggaaatcaatgtacttgagcataaacataccacagtcccacctgttcaaatatacgatgcttgtgtcaactaaaactatattgttgtccatcgtaacatgttcatgaatgtgccaatgcttatgttacaaaatgaattcttcatatggccatccaaccaaacatggattaaaaaaacatacagataaccgctgaaggttgaacacatgataatacctaacaaatcatggttcaagctattgaaagtgattgtgttccataatactgaatttatgcaggaaataatcattagcacatgcaatacatacncattttgctgcanaggaatatcat

SEQ ID NO: 25974 - DNA, 257 bp, Oryza sativa
  unsure (1)..(257): unsure at all n locations
aaaagaacctccaaagggttgaaccggaagaatttttccaaggatcgatatatgcctggtacatatattccggaacatatcctatacacataggcccttcgcgtgtacacaccgtgtacaccaactaaaaattatcacaaaaaattctatgaaaattcatacatgtactttcaatagtattacatctacgtacaaagtcgcatcttcaaattcattctacatagagaataacaanaaagaataaattctgacaaaat

SEQ ID NO: 25975 - DNA, 326 bp, Oryza sativa
tcacctagcgcatatcagatctatgtgcactaacagatgcatttatcaatagttgtgcaagctagtacagatatttcagaacatattgatacttgtcactgtgtaccttattcaacgaatcaaacagcatatttctttctcctcactgacactatgcttgtgggtgtgtgatgcggacaactcccagtgtgtgcgacagcatgcgtcgctctcagactctgggctggtgttcttgtcaaagacctcgagggcgatgttagcaaccttcttcaatagaatcaaacaacagtagttctcaatacaacttggaagtgtttgactagaac

SEQ ID NO: 25976 - DNA, 386 bp, Oryza sativa
  unsure (1)..(386): unsure at all n locations
gctgagatggatctactttctttttcatgaattcagatacgcgaatttaaacccaaaaaagtttacggattgtttgctaattccaatgatattttccttttgctctcattagcccatattttcaggtgtatctgtgattagttntgagacaggatttctgagttggttttaacataatctaatagcggagatattggttcagaaaaaaatgacccagtcagagttcagacttcagacttcagagtcgtttttagaggaaacattagcatctttggtggcaccacctttctacaagattgcgggcgtgagtatggtccgttcttttctccaacaagagttggatgaatattaagattntcatgtcatatttttcaaactattaaacg

SEQ ID NO: 25977 - DNA, 472 bp, Oryza sativa
aagtgtatatcacatatgatgaacctattgaaggatactattatcgtaatgcaggcaaccttcaagttgggaatgcgaattgcccaacgcaagtgcgtgccgtgcctctgtgcctcttgtcctcgctcacaggctatgaacccgtgtacttatcaccgatcggccttgcatgcgatgacagagaaccacgtggatgaaatctttgacgtggcatatgcatctcgaatcgacgagggcatactacaatcatctcttggcgaaaacgtacaagaaaaacgaagcagatcagcgcccagaagagactcccaaaaacgaaagtgacgtgtgctagctactgatggacatgatgatcatacgagtgagaccgatgccgtatataatcttgcggacaaaattttgacccacgccgcgcgcaccggccggcgtcacatacccgtgctatctacaggaccgatgtgctattctatctata

SEQ ID NO: 25978 - DNA, 429 bp, Oryza sativa
  unsure (1)..(429): unsure at all n locations
agctngaaatatcatccaatgctcanagaatgttgtgtgacttcnttttaagaaaaaagtgactntnttattagtaaaaagaaaaaagagagtttctccggtgcttggaaatgaagatgaccgttgatccaacctaatctaatggtttacaatacaaggtacctataaaaaggtacttnaaaactangccaggtattagcttatagattggttganagggtagatccggtaattttgctatagtatcatattagatcggtataagaagttcagttgttcttcataaatctggttgttgggatcatggagcagttctgtatggtgaatggccccggaggcccggattgtatatgaagttcccgttatcgattacagggaacaaacattgcgttagaggtggaagaagattgccgattgcacatactgaaa

SEQ ID NO: 25979 - DNA, 482 bp, Oryza sativa
  unsure (1)..(482): unsure at all n locations
ggcgacgagccgagctcgagctgctcgcgagctccgtgtttttttgacagccctacctactgagaccaaccgagagcatgatagctccacaagttaattnttntttgccggacaacgagttctggggccaccattttctattgccatcattttcaaattacttgcctgtacaaacttttagtgattaactttgccattattttcgattgtcataattctccgtttcgaatgataatatatgacactcgaaggagaaatatagctgatattgaatgttaacaaatgtacaactggtactcacagcttaatttatctacagttgtatgaaaatatcttgcttgacaatttagaaacccagaaacttgggcatatccactctgcagatggcacaatgcccgaacaagagttaaacaataattatgtgatggcttagagaactgtaatagaggtgtaatataggtgggcagtggtactttacttta

SEQ ID NO: 25980 - DNA, 196 bp, Oryza sativa
taaattatggctcaagctaagttctctctctcacacactcatgggagttctaccaaccggcacaccgatgtatggcacgcctctccgctctaccttaacggttgtccatcgtagcgcacctgcctacctatgggtgaaccatctatgcaaggatacttgctcccgtcagctatctaatccgctatggctataccca

SEQ ID NO: 25981 - DNA, 424 bp, Oryza sativa
  unsure (1)..(424): unsure at all n locations
gccatccattattcttttgttttcaatctggattaagaatctntacccttattgctcttagatcaccctaatactgttctgtagtcacatccaatcacttatccatcaaaagcatgacatatatgtaaattatgaagatcgtctacatgagcatgtcgatgttcttgaggctgttgatgcgctaagagagatgggctggtccaatatgaaatatggccaatatacgtagttcaaagaaaaatattatgtgaaaagtggtccaaagtaaaactttctgactaattctgcccacagtacaattcactctgaataaaattatagaatcgcaagaaatctaatggtaatatangaaagaatttgaatctanggcaatggatatttcaagacatttcaccttatctacttgaaaacatctattcatcct

SEQ ID NO: 25982 - DNA, 487 bp, Oryza sativa
agcttcgctgcatcatataattgtatcgaggggtgtcttgtgtttcgtgattgcgtgtgaatgtgatggcctctggcaaggggttcgcacggctgatcgacctgagcttgttcttgttggggggcggggaatgatgattgggtgtacacgtgttgagttctagtttgctggtcctttccgcttttctgaaaaaaaacaggcgatggcgccgacctggcaagatgcattgaggatttgaggtaacaatagacttactgaaaattattttatgtcatacatattatgaagtagacaatactacaaatctctacttcatgcatttcaatatataaataacttctgactatatatatatgtgaacaaaggtatgttatgtgattatagctcaaaattactatactttgaaatgagggagtaattactaatactacataagaatatgttcttgtgcagtacaatacattactcaatggatttagatctcttg

SEQ ID NO: 25983 - DNA, 394 bp, Oryza sativa
  unsure (1)..(394): unsure at all n locations
tgcttctgaaagaatatgagtgataattgtgcttatataactagataagnttctgtggtatatgaacataacaaagaatgacttgtattcttttttaccaaaagaagagcatgactaccttaaaccagtgagtagttcaacttcaaattggttaggtgtaagcattgtagcaactgggacaacctaaggatgattagatcacaaaatgaatgtattaggataagtaatcatatatgggggcatgtgcaagaattagagcatgcttaagaatcatgagaaataaaataacatatttgaaatgacagactctggcctagagtttttcacttgataactagatcagcaaaagtgaacacaagctaagaagaccaacttctgaacacaatgtgcacag

SEQ ID NO: 25984 - DNA, 387 bp, Oryza sativa
  unsure (1)..(387): unsure at all n locations
agcttcgtaattacatagattatgccatacttctgagagatctgtnattgacacgaaatttaaaaagattagatctatgcagtatctaacagggtatacttcctttagagtgcaagatattcacctgcatggccacaggaaaatcatcctgaaaatctggggggaagaagagatcagcttgcttcttggaaaaccctggtttccctgaaataaatgatatgaagaacgagtgaacagaggaatgatttatccatgaacatttattcactggtaatggcctacaaggagaagaatggngtggaatatataaccatttgcagaatagcactgactacactaaatgacaaatgtgtgtttgataaaaggcattctacttatttcttactc

SEQ ID NO: 25985 - DNA, 342 bp, Oryza sativa
  unsure (1)..(342): unsure at all n locations
tccttgggtggatggngatgagcagtcgtcctatgtaccccttgtggacaagttgaagatgatgagcggcaagattatttccgaggagcagcgtctagtggagttggagttggagttggaagatgaagatgatgtggaagatgatgagttggccgagctgataacggcgcgagacttccgtgtcatctgggaacatcgcttttaccctcgctattccttcatcgacaccagtaagtataaatcctctccgccccggcgtttattctgcttacgttttttctttacttaacgcaatcaatattatttttgagaatctatctatcatgttgtgtatcaccatta

SEQ ID NO: 25986 - DNA, 442 bp, Oryza sativa
  unsure (1)..(442): unsure at all n locations
agcttctgctttcttcaatccacccatcgatttatattgaagaaagagtagaggcagagttatgctcgaattataccatgatgaanataaaataaaataaaataaaatatcgcgagacagtcagcaccaatcgctcaccttgctcgatgccttcttcttcttgactntgatcttgcgacccatcggaggaagagaagaggggcagctcggggagaaggagagaggagaagagaagagagggcggaggttggaacttggaagtggcggcgcgcacgggcaggggggcgagccctaataggcgctagcttatctgggccaaggccgaatacttggataaagagtggcccactgtgccgtcatgagtagtaacatggtgctagctagattctccagcccatacaaaatgggccgtcttaatccgctcccaattgacaccttgaat

SEQ ID NO: 25987 - DNA, 486 bp, Oryza sativa
  unsure (1)..(486): unsure at all n locations
ttgcatccgcaacccacttgtgcaacatgccctgccgctgtttctatttaatgtttttctcccagaatgtagtggtgagctaccagagattggtttcatgattctttcaagtctcaacttctcctataccatgcccgcttacatctggcagctttcatatgtcataaactgccctcacagaccaacacatgcccacacatgcttgcgcaactgcgacacacgcgcccgtgaaaactctggaagaatttcccgatcggtcacccatccctaaattgctccatgccaagcacacactttgtccacactcgtgcacactcgggaagaaattctcggccaagcacacactttgtcctcactcgtgcacacttgtgaagaatttcccgatcggtcacccatccctaaattgctcatgccaagcacacactntgtactcactcgtgcacactcgggaagaaattcccggccaagcacacactttgtcctcac

SEQ ID NO: 25988 - DNA, 435 bp, Oryza sativa
  unsure (1)..(435): unsure at all n locations
tacaatggtacactttgtggctgtggtcattgcttatttggccattccttcttgtatatatcaatatatgtatagctgatccatgatctgatctggcatcattcttatgttataagactcaggctattatcaatgagttggacattgaaagcgtagagaggcatctggcaaacttattgatagtggtgagctattttcttattntacctctatgaatatttttcttaatataacaacaatattattcgactcctgtaggaaaaagaggagaataatgatgacatggaacaggatgatgttctgatggatgaaatggatgaataatgatgttgcagctttcatgcatcggactgcaagtgtactgaanaatgcttttgggctaattactattntgatcttatctgtgttacctatagaactcgaactcaatatatg

SEQ ID NO: 25989 - DNA, 447 bp, Oryza sativa
tactaagcttggatgctgttcagagtaatgatccaatctgtgccttctgctatattatgacagtaataatccaatcaccacgcgcaaggtcatcttgtgtctcctgaaatcatcagtcgccttcatcaaatgcgtcgtctacaatctgtgcaggttaagcaccactgctgctgagtttgagcaaatagtagattatgtgcttcacaatactatcgaattcacctcataagtttgtcgccggtgaaatactattgcagcttcaagctaaccgatttagtgacgcatattatgcttctcactcatttcccgatggcctctcattcttgcccatatacctctaattctaatggcgctctaacttactcaatgtaattctagcatatgccccaattgttatttgtggacagtctaatgcatgtacaacttcagaatttcacgaataatctt

SEQ ID NO: 25990 - DNA, 426 bp, Oryza sativa
taaaccaaccacccacaataattgaacatatggggcaaaatgaccaatgcctaatatcttcctggatttttttttcaagttttagtaattataaaaatgtccaagccggacaacaacttgcctagacatgctccgggtatgccgagcatcttcaaattcgattcatcatatctcatatctctccctctatatatacgtacattgtcaagctacaagtttgatgaatgacattatgacatacaagaatagaaagcaaatatatactaaaatgatgatttatggaggatatgtgtgccataatctatatatggtggcatactgaacaagctggttggtagataaagcgtgcttccatgcaagtagagactagagagtgatgtgtaataaggcatatattggaccgtatgggttagagtatatacgcat

SEQ ID NO: 25991 - DNA, 444 bp, Oryza sativa
tgtgcttaccccattccgttaagatgactaactatgtatggtcaatattcattttgagtttgctctatcccttagtttttgttttactaaacaagtggaaattcgtattaaaataggggcaacatttataaaatgaagcttaatgtaaaaaaaaaaggagcaaaatcataatgtcctcggaaaagtagggacgaacaccgttaaatcatgttaacaagagcacatacaaacttcagttaaaaatgacaaaatcaaaaacttcaaaaaatagggatacaatcttaactgaagtattacaaaatcacaaagttaaaacataaggtaaaatcgtagctgaagttaaagaacagaaataagaacacaattgtccatttttacccagagatgactacacggtggcccataaaccatgctgtcttacaaggtgatcttgtgtgcttgtct

SEQ ID NO: 25992 - DNA, 405 bp, Oryza sativa
  unsure (1)..(405): unsure at all n locations
agcttatgttngataaagccaacgagtacgcctatgctgaagacgccgtcaccgcatcaaagcagtcgggtcccaggtggaagcaaaacaagggtacgccggctacgggaggaggtggaagtaacaatcataaggaccgcaagcgtaagcctgcggaacttgttgcaaccgccagtcactcttctcgacagcgttcgcgcgtcaacacgttcgacaagatcatgaactcccaatgcccgcaccatcctaactccaaccacgtggccaaagattggttcgtctacaagcaattcgcggatcaatacaccaagactgcacggaagaattctgacgaagaacaaagcacgtcgaggaagaatgacgacgacgacaccccggcagggtttcaagatcaccgcaaggagc

SEQ ID NO: 25993 - DNA, 483 bp, Oryza sativa
  unsure (1)..(483): unsure at all n locations
tatcaagtctactttcaaatggatccagccacatgtccatatctgttctggagcggccgcaattgtcattntattcccgactgttttctgtccatggtgctgcgtcacctctttaggcccaatgggctgtgtatccaagttgggcacattatgtgcgcgtcctatggttggagcacgaccctatggtcgttcttcccctcttcttatacctctagtcgccgccaagaacattcgggttttgatgatagagatagctacttgctaccggctcgcatcgcgcgtgttggctaaaccgcccgtctgcctgtaatcggaaccccaccatattgtgtttgatagtgaaactttcatctttatctagcaatttcaatgacttttctacttgttcttgcttggtcttcgattgcttgcangacgagtgcccttgtggcatggtgacgacaccacaagttccggtgaccattggagacggtgatcggttgt

SEQ ID NO: 25994 - DNA, 463 bp, Oryza sativa
  unsure (1)..(463): unsure at all n locations
gatcttaagtcactgagctgcagctacccactggacccagaatttgctttttccaagcagcaaatgcgcaagagttgggtagtggcaggattagtaatacatatggtgccctcagttcaaccatctaaccatgtgcttagcttcatggaggtatgagctcaatcaagaagagagtatttatactcatcttacctgccacggctccttgcagctatatagcttttcagatggttaattacttctgcagatttgacaaacgaaactgcaatataatctacgccttcagaaattccaaagtctatgtcaagccaatcctgcagaagttgcacagaaataagaatcatcatttctcaacaacaataactcttggtaacaagccacataaagctttctaagaaatggatggtggactttntcgaatatatgcagatattattcactattacaacacaatgggttgagt

SEQ ID NO: 25995 - DNA, 508 bp, Oryza sativa
  unsure (1)..(508): unsure at all n locations
ttacggacacttaaaactaagcttgtcataatttggttctttaaagatgatggatatatatgatatcttcaaactcatnttggtttatagcacgtcataatnttggttgtgtcgcgaagcgagcgtagctcaatgggctatgttctttttttttaaatctatccactctaatttagtttaagttctaaacttagcacatatacttgtatttagtgatagatgttaattatagtgtgtacgtttatatggtcagtttgaacaatttttttgtaaaaaagaatagttgtgtcaaatcttaagcaaacttttatgtagatttgcccccaacttcatattcattccaatcgaaatgactagtctatgaagtacaagaactggcaaaaaaaataaaatagcccgatgcggcgtgactgacccagcctcacttcacgtcgctggacaccacgtacgatagttgattgttcattngttctatcaacgatagctcggtaaaatcgtattaccacca

SEQ ID NO: 25996 - DNA, 232 bp, Oryza sativa
tttttttttttccccctcctcaaaaaaagcgaccccggcttctcttccacctcaacgccctctattctaatcttttatcatatatctccctggtggtgatgaaacaccgatgatacttatgccgcactaatccttaatttgttcatacttcccaatattacggcggccaacattggacccgtaccaagtttgcttttttcacggaggataagaactatactggccttgcctg

SEQ ID NO: 25997 - DNA, 391 bp, Oryza sativa
  unsure (1)..(391): unsure at all n locations
tcgcacaaccatctatcgatttctcccttccttctctttcttctttctttctntcgatatcccctctcacatgtcaggttatttattctcctcatcctctccggatgatttcacttttgctcgaaatctctcatgttgttgttgtgttgaatgtggcgaacggggaaactctggtggtggtggtggccggagtggaggatggcggcttcggtggcgatgcccgatgcggagcggcatcggcatgtgactgcagctggtacgacaatgccgtgatggactccggcaagtacgtgcactacacgccgggtcatgtggaggcgctggatcggttgtacgccgattgccccaatcccatattctctcgccgccagcatgtactctgcgagttatc

SEQ ID NO: 25998 - DNA, 442 bp, Oryza sativa
  unsure (1)..(442): unsure at all n locations
taatgcatggcaattccacttttggtgcagctacgatcttattttgttagtgcctgtnttgtgcatcggaatgcattgcatggcctgagtttcattttctgtggccttcattcgcacaacttgttgtgtggagaggtggtgttgatattatacatctacatggacgtacgcttgctaatctagcgaatagtgatgtggatgttcttgaccctagctatctctaactttcacgtcaaccttaaaaattcggtgtttggtttttatcttccctttcaatagcaatccttatgttgcatttagattattgggtggattatattgctgtggtttatcaactcgatagataggtgaactaaataattcaagatataaaattatcatatagctgaatacaagctggtcaagtaatagagtagaagaataatttgttacacaacatata

SEQ ID NO: 25999 - DNA, 349 bp, Oryza sativa
  unsure (1)..(349): unsure at all n locations
tacggaccttaaatctcagcctgacttctcttatgtacaagctgccgattggcttggattgtggcttctatatccttaagctcccgacgttcggctagtcttagcttggccttctccagcttgaattgatgttgctcaagatagaccgctagagtaaggatgtcggctagctcatctgggattagagcttggttctcatgttgtccagtttaccaccaagttgtccagtgatgacgcttccagccgatgagagatatcttcaagggttntcttcacatcatcggacaagggaaccagagatttgctggtggtatcttcttctggttcttcatcaagataatctttaatg

SEQ ID NO: 26000 - DNA, 492 bp, Oryza sativa
  unsure (1)..(492): unsure at all n locations
gcttccgggtagctcgctntaatctntcccgctgcattagttatcttttatatttntgtacgacgtgggtctgtatgtcaacaatcgtcgnttgtgtaccttggcaggtcctggacagggatttaatgcacattcagcttagaaattctgattcgagaatttctgggtgtgacaagttggtatcagagccgaccttgaccgtatgacaagcccactggaaacctaagagccctctgaacccttgctttctcatatgcatatgccctattgcacttggantttgttcgggaaaattatggcgttgttcttttgatttgtgggagaaatcttggtcgcttatttaattggatttctcgactagggacagtctanggatttagtaaacagttattcggaagttattcggcagtcggttgggaattgtcgggtgatatgcattangtcgtgtctatggtcaggtggnggtaagttatgcatatcagtatgactatg

SEQ ID NO: 26001 - DNA, 460 bp, Oryza sativa
  unsure (1)..(460): unsure at all n locations
tacccaaggaagagacttctcctgatccagttcgaatatcttctgagttggaggaacagaagcatgataaaatccagggacaactggaaacaaaggatgatatgtctctcagtaacgcaaatatagagaagtctagtgatagtccagatgcaactcaacatgatagggaagtatctgcactcagtcaagagcatgttcaatctgcacagccacaacagctgccagactgtgcaagaccatccagctcagaaatggcaactacaccagctaccacatcttcccaattttcacctagcaccgcagtgacatctcaagctcaacttcagcaccagattgttagttctcaaatgcaccaatccgacaagctttctttggctgaacaaaatacgcagcagcaaggggcttgcttatgaaattcctcagaatgtccaggcatnctcgcagagtcaagctcaaatct

SEQ ID NO: 26002 - DNA, 453 bp, Oryza sativa
  unsure (1)..(453): unsure at all n locations
acggacctataaaactcaagctgtagacctagcttcttcgtattctcataagcttggtactctgttccttccaactactttttagaattttaaactctcctaaacaacgcatatatatggggaataagttcactttgactctcttaactagtggtcgaatctgatccgtatccctgaaccataccggatatcttgaccccgccccccacacacacccctttaaaacgagtggcaattgactccctcggcgattctggagaacggtttcgctgacgtggagactactcggtgttgcatggcattagaatttaataaatatacagataatcccaaaaggtgccattgacaaacgntcaaatccaagaaatgccattgacaagtgtgaattccaagaaatgccatcatataaatcgatttgtctcaaaatgccatcaccggtaggatccgtctatc

SEQ ID NO: 26003 - DNA, 464 bp, Oryza sativa
  unsure (1)..(464): unsure at all n locations
ccttgtatggttganacaagctcctagagcatggtatgatatgcttaataactttttacttgtgaaaggttctacaatgggaaaggttgacaaaacgcctttcgttcttaagcatggtgataatcaactttttgttcagatttatgtgaatgatatcatctttggttgttcgactcatgctttggttgtagattttgctgagactatgcacnagggaatttgagatgagcatgatgggtgagttatcgtaccttttgtgattgcaaattaagcaaacacctcaaggtacttttgtgcatcaaacgaagtatacgaaggatcttttgagacggttcaagaaggagaacttgcagccaatttcaacaccaattggttctacagctgtgttggatcctgatgaagatggcgaagctattgatcaaaaggaatatagaagtatgaatggatctttgntggatctaact

SEQ ID NO: 26004 - DNA, 481 bp, Oryza sativa
  unsure (1)..(481): unsure at all n locations
tgctgtcaagagaatagatgaagatctagaagatggattttttactatcaatcaacaaaaacaaagtgaaatggaaaattcanattgatgaacaaaattacaaagtgaaaatattggaaatgcgaagaacaaagtgaatatctatggcgagacaggtaaagggaatgcaatactcagctgcgatggaccaaacgatcttgaagggcaagggatgattttgtcatgatggaccgtataaagccatttgaaattntgaatctatgagtactccacatcaatcattntaagtatgaaagaagaaatggttttggtattgacaaataaacattaatgtatttctattggtatattttttctttctatttacatttgaatatatgaatacctattaagaggggtgcaatcattgatgtgtttgatatgtcttggactcaaatgatctatcgaatgcttgtgagagaaactaagattgccgatcgtc

SEQ ID NO: 26005 - DNA, 480 bp, Oryza sativa
  unsure (1)..(480): unsure at all n locations
tattatgcaatcaataatgtntgtcttccttgaattatacatattatattcagacctaaatactattgaacgaattttgcctgagaacaaatatcttaagtgctgcctgactntgaaatttctctgcacacatcaaatttttaaaatgtgttttttagaaagaaaaggtatagccacttttaaggaaataataattgtatacatgaaccagattacaaaagaaccaaagcaaatagtgtgcaatcattaggttacggtgacaattctgaattccactaagcgatcagtatcacaaaccctataaccaggatgttacaactgggatttgggatccagaaagcatgcagaatataaatctagcgacaaataattacatagatgaccaattggggtcttggggaacaactattcctgacaattcgtacactagtaccattcattcatcagtataatcgtacccttctctatcaagtagcatcg

SEQ ID NO: 26006 - DNA, 494 bp, Oryza sativa
  unsure (1)..(494): unsure at all n locations
cttctcatcctcccttccncgtctttcaacttgctttaaatgaatccctacaaggagaggttggaaaagatgatggcacgctttgatgaaatttggggtgatctgcccaaaaagattgatcagattaatgagagaagagaagctctggaaagcaatgcattattctaaaggaagctaagaaatatgggaactatggttttataagtgagctcttgcgtatgatgtatgatcttggatatgaggttccaccaaagtacactaaagtatctactcatgttggaaaccaattgcattgcatgacaactgttactctcgtttccgacaaggaagatctttcccagatatcattcaatggcaaggctaatttgttcttttatgctcgtgaaggagtcgcattcgaagctttgtgttgtctcggtccgcatttcaaggatcgtctggagaatttacatatcactaccatcccgaacatggtgatgattttttgttgaacg

SEQ ID NO: 26007 - DNA, 398 bp, Oryza sativa
  unsure (1)..(398): unsure at all n locations
gtgggaaggacaatacctcatcaaacacaagttctgtacgggatcttttcgcctagcgacactcgaaagcgaggagttcgaccattcctggaatgccgcctctctcaagcgcttctatgtctagaaagggtggcacccaaatcaccaacttgtaaaaatgtacatactgtcatgtaagcccttcggcactatgtaagcccttcagcactatgaaagcctttcggcaagaaaaataaaagaagaaagagagaaaaaagaagaacaaactggatgtagggctattatccaccatggaggcccgaaccagtataaaatctctgtgtcctccgccttctttntaattttttcgtgtgattgataattngtggaaaaatcccaaggcaaatgctcgatcagcg

SEQ ID NO: 26008 - DNA, 441 bp, Oryza sativa
  unsure (1)..(441): unsure at all n locations
tnttaaaggcttaattcagagttgtttgtagctagatcatatgctaagatatcactgatgttntgcatggatgcaatgatgattgtatctaaatgaaattcagacagtttccaaaccagatttgcaaaagcacattgaaaaaacagatgagcacaagattcagacaaactacaacgagagcaggagtttgaaatagtaggaattctgaagttcaaattttttgcagttgcaagagcatttctgagaagtctccaaataaaggttttaacttttggaggaataaatttgcatttccaagttttctttaaaaggtttaattgcaaatttgaaatattagcagcaggtaacatagagttggttgataagactttataagcactttgagaagacaaataccttttgagttatgaatccagtaaagtttgtcatcagtattagaat

SEQ ID NO: 26009 - DNA, 384 bp, Oryza sativa
actcagcttactccattgcgctctctcctctgtcctctttcacgcgcaggcattctctctgcgacaagttcattctcttcttgaccgcagcttctctaaaattaacattcacaacaccatatcttttatatcgtctatggttggctattttatgcttctaaaaaatacacgtgcgtcaatgagaaatgatatttaatcttatcggttactaagtgaaataccatgggaatccttgattttttagtacattagaacaaagtacatgtagtttttaaaaaaagattctaacatcctttattttcaaaaaaacacttaaccgctcatacgaattgattttaagcaatgactaactactaaccgtactataatactgaaaaattagtt

SEQ ID NO: 26010 - DNA, 496 bp, Oryza sativa
  unsure (1)..(496): unsure at all n locations
tcgtcgccacgccgntacaccgccaatcgtctgcgagtcatatgtgagcttcgtcgccaacgccggtcgtctgcttncactgacactgccatccaaccgaacatctgtcaccacaggatcatgcgaagaagatggtcgtgcccagaagaagcacgtgctggatgcatgtgctaggagctagcaagctgttcaaattgctgtgttcgagatatgattagttntttaaactgaatattctttacaatgtattaatctggttttagaatgcatgtaaccagctcgttatacaggacaataaaggagggaaattcagttcaagcaaaacaaaaggtaaaattcataaaaaaatatttttttcagccacatttaaataggtatatatccaattacaaatgggatatttacccaaaatatgcgttntcatggtgtatacctaatatgcatgtttacataggtatatacccaacatacgtgtgtgacttaatatgcgtttata

SEQ ID NO: 26011 - DNA, 383 bp, Oryza sativa
  unsure (1)..(383): unsure at all n locations
tactcaagcttgagcttaatatatactccctccgtcccanaagagaaggctaaccctgagtttccgtgtccaactttgacggtccgtcttatatgaaattttnttataattcgctttttattgttgttagatgataaaacatgattaatattttatgcgtgacttgtctttttaatttttttcataatttttttaaataagacggacggtcaaacgttggatacggaatcacgtttgtcttttttttttttttacggagggagtataattgatcgatcggtcacatcggaatatccttgctccatttgcagccagcaggttgattgaatagaatatatcatcagttcaactaaatcatgtactagtatacacttcttctaaca

SEQ ID NO: 26012 - DNA, 371 bp, Oryza sativa
  unsure (1)..(371): unsure at all n locations
ctaagctcggctaggttgtgttctgatgcaagatgggaaggtggttgtctattcatctcgccagttacgtccgcataagaagaactaccctactcatgaccttgagttagctgcagtggttcatgcgttgaagatttggcgtcattatctttntggtactcgtacggaggtgtatacggatcacaaaagtttgaagaatatctatacccagccggatctgaacatgagacagcggagatggctggaactgattcatgattatgacctgcgaattcattatcacccacgaaaggctaatgttgtagcagatgctctcagcaggaaaggctattgcaatgctacggaaagatgacagttgccattggagttat

SEQ ID NO: 26013 - DNA, 507 bp, Oryza sativa
  unsure (1)..(507): unsure at all n locations
ngcagaatntattgaagatgcaggacttgtaaactgttagctacttaacatactggataattgatcaactgtagagttntaatgaaagtaaggagctgaaactcaattgttgagctgtcttcggttgtgtctggaaagccaaatcagctacgaagaagtcatgaaaaccattactcagagatatcctttgttatcccctgtgatccatataaacaagaggaaaaaccagtacaaaatcagataattgtgatggcacaactacctagacacatagtaaactagccagaagacaaggatatcgagcaactcatactcattagtttgtttgaagcatcaattgatcatatattcatatgcacctgagtaatctccatgcatcaaacagatgatcttctaatatgccagtgtatcatcctgatcaaccatatccaaatatcatcgattatctcanatactcaacgcagcagtgaaaaaagatctggtaaaaacttgtattcattccactgg

SEQ ID NO: 26014 - DNA, 500 bp, Oryza sativa
  unsure (1)..(500): unsure at all n locations
tcctttctcgtagaattatacacaactattgaaagagcatatatgttcttaatttaatttcatcaatttggttgtatgcaactgaattgactaatatatcacgttcaaatagtttgaaactcttttagcgtgtattttgaggtggagtccaatatatatggactttttaggaaataccacgactactatagaatcaaatttttttggacaataccccctaagtaccaccatatgtaaaaatgggtacctggagggcagttcaatgatcgtttacgaaaatcaattntgcgcatgagagcgttttaacatgcccacggacaaaaataaacctagttttgcatgccgtcctttcaagatgaccgcatgcgaaaatacccttctctacccctccactcctttntctctcccacttaagtcacgtctagtcacgtccccatgtctccctcttctcttcccattccttctcttccctctcttaccattccttctccgctcctcta

SEQ ID NO: 26015 - DNA, 469 bp, Oryza sativa
  unsure (1)..(469): unsure at all n locations
actcagcttggcatgtcaattgatggagccgggctgttcatgccgaagctccaacctatcacaatagtgtttccactgactgttcctgttgaagatgagaagccaatatatgccgagtcagtgagcactgttgatagattgtaggtagtagaaagcagtggcttcacaggtttttccacattgaggggggccatggtcacattgatctgtgtgatttctctatcatagtttacccaaacttgcatcgccttctggctaatgagtgtcaaattcttaaagtcaccactcttatcatcgtaaaagccagcatcacgagatttcatggagtaaagactgttgatattgatgccaatgtggntattactgatgtcttgtaagtcataaatttggacagtatcgagctcgatagcaaagatgtggntgtttgggtctccattggtcttgttgttgaaaggcccaaatactgggt

SEQ ID NO: 26016 - DNA, 511 bp, Oryza sativa
  unsure (1)..(511): unsure at all n locations
ctcagcttatttacatcgctacagaagagaataggtggcatttgttgatttcctccaaaaatatttcctaacttccttgtcaaatatttcccgacttgcttgttgccagtcttttgaccgttgacccanatccaaatgcattcgctcggtaacaggagggcgtggattaacataataaaatacaaatggaagatttctgatatcaccgattgccaggactagccacaacaaataaaaataccataaaaagcaataagagtgaagaaaccaaccagttgactatctgcagcagatgaattcgtgttacttggagtggtaacaagggcgagttcccaccctgttggatcaaatcctttatcttgccatgtagcggtgctggatgttgaagcaccagcatctaatagagatgacaaaataaagagaanaacagaacatcaataactttaaccctattgacaatcaccaagaattcaagacatngtcataanacanaagtacctgctggaacaat

SEQ ID NO: 26017 - DNA, 258 bp, Oryza sativa
  unsure (1)..(258): unsure at all n locations
tactatagagaagagaanagctactagagccgtaccctaactctttcaacgcttccggactcctgagttctactctattcctattacaccagctagatactactaaactaaactagagagaaatgagagagctatagcttgaggagggtgagtgaagagagaangtgaattccctctatatctgaactatgatgtgtgtgactgatggaatggtcggtaataccctccaaccgacattgcagcttcatctcaaccgtg

SEQ ID NO: 26018 - DNA, 387 bp, Oryza sativa
aaattccgaacctgacagatgataaaatggtttaggcgaatagtggctatacaaatgataattgtacaataaaaggctttgaatcaccatggtgtagcttacaaaaagggttgtcacaaacacaatataaaaataaaataaatataatttgaaaatatgcagaacaagttattaatgggttcctgattcctccattgtgtaatgtaccaaaatcatgggtgaaatattaatatgttatagtgctcatcatatgctaaggtgcatcgaagctccttcatcaatttgagcctcgtgcaaggcgtgcattaatccaggataacaactactctactcatatttgaaagggagaaaataatgcaacaaacaagcccatgtttaagtgctcta

SEQ ID NO: 26019 - DNA, 406 bp, Oryza sativa
taagcactactttcaggcccacaaagtcactgtgccgtcgcattaccctttgggcgaagtgctacggggcaaggaaattactggctgactcaacaagtgggcggcggagctatctcccttcgacctacattttgtcgcccgcagtgccatcaagtctcaagtcctaattgacttcgtggccgaatggacacctgcattcttccctgaacccgagcccgttgaacagccttgggtaatgtactctgacggctcgtggtcacacaagggggcgggcgccgcggcggtactcactttgccaaggggcgtgccgatctggtatgctgcaaggctgcagttcgacacgaccaacaacacgatcgaatacgaagctgtactggtgggcctaagaaaggcgaaagagttgggg

SEQ ID NO: 26020 - DNA, 458 bp, Oryza sativa
  unsure (1)..(458): unsure at all n locations
taattgctccatgatttgacaatgtggtggtacaattcacatttgttaatcacggattaattatgcttaacaaattggtctggcggcttactcacggattctgtaattaggttttttattagtgcccgaacaccccatacaacaccctatataatatctaatgtgacacaccaaaactttacaccctagatctaaacaccccgtagaaagcttaagcgagaactattctgttatgtgtcaatcatagtcatgtgatttgccacattcatttgtctggttcctgtggcaagtccacaagtgaacattgatcttggttaaatatatgttgagtggagattacaatatcagaacttcagacacagaccagaatatcatatctgtccataatatcagncaacccatatatggttatatacacactatatttgatggaggttgcctatgattcgattatttac

SEQ ID NO: 26021 - DNA, 514 bp, Oryza sativa
  unsure (1)..(514): unsure at all n locations
gacctataaaactcagcttaacatgcggcgatctaagttgaaaacatctctgaattatgcgttgataagttgctcatgcgttcttcaatccaaagggcatggtgatgtagcagtaggccccaaagggcgtaataaacgaggtcttcaagcagtcggattcttttagtcggatctgatgatatcccgagtagcaatccaaaaagctgagtagctcgcagccggccgttgagtcaactacctggtcaatgcgaggtaacccaaaaggatctttgggacaagacttgttgaggtcggtataatcgacacacatgcgccattgccccgtctttttccaaaccagggctgggttagccagccagtcgggatgagggacttctttaatgaagcccgctgctaacagcttggttaattcctccttgattgcatccttcttgtcctgtgcaaaacggcggagtcgtngcttgatggngttggcgtcttccttaacatgtaaagagtgctcaatcacctctct

SEQ ID NO: 26022 - DNA, 430 bp, Oryza sativa
actcagcttatgtggaaggcctcactctacattgataggggcttacgctcttccaaaatgaatctcaacatgttgtgtgtacttacctcctgttatactgattaccttttttcaatgtgctgtttcttgagtcctgattgctgatctatttctctggactttttttttcagactgactcgttagttcttttattgccattaatcggctcatcaagtgccaggtatcatccatccagttttcagtgggtctatgcctttatacctggcagtcataacctgactttgtcttcaactttttaatatattattagcactgcttttctgtggggcattactggagttctagcaccaattctggacgagactcgtgttcgaggattgttaatggtgtccttgactaagtggtaaacaaacatatactatttagctc

SEQ ID NO: 26023 - DNA, 436 bp, Oryza sativa
gtttactatatctaccatctctcttaatgcatatgtcaacactaaaagcaattatatgacacacctggaagtaggacaagaccattctggcacttctgcttgaaagtctataccaattcgaaccccagtaacatatggtttggtatcttttaacatgtactctatatgactcatgccatgaggcctttggttgatattccctgaagatttgaccttttcctctgacagcttgccatactgactctttggtttcttcctgaagcatggcagacaataccattcatcagttggtacctcatgaacacgaaggatgcaacaagacagatggaacgctgcttcgcaagaatcacatataagcatctttaatggatggtctgattttccacaagtcttgcattggaacagtaagttggcatcataaccagtcaattcctct

SEQ ID NO: 26024 - DNA, 490 bp, Oryza sativa
  unsure (1)..(490): unsure at all n locations
nnggagtggtagctgaacctggtgcggtatgtttttgcctactttgtgcttaattctgttgttgtgtatgatcgactgtttgtgttgtgctatctgtatcgntgttntatttgtttagtatatgtattctgtaaattagcacaatgtggcttatgtgtgtggctaccgataagatatctttaatgtcatgctacatcaaggtggtttatctgtgattactantataatgtcttgtgttgcaatagatcccaactaaaagtctgaaaaataaaatactacaaatgaataactatgctcaaatataaaacttacatgcatttgtgtatgagaaccagtggctacctatgtatactcatctgcaaaaaaattacaactgagaaatctctaaatatttagtatttacaacaagattttcaagtgggggtgggtgtagagcataccgtcaccccgactccctcttctaagttctgaaagctgtgcactaacacta

SEQ ID NO: 26025 - DNA, 308 bp, Oryza sativa
tcactactgtcagaaaagagagttcgatactattagggcatgattacgttctcaaaacatcacatcgaagctttggacacacgtattaagcactaaatatagatgaaaaattaatttatagtacgcgtagagaaatatactcgaaataaaactgttaagccaaattaatgcatgattagccataagtgctacggtatcccacatgtactaatgacggactaatcaggtttaaaagattcggctcgtgagttataggccgagcatgaaagtaggtcgtcttcatttatatgcaaaaaccccttcctata

SEQ ID NO: 26026 - DNA, 501 bp, Oryza sativa
  unsure (1)..(501): unsure at all n locations
acggacctatgatactaagctctgacagataaacaggaaagataatctaaatgtatgtgattattaaacatctaaatcattaagaataacttgggggaggatgtaacaatgtgattatgtgataaacaggtttgcagacagcaaacgttttcgctagtaaaagtacaacagcaagctctatcttgctccagttcatgctagcagcaacaaacatatggaccatttgctctntaggtgtaatccaccgcacgagtgtaatctacaccagcatgtcgcctcaaatcaccagacattattccccaatgctggtcatagcgaaatttggagggcacagtatataatcaacctgtttggcacataagcaagtattccactaccaaaattctagcttcaaatctcagncgaagccccccaaacccaaaacaatccatgggatcaaagcaaggcaacacgtaaatacgtaatacgcccacgagaacagcgctncacgccacaatccgt

SEQ ID NO: 26027 - DNA, 378 bp, Oryza sativa
  unsure (1)..(378): unsure at all n locations
tcttacctatntatgtataagtttactctagtattaaattaagaggatgcttataatggtaattaaggtggaatattttctatataagttaatttatttacagacttccatattcatgacatgatttcagatgagtagccaaattagtttagtgaggcttgacattagctatgttgatatattttaaggggtatggtttatattttaacttcctctagctagcactaagccctaatggtttcngtggttatctagatcttagntattattcatgagacctattatgaaatgcanatcgataatgccatgcatatgaaggactcaagtgaaaacatgtcctatgagagtatgcatgcttacacataangttacattttt

SEQ ID NO: 26028 - DNA, 453 bp, Oryza sativa
  unsure (1)..(453): unsure at all n locations
ngatacacgagcatgtcgctctgataccaattgatctctcttgttgaacctagaagtgggngaataggcgtgccctgtaaacttaaaaacaaatcgcagccggaaattcctaacagacacggaacttcctgggaaggaactccggaacttacggactgccaggcccagatctttcggtgtactaagacaggaattgccgggttacagaatagagatgaaattcaaatttcgaaacataagactaagccaatcttcacaagatggtgcacaggtattctacgcatatgatatagcacagaatcatccatataaacatcacaggaagagaccagagccatgttctcccgaagttcggatgttgccaccctactctacgttgaggagctccgaagagctgggactcgattaacccctcgtctcacttgtgcaaaaccccagaggaaatccacaacc

SEQ ID NO: 26029 - DNA, 499 bp, Oryza sativa
  unsure (1)..(499): unsure at all n locations
ntcagcccacacagctcanaatagtgcaggtggtttatttgtccggtctaaataattgagggtgtaaaatatctggtatttgagtttaagggtaattcgttcgaccgcaatagttatgggggtaattcgtactttttcctaatagttatgatacaaaattaaatttattagactcgtattcaaaggtacttataattatacttttatatcacataaatgttattatgatatcctaatagatcaattgttggtcaaaactttattgtaacaaaaccaatttaaattattgatttatgagttatataatttgcaacattgggagtactagtattatcacaagtaaaaccaatttaaaccattggattatgagttctatccagagtagaacaaaatattctattactagtagttgagttgaggtggtagtacanaaatatataatccattcaatatgaaaagacgaatgatctacactaattctagtaccanataaacatac

SEQ ID NO: 26030 - DNA, 114 bp, Oryza sativa
  unsure (1)..(114): unsure at all n locations
ntgatagatgaatagtctctattgataacagaagctaatggttatgtagtggtgagtccgccatcccaccaccacctctttgttttgtactctctccgtttcacaatgtaagac

SEQ ID NO: 26031 - DNA, 387 bp, Oryza sativa
  unsure (1)..(387): unsure at all n locations
cttagtacagtactacctatacntttggaagtgatggctcttgacaagttgtcaacttggcaattgccatgcgatggccgattggccgaggccgacaggtcagactgaattcagtgaacccgtctggtggatgtcaaatggcacgtgggacagggactaattatatattcgtcgacatcacggaaacctctctgtagcagctgtttgcaccctgccttaaaaaaggaacacgcatgctatatatcgcttaattagtcaaatgaaacttgacccatttctaactcanaatgactgttgcggtcgcgtatggaatgatatcgagaaaaatccgtgcatggctatgtgtaaaccgttccactttttaccgtacgtatacgttcaaacttg

SEQ ID NO: 26032 - DNA, 500 bp, Oryza sativa
  unsure (1)..(500): unsure at all n locations
ntatgggacaatcgcgagggagacgaccagctttgtgggactgagggagtatacaattagtcactcgttgtgctcataaaaatactgaagtagaagtttagatctaagactaagcggactgtttttttatgccaactagctgggtggtccgcgcaattgcgcggctagcacccaaacaaaatcatatattttttagtatgattntacttaaaatttattaaatagctatctagctatctcattgtcttaagattttgaaagaccaaaccttatcatcctcgtgtttctaattatatagttttcaaaagtcacaccagttgctatctcttatgtcatctccttttttatttgcttgctcaatctaccactatttctattcattcttcttggaacctttaaaaattagattttatatatagttcttagagtttattggcacgttgggtttcattttatagtttctagatgtcccgtcaaacgttgccattatactcctctac

SEQ ID NO: 26033 - DNA, 464 bp, Oryza sativa
  unsure (1)..(464): unsure at all n locations
ntatatattanggtgaaatctccaataatgagccaagcagatttcatagaggtctgcagagcttcaagttcagaaagaaaattgattntatctggctctaactgtggcctataaaccaccgtgatagaccattgaagcccctctcccctcattgttaacactgcagatacagagtaggtgccaaggagtacatctgaaatggagaagtaattctcatcacaagcaagcagaacgccaccccttgtgccggtggccggtagagaaacacagtgccgaagaaatctctggcccagagtattgagaataatgcgatcactgatagaagacaacttagtttcctgtagacatacgatggttgcaccatgctgttgtaaaatacatctcacagaatcctgctttgctttggaatttaaacctctcacattccaattaaacagatagacattntcttgtgacatgggaac

SEQ ID NO: 26034 - DNA, 497 bp, Oryza sativa
  unsure (1)..(497): unsure at all n locations
ggaaacacatgatgaaacanaggttggttgaaggtatacatcttattatttcttctgaaactgatggaatacgactactgtattgaatacaaggctgggaaggagaatgtggtggcagatgctctatccaggctaccacagggaaaatcagaagaggaacaatgtgatgccattacagtagtgatacctgattggatcctggacatccaaagaagttatgagggggatatacaagctcataagattctgagtataataggaactgacagtgaccctgatcagcaatatagctttggaatttggaatcctaagattcaaaggaaggatntatgtggcggaagaaacatccattagagctgatntaatcagggactatcactgtttggcttttggaggacactcacgtatgagagctacttatcacagaattaagtctttatttactggcttggactgaaaagtgtggacaattattaaaaatgcctgttgtcagtaca

SEQ ID NO: 26035 - DNA, 147 bp, Oryza sativa
tcagcttctaagaggtaggcaatttctttcgtagttcacgtttcttcttctttaattatgacaattaagctcacaggtcacactgtgattagttcagtgacaaacttattatgtagagaaaatcccctgtgtaccctcgaaagttca

SEQ ID NO: 26036 - DNA, 500 bp, Oryza sativa
  unsure (1)..(500): unsure at all n locations
tcacctcggttagtgagccagcagcatgtatggggtggttttggccaggagttcggccatgctgggccttgggcctgttgggcctactangctgcgcaacggtgtaaatgggccaatagagaggaaagcgagctgggctggtctggaaaaagtgggccggcctgtaagagagaatgaaaagatgtcgagggggttggatcaagggagtggatggaaagtatgggccagtagagaagaaagaattgaatgtggcccaagtgtgatatcctaaaattaaatttgggactttctatcatagtatagtgggccggatgtgtataatttaaatttgctgtcatacaatgtcccatggcacataatagtgcctccctgagtccctggttacttcgtgtagttccctggttatgtaagtatagtaatccttatggaaggtagttctgtanactacactgtaacttcatgtcttaactcagttaaagaaattggatgaaatattctaa

SEQ ID NO: 26037 - DNA, 519 bp, Oryza sativa
  unsure (1)..(519): unsure at all n locations
tacggacctatgatactaagcttacagcgatggttgcgtaggttgacaggtttagtgacaccattcatattaaacaaacgcttcatggcagaagttgttgatcatgactgttttgctggaggcggctagctagttcgagataacatttatggcactgtctgttcaatatacaaccctaattatttgagtgtgtaacttgatacacagtcacaccgttacgtgcacaaattcatatatttgccgtctgcacatgcttgaaaatcgtcgaacggtcgaaagcactgaagtcatgctagagcacggacacttacatacccacggaaaaatattagctaaatactctaaaattttgtgtatgccagtctcaaatctgactgaaactctaacggactagatgcacacccccaactagcattntctgaatgctaaagttaatcaattatcttacatcatcatcttttcgcttatacttacactaacttatcaacctaaaattanagtttcaatcttaaatttaag

SEQ ID NO: 26038 - DNA, 485 bp, Oryza sativa
  unsure (1)..(485): unsure at all n locations
nnctttccaaattcatgaattagccttacaccagcacgatacgtgttcctccatcctagtcatactggagatatgacctagaaccgttaagtggcgggcccacgccttgaacttaacgccgtggtggcggacacaacgggaacccacccacgtggcacaataccgttgtattggacagacttagtcacctaaactaccacgtcggggtaaataggaagttcctctgagttatccgaactcatacacaccggcctaccagaatgtaaggctaaaccataaataatttactaagtttggactatcccatactagcacatgtggttgtactgtatacgaaatgaactgacattgagtgaagtccttatgtcggtttgggcgcactctccccctatcggtacacaactaatcaccatatgtgcaccacttgaggcccanacctaanatccatgctttccaccattntatttatcaaaatcacaagtatt

SEQ ID NO: 26039 - DNA, 408 bp, Oryza sativa
  unsure (1)..(408): unsure at all n locations
ngccctcaccanagcanagcagcaacacgattcgcatcgcatctcatgctcatgctcatcgcacattcgcatctctcatgctgccgatggagacgtgcaaatgggagggcttggcttccacgcgcagaaacaccgaggcaaggctgccttgcacccgattccattcttcttgtgcttctgcggggaggacgaccccaccgacaccctcctcgccgtccgatcgccccaccgacgcctccatcatccaccactctctctctctctctggtcccacccactcgctcgctctctgtgggccccatcgtcgaaaagttcgcgccgatgcaaatctcgtcccacacctagccggtaggcactagcaagggcatggttgcaaatatcacaaagntgcttcacatttttactaac

SEQ ID NO: 26040 - DNA, 449 bp, Oryza sativa
tggatgcatcgcagtacacttggagacccttctttgtatctatgctaatcaaaatgggtgctgatattaggcgacttttcaactcttgaaaactctgctcgcactcttctgaccacttgtacttcatatttttctgaagcatacgagtcaagggcttggcaatcttggaaaaattctctatgaacctccagttataacctgcgagacccaggaaactgcggatctctgaaactgtcctcggatgtttccagttggttacggattccacattactaggatcaacggcaactccttcagttgagatgacatgaccaaggaacttcacttcagacaaccaaaaatcacatttgctaaacttggcatacaactgatgttctccaacttctctagtgaagacgaagatgtcttcatgctcttctatggttatgagtaatgaaatgtcttcataa

SEQ ID NO: 26041 - DNA, 356 bp, Oryza sativa
caatgcatgtcacatcgaatatacagatacacatttgtaatattaaacatatgctaataacaaaacaaatcacagattccgccatagaaccgcgagacgaatctattgagcctaattagatcgtcattagcaaatgtgtattgtagtaccacattggtaaatccgccgaatccgaatttattaagcctaaataatccatcatgagcaaatgcttactgcacaattaagcataaaagattgggacaatttcttatctggctccggtttaagtctaactaccacattgaccctacctttttaaattatatatattggcctgtgtttgaaaatgaaccttaccctgtttaactacacca

SEQ ID NO: 26042 - DNA, 495 bp, Oryza sativa
  unsure (1)..(495): unsure at all n locations
gcattacgcgacctataaaactcagcttanatggcctatcttggccatntgaactcggaattggactcgttaagtctctaatttttccttaagatgtaaagaacccacttttgtgctttgtttctgctggtatgtggagttatttagtgttaaagcctttttcttttccgctggtcgtgtagacgctgcagcttcggaagatccgctcttcgtggaagtcgaagccgtcgagtgggaaaacgagcaaggcaagacacatcatcttgatcatattgaatcccattctataaaattatgttgatctaaattattgcattatcgctctatttaaattcccgcgtcatcactgttntacttagccatgcctatttacctttgttatgaccatattattattgctattggtattattattaccttgttcaccctacgtaaacaaaaccccaactagtggacactctactcatggtatccctagtgtaattttacgtagat

SEQ ID NO: 26043 - DNA, 439 bp, Oryza sativa
  unsure (1)..(439): unsure at all n locations
gacctatagaaactcagctgacaaaggcatcacagaatctagttctttgattgttactgctgggagacggatcatttagcactggtttatgagtacatgtctcaaggcactctctatgatcatctaagaggtttatagattgcagacttaacccctgttctcgaattgttctgaaggctagtcttgttcaatggcataacacctatacactatatttgaaatgacagggcatcttgaatgaccttctaatgatatctatttgttaatatataaaaatatgaacttacctttctagggaatatttgcatatttctattcccacctattggactaatnggtaaaatgtgttgaaactggcatggattacgcgatttcaattcttaattatgacttgcacatatatctaaggtataatggcgcacgcgaaactttgagttgg

SEQ ID NO: 26044 - DNA, 385 bp, Oryza sativa
  unsure (1)..(385): unsure at all n locations
ttacctcatatgtattgatacagcataagagatgactaattgtctgtgataaaaaaatcaaggtcatgtatattgtctgtcgcaccatcggaatctcggatcgttgcaatgatacaaagaaattgtaagcttgtcaagtcacaaacgatgggtaaaatgtcctgttacatcacttgaattactgcctggtagaacttagaaacaattaatcttagggtgtgataacggataaccaccccattatacatgacgttcgagataaacgataccggatagaaaagcgtctaccctcagttacttgcagatatgataagtccggaatggnttcagaataatgcaatagaaggctccttccttgggccataaatggtcactgacacatatc

SEQ ID NO: 26045 - DNA, 500 bp, Oryza sativa
  unsure (1)..(500): unsure at all n locations
ctaagcttcaggttgctgctgcatcgttccnctcggaccgtagtgtctctactcctggtcatatgctgctacattgacttgcagctccatctatgtctccctcttatgccgcagtgttgccgctctcgtcgttttcgccgccgttttcacattaacaccatagtcgtcagcactaatcatcattagccagtcatcatcttcgtctacttcaagcatcgacacctaagactaaatataatatgtttcatattaatagtatatctcccttcctatactatttaacataaatatgttaaagtaaatacggagagcattgtgttccgcagtaaaaatctcaaatgcggcagcgaactgctgtatgtcgttcagctacagtacgaacgttaatgtagaagtntttctttccgatgtcgcggcgtataattggagcattggatctagagtacagtgctcatgattgaacagatagccgagagatggcatgatgcatgtactactag

SEQ ID NO: 26046 - DNA, 446 bp, Oryza sativa
  unsure (1)..(446): unsure at all n locations
tcatgaagttcatggtctccatgttcgctnttagataagccatatatcaatatcttcatagtcgctttcagacattccatactccccatcagcgtcatcactattgccctcttctttaggaatctcatttcctccctcttgataaaaatcattgccctcatctttaccaatctcatttcctccctcttgatcaaaagcactctgtggacaaggattgtatcttaaacattangtactgcactttatgtagataatgttatgtactgcactagggctgagttctttcccccactttcccaactcacatatctctttttccacgcgtacgttnttcaaactgataaacggtgctttaaaaaaaattctatacgaaagttgctntaanaaatcaaattaatcccattttgaaaaaaatactaatacttaattaatcacgcgctaatgga

SEQ ID NO: 26047 - DNA, 492 bp, Oryza sativa
  unsure (1)..(492): unsure at all n locations
ntataatgcaatntctgagaagccgattgagatagattctgcatatattgatacacatcatacctccaatcatcggctgttatcgtggcaacttctactttgatatccctcatcatcggcttgtaccctgatgccccttgagccaaattattagcttcaacattgtgctcccgagatacatgctttaaaatcaccagccgaaatccatccatcaactctcggcacttctcattgtataccattaatgtatcatttttgcattcatattctcctgccaattgactgatcactaataacgaatcacccataatttcgacagcatcggcctcaacttccttaagcaactgcaaccncttgagaactgcttcatactcaacctgattgttagttgcatatggcataatagtataggcaaactcgaaactttccccgaagggaaatatactaagccgataccacaccatgagtgacactgaccatcataaacaaagt

SEQ ID NO: 26048 - DNA, 471 bp, Oryza sativa
ctaagcttgaggcggacatctaacggaagtgaagaagatggactttctattgtcccggccgaagccgccaagaactatgtacgtcacagcggttgggttgtgcgggataacgtgcctgtcagtacggtgtactggcgaagaacaagggcacgcggagatcatgagagctttgtcccagattcggagaaagagatgctgtggaccacaatgctcgagacattcaccctttctgcgggtacagaggacaaagtgaaaaggtggactctgaagataatggccgaacagtttcagagcttctagggagatctgttccagaagtatatactgaaggggcagacaccgaacttcgacacattcccaaagctaagggatcactgggacgagttcgttgatataagacaggtgacaatggcaggcgatgatggaaagaaacaaaaaatgcccgcagaagagaccataccacttgggtca

SEQ ID NO: 26049 - DNA, 418 bp, Oryza sativa
  unsure (1)..(418): unsure at all n locations
gaagtttaatctgctaacgttatgtacctctcctgctagaattggctctgctaagggttatgtacgcctgttagattggctctgctaaggttgctgtaccactcctgactcctgttagaatggcttgtagaatntaaaatcactntttcagtgtttagaattcaagagatcgcacatatgctttgattagatagcaaagtcactatggctgttagtttagctcgtatttagtcgatttgagatgcaactggagcatattttctgtggatctttcctatcatangcttgatatgatggcgatgaagtatcttgaattcatagtagtatatcatcgcctttcttctgttcttagttaaaaatttcgtaatcattagtgtccatcgaggtcagcttgcatcttaattngtatgcgtatcaa

SEQ ID NO: 26050 - DNA, 525 bp, Oryza sativa
  unsure (1)..(525): unsure at all n locations
tacggacctataaaactcagcttggcttntacacaaattcattacaagaaccatgacagattgaattgttcattacaaaataactagaccacacaatataatcctctgaccaacaatacaacttcccaaacaaggcatattcaacttccaccagtgcaaagaaacacttcaaactccagattcaacttccaccagtgcaaagaaacacttcatacttctcatacatcttcttctactttgctgaaaataaaatcacagatcaaattagtaatatatagagagagtttacataaattgacatattcaaaataatcatattatatttcaccttaggaaaattggacatgttcgaacagtgtgcccatggccacgacaataaccacaacgcctaacacgcttctccatgaatcctcgtagtctttntgttggagctcctttatgcacaatttccataggatcatggaccttatcatgactctcaatgtctgtacgtaaactttgcgctagcacatgaccacataaaga

SEQ ID NO: 26051 - DNA, 409 bp, Oryza sativa
  unsure (1)..(409): unsure at all n locations
tgcccgcaggtacaccgaacacacacttatcggngtttatttttatgcgggcggagcggagactctcaaaagttttcgctagatctgagagtaacatttcctggttgcgcgtctttacaaccaagtcatcgacataagcctcaacattacgtcctaattggttacccaaagaaattccagttgtacgttgaaaagtaggacctgcattctgtaacccgaagggcattgtcgtataacaataggttcctatgggggtaatgaacgcaatnttttactcatcctccctagccatgcgaatctgatggtaaccagagtatgcatctagaaaacacaaaaggtcgcaccccgcagtggagtcgacaatctgatctatgcgaggcagggggtaaggatccttaagacatgcctt

SEQ ID NO: 26052 - DNA, 378 bp, Oryza sativa
tgaaggtcggcacatcataacggaagtggaagaagatggacgttctattgccccggccgaagccgccaagaactatgtacgtcacagcggttgggttgtgcgggataacgtgcctgtcagtacggtgtactggcgaagaacaagggcacgaggagatcatgagagctttgtcccagattccgagaaagagatgctgtggaccacaatgcttgagacattcaccctttctgcgggtacagaggacaaagtgaaaaggtggactctgaagaaaatggcagaacagtttcagagcttcaagggagatctgtacaagaagtatatactgaaggggcagacaccgaacttcgacacattcccaaagctaagggatcactggga

SEQ ID NO: 26053 - DNA, 467 bp, Oryza sativa
gcttctgtatgcgttaacataagctgcacaatgcatgcatgatccccgttatcttcctctacgaccagacgaccaccgattcctccctgctggcctgaccaccgtcacttaagttaaagaattcgctctaaaaaaaatttggaatctataatctcttgctttcaactttttttttaggagatcttgctttcgacttgaaatcccgtatgtctaaattagctcatgggccccctctctcctacgtacacagtacattgattcaaatgcgtacctgatttttccgttcaaaaaaaaaatgcgtacctgatttattattactaggattaagtccactttaagccccttaaatataggtccacgctaagtctgaattctctttccagcccgggcctgctccagtaagtaacccgtgtgcgtgctagcccaacgggccaaccatatgtgatgggccatattgttggcccatc

SEQ ID NO: 26054 - DNA, 360 bp, Oryza sativa
agctgcgcctgcagagccgaagccccttctaccattgtttgtggcacttggccaggcggctgaagatgtacttgggtagcgaccggttgagcttgcagttgcacatgatgggctggatgcgctgctgcggtcaatggctgcccgacgaagtacattggcgcttgcgtgacttgtggcggaaggggctgggtcggcacttgtggatagacttggggtgggacatagcctgccgaatactggaggattggtgccgaagcgaccttagaccgccttgccgcctcgtacgcttgctgctgttcttgcatttggcgaagcatgtcttggagtcgtgtcatgttctgtcgcatggcttccatgtcg

SEQ ID NO: 26055 - DNA, 495 bp, Oryza sativa
  unsure (1)..(495): unsure at all n locations
tactcaagctggagtgagcagcttccctctccttggacgatccttgtatgataacctcttatggtcagtcatcagttcatacttcctgaaatgtgatgtaatcaacgtgcagtgccgggtgtaatgtacaccttggccttatctaacttaatgaatctttgtaagttagtaaaatttgaaagaaatgaaaattgtatcgttggaatcagaatggcaagttagatcagatggttatttggttgccaagtttttgcagcataccctcatacatatattggcgaagaactggtggcaagaatgctgaactgcacatcangtaagtcacaaggttgtaagtaacattagatgaatgaagatgtacanttttcatgtttttggacagatatgcttagattctgccttttacggatacatccatgctattttgaagccatgtaactgattataattaatgcagcctctccggtggttccatgacgatcatcgcattactcg

SEQ ID NO: 26056 - DNA, 512 bp, Oryza sativa
  unsure (1)..(512): unsure at all n locations
accttaaaactcagctgagatcgagctcacctggctgatctgttagctcatccttgacctcgcacaagaattaggttaatgtaaggctctttatgcaaaagctcaagacacacagaacagtcataggactgcgggttgatttcctgaaactataagagcctctttgcatattggcctgagactgacagtgcaccccttggaaacaaaatctgaaattataaaagaacagtaactaanacgttgtaaaatccatataaaattaaatatagctcattttaagatgattcanatttctgtgaactcaccanattgggaactttgatgttatggaataaaaacttgcactcacagtacaaatttagcctctaaaatttatccaagttaaatcacacataaagcacgcacaaaatttataanatgcatancaaattcatttcaactcattntggagcanactcaatgtctacagatccaccaactttatgtctcctataaagcanaatgaaatagta

SEQ ID NO: 26057 - DNA, 471 bp, Oryza sativa
  unsure (1)..(471): unsure at all n locations
tcagccgagagagaganttcttatcatgtgttgtgcaccgatcgagccagctgagaggagagtatagttggcatatggcccgtgcccgttgggctgatcgtgccttctagcccgcccggcatgaccggaaagctagtgggtcgtgcataagcctgacgtgcatcctgcaagcacggcacaagaaagctaattcgcacgcgcgcgctggcggcgcgcacgcgagtggtaggttntttttccagggaacacgcgtggagcggttacctttttttttgggaatttttttgcacggtttcctttttcttttcgggattnttttccggagaagcgtacatataaagtaactaatccgattagttntagataatgacctaattaaggtaagattntgtagatttgtcttttttttcaaagatttttttaagtaacagaatggaaagaaatctatacgtgaaatcaaaatgtaaaact

SEQ ID NO: 26058 - DNA, 435 bp, Oryza sativa
  unsure (1)..(435): unsure at all n locations
tgcccgcangcacgccgaacacgcacttgtcggagttcagctttatgcgggcggagcggagactttcgaaagtttccgctagatccgagagtaaggtctcttggttgcgcgttttcacaaccaagtcatcaacataggcctcaacattacgtcctatttggctacccaaagaaattcgagtagtacgttgaaaagtaggacctgcattctttaacccgaaaggcattgtcgtataacaataagttcctatgggggtaatgaatgcagttttttcctcatcctccctagccatgcgaatctgatgataaccagagtatgcatctagaanacacaaaaggtcgcaccctgcggtggagtcgacaatctgatctatgcgtggcagggggtaagggtccttatgacatgccttgttaaggtcggtgtagtcgatgcaca

SEQ ID NO: 26059 - DNA, 383 bp, Oryza sativa
  unsure (1)..(383): unsure at all n locations
ttggatacccacacgatcaccatgaaaccatcttatcatgggttgaccttaattccatccgaatcgatttagtgaaccctgatcgcgggtcgccgatcgaggaacatctccgtggacgatgcggccggccagcaacagcgggaaagctggccatcgccaccgtacgtgctaatcacgttcgccaacagcgatggcaccatctcaacgagcctctgtcatgcccatcacggtggacttncacgggataggtcgtcatgccagtaagctaggccaactcgccggtcttgtaacccgtccctgtccatcaccggctgtgtgactgtggggtgctacttgtgctccccttccgagagatgaacagcgccactgacatgacatgcatg

SEQ ID NO: 26060 - DNA, 498 bp, Oryza sativa
  unsure (1)..(498): unsure at all n locations
taactaactaattaattattcattggtgtcccttgtcttcttgtactctcgacatacagaattagcgctctaatgtttttcacgggtgaccctagatgcttgtttggtagaggttcaactttgtaatttagctctagtaattgagtttggagtgaaattgtgggagcaggcatatagtttattttgtgagagcgtttcttcgcttctaatttagatgaaactaaaactgtttggctagactccagttctataagaggtggagctaaagctaaatctgtaccaaataaaccctaacttgcgatggctccacgtggtgaaacaaaaccagctgtgaacacaagacaagattaagatgctaaatctacatctttgattttcgcttntggcaacccctcttcctagcttctaactcgcttcattttttcgcactcttatcgaactaataatggcaaacagatttttaagacaaatcgataggaaaattactttacaaatata

SEQ ID NO: 26061 - DNA, 490 bp, Oryza sativa
  unsure (1)..(490): unsure at all n locations
tccattgacggactgggtggactgcgcgacggacgatgagctcgcaccgccgtcggtgctgttcgggccggagttcatgcggcggaagctgtaccagctgagcccggaggaggacatcacgctgtcgcggagcctggtgcgggtgagctcctactacgtggacgacatgcgccgccagccgccgttcggcgaggaccggtacggcgcggtgcgcaaggtgtacgtggtctgcgggaaggaccaggccatcgtggaggcctaccagcggcggatgatcgccggctgccccgtagaggaggtgagggagatcgccggcgccgaccacatggccatgttctccgcgccggtggagctcgccgggcacctcgccgacgtcgccaacacctacacttgattttgattgactagctgaaacacgtcgcagcaaacataccaaagccggtttagtagatacccaattttntgacgatacggcaccatttaagtataa

SEQ ID NO: 26062 - DNA, 443 bp, Oryza sativa
  unsure (1)..(443): unsure at all n locations
acgaaagaatgcgagagcttagaacaactcactcagagcccnctacctggcgcgccagatgaccgagcgtggggctcctcaccgggagaccgcgcaggccctcctttgccggttcggccgggggccctgggtgagattctaagctcctagtctgcggaaagttcgcgagaatggaaaaagcacaagacacgggcgatgtatacaggttcgggccgctgagaagcgtaataccctactcctgtgttctgagggatctgtgtatgaagaagctaccaagagctggagagtcagagagctcttattctaaaaaccctcttctccttttgtttttcttttctcgtgggatctcctcttcagatcatccccccttgcagcctctgctcttaagtgggcaaggtcctccttctatatctcaaggggataccacatgcaccacttcttcc

SEQ ID NO: 26063 - DNA, 486 bp, Oryza sativa
  unsure (1)..(486): unsure at all n locations
tattgtgcaactggcaagcaatgaatttagacaagattgttacatattgaatttggagaaagaacgcatcttacttgttatgagagtttggagctgatatttccttatctaaaacagcttgacgatccctnttgttagtaggatggaatccactgtcttgatcactcctacttaaggatcgcccaaccccattttgtccagaaagtaaatctgatttactaatgctcgagactgatgagacagttccagacctgcccatataaaagttacccagataggaaacgcctggtcagattgtaaaactntatatacaaatcattttcttattagctgaattgcttagtttgaatgttcggagaanaaataacttgataatatgtttttcaatcatcatgtctatgcaatatgcaaggtcagaatgtccatgatgtaagatcatacagaataaaggactgcattcaaagagaatcaaaacaatataacatg

SEQ ID NO: 26064 - DNA, 425 bp, Oryza sativa
  unsure (1)..(425): unsure at all n locations
cttagcaaagcntntatatataaaacatactctaattcttctctactatatgcaaaaatcaacctgtacgtgtatcgagtntgtaaagcaagggcagttcaataatcgcaccaatgcacatatgctgattatcacattagtccgcaaagatggtattngcaccttgcacaagcatctcacaagcatgattaattaccaataatcggatcacaacacatgcaagtgtgggagcaacacaaaaagggagtaaagcttttcgcaaccacaattttcgcactcacacacaatcgtacgaagtatactactatactcctcccgttcacaatagaagtcattatagcatcttccatatttatattgatantggatgaatctacatctagaatcattaacatcaatatgaatgtgagaaatgctagaatgac

SEQ ID NO: 26065 - DNA, 496 bp, Oryza sativa
  unsure (1)..(496): unsure at all n locations
tcactcnctctataacatttgaaacaatcatcaattattttctgccaatgaaaccccactctcctagcaaccaatttatcttacgggccgattaatgaatttcacaaatcccttcatgtactactctcctagcaactttagttgatcattatctaagtaatactccatctattttttggcgatataatatttgagcacttaccgccgaatcttccgatcaaccttaagtgtaggatctttcaaaactctaatcaaaggaattctccaagctatttctaactcatgggcacaaatgtccgaattcacaattaattcagccttttaatcaattgtaacgtgccccccagccttctgtctgggatcggtcagaccggccacgcaatgccggtcagaccaccctgtctgtccggtcaaaccgaccatgcagagccggttagaccgcatgtcaccaccggtcagatcggccatgcaatgccggtcagacaacccctggtct

SEQ ID NO: 26066 - DNA, 428 bp, Oryza sativa
  unsure (1)..(428): unsure at all n locations
cggttacttctcttatatattatagcgatggccgtcaaccttataagcatgagcacctgagcattaaagtaaaaaccttatcacatccattagatcgattcctcatacaacaaattgttggccaccttctgtaaagacaacacattgtctgaacctatcattgatctcaacaattggagatctactttgcacaatatttgctctacatctgagggatgatcatcgtctatcacattctcattgctgggaccatcatcactggcataatgatcgaagaaaccatcaacatcactactcacgggttattcagtaccccgtgcgtccacttttgtttggcatgcatgntgatcgtcgagttcaaaccaacatgcacattccttgttgagacctcttataataagatgtgactgtttcatatgcatctaccc

SEQ ID NO: 26067 - DNA, 438 bp, Oryza sativa
  unsure (1)..(438): unsure at all n locations
tgcataatgcactacataatattgtagatctatatatttttgcatggaaagttgaatgtcttggcaagctgttggccttaggagtagtgtccactaatctggccataactctttagtgggaaatccaatggacgaacggtttgctgggtttgaaactagactcaataatcttcccagaaagtgctcattcaccttctatagctttgagataacaaaagtatgatgatttattgaactagtccgttttgatactgaactggctcgattttgctggntcttatttactgtctgatttatcatcctcttggtgcatattcctaagaacaaccaaagtagaacatttacgtaatataacattctcatctatacatgcatcaaatgtagcaccgagtgagttcacctgcttatgtagtctttcacatgacttctcgtaatcgg

SEQ ID NO: 26068 - DNA, 470 bp, Oryza sativa
  unsure (1)..(470): unsure at all n locations
ntggtgagcctaanacccanagaagctattataaactttcatttctctcatactaagtagaaaaatcaaacagggcaatgatagaccaaggaagcaaattgaattgataaaaaatcacactccgttattatgatgatagcccccgacagacaacttcaagaagaaaacttgatgttgacagtcaagatagggaagtacagtgataagcttaagcgtagaaacgatgaagatgttcgatgttccaagagttgtcgacgagtgtaccgtcttcgcgcttgagtcgataggaacactgccgggtgactgcagagatgataaatggcccttcccatagaggagataacttgtgccgatctcgtgtagattgaattttcctcaaaacgaggtcgccgactagaaaggcacgggatcgaacattgcgattatgataacgtcgcacccttgtagtatcgagccgactgaataaagct

SEQ ID NO: 26069 - DNA, 438 bp, Oryza sativa
  unsure (1)..(438): unsure at all n locations
ctaccaacatcaanncacttgaactacggagacaattgctatagtcatatttctacggatcgacctgcctacctcagtaactatatgctctcttttgcactgaccttgccatacatgaagcatgctagtctatcaatactctaactagtagtatttgcctaacttttgttcttttcagacttcaacacagaaaacaattatgcgttctatataatatcaatgaatgatgagagttgaatgtgtgatagtcaacatatatatatctacatacccagccgatatctgatacatgaaattacctgcgattccatgaaaatatcattgtaatagaaatgctgaagctatgatcaaaggggattgggcaaagaattctcttcagcagagagatctgcaacgtttatacctttcattatccctgcaattaacgaaaaaaatagg

SEQ ID NO: 26070 - DNA, 499 bp, Oryza sativa
  unsure (1)..(499): unsure at all n locations
cgtatattgtgaataaagaaatttccatagtattgggcatacgccatgcgcacactgctttaacagatgtgcttaagtccctagaagacacatggtttcaccacacctggaaatatatggcatatgtggtgtaaaatccgagtaaataaactcataaaggatttaccaaccgcctagaaaatgaccacaatatataatcagcctaagccataatattggtcaataaaaatgcacacttacgtggcgaaaagcaatgatattgtatcaaatcaattgcttaaaaacccaaacagcaccttgacttatatataaaaaagtcagcgggacagctatataaagctntactgtttgacaccttttaagatgcattgtaccaactccttaaaagttaagtaactgcggtataaaaggattntaaggtattgggcacttgatcacgcgcactttggcctaagcataaagtgcctaagtccctaaaagaacgtgacaggccacacct

SEQ ID NO: 26071 - DNA, 494 bp, Oryza sativa
  unsure (1)..(494): unsure at all n locations
ngatctgcaacttctagatgcctcttcaaaggagtttgaaactatgctgtcaaattgcaaacttcttgaatggctaagcatggacagatgccgcctgaatggtgaacttatggtaggtagtccattgccccgtctggtatacctacaagttgtgtactgccaagtaaccaagatacaattccatgctgtggagctagctaattttgtatataaaggagactttgtgcccatagccctcaagcattcgttgaagctggaaaatgcaaacatcatgttatatagtttgaatgatcggcatgctatcagtgacctggtaaaatgttttccgaacttgcaaaatctgaatattcacctttcttggaacgatgcagagagttgttctcagaaactaaccctacatgctacagttgtagcttggttaacataatctagtgaatgatctttgtnctttctgtttccagactaagttgtatcagatacaccttggaagtttc

SEQ ID NO: 26072 - DNA, 441 bp, Oryza sativa
  unsure (1)..(441): unsure at all n locations
tgataatatcaaagaaagctgtgcattaagtgcattggattntatcgacaatctgattcaaggacagctacccagatctctagttgcttgcaggaatctggagatccttgacattggaaacaatcagattagtgattccttcccttgttggatgagtaaacttcctgtgcttcgagtcctggtcctccagtctaacaagttcattgggcaggtactggatccttcatatactagatacgggaataactgtcaatttacaagtttgcggattgccgacatatcctcaaacaacttcagtggcacgttgccagaagagtggtttaagatgcttangtctatgatgtccagctctgataatggaacttcagtcatggaacatctctatccncnggagaggtacaagtttactggngcagtcacatacaaaggcagtcacatgac

SEQ ID NO: 26073 - DNA, 473 bp, Oryza sativa
  unsure (1)..(473): unsure at all n locations
ntgccaagcatcaatctatactaccacatgtctgaattatcattcacctgattaaagtgaaccacgggaatagtcatctgtcctcagttacagggctnttttgctgacccactcccatccctgagattgcaaggtcagaagcagtacccatgtcactcctgtcagtatcaggcatttacatttgcacttcagcaaagaaagattcagcaactgctcgaacagggacaacctaactgaatcaagagtaaacagaatgtttaataagaaattatactgttctctgatgaggccattttcttatactagttccattntcgaagtggagtatgtatgtaatcccactacaaatatttatggcgaacaaatgcangtgtgagtcggtgagtattgcctacccatcattgaaaaattcctggtcttcttgcttgtgtatttgcaatgggccataagacagacagcnnggatatctttac

SEQ ID NO: 26074 - DNA, 465 bp, Oryza sativa
ctacttcaacggtatccccacccttggccacaattctcttgatgaatacatctcctgaactgcaccccaaggcctgaaaagatcattcaactactagtcataacaaattctattatgaattaaatcaggcaacagataaaagggagaacatacctgcagaactggtggggcacggaagatcacaatgtccaaaatattaagctcccggaaaacgtatgaaacctaataccataacaacatcagcaaacacacatcacaaactattcttactcatagaacaatcaacaacaggaaattgactttaccttgtcggcaaggattcggtcaccaacatcgaatgtcggatacatagacttggatgggatggaccttggctcagctaaggatgatctatataacagtggcacagtcacagcggcaaagacagtctttgcatcatccgaacaggagctcacccaccttgat

SEQ ID NO: 26075 - DNA, 299 bp, Oryza sativa
gaagacagcctatacttatttgtgcacaactctctcaataaataaaggaaaatgatacagtataaagtgtgcaaccaaacgggccgaggactgatgctgcgggtgggcctgcctgggagcccgaatttcttcttaacgacaccagacaccgggggtaccgctcacactgacgcttggctcgccgcaattcttaccttctcgcaatcacaatccgagcggtcgggcgcgcggaggagaaaaaaaaccgctggcgctgcagctactcacgcgcagccaacaactacaccttgccgtgcatt

SEQ ID NO: 26076 - DNA, 334 bp, Oryza sativa
tctgctgtgccctaactaactgctggtgaagcacttcattcatttgagccatttcttgtagccaaacttgaatatcatgtactgtgctttggccgatttcagtgacaccaaaatcgctgggcttcctagtaaaaaggacttcattaagagacttactcaaagtgctgtggttggaggtatatgacccatactgtgcctgagacagccattgcgaccatttatgtgggcatgcatgaacagtgcatcttagataagcctccaggcattgatttaatcgctcagtctacccatttgtttgaggatgataaaatgaactcatattcgagtttacatc

SEQ ID NO: 26077 - DNA, 414 bp, Oryza sativa
  unsure (1)..(414): unsure at all n locations
gcatcctacaggctagcacccatatgtgtcactcgatgacttcccaagtaccattagacataattgagtccatttcactgcgtaccgctttctttcaatagtcaacgtcaggagatgaatatgcctcttcaatggttcttggagtatcatccacaagatttacaatgtattcatctacagaagactttgcaganctttgcctcttactctttcgaggtgctacaatggtaatctcctcagaattatcctcaagcgtttgatcaatgtgttctatcagcacaaagtgctcatgggataaaatacgttcttgactagaagtgctacgtgcatttttcataggaaaatcattctcaataatgtggcatttctggacctcagtattgttccaaccacgcttgtcaggtcctccataat

SEQ ID NO: 26078 - DNA, 509 bp, Oryza sativa
  unsure (1)..(509): unsure at all n locations
acggacctataaaactaagcttgatatcactacatgatatctctgtgccatagatggccattntgctctgtggtcagcagggatccaaagaagttacattntgtgtgtaacaaggaaaaaaaagataattaggacatcttttaagattntgatgggactgctcttttaagcaccatgaaaatttaatttccatgtcgggctccttgttttataaatctgtttatcttctggntagttactcacataaagttagaaaattggatttttttttctttgctaaaaaataattaaatatgaatgcataaaatattgatgccagtattttaagtgttcttatgtgcaacttcgcaggttgcttctcagccagccatggaatgcttgccacttgtaatggaaccagagtcagctttctactctgaccnncagtgtgtattggatttcaatccctttaccctccatgataatgcatatacttatgtaatccacatgcttgggtaaagtttcccgca

SEQ ID NO: 26079 - DNA, 406 bp, Oryza sativa
  unsure (1)..(406): unsure at all n locations
cttgcaagcctatgactaacggtttggctaggaagtcaactttctttttctatgttaacttccgggcatatttgagttgcccttatattccttccacgcgaatgtactatcatcggtacacgcaaattttgggttttccaaccatttcttatcacaaaagcttgcgatatgaaagattgagaagcttctgaacctaacataactatngcgggttccgtagttacagagaacatacccactacaacgtttggagcatcctgagcggtttcagcttgattgtgaatcacacgacctccaccaaagtggttggacgcactagaaccttgaccactagcctgagagctatgaatagactgagctgtcgctggagcaagatttctggcagtgctgccattagcatgccctg

SEQ ID NO: 26080 - DNA, 454 bp, Oryza sativa
  unsure (1)..(454): unsure at all n locations
tatctagaagaaagcaagatcaagaaggaatcgagaagagctcaacatggcagctcaatttatctattaattagacagtgtatagtaattttcttttttattgttaagcaagttagtttagtatccgatcaggatttgtttcttttctcccatggttcgtatccataaagcagacagtagggatggcaatttcccttgcggggacccgacccaacggtggcgggggcggtggccatttctgacccgcggatgagtcangggatgggccccgcatttgggcggtgaggggacggtggagacattgaacccgcgtggccccaggggatatattaccccttcaaatgtagcccatagaagacctaacaagcccaacttaataaaatattgagatatataagcataaactgaacagtctaaccctaccttatcctctctcctctggcctttccgtctc

SEQ ID NO: 26081 - DNA, 361 bp, Oryza sativa
  unsure (1)..(361): unsure at all n locations
tgttaacggatcgacaatgttcanattagcgcctatcactatattgaatattatcatcaaaccatggccgttccaagggtgggctttggatttcattggtcaaatttatccttcgtcatctaaagggcattggttcgtgctatntgcaatgggttacttcactaaatgagccgaagccgtgccgctcgagaatattactacagaagtaattggctttattttgaagcatatcgttcatagattccgtattcctcaaacattaaaagagcttcttttatgccaaagaagtgaaaagatttgccgaatcttatgatattaaagatgttgaattcttctctttactacgctcaagctaatggat

SEQ ID NO: 26082 - DNA, 476 bp, Oryza sativa
  unsure (1)..(476): unsure at all n locations
tgtgcaatcgcttgttggtagtactgatgtagcttgatcattgtggcaatttcagctcaaggatacccccacacaagccagtgatcccctcgaccgaaaaggcactggcattaagaaatattccacgttttggaacttcaccctcaaagttattgaaggagatatccaggcgttcaatacctttcatgttactgagtaagtccggaatgcaaccagacaagttgtttcctgatagatcaagaaccaagagacccctcaattgtccgattgaggatggaatttctccttgaagaaaatttcctttcatgatgcaatattgtaagatttgacaattgccgagagaggcaggaatttccccagttaacctatttccagatacatccaaaagttggaggtttttcaggtcaccaacttttgatggcaatgatcctgttagcatgttcctttggaaattgcagangtggagagagtagata

SEQ ID NO: 26083 - DNA, 359 bp, Oryza sativa
acattgtcgtgatgcatcatataataagattaatgtgtttatgatgtcatgaaataatgatatgatataatgagcatgcgcgcatatgcgatatgtcaattgctatgaggggcgaattataccatccgacacattggttggctcaagttcttgcatcacaaagtgacacgctgagaagtaacaattatttcatgactggagaagcaacacatatacatcttgtttgaaaatgaaaccaatgaaacatgacaaatctatctggccaaacgatactattctttttggaaaaaaacccatattcctacaagaactgaataatgtacattgaaacaaatgtgtcaaatgcaaaacactctgtg

SEQ ID NO: 26084 - DNA, 490 bp, Oryza sativa
  unsure (1)..(490): unsure at all n locations
tcagataactggaaatccagctctgttctaggttaattatataacacgcttaattgcagaacatgttgaaaggctggaagctcatgtggctcaccgtgcattgcccttcgttttcgtccttttaagagcaatcgatggatggagaaaacgtacaaatccacgtgttacatggtgaataccggatatggatcgttcctattcagctagtactatattattggagagtntactatatgcagctgaccgaaggaaccttgacagcaaagctcccatttgtctgtagtgtgattcccgtggtaatttatcttgcaacctgaacctataatagaaaagtatcatgtgtaaaagatgctaattgagatgcccttggacttagagactcatcacattctgattctattgtacagcctgtcagtagaccacaataccacatggctattgcaagtttgtacactttcacctctctctgctagtaggtgcttctgctgct

SEQ ID NO: 26085 - DNA, 382 bp, Oryza sativa
  unsure (1)..(382): unsure at all n locations
ctgatgttctcctagacgctaccttctatctataacctcaattttgttgaactatcaagcgattattgttccgtaggaatataactggcatgatattctatttctacttttatttctatacatangttataaaggggcaggatattccttcatagatgaatggcaaatgctctatctgttttcgtctgttgatagcagaatcgataatgccgttatctatcctaaggcatcgacgttatctcctctctttcacgccactccatggctgccgctcgtcccagcctctccggcaagctcccactgcagtctgcgacggcagcacctacaccttttccatccaatattaccttcccgcgctaccccaagtccttggactgacact

SEQ ID NO: 26086 - DNA, 470 bp, Oryza sativa
taatatcatattaataatttctatatctatgacgtattaacataataataaacactaactaatataatactcactaaatatgaatagtgttgatgtaactaaaagactaagcactagtcaagaaatagtgagctcgatcatgaagatatggtgatattttatactaacgagctaaacgagcagctcatgagctaaaagtctaactcaactcgactagactcattaagagtacgagttcgaatcgatctgagtcgagcttgctacgagccgatccgagccacgagtttcgagctttttgtcaatcggggaaacataagctatcatacgaacaaagggaaaaaagagaacccagagcaagaacattgtgctagagaagacagagcctctgatatcctagcccaattaagatatggcttgtgtggccatagagctgtgacgcatgttagactaccttgtagttagtagggtgg

SEQ ID NO: 26087 - DNA, 486 bp, Oryza sativa
  unsure (1)..(486): unsure at all n locations
ntatgtatacttcaagaaatacaaccaagataccgaatcattggcttcagagatgtctaggttcagaagaattctaggcattcnttgggaatgcaagaacctggttgtttgttgtacaagtatgaagttatcctgaataaaccggcattttatgaaagcactttggtttggagaaaccaactgttgtagaggacaaaccgattagctaggatcttggttataacttagcaaaagtgtgaactagactgatgagtctaaagtctttagcatgcatggcctcctccttttttggcaaaagggtgatataagcacggttgagaagctgaagattacaaaaatctattgtccatacagtagatattgctgccatcaaaaccccttntataatataccaacaaaccttctataatctgtcatttgttgctcgatggaattccacagattctcttttgaaatgggtgcatcaagtagctcaagatcatgggt

SEQ ID NO: 26088 - DNA, 520 bp, Oryza sativa
gatcctgcattacggacctatgaatactaagctcgatgatccggcagagacagtgcagaagttactctgtgtatgacaaaccaaagctgaagcattcaaaactaacacaaatgaaatgcattcacatcatatcctcttaaaactgagcctaattcagagataatactgttatattatttccaaacccattcttctaactcgctcgctacaacctggatctatcgattggacaaacagagctataaatggaatccaagaatatggtattctaatttaaagagagcataagcatgaaactgcactcactcggtcagcttcatatcgtcggtagggaagtattaactgcaaaacatacagctcttgttacaaaaaagtagaaacaaaataaacaacaatactccagcgttataaatatattgtattaaacaaaacaatgtggagaaatgtcataccattatactacagtacctaattaggacaaacgcgtaaaaccacaggcaacccctactatatttctttc

SEQ ID NO: 26089 - DNA, 361 bp, Oryza sativa
  unsure (1)..(361): unsure at all n locations
agcttattacttatgcttctcgtaaacatgatgatcntattgangatctggngagactatatgtgcctcgtagctgggagaatacagttatttctgatgccgctattgaatatctaatgaccttgcgtgttgtaattagcttatgaagctatcgattattcgtgccatggaaaagtattattcttttaaaaaagaacatcagcatttgttagaaactttgtttctttcttgaatggaacattgcttggaaaacttgtctaggttatctctagctatataatactcagaaagtaatagttagttgaccactgtaagtaattgaggcttccttagccgatgtgctctccaatttccccattat

SEQ ID NO: 26090 - DNA, 90 bp, Oryza sativa
tcaaattaattaattaaattatttggaacattatatatcacaaaatattaattgtattttgtttcatatttttcacctattttctgaagc

SEQ ID NO: 26091 - DNA, 451 bp, Oryza sativa
  unsure (1)..(451): unsure at all n locations
agcttgtttatgaacatgaagctgatntaccatgggtangttataattggctcaaggagaacggagttacaaaatgatttgacagccgatgaatattatcatctcatggccgatgaaagggaagacttggttcaatctaaattaagagcccttgcgaaggttaccaaggataaagaacgagttgctcggcattacaacaagaaggtggtgtccaagactttttcggaaggtgaacttgtatggaagttgatattgccgattgggactcgggataacaaattcggcaagtggtcgccgaattaggaagggaccgtccaaatctataaggttgtgtctaagggagcttacatgttgcaaggactcgatggagaagtctatggacgagcgctaaatggcaagtacctgaagaaatattacccaagtgtttgggttaatgcatgactggctggtg

SEQ ID NO: 26092 - DNA, 445 bp, Oryza sativa
caagattgaactcttagcacaacttgaagaatgcaacgctgagctggatatggagcacaaaatactagccgatctcccaaatactattgaagaacagaaagcaagactcaaatcggctatcaagcatgttgctgatctgaccaagtctctgaaagttattccctggaaccgacgctcaagatgcccaagccatagacgaagtagaatagattaggcagaaagctatattggctatccagcgatacttgtctcaataacctttgtgtaatatgactttagaatttctgtatcggctaagacattctaatactgtactgtcttaacaatcctttgtgccgataatatgactttgtaacttgttcagaaatttcatcgcatttgcatatatggccccctaaattacatggtcaagcattgtaaatataaacaacatggcgattacata

SEQ ID NO: 26093 - DNA, 323 bp, Oryza sativa
agcttgtggatcgactcgtcgtatgcgacagatctgctttcttaaatcaggctgaggctctcgcgtgtcagagaggagagaatgtgccatcacactatgcctgcaatgacaagttgaggggggaaaacatgatccatctatttactttccttgtgaaggcgccactgtcaaaacttgacctgtgacctccagttgccacttgcaacatattgaccgggcgaaacagaggaagcactttagaacatgatgaatctgatggaaccactgtcttatccatagacataataaaattccaactaaccgctgatcaacacatacaatga

SEQ ID NO: 26094 - DNA, 391 bp, Oryza sativa
  unsure (1)..(391): unsure at all n locations
atataagagcgtctgagtactaatatgagaagctgtctgtacttataaattgttttgaatgtgcttagtgccttagtgcgtattatatcaacatgggggaactgtttgagaaagcaccatangtgtacattanggcatttagtgatatatcttgttctgaatatggcttacctcctgcgccgcctttgtatcttttattagtgtcatcacacttgggctatccaaaacttccttcaggctatgcctctaacaaacataaccaatctaacataanacagagaccattgagacagctggtggaatataggcaaccaaatgaatagatatataattagagtatatttcacaaaattacatatactnttgccaaattatcacacaactacagatg

SEQ ID NO: 26095 - DNA, 373 bp, Oryza sativa
  unsure (1)..(373): unsure at all n locations
agctttgggcgatcttaaagttatgatccctanatagcttcacaaaaaaaaaacgccggttaatgttagtcagtatttgtggttaaaaaaacaaaaatgctgacttagttctgcctactaggtcatcctatattcctattgaggtttacagttcacaggtcatgagttcaaattcaaaattaaatacaaacgcgtagaaataaaagtaggagtcaaattctggattatctaagcaagtgacgtgatttcaccataactgctactactacccgttccgatttacttgtcgatttagacattgacatagtatcccatacaagtgtttcattattaccttttatacctatttacttaattttgtagcaactacatc

SEQ ID NO: 26096 - DNA, 453 bp, Oryza sativa
  unsure (1)..(453): unsure at all n locations
cttccttctgattgctggctgaagcggatgacgttcatctgcttnggatcgccctacagaggttgattgcccttggctaggcctggaatacgtccgggagagacacaacttcttccatctacaacaattctttgctgaggctgtctatgcaaagaatggttgctaagatttattgccgagtcaggtgcaacatgaggagcattggcgcattgtttctgctatgggttctgattaacacgaggccttacgggtacggcgtttgctccagtgaccacaatacgattggaatgtctgcttcgtgtaaattggcggtaatgtggaggtcgattttgccttggtaggggacagtttttggagtaatgcccttcttcactgcaattgtaacaaacaataactttcttacactcgggttcttcatcctagacttgatttctcagctgctgtattggaacc

SEQ ID NO: 26097 - DNA, 431 bp, Oryza sativa
  unsure (1)..(431): unsure at all n locations
aaaatctgagaattacttttctacttcgnattatactatctttagcttttgagatgagataaaaatttactatatattgctatcttgataccaaaagtcactgccatgctattatattcatattattattatgattatgactcctttatattttttcccaccagtatacatgaataatattatctgtacccaggacaacgcactggcatcattgctagtaaaaaaaatataagacggtagtcaaacgttaaatacgaaaatcttttatttgccagagggagtacgtactccgtacacgaattatcgtgcagctgatcgagacgacgcacgtagcaccgtactacgttccgggccccgcgcgcaccaaatgtttccgtctggagtcgcaacggtttgcaaacaagccgtacaacgtggtgatctccgtatgc

SEQ ID NO: 26098 - DNA, 226 bp, Oryza sativa
  unsure (1)..(226): unsure at all n locations
agcnacnacgctgcacctcatagaccgcgtgccttcntttttccaacggagggcagactaccagtagcctgctcctnctgggtccccttcacatccacttccacgtgcccctgctggctaccctgcgcatacctctacacgtttccttcctcgggcaagactggatagaaactaatcccctctttttattccagactggctgttccctcgcgattgagcagaaata

SEQ ID NO: 26099 - DNA, 216 bp, Oryza sativa
  unsure (1)..(216): unsure at all n locations
tccctacagtgcagtggagcatagcacggttgcnnttcnnctgtcaatggagcacataataataatattaaccacggtggactttcagctgccagtgaagcangcagtgtaagctatggcggactttcaccacctgtcaatgaagtaaggaagagaacgtatatgggggattcgccttcaccagccagcaaaccctggagctgcatgttcagggga

SEQ ID NO: 26100 - DNA, 370 bp, Oryza sativa
gcacaagagcgacgtgagggaggagaagcacaaatatcacaacgctcgaaatcaagaagcgcgcgcaggaaaacgaggcgtgcacagcatcagagaaatgagaaaaaacaggacaacccgagccgatgcgccaaatggacccgcaaccacagactgggaggagaaacagacagagggtctttccagacatgcgagacgaaaataaacactgaagaggtagcagcagcagcagcaataacaaacacaacccgccagcaccaacaaatccagggaagaacaggcgctatgggtcagcacgagggggccctgccggcgactttctgagctatccagccgagcccgccgaagaggcccacaccggtgatcgcgc

SEQ ID NO: 26101 - DNA, 279 bp, Oryza sativa
  unsure (1)..(279): unsure at all n locations
agcttcttgttgaacacccacttgcatccctaggtttatatccatagagatgctctatcaactcccaagtcccgttagcgataatggaatccattntactaccgacagcgtccttccagtagtctgcatcaggagatgcatatgcttctgaaattaacttaggagtgtcatccacgaggtacacagtgaaatcatcaccaaaagacttagcccgcctttgtctcttactccttcgaggagcttcattgccatcctcctcagtgacatgttcatgtgtat

SEQ ID NO: 26102 - DNA, 284 bp, Oryza sativa
  unsure (1)..(284): unsure at all n locations
tctcaaaaaaagcatcgcatggaatcttgtttcttcactgaacaaggtacaagatttctttcacagctactaaatgcttccggcaactgaaaaacctctatgcttctggcaggcgttttggataacacggagctttctatgcttactggctcccaagtgaaggcaactaggagccctgcctctggattttcttctaccttttccccattgtctaggttnggaaaatctagcaatacatctgtgctcaaggaagtcggagagaattctcgtggaaaatttccttc

SEQ ID NO: 26103 - DNA, 441 bp, Oryza sativa
  unsure (1)..(441): unsure at all n locations
gaaggagtcaggtggactcttgccatatacggaaaggaccaaaggcttctctacccactgtctatatactctctccagtgtcatttgaatcgacgatttggacaatgacaccggttacaagatacatacctaaccttacttgtctatgatagtatatataacatataaatacatatctatctctattataggactctaagagacaaatctatatatggtgttctagttcctttaaactaaatatcgttaaaggtattaatagnctaaattataaaagcttgacctcaatcttgtccaagacgccatataatattggaaccggagggagtacatatctaatggaatccctccggccgccactgtccaccatggcgtcctgcagcttcatcttcgacctcagcatgctaccctctccccgctcctgcccgcaacaacgtcaac

SEQ ID NO: 26104 - DNA, 402 bp, Oryza sativa
  unsure (1)..(402): unsure at all n locations
cctcgcgatncacacgcggctaagagctctcacataattgttatttaaaactttacctgaagattcactcagcaaaataataaagagaacaaattgaatagctggcggtgacatatgtacctttcaatatgttagaacccactaagcttatcatttaactatgccatccaattagataaccatgcgcccatgccctaccaccggtagccaccactactttgcgttgtggggccgtgttggagctagcagtaaataaagcatacacttttatatttccgacatttctcttttgctatcagtatagaattatatttaaaatttactggctgctactgatctggatttgacttagatagataacatctaaacctatgcatatgaatatttgcgaaactaatgcca

SEQ ID NO: 26105 - DNA, 306 bp, Oryza sativa
  unsure (1)..(306): unsure at all n locations
agcntaantgatcataattgntaatatacacagnttttttcnttttctacccaaacagancatcagctagttcattcatggaattgcaggggagacaacttcagcaagttcttaactccggaaacctgattgagttttgatacagggacagaagcacagcgtacaggatgcaacaccactatttacacccaaatttggcacctatgattaaaataggaaagattgccaaaatttggaagtctaccggcttccttcgagtgggccgtgtagatatcttttatctggtttcactcggcaatactatat

SEQ ID NO: 26106 - DNA, 332 bp, Oryza sativa
  unsure (1)..(332): unsure at all n locations
acatgactaccttcctgatctgtacttgacaagaaanttgncanctctactatgcctttggcatttacactactaacccatcatcgggagattcgtctgagatatatgctgaagtggtgaaagggcttggagaaacacttgtaggacatgatgagcctatcctagtcgcgccatgagcttcgtatgtaagaaaaacgaccctgactctcccaaggtaaaagctaccacttgatactatcctatgttaaggtctacctgagctaaatgcattccattngataggtactgggtatcccaagcaagcaaattggcctcttcataaagagatcaat

SEQ ID NO: 26107 - DNA, 445 bp, Oryza sativa
  unsure (1)..(445): unsure at all n locations
gcaagctggaccgaacacagtatctagctcaggctttttggattataacggaatcaaacnnctccggtgcaggtcacatgaatcctcttccccacgccttcaatgcgctacttgcgatcttccgcgttttttccatgcaagccccgtccagtcgtcacgctcctactccctccgtactaccatagattcatttcatttggatacaacgtttagggccgggtttagtttcaaacttataacttttccatcgcatcaaaattttcctacaacacagattttcaacttttccgtcacatcgttctaatttcaaccaaactcttaattttgatgtgaattaaacacaaacgtctcaaattntttcttcacactttcaactatttcatcacataaaaacttttctacacacaaactntccaacttttccatcacatcattccaagttcaa

SEQ ID NO: 26108 - DNA, 346 bp, Oryza sativa
  unsure (1)..(346): unsure at all n locations
gagaagcgttataccctactcctgtgatctggaggatctgtgtataagaaactacaaaagctggagagcaggagctttacttaaaacctctctctggtctcaatcagccttcatcngtctggatcccttctctaatgggcaagggccctcttttatacctcaaggggataccacatgcaccatctctctcttttgtgtggcgactttatctatcttncccncaactngacttgccttctcttcataaatggacggagaattagtatggtgccgtccgaatgaccttctgatggactgcccatacctaccttcacttccgcgcgaagcaggcgcgacgtgggaacat

SEQ ID NO: 26109 - DNA, 456 bp, Oryza sativa
  unsure (1)..(456): unsure at all n locations
agctttgattatcagtgccatacaaggtcatattactattctttagtnagtcggtggatcatgtggttgcaactcttggtaattaactcagatagcttgttttaagaaaaggttaatatggctatcttgaagtattcttggtctttttcattttaaatattgtgttaccatagatgaattggccatgaatatagagaggttagccaataatctattgcttaatactattagctaatgtttcagtgtttaccacatgacggacatgagcaatactctggtttctacatgtgataatatcgcgcgatcataacattaatgtggtaggctggtaacggaaggttaacgcatgataactgtcgagaggcacgatgataactaagatgttcagaaatacaaagattcatatatatgaaccattcggtcgaggaacagtagtcctagagaagcataccacgt

SEQ ID NO: 26110 - DNA, 517 bp, Oryza sativa
  unsure (1)..(517): unsure at all n locations
tactaagcttaatgtgagcagctagctggctggtcgacacgtaaaccgatgatctattctaagaagaagctaccgaatgctgatgcatttgctgtagacctgtagtgcatcgtgtanaaaacgaataaggatcaaacatataggccgtgtttagttgtaattattttttcaaaattccaactttttcatcacatcaaaactgtcctacacacacaaaattccaatttttccgtcacatcattccaatttcaaccaaacttttagttntggtgtgaaaacacagccatagctttgttgcccctttaatgccgggttggttcggaaagtttcgttaaagagggtttatgatattcctacatgtttacttggtctttttgagacggatttgctaccatttatgtcgccataaatttcgttgattacagtcggtatacatgcctattggtcacacagccgcacaggctttccacttgcatgtgcttcatgagagagaagaatatnttcacacatatatcgc

SEQ ID NO: 26111 - DNA, 174 bp, Oryza sativa
  unsure (1)..(174): unsure at all n locations
agcnttgccgntgttaaanaaatgatatactagnatcgatttaagcatcctgaacaacccatctatgacggctgtcagcagcccgttatagaggcactcattnatgacgggccaaaaaaatccctcttgaatattggtcctcatggtcaaacccgtcaccgatgatccctcttt

SEQ ID NO: 26112 - DNA, 99 bp, Oryza sativa
  unsure (1)..(99): unsure at all n locations
tactcaagctntgccgngacgcgtcttatgtgttgtgacgaggctcatgtgnctcgcattctcggagagcggctaaagtatacatgcactgcagtgtga

SEQ ID NO: 26113 - DNA, 455 bp, Oryza sativa
  unsure (1)..(455): unsure at all n locations
agcttcggncccttatagaaaacaancnnnncanacttttgtttttnnncancnnaagcnagtagcaaaattctcgttgcaacaacgggagaagataatttcaaaagaaccgaacataattgaaggatcaaactgcatatatactagctaaatgcaagtgcttcctacaaataaaaagagtatgttataatattatctatctaaaaaatatatctcatgaaatgtgttgcacatatgtttctatatgaaatatttcttatttgaaattatacgtaactatgcatttaggttaaactggtttttgatattagaaatttcagggataatttacaaaatttacaacgagagcaagtgaagtgtcagatntgctaccactatctactaggggtgaaaatggtatggaaattttacggattccaaacctattttcgaaaacagaattccgtgatcggaat

SEQ ID NO: 26114 - DNA, 332 bp, Oryza sativa
  unsure (1)..(332): unsure at all n locations
tgcacttcatactctcttatgtaagtactatctactagaaaaatttttaatttttagggcngaaagaaataattatactactttcatccagaaacatcccactaacatgatctgctaaatgccgattatgtctagatttgttggagatgaggtttctcatactctaagcgttaaagatttaagcgacctggaaataatataatacttagttcttagttgtgagtgaaagcaaatatatgatagattgttgaaaacttctaagatcatattaactttcatatatttaaaataaaagcagtggttaaaccggcctgctaacatttttacagatg

SEQ ID NO: 26115 - DNA, 411 bp, Oryza sativa
  unsure (1)..(411): unsure at all n locations
tattttgaaaccacncggaaatcgctgagtgatgtacttccttttaagtatgggtcgaaaagagacttgcgtctcaaatcgacttaagagatgcttttcaacaactcaattggtactgtaccgacctcccgggtcagatcattacttctcggctccgagagccatttcacttgattaatcggctcccagagcattttcattttctcggactcccagagtccagctgcctagcagcacaacaatccgcttccactcgggaagcctagtctatgatgcccgcagacatcccgaatcacacagattcgtttcttgaccactcaggtcatcctctgccacatagactgattctggtaacgattcccaaaccacaacaacttnttacaaagcacatgcaaacacttctacgctata

SEQ ID NO: 26116 - DNA, 445 bp, Oryza sativa
  unsure (1)..(445): unsure at all n locations
ctcatggaacatccggacaaacatttcaagggtcctctgttgaaggcccatctgatttaaccctctagcaaggcttgtgtatgtgaacctgtcccttatgaaggccattgtggtcgccactgcccatgcatcatccatccttgcaaacctaacataaacatcaaccaaggagttcccaacagctgcatccaaagattcaaagctggtcttgagaatgtagccatggattntcctggcatgcaggaaagctagcgaggagctactgcctttgagaagagtggagacggtgaacgagttgngaagcaccccgctaagccgcatctgagaaaatgccanaaacgcctcctcatctctgccatggcatgcaagtccagcgatcaaggcagtccaggacacgacattcggcttgcgactgcatggaaagtgtgcaacaagtcgagtaaac

SEQ ID NO: 26117 - DNA, 273 bp, Oryza sativa
  unsure (1)..(273): unsure at all n locations
agctccgcccatcttttggaatgcctncctttgtgcctattctttgcttcggctggaaatgtgaaccatntctccatggcccgccaagctcgctctttctcggcttctgtgaccttcccgatatctatatggaggatcccgacagtctcacgtgccgctatcccgcagcaggtagaccatcttccaatgacagtcctgcgcgccgtgggcctaccactagcgtcaacctctcttataacttgcactgcggtcggccatatattttgtgaccgc

SEQ ID NO: 26118 - DNA, 238 bp, Oryza sativa
taagctagatggtgccaaggctttaactaatttatggaatagactatgaggacaccttctgtcctgtagtcaaagctactactattcgaactaaatttgctattggtggattcagagggtggagccctgcgtcaactatattgtccgaatgcttttttttcatggagtactttgagaacgaagtatatatgaaacaacctccacggtatgaagatcctaaattccaaaccatatatgc

SEQ ID NO: 26119 - DNA, 455 bp, Oryza sativa
  unsure (1)..(455): unsure at all n locations
agcttattcatagcctaagagatcgactttaactcnnttgtggatgagagaaaggatgaatttgtttactgggcaaatggggaacctctactgttatcccatgcaggtacatcatgtgattgtgtactactttgtttctatctgagagggctatatgctttctgcagtcacttttactttgtttgataaatcagttgctttcaccagcagattggcaaatgggatatgattacatccacatagacatagattttgtggggtcttaattttaaaacaaattgtatagaactcatcgttgcacgttccctaattcactctattcatacgagtattttaccattggcttatcaaatgaatatnttgcagctattggcgaggctatgctcaccactattggctatatatatgtgcgacaagcagcgagagaacttggaaagagtaagttgtatatgggt

SEQ ID NO: 26120 - DNA, 371 bp, Oryza sativa
  unsure (1)..(371): unsure at all n locations
accatggatgcctagagagtctcttgaatccatattgcccccttgaagntggcatgctcaactaatatagttgatgatagatggatctgagggacacaaagactgtttagttgtaattttgtagtacaagtatcgatggtactgtagcttgttgcctttgttaaaagtgagcatgtatacatggttcatagagcctgngagatgactactgatgcagcaataccatatttctgatagaatttagtgctcaactactctaattcaagtagttttgggaaagccttctcatctatactttgttagttacatgtgaaagatgtcgaatagcgactgtatattacatgcatgatgtggatatagttttgccttta

SEQ ID NO: 26121 - DNA, 452 bp, Oryza sativa
  unsure (1)..(452): unsure at all n locations
agcttctataggcccagatcacgcctgtgttgtttacttgntccttttatnttnttcccaaggactagttttttgtgctcaaagttggtggggttatcagtttggaagctgccagaaataagccatgggtatattgatttgttgctgaaccggcatcatctttttagcttatgcttatcagcaaaaatttgaatttttaatcttaaatttgaagccgattntaaggttttttcattgatcgcgttccggtgcgtgtccgcctgaagctcttggtcgctgatgcgttggccaacaaccgctggatccgcgatctccatggctccttgtgagtccaggcaatcttgcaatacttgcagaattggtcgttgctgcgaacaacaactctctcagagggccatcatgattctttcatctggaggtgggagagttcggggtcgtactccatccggtcg

SEQ ID NO: 26122 - DNA, 461 bp, Oryza sativa
  unsure (1)..(461): unsure at all n locations
tgagcactgtggcatcttttcttgctccattataggtcttttcttacaaaggagacactcatttatcatggaagctagatgcgccaagtagaccaattagctggctggtctccagccagctttagaagtattgattgatatgatatattgtgcatgttacctctacatctataagttgatgatgtggtcaaaattagatgtagcaaagaccaaccagctntagaagtattgattgatatgatatattgtacatgttacctctacatttattagttgatgatgtggtcaaaattagatgtagcattcatctcctttataaaacttgcccttatgctgcgttcgatcttcctgttttgagaaagattttgacacacacaaaacttgaaaattgatgtatttaattttaaaaataacttctatatagaattgttacaaaaacacatcattaatatattgaaagc

SEQ ID NO: 26123 - DNA, 264 bp, Oryza sativa
ctcctctcgtcgatcacgggcagtggggcggctatgcatttgaccagtcttgcataccatagaacgccatgcaaccgatttctctcttggagacttggctctccgctggtcttttggccttgtacatactaaaagctggtagaaatatgaagatctattggaatgtctcatgttccggacactgtgcagttgaatctacattcggaattaacgatatatactttgtacatgcctacatggtcagtggctctcgcacgggcgata

SEQ ID NO: 26124 - DNA, 394 bp, Oryza sativa
  unsure (1)..(394): unsure at all n locations
tctgcactaatacatggtccaaaatcactcggcatgacaaattgacaattaaccagaatggaaccaagtgattgtcttggataggcaagaatcaagtgactgggagtataaatttcccctatcaaatacgattaccttattacagtctgaacaacaacatttaacaaatcttctaaccaacatcatagccttccatacgcaaaacatttatccaaatgaattaagatcagaattcgccaacacagccatattgcttatatctcaatagcagtctctgaatggaactatgataggattcagccatcnttgggacttgctgacacaccataatcgatggacaggaggagggtaacatactgactactgagacaantcgacatgattataggaacgc

SEQ ID NO: 26125 - DNA, 396 bp, Oryza sativa
  unsure (1)..(396): unsure at all n locations
cttctctagctccaataaccccggtgaagccttggactggttgcatgccattggaaaaaagttccacaccgctctatctaatgatgaagagaatgttatcttctcaacccatcagctgcaggggcccgcattactatggtgggaccacttncaggctatgcagccagaaagacagaccatcacctgagcccgcttcatcgccgctttccggaggacccatgtgccagctggagtcgtggcccttaagaagagggaatttcgggagttgaagcaaggcaaccgctctgttatggagtatttgcatgagttcaataacttggctcggtacgccccagaggatgttcgtgaatatgaagaacagcacgagaagtttctggcaggaatggactctgaact

SEQ ID NO: 26126 - DNA, 499 bp, Oryza sativa
  unsure (1)..(499): unsure at all n locations
tgtganatgaatcgtaagaaacatgacatanataagtgccatttttatcaagggatacctgatatatgctcggacttcatcgcaattccgcagaatataaatatgagcttgttctgattcaagcatatcaagatctcgagttttatgagaaccaatgggccttccagcacaggagaagattgataaattaaatttgttaccaatggatgtgtcatgtattcttcctggacgattgtgttttgtctcgacatcatccaagtacctagagcttaatgtcataaactcatctgcaatgtatccctcagcaattgaaccctctgggcgagccatattccgaactagtgattntaggcagtgaatttgtctctcaaataaatacatccatcgatagatggttggcccaccaattagagcttctctagccaaatgaacaggcaaatgcatcatgacatcaaagaagggatggtggaattcttttcaagctacaaagattactgga

SEQ ID NO: 26127 - DNA, 441 bp, Oryza sativa
  unsure (1)..(441): unsure at all n locations
agctntgccgacaatggtccgtgcagcggcatgattattacaaataccaaaatgtatatccttgaacaactgtctcccttcttccaaagacacacagcgctgcagtattcctgatagacttttcttgtacagctcagtctcatgaataatgtaaagtctgctgcgcctggaaatccgctcagcttcatttttgtcttgagggagttcttgtttgctcaaaaattttataaacagttctctccagtcagcttcgatcatgcttacgccttgagtatccatggcttcgactgtctctattttgggcacggccggctcgtaaagatgttcgacgaacacatctgaaggagctgcttcccgtcttgaaccaaaattggccagcctgtcggctgcctcattgttatgtcggaggacatgggtgagctcgagtccatcgatattatc

SEQ ID NO: 26128 - DNA, 378 bp, Oryza sativa
  unsure (1)..(378): unsure at all n locations
cctggtgngaaaaaaatatcataaaatataaagttgngcctctctcctcagcactagagagagcaagcataanatataacaataaaacaaaaagaggatccagcgagcacaccccaccattccccctttgtcaccaccttccaccaccggttcttggtttcgttgctgttnagggtctgtgttctgtggcgtcctttgtggttaggctcgcgtctctacttcgactagcctaggaccagcacttgacactataccctngagcgattattaaatntgctgtgctaatgtggcttctagttttctcctgagcattgctatcagcccaccaacaggtccaccacagacccgactacagtttgcaggtcttgttgcacagca

SEQ ID NO: 26129 - DNA, 414 bp, Oryza sativa
  unsure (1)..(414): unsure at all n locations
agcttagcaataataacctaaatgattttcactattcctatttgagcnacaactcaaacgggttggttagccctatcgacaaataaatctcctgacaccagttgtaactagtagaattttttacgacttcttactggcaaaccatcaattataaaacgggaaaacctattaaaacatgttatggcctcttgatccctgaaatataccttcctcgtacgtgatatgagtggataatcacaagaatttgctagctatttcttaatcgcttaaaccaccaaaattgatctcggatataacaacgtaaagataaattctcacattgtgaatgaaaggctgctcatctttgagccattattcttgcatccatgaatttcttctggacaattatttcgatatagaaatggtaaaattaat

SEQ ID NO: 26130 - DNA, 280 bp, Oryza sativa
  unsure (1)..(280): unsure at all n locations
aggtgctcaacacataaaaaaaaaaaagaatactgaaccaatgaaaacnagnanaaaataaaaggaaattttttaaaaaagaaggggtggggaaaaaaaaaacaggaaaaaaaaaaaaggggaaaaagaaagaggaggaaaaaaagaagaaaggaaaaagaagaagggaaaaagaggaagaagagcacaaagggnaaaacaaaaaaaaaaaaaaaaggacagaaaaggagaagggaaaaagaacaacaagaaaacgaaaaaaaaaaggaaaacacagaaa

SEQ ID NO: 26131 - DNA, 239 bp, Oryza sativa
  unsure (1)..(239): unsure at all n locations
gcacaaagcgcacaaaaagagcgaaaccaagaagaacaaaagggccacccccccccggccgaaaggagagaccnancacacaaagaacaggaacacagcgacacacgcacaacgcgcgcggcaaaacaacaggccaccgcccgccaaagaccgaaaaaanacacacccaaacgcacgacaaagacagagcaacccccagccgaacactgcaaaccgacaggagaaagcaaccggacggg

SEQ ID NO: 26132 - DNA, 393 bp, Oryza sativa
  unsure (1)..(393): unsure at all n locations
gatcagtccagtttacaacatgtggcacaagctattgttttgtgaacttgggagcttttantaatgaatacatgcttgacatatattcatcaattgtggttgctcaggatatacccttgtggtctaccacagtaagttgtcctatgtaattatttgctgtggttgcttaatttgcatatgtctttgcatcatgtgctctctgatctatatgattattatttactgagaaaattaacaagtaccgtagcaccagaagttttctgtatgaatgcatggagatgttatttcggttatcgaagatttggttgggattatattatacctttattcgctatatgagggtgggttagatctgaactacaacgtacacccatcttatttttgttgatattt

SEQ ID NO: 26133 - DNA, 255 bp, Oryza sativa
  unsure (1)..(255): unsure at all n locations
agctttcaatttggtgttaggtgcagtatttttattatttcggcnntcgcgnatgacatttgtatttagattttaattcctttacttggtactacctccgttannaaattaatattctgagaagatgtaactgtaactattacatgttaatagatgtcatatgtttaaataagatataagttaatgtatccagagagataatcggtatcgaacgtaatatatgttgttatatcgcactaagtatttgcaatcata

SEQ ID NO: 26134 - DNA, 389 bp, Oryza sativa
  unsure (1)..(389): unsure at all n locations
gctagctcctacggaatcgctcagaagcgcaactagttgtttatcttatccatgancangcatngcgctgctggcgtataatgaacgcgctcacttgatgtgcatgtatgatctctctgtaaactaaaggtgctgcatgggtcatgataattgacaactgacaagcgagtttcaagtagaatttcggtatttgatacgattctgaaacacagcagattggaactcaagaccatttcttctagtaacagactccctctcagctgtaacctgcacagctgagctgagcccgcttaatgctgcacattccttcatctgatgtctaaactacaggccacgtacaccaatcatttctctaacctctgaatgcttgggcctatgactatagacta

SEQ ID NO: 26135 - DNA, 456 bp, Oryza sativa
  unsure (1)..(456): unsure at all n locations
agcttatctgattaaaagatatgatcagcaatcnctttgagcctatgactaatggctntagggcctatatcacgctttgcgtgagagtgattgtgcgaaagctgtttctgacattgactaatcaaatcgtggaaggtacccatagatatgcgcctttcaactcttcgtccttgttagcttatcgacagtaaccaaaatgttaatcttcacacttaattttagagatatttaatcgtaacacatttcgatatttttaagtattaacttttaaaccactaagaacatagatatagtgttttacctgtaatttatctanaactgtttttcgttgctttgttcactgctatttgttcgccttgttgttaaatataataatttctaactataaatttagatatatanttgtctagactcgtaattaacagttgttatattatacgatggggatagatgttt

SEQ ID NO: 26136 - DNA, 486 bp, Oryza sativa
  unsure (1)..(486): unsure at all n locations
tgctacatagctcttggattatttatcttcttgnatggatnctccttcttgcgtagatcctctaggcatctcacctcagacatacatgcaaaagattgagactttccgtcgtagtatttggataatcctttcctgcaaagaacaacaaagcacttgccctgtgagaaaattttccttttgctagtacatctattgatactaatatgcaactcttcttccccaggaacttacttgacagggagttgtgccttcatagatgacagatcgtagaggctatctgaattcatccttctcgctggctgctgcgcaaactggtcttcttgagcttcagcttcctcgctgtctgaaaattgagcctcatcatcggagtcgcctgagatggacgatgatgtctcgaacaagtcttcatcttcttcttcacggtatactggaaggaccgccagctcaccggatttgccatgctcgcagttttctggcttctgaaca

SEQ ID NO: 26137 - DNA, 236 bp, Oryza sativa
cttcctatatgagaagaatacatacagagggtgcatacgtcattgaaagagccctgtatatggaaagtggatcttctttccactcacgtggacatacactcggttcatgaatgccgtctaacaatattacattttcaaaacatacaaaaactgataaatatgtgataagctactctattaaactataagctaaaactcgacttattgaagaagaaactaaaattacaaatactctc

SEQ ID NO: 26138 - DNA, 501 bp, Oryza sativa
tctctaatttcaggccaagcagaattcgatgtgaatgtctttataagatcagggcaaccatattgtctacaaatagcaatagaatcttgataatattgatacaaataccgatgtcctccggtaaatgaagctggcaatattatcctttgcccaatagaagatccagatgtaatacctcttgagacagaattaatctatgagttgaatggtgatgatctatatttactttggaaggctggtgtgcaataatgtgctatccggctcccctcgacacaacaataagaatctacttcataagattgtgttagccttctacaccgtaacggtgtattgaagtctcctggcctatcatgcaacctatatgcatagcactctagcattgtaactctattccgttgcatggattgagtgcgtgctatttgacgatatgtgaggtttcatgataacctcctctcatatggaacaacagtgatattgatggcataacttgcgtgatttcat

SEQ ID NO: 26139 - DNA, 64 bp, Oryza sativa
agctggctcgggcagctggaggaggaagaagacttatatataggggcgggactcaacgcccggg

SEQ ID NO: 26140 - DNA, 333 bp, Oryza sativa
cacaacgcacgcatgttacctaaataaagtatgagcaagctctggcaatgagggtatgccaaccaaacaaccacttaatgctctactgctatttctcactgaggaaatatggaatgaaattccaaaatctttgagagcatctctaacaacattttctaattcaactctccacatgcctattcagccagcttgccacagagctggagaatcaaatttgtatttcactccaacagtctctctattaccttctctaactttaatagtgggtcccacatgtcaatctttgccattcttcatctctcatcacgattttccctttcccacccactctct

SEQ ID NO: 26141 - DNA, 247 bp, Oryza sativa
gagctgtcctgccaaacaacatgagcacgtgtttgttttttgacccaaatcggaagatgcacaacccccggcataatacagattggacaggggtaaatgcactggcgaaatagtgagaaacatgatatactcaagaccacgtaaacctaaaacatggggcggaaaaccgagcagcccttcaagaacacgttattggaaacgacaaagaatggctgtttaagtaggaagtcacccagcaacaccatgg

SEQ ID NO: 26142 - DNA, 435 bp, Oryza sativa
  unsure (1)..(435): unsure at all n locations
ctcaagctntagctcccttatccgatgatgtgaagaagactcttgaagacatctctcattggctagaagcatcatctctagatagtttggtggtagactgtggatcaattaggactccgntacatgaagttcaagctctgatcccggaagaactaaccgacgttcttactccagctgtctatctngaacaacatcaattcaaactggagaaagccaagctgagattaaccgaacgtcgggagcgcatagatattgaagccactatccatgccaatcggcaactcgtgcatgaagagaagtccaaacttgatcagctatctgagggcccgatcaagtctaatattgatcggcttgaagctcgtaagattgagctctnggcacaactccaagaatgcaacgccgaattggatcctgaatacgaatagctaactgatc

SEQ ID NO: 26143 - DNA, 366 bp, Oryza sativa
  unsure (1)..(366): unsure at all n locations
agctntccaaggcgcagatagctgcacgcattaagtcncaacttcgggaggagcttaaagaagagcttagagaagagctcactgccgagccgttaggtatggaggctcggatggaggcacgcatcanggataggtcgaccgatgccactcccggtcccgtagtacaagtgagccccacgcagaggcgtagcagctgcgcatcaactgagactccggcagaacagcctgaaggccccgccgcggcggaccacataacggtaaaaacaacttaataacacatatattatattagcaccacaatacattgcaacatatactaaagacactaatgaatcaatcgcaggaacccacatcgcgtaccctagt

SEQ ID NO: 26144 - DNA, 89 bp, Oryza sativa
tgcacatgaacaggcgactaatcatgcatcttggatacctagcacaagcactttggaattaaagttctgagaaacgaatcttatatata

SEQ ID NO: 26145 - DNA, 373 bp, Oryza sativa
gttttttttctagacgcggaaagaggcatcactgagtgtagtaacccaagtatatcaataaccgtgctcgcggatatagacgacctggacatgtattacacttgggtacactctaaatatctaactgagtggaagggatttggatacgagatttatgtgtgggaccacttctgaagggggaatgggatcctataaacatacactaatacggagcttcctgggacacaagaggggacaaccgatgttattgacatggattaaaactgatagtcatgccggcttagctgtgaaaaattgaaacttggttgccaagaacctagccatcttgattctcggatggcacatgcttgaggttgcgagacgtggacttcct

SEQ ID NO: 26146 - DNA, 405 bp, Oryza sativa
gaagacgataaatgatgaagcctcatggcgaagagcgtgcatcctgtgcgaaggtcgaagggcgaatagtatacgccgaaggaggatgacttctccatatcgaggccagctccgggaaggcccaaggggccatcccagccgcttcggcccgttggccattgggccagcgatcgccaatttggcctattagaggcccatgcaccttaattacactatatacccatgtaaatgtccctttcataagggcaactatataaattcccctgtaaaacctaaacccaaatagaggggcctgtaatatggttataaatagacccctacggccatgtaaaggggggattttggaagaaaaagtctcagtttaatacatttgtactggttttcaaccactgctgagtaaccacg

SEQ ID NO: 26147 - DNA, 520 bp, Oryza sativa
  unsure (1)..(520): unsure at all n locations
ctcaagctaagacccatgaatccctttatgcatatctggattttgttttctgctaacaaacatataggangagtagtatctgatataaatataatactcgagaagaaatcaagtattctaaaatatttataaatatgtatttctcctcttatcaattttgatttccccgagcagatgactccttacgtttaaacactctgcccgactagtcatagtccccaagcatcgggagtcggcctatgcacttcccaaacatgcatatgagtgacatgagttcgtcattaatggaacaaagtttcacggatcagaatttactactcgggtacttttgcaattattaagagcagagaataaatttatctcatctctatgactttgatttattccgaataatacttagcaccttgcgttactcggtccatccaacgagcccgcgggtgctatgaatcggcccanaggcaaccatccattggcaaccatacggtagcatatgacatagaactcataactcgatagtact

SEQ ID NO: 26148 - DNA, 351 bp, Oryza sativa
  unsure (1)..(351): unsure at all n locations
tcttaagcgacgcagctgcaactccttgtagaaaacacaagttttttgattgtataggcaaanagcattgccttgtatatattaatagagcaggagaaaattataacgagctatatacagagttagacgaaaaagataacccgaaaagaagagcaaaagcaggatatgtgatatctcccagatccatactcttgaaggttgcagccctgctntgactcatgcttcgcattcttccttgattttgctagaattgaggacggcgcaaacgcattgctgcggaagattcttacgtttcgttcacaccagatcttccacgagattataatcaccagagtcttgagaggcttgcgt

SEQ ID NO: 26149 - DNA, 453 bp, Oryza sativa
agcttggagcatcaagttcctagggcttttctctaacgatcccgatcgcaacaatccaccgtgacaaggaagtgtggggggaggactccgatgagttcaagccagagaggtccgaaaatggagtgttgaatgcagcgaaacaccccagcgcactactctccttctctatcgggctaaggtcgagcatcgggcaaaactttgccatgatcgaggccaggaccatcatcgccatgatcctgcaaaggttctccttcacgttgtcccctaagtacgtccacacgccaatcagtgtgatcacgctaaggcctaagtatggtcttccaatgatccttaggagcctcaaggttaagagagataggtaagatccaaggaatatcttacttacacttcttttttagcactgctttgttgtacacgagtagtcttggtcacaagaatatgctccctaataat

SEQ ID NO: 26150 - DNA, 457 bp, Oryza sativa
  unsure (1)..(457): unsure at all n locations
actcagcttgtggagcaagaccgattgtacttcatcggtcacttgttgtactatttcggntacatctatgcctaagaccggaattattagtgatcctctccctgttagttctatgggcgttggcaaaaagaaagggaaaagtgttattattggggatcctcggcccaagaataggatcaaaaatgcgaaggctgaagatcataaagttacaaaagataagtcatctagttcccacaagactaaaaagccgaagctcacttttgagatgcttatggctaagtacaagaaaggattagctggtcaacgatttgataaccaaactagtgattcgaaaagaccaagatcatctcgtatgaagagattnggtcaaacatcatagcaatctgagccatctactataccaactccatataaacctccgggtgtgatgccatggtatccacatncaatgtcatca

SEQ ID NO: 26151 - DNA, 447 bp, Oryza sativa
  unsure (1)..(447): unsure at all n locations
agcttcacccttattttccttccattatctttctttcggcnnccttggcaccattatgttatgtcttggctcaccaatgaccactctctttcctttagtagattcagattgctccgaccgaatcaacaccttcttattattggaaataattgtattcaccgtaaaaggatcatggtcaagcttcattcttagagccatcggtgagattcaatcgtccctcatctatggccgattgaacctttcgtcgaaacacattgcaatcattagtagagtgagaatgagaatcatgccatttacaatatgctcgacgtttcaactcttcttgtgatggtatgacatggcctttaagaaatctaattcgcttttcttgcataagataatcaaaaatcttatcacacttggctacatcataactatacttaacctcactctgccgatctttacgag

SEQ ID NO: 26152 - DNA, 439 bp, Oryza sativa
  unsure (1)..(439): unsure at all n locations
cagctttctgagtgtgaggcattggatatatgcccttcattcaatcattctcatggattgctaccaattgcgatgcatcttcttaagagatttgctggtatcataaaacactcggtcaatttgtggtgggtggtaagttcttattctcttcttgtcaaaaaaaaatgtttatttcttttcaaatagactactccctccgatttcaaatgaatggcaacagatactattcacattgaatattcaaccgctcttatttcagtagtgtatttataaatattagaaaatacaacatattatcgaagtatgttgcatgttaagcacatttctattgaacaaaatatgatatttaaaatggtctaattcgttgagataacctgatcaatggtgacaaataaagggaaactgatggnggtaaaacaatggttgcacctgcattaac

SEQ ID NO: 26153 - DNA, 321 bp, Oryza sativa
  unsure (1)..(321): unsure at all n locations
atgcttgtatcaactccgtcgcatatattagattctcagagatgcgtctccctttgaagaaacccgttnggtctaaatgtatcatcctcaggaataccctgtgcagccgtgttgcaagcactttggaaagaattcttactgagcagttctgaagagagatcggcctatatccatcgactgtgttttctttcccgggctcttggattagaacaatataagctctgttgattcgctctatgtctgccgcacaagttgtgaagcctgttgcttaactgaagaacctcctctttaattgtgttccatgctgcacggtagaagctt

SEQ ID NO: 26154 - DNA, 156 bp, Oryza sativa
  unsure (1)..(156): unsure at all n locations
agcagggggaaatttataaaaggacatccgtcttttattacattgcaccactctgggncatagtgggttgttatagagaaatagaggaagccacacacggattcagtcaggcctatccatacactatctaaacaaggaagttagacctggcgatgc

SEQ ID NO: 26155 - DNA, 135 bp, Oryza sativa
aacacgagcgacttacaaggaaaaatttttttttacgccaaagttgcgagaccagtgggacagaagaagaccgaaccagtggagaagactaagaatctctagataacggtaactatacagagatgggcccatgaa

SEQ ID NO: 26156 - DNA, 513 bp, Oryza sativa
  unsure (1)..(513): unsure at all n locations
tactcagcttaaatttaagctcccaaacaggcgtataacataaaagatttcttggcttattatgtccagtagctgcactagtagatagatcccctggtcgaaagcaaattaacaagccagatcggctgcatggaaatggacagccagcagatggaccgaactgcangctagctaactgaaagaaaataatctgaatcgatcgatcggtggctggctggtcggttaattgtgcaacatgcaatgtgcagagcccacatgcagatgcagatgcagtggatgatcgatgcagtagcagctagctagcaggaagcagaaaccggtggtggtccattgtattgcagcagcatatgcctcannattgagtattgaatgaatttgtcgagctagctagctactactactggtgttactatcgagattaactgaatatttgatggtttagctgtatatagctgagataatgaggtattattctctgtngataaagcctcttatgtcgatcgtcttatctga

SEQ ID NO: 26157 - DNA, 317 bp, Oryza sativa
ttgaaatatccacaaataagcaaaaatacagcctgaaacgaaggaaaaaagcacatcaataaaaaccatcaaaaaagtgcacaaagttgactggaccgaaagctagctgatataacccatacaagtagtagcgcctaccacacaaaatgaatataaaaatgttgactacatactaaatgacagacagaacacaaacatcctacaacttggctaaaaaatactcagacacaatagatggcctacaagttggagcttcctgttcctcacattcccaccagaatatacacataccatcattgactgtcatcaccaacagc

SEQ ID NO: 26158 - DNA, 332 bp, Oryza sativa
  unsure (1)..(332): unsure at all n locations
atccatgatcatagtcagaagataggattactagcagcaagaattttgtgaggatatataatgcttctaagcangcatcaaatatcctcttttcttttattaatattaatatgctatttccctcctgtttcgtgatgcctttggctgaagctgtagaaactgaaactgtgtcagctgatgcccaacataaaagacacttcagaatccttgtgtagttctgctattaggtactggcttttcagaatgtgtatcctaattaggtggtttgaacaaactttatttggcttgaagtagctangttctgaaacctgtttacatggatgatagcatat

SEQ ID NO: 26159 - DNA, 207 bp, Oryza sativa
  unsure (1)..(207): unsure at all n locations
agcttgccatgtacttccttatagagnnagtagnatgngatagtgnaagcgggcacacacacaagtccatttatctctatctctgactttactactataaaaagagaagacgtcttatcgntattttagtacgtcatcggtgtttgagacagaatttgatgttattcgctgttactacggcaagtactcgcgtccctgcatagtgtt

SEQ ID NO: 26160 - DNA, 374 bp, Oryza sativa
aatatcagcttctcaattggacaagcaaaaagagcgttattttttgatcgttgcacttcaaacttactaatgcgaacctcaaatgcaacccaaacaatatgaactgatatttagaaagtggaagacttatctctaccatgatatacaagagggacatcactctttgtgccaccaaaagcatattatatggacggacattttcaagagtaaaaatttgaacaagcttggaatagacctttctatgtaaacatgaactacacataaaaagattcacaaaacctgtacgtagatcaaagtgcacatcttatggattttctcaaaaaagattttataaaagtttcctaatttgaatataaacactatactgcactatt

SEQ ID NO: 26161 - DNA, 515 bp, Oryza sativa
  unsure (1)..(515): unsure at all n locations
ctcagctngtaatgaggtcactatgcaaggtttatgtngagaattgatcttaagagtttatgcaaaccttcactgctagccatctaacatatccagatctcctgattgcatgcattgatggagcataacaggtacaagcgggcctcattttcacagaagaggaagttgagtacagagtgcgcaatgttctggccagtgttgaatcatctctctctaatgcatcatacctatcgggaaaccctcctgagatagtggtttggagtgcctcattgtatgactacaaggtaattttttatctcaggttatcattccctattgctatcctctagcaacctaattatgnttggcatgctaaaatcattccaccagaatccgatggaattgtcaacatcacacataccaattttgaaggataaattaccgatgaacacacctctttgcttgcccgtctttaccttgctctgaaacatagagatagagacaggtgtatntcagttctcttttttttttggtag

SEQ ID NO: 26162 - DNA, 177 bp, Oryza sativa
agctatgcagcgatgaagacgaaacggtgtgtctattttctacgtcacacggccgcccgctgactgaaccctaggagactctctcaacacgtcacacccggcacggtcacgccgtgcaagaacatcccaggcctagtcaccccctaggcaactccccgccaaacactgccaagctct

SEQ ID NO: 26163 - DNA, 457 bp, Oryza sativa
  unsure (1)..(457): unsure at all n locations
agcttagcatatgtgggtgtatgatcttgatcatcttagcatgaaaagnatctacacaagtcacaaggatttgacaaagtttaatggaattacaagaaaccagaatgtatatggtttaatcaatatgaatatttttggctttggtaggaatttatatcaaatgaggaactctcaaatttatcattttggaaaataaaacatacggaactcaagtcaaacttagaacatgatcatagcaactcttattttactatctcatatctcgcaacaacctagactcagatcagcaaagtgcagctcacttacctcaggttcccggataattnttggcttctctgattcaaattntgagacaatacttaaccatgaatccatatatgagagatatcaaacagagcaactattcatcatttcaatatgaagaactaagcatgtcttacctagcatattatatcta

SEQ ID NO: 26164 - DNA, 464 bp, Oryza sativa
  unsure (1)..(464): unsure at all n locations
tcttgtctctaannacataatcttgcagacggaatntggtgattcttaattcactgaaccaagcgaagatggggagaattggatgtagctttctctgtagatgtccatggatatataatttacctgattccaagtccgtataagaaagttctgcctatattaaggaatgacactcgaatgttaccaaaaaaaaaaaactcaacagaccctaactaagcagtactagtttaaaaaactaaagggtttataggaatacagagatattagagtaaatggcatcttgggcctgtctttattaccgtagttacaacttgactaggtgtaaaccaaacttttcactttgggtcttgtttctttacatgttaagttaatatggaccctcgtctttcttcctccaagactctctctcccctctctgtgtatagctcaaagcacggtagtgtagctcgagcatgagcacacac

SEQ ID NO: 26165 - DNA, 399 bp, Oryza sativa
tctttccggggataacatacaacgaacacgaacacggttatcttgttcttcttcttgcgtgatccgaagaggagaaagaaagatagaaacatacaaagcggctgagataaaagagggaggcccctatttacgcgcgttggcgcgtgtggggggccacgcgcacccaaaccccacccgcggtatccggtgggtggctggcggatgtgaccggcatgtggccgcgaccggcttggctaagtggcgacgcgcggagggtgtaccggtgttaccggcacgtgcgcgttcgcgcgacggtgtggccgtgtgtggaggttggattgccgaccttgtgtggtgttgtgttgagtgtgttctgatggcttatgctactagatgggtgatgcgtgactggtttacgcc

SEQ ID NO: 26166 - DNA, 364 bp, Oryza sativa
  unsure (1)..(364): unsure at all n locations
tagtactgggagtaatngatgagaaattcgangttatatcatgtggggagtggttcaagtgttcgcggagaacccagagcactgagcacgtcgaggaagcggacgacgccaaccagctcgccgtcgtcggcgtccaccacccacacctgcgtcacgcggtgcgcgatcgcctgtgccatcaccaccaccagcgagctccccgggtggcacgcgatggtctactccgtcgccggccgccgcatccccacgacctgcctattgcctcgccgcgcgcatggcgctgacgcgtagtgtttgacccgtcctccgcctcgtcgtcggacaaagacgtgaaggaggataacgatgatgacgacgacgatga

SEQ ID NO: 26167 - DNA, 353 bp, Oryza sativa
aacttgcttaaataaccatactattttttccccttcgaacaaagggacacatttgtcttttgcagtatgccatgtgcattatttgcctatttgccctaatatatagaactttgcttactaggagcgctcaattcaagataatgtgccacacaagggctgatcaaaatactaatagtactagacttgcactgatagtctgacaccatcatcgatccccttgtctttacgcggacgatctagagttctcaatctgggacagcggacacaggatccaaacgccaaagtatttttaacaccaaggtgcgtatatgcccctgcgcatattgctcgcgaatccacccaaaggcggagaa

SEQ ID NO: 26168 - DNA, 372 bp, Oryza sativa
tatagtaagaacgaaaggcgatatcttcattacacatcttctcttgaagagagaaaacatcagctgagacaggaagcattaaggcggaaaaactatgtctgaccgaataggatgtcgcacaaaacactatataccacaaatgagcgtgtgttcaccgtctatcaagagaacagaaaagtattgtatgtagttgcacatggataataaagggtatacgctataactttccatgataactatgtaatctaagcagggatcttatggatgtcaagaaaatgcacctcgttctatataatccaagttgtatatggaaggagagctgcacttctggtagttaatcggacggacaaatactcgtgagagattccacca

SEQ ID NO: 26169 - DNA, 318 bp, Oryza sativa
  unsure (1)..(318): unsure at all n locations
atggccttgtcttgcccaaagaaacaacatgccacacatattatgcccatacccatatgaaaaaagaagaatattgtacactgtggcttccattaacaaaaccgtgaattattntgagaatcatacataccttccaaggaacaacctcacaaaatgaaagatccaaatagcactatatcatgcaagagggctaaagcaggacaatacgggacccctctctttataccataccttgacataatagccactcagacacatatgcctgcaganatcagagactaatactgacagaattgcccattcatcaacttaaaacat

SEQ ID NO: 26170 - DNA, 403 bp, Oryza sativa
cagctatattacataagaatgaaaactgccttcgttctgatcagacagacaacacttaagaggcgagcaaaaatcctatcaagacagccatatcataagcacatgatatcgaccgtcaactgacccacaagcaagcaacctagacacacaaactaacaaacaaaagctagacagtcgataaactaatggaaaacgagcctaatgctcggaacggcttctgcggccgaggagtcgaatgcagacctctgctcgtcaccaggtccctctgagcgactcctggagcctggcagataaggctcgctgctgcccgactctgagccactggagctgctgctgctgagatcgtggctgccactaggagtagcagacaaccaacctccgttgccactggctggacccctgg

SEQ ID NO: 26171 - DNA, 204 bp, Oryza sativa
  unsure (1)..(204): unsure at all n locations
agctatgagcttaattatatactccctccgtactaaatattaaggcaaaccccgagntcccgtggccaagtctgacggcccgncttatatgaaactgttgtataagtcgtgaggtattgcggccacacgatcagacctcgagaatcacaatcgcgacacctgggctatctgacgcgacgcagacctctctctaaatacgactga

SEQ ID NO: 26172 - DNA, 456 bp, Oryza sativa
agcttaagaagctgtcaggtgggtccaggtcttgtcatactatgctagggtgagagaggtgggtaagattctgggtaaacttgatttttagattaattttcggaattattttctcctctaactttgaaactacataattcaatgtgtggaccaaattaattagtgttgattttactggaggtaaatgattacacctagattccattttctttggttgcactcaaaaataatgggtggactgctcacagaaattaaacaaagatgggctattagaaagctagattgaatttttaggaggcttaaacagagaaggaaaattctagaataattacatttattcatgataactaatctagtatttgaataaattattttccatgttcacttatgtgcagttaaatgtacttctggatgaaatatggttttagccgattaatatttaatctgatttctttt

SEQ ID NO: 26173 - DNA, 360 bp, Oryza sativa
ctgcgcacaccgctttaacagatgtgcttaagtccctaatagacacatggtttcaccacacccggaaatatatggcatatgtggtataaaatccaagtaaataaactcataaaggatttaccaaccgcctgaaaaatgaccacaatatataatcagcctaagccataatattggtcaataaaaatacacacttacgtggcgaaaagcaatgatattgtatctaatcaattgcttaaaaacccaaacagcaccttgacttatatataaaaaagtcagcgggccagctatataaagctttactgtttgacaccttttaagatgcatcgtaccaactcctaaaaagttgagtaactgcggtat

SEQ ID NO: 26174 - DNA, 457 bp, Oryza sativa
  unsure (1)..(457): unsure at all n locations
agcttccncatacaggtgatataagatttttatgtttatcataagtatttttttttgaagcttgatcaaaatttatagaacaatatagcaacatatgtagctccaaatataattcattaatctatcgctgcataattttttaagtatatttgttttgcgttgaagatatgttacaacattcttctatatataaactgatcaaacttcaataaatttaacttagaacagccattgtcacttgtgttctctcgtcgagtgacgtctagctaaggtccgagaaacaagaaacgagtgagtgtaccatgtatgtgcccatgccatgagttgttggaaagagtctcacaaaatagacaaggaactctacctagtcatatgccaaataatcacaaaagatgtctctagtgtccagtggaacataaatagctagccctactggataaaggtgatatgatcctgc

SEQ ID NO: 26175 - DNA, 507 bp, Oryza sativa
actcagcttgtaaccacacattctggacagaaccaatcctcctgttgtatgaaagctctattctgaccaatacatctagagtggtatgctcatgggcagccatcacagcataccaaagtcccatccattccacatattcggcaatcatcactgttgccatcctgggatgcatgtgttgaagcagattctggattatttccgttttgggcaggttccagattctgtaaagcgtctagctttttgcaagctggagcctttgagcctctagtcaatactgatcttgacccaacctccgcaaaagtactagaatccatctcatattccatttcttcactgtaaccttcccgtctttcaggtcagtcttgagttcttctgaatcaatgacgcgatcacatagtagttgcatgatcctaagcttcagggtaacaggaagcttatagtactcaatggctatgacacttctatccaatcttcggccttctagatctttaataatacccatgacat

SEQ ID NO: 26176 - DNA, 172 bp, Oryza sativa
  unsure (1)..(172): unsure at all n locations
tactcaagcctgcttgagaggngactcgaaccgtccaccgctaaatgtccggttctatctaagttctagtactatgctcacggcggaactctcaacccagttgatggctccctagtcttcaccgatcagatacgcgaggctgcgcgtcgactatcggacgcagaggagcctc

SEQ ID NO: 26177 - DNA, 441 bp, Oryza sativa
  unsure (1)..(441): unsure at all n locations
agcttgccatgctaatagaatagctttgtcatcattttgngactgctctacaatgctggctattttcttcctgagttgcattccagggggagctctgtacttggcttttcttgtgctctccttttgtttttgagggccacaaatgagtgagcatcaatattttgtgctttgtgatagaccatatgaattgaagaacagttgtagtaaatttgttcaagtatgctaaacttcctaatggcaatgaatttctgttaatgtttgatcacctgtgtctaaattgtcaatgcctttagtgaactatgcctgaaatgtctgaaagcttgcacataaattaaaatgttatgggttacatataactctgcaaatttttgttgctgaatatcacaatataccataactgataataacttgcatctattgaagaatttcctattcaatact

SEQ ID NO: 26178 - DNA, 396 bp, Oryza sativa
gagctctgagattgcgatgtgtgtggttacaatggagagatccaagcaagccttgggtgggtgtggaaacgccttgcgatggtgtggatatggacctcttcgccgcctcaacaaatataactgtgggcgatgggaatacgacgcgcttctgggactccgcatggattaactgccgaagaccaaatgacctaatgccgttggtctatgagatctccaaatataggaagatatccctacggcaagggaaagaagacgactcctgtgtgcatgacctgaccctctattgcggttcatctatcacaatcaacctcctcgatcagttagtccgcctgtgggaggcggtacggaatgtgcacttatacagcgatgagcctgatcagattgtttgtaaattac

SEQ ID NO: 26179 - DNA, 421 bp, Oryza sativa
agcttcttgcttgagggtgtgtcttgtaatggatagagtgaacggtttatatatgctggtaatgaccgttggaaaggtcggtagtacccttcaaccatcattggggatcaattccagccgtccaaccaaaacctggatcgaacggagctgcggtggatttggtcgaaccatgggctggtcccgcctggcccaatttccgcaggtggcctcctcttttgctcccacatgcagacttgttaatcttggtccaattggacgtgtcatttttgctttcttggcccattcattgataagtctgattctcaacatcgtccgattgattgatcgcctgtattgatgtcgattatactctattatatggccattctctgcaagaggttagtgattctagtgctagtggaatattttattatttgacata

SEQ ID NO: 26180 - DNA, 361 bp, Oryza sativa
tactaagccttctctaaatattgatttccttaaccgattatagcaggattttgtctattggcgatatgataattatgttagaggcttaccaaatttcactattaacatctagctagatgacaaagcctataacctttaaggcgtttaacttagtttattagtaggttaggcaacttgacttgatattgttgatattgttgctcaatgctggtatataggcaacaaatatcgagcatataggcaagggttttagaacatatttgtgccttcttaaattaatgttgatgagtgggaggccaatgaatacgatgcttatgttttctttgttggctatataggacactaaatttgcccttgacgt

SEQ ID NO: 26181 - DNA, 55 bp, Oryza sativa
acccaaccgaaagacccgacccgaagaaaagcagagagaaaaattttctcacaag

SEQ ID NO: 26182 - DNA, 396 bp, Oryza sativa
cagcatgcaacttaagaaaggaacatcaacgaacagtatgattattggtcaaactcaaacatacaacaccagccatgagtatgaaccttaattcatgccttactcaaaacagcacaaaaagcactcgcctaagcgcaaaagcaaggtgtatcagctaaagtgccttgagtagcgacagccgcagcgaggctggcgctgcacctttaaggctaaccacttaagcacaaggcactgaagtgcataagtgcaagcttcagtcgcatctagctggcaggtagaaaagaatagaacatacggcatgggtcgtgtagcccacaatatggcccagaaggattaagttgaacttctaagtaaaattatcttcacagaggcaagctatgtataaagcaacaatac

SEQ ID NO: 26183 - DNA, 259 bp, Oryza sativa
ccatgccgtcgagctcgtactccaccggcccctccacgccagaggtctatgatggaggaggtgctctagatggtcgaatgatccgcgacttctacatccacgggcgatgggaaaggccgcgagattgggagcgtcgccttctcgtctacggtgacggcagcacgcctcatggcgcgctccaagctgccggcgcgcttctacgtcacccgccccgtgtccctgacccggagtctccagcccaacgttggctggacgacgt

SEQ ID NO: 26184 - DNA, 385 bp, Oryza sativa
tgctctcatgcgacaccacgtaaaatgttgacagccttaccttttccaaataatagtagctcgataataggatattcataaatatatatgttctgtgcatactttatgctataagagacagcatgactagcggtatcttccgaattattcacacacagagggtactattgtcttttttgcttaaatgaatagcatctcaatcgcctatatttgtgcctagaatgctgcttaggaccaactgagtgatctgcaatgctcattatgtgcgtctaacagttgatgcctgaaaagatgtccatggttgtacaatacatgcgaacatctaggtagtaattctgtacaacgatggattaatttgctatctaattcatttctgggtcatcct

SEQ ID NO: 26185 - DNA, 423 bp, Oryza sativa
  unsure (1)..(423): unsure at all n locations
nnagctcatataatatatcataatgcagagtttattgttcttaagctattcaactccatggcgactttatatcatttcaccaagaagtttctgttcttgttaagacaataaattagatataagcatcgaacaagctcttggtgctcgcatatataagttcgagtgctatttggaacctccagcactgctcgtgagatagtacacaattgaatgcatccaatcaaagaaatacagcatgcctgccgctgctagagccaaagcctcacttaagcaaggacttcctgaggagtaggactaatggtcaatggtgacccgatcatgctgcagagcattccaaaatggcagtgggccagtggcggccaagtcggaggcagtaacatccaagatcgtgtgcagggttttctcattcatgctcaacaactt

SEQ ID NO: 26186 - DNA, 229 bp, Oryza sativa
aaaaaaagaaaaaagggaaaagaaggaaaaaagaggggggaaagagaagaaaaaaaagaaagaggaagaaaaaaaaaaaaaaagagaaaaaaaggggaaaaaagaagaagagagaagaaaagagaaagaaaaaagaaagagaaaagaaaaaaaggaaaaaaagaggagagaaaagaaggaaaaaaagaaaaaaaggaaagagaagaaagaaaagaaaggaagaaaaaaa

SEQ ID NO: 26187 - DNA, 380 bp, Oryza sativa
  unsure (1)..(380): unsure at all n locations
acttggcgtcgatgcgatgcatagactatggatacttcatatcccaccttgtctttacgcagtatttttgttactacacctgttgacagtgcattatagaccgtatcgatactcttgctaccatcaggatagatgtgctcccattctcgggttccccccacatatatgggatatnttaagaaatgaacgtctattttcatagcagggcccgtggaaagaatgggaaagacgatgtcactatatctcttaccggtgacagaggccatcacataaatatttttttattggacgataacttgaaagaagatctctacttttcttcaactaagaaaatacgccggcagcgctattcgatcctcggcaaaaaaacagaccccatt

SEQ ID NO: 26188 - DNA, 448 bp, Oryza sativa
agcttatcatcctcgcacagcatgtttcatgctatctaagttcgaaacaaaacagactttcatcatatataatatagttccaggcttaacggccacagaaggtacaaatctaagttgcacgatcagaatgtcatacaaagcaaatctggagtttattgatgttcagataaaacatttcacaaggcctctcaacaacagagcctgtttcttcatcctggttcatggcctgacattcagcctctgcagcataaataaatctaccatgatcctacagcaccctgtgccggattttcacaggcagcgaagccccagtaagtcttcaatgagtatggcgggtagataggcgctccctcagttgtgatcttggcgatctatgtcattcaacacatatttcattagtaaaaggacatgttcataacacatttagcacacaagggtattataaaca

SEQ ID NO: 26189 - DNA, 417 bp, Oryza sativa
  unsure (1)..(417): unsure at all n locations
ttacggacctatgatactaagctntgctactcccaaacaggacagcaacagaatattacattatataatgaggatgtttgtgtgtgtgtgaatgtgtgatggaagttgtcattttntgaccaacgttcggcgaccacagtgatgatggggcccagcagcagtcagtctcagtgggcgggggagccccactctctgacacaaatgaagggtgggttgctntgaggcttatatnttccttaccaatatttgacaatttcaatagtggttatttgatttggaaccaaattttggcatacctaaaaaaataagccatttcaacagttaatttagactattgtagcttcaatacaaacataattntacctttactagccatgcgtataaataccaaaatttaaatataataaaaattggtaa

SEQ ID NO: 26190 - DNA, 85 bp, Oryza sativa
agctggagctaaattaaagaggcgctaccgactatattgaaccagaaaggagagagggagagaagaagccgaagaacccgccacc

SEQ ID NO: 26191 - DNA, 366 bp, Oryza sativa
  unsure (1)..(366): unsure at all n locations
cttggaaatgcttctgtaaatcattggactggttaagggtgcaacatctagctgatcaaatagagttatcttagagtctgccttttcttaccaagaggacagtgaactcaaaacttaaactaccttttgaaaacagatgcccagtgtcagtaaaagctaactgaacactaatttgataaaactagctgtatgattacgatcaattttgatatgccacgtggacatanntttttatgtttgaatatttggatatgcttgctatatgttagtcaatttggttgcaaagaatctgtagatgcttaagaaacgagatacccggtatagttatcgagtcaattcataagcagtgtttgttccaatgctgat

SEQ ID NO: 26192 - DNA, 374 bp, Oryza sativa
agcttgagggtcggcacatcataacggatttgttatataaaggacgtcctaatgccccggccgaagccgccaagaactatgtacgacacaacggatgggttgagcgggataacgcgcctgtcaatatggtgcgctggcgaacaacaacggcacgcggagatcataagagccttgtcccagaatctgagaaagagatgctgtggaccaccatgacttgagaaactcacccttcctgctggtacagaggacaaagtgacaaggtggactctgaagaaaatggcacaacacttttagagcttcaatggagatctgtaccagaagtatatactgaaggggcagacaccgaacttcgcacatttccaaagcttaaggat

SEQ ID NO: 26193 - DNA, 424 bp, Oryza sativa
atgcaagcctacctgaatcctccaggtctcatctgtcttatataaacccagcagagatacgagtggcgtatagaagcacaatgcatatatctatatgctcatccttcgctcgaacgtttctgatcacttcacttcaagacaagctgaatggccggacgtaaatatacaatattgaaatcaagcaagcgagaccagatgtggaagatatgcgccaaataacgaaacgcgctgatatatactcctgaaaaaaaaagcactgattaatgagacgtgatatacgacaacacatatataggatgcgattaatcatgtcgatcggatagaatattaccgacagagcgtgtgcatatccgtactacgactttattctgcgatgtgtgtggatatggaactggagaatatgcatggccagcaaagtatcaac

SEQ ID NO: 26194 - DNA, 390 bp, Oryza sativa
  unsure (1)..(390): unsure at all n locations
tgaaagaacgggtaacacaaactttatatgtgccaacaaattttttcaagtatctgtctggtttactgcaactacggtggttagccatacgttttagtcatgtgacattatggattagagattctctttttttaacttgtttaaggtgtgcctactttgtctatcaataaccaaaataaatatagtctttatcatgtctttttcattctttatcacattctccttcctactagtagtatcttccaatggntattgctaacttctaattctctcatgaagccatcatagagccccaaagacaagctagctgccttgaaanannaatgacttgcacatcatgtctaatattncgtcttgaaatttcttatgttacacggaacaactgcacta

SEQ ID NO: 26195 - DNA, 130 bp, Oryza sativa
tcggcgagacaagccactcactgctgtctcttcacgagcaatagcacctcgaccctcaccacaactcactggaagggccaaccggcgatatgccggagcttctgcgctctctggaaacgctgagatatct

SEQ ID NO: 26196 - DNA, 435 bp, Oryza sativa
  unsure (1)..(435): unsure at all n locations
agcttatcactgtacttccctatcttgttttttttatcaagntctcttcttgaagttgtcagtcggtggctatcatcataataacggagtgtgattttttatcaattcaatttgcttccttggtttatcattgccttgtttgattntttctacttagtctgcgaggactgaaagtttttaatagcttctttgggttttaggctcaacaaagcttgataaaagcttctaagaaatcaaagactcggctagaattatcaagcacagcatatatacaccagtattgtacaagttatgcctccatttgctacatttatgctcagtcagaatcagtcctttcatcatcagagttattactactcggctgaagatcggtgttgcggaattgatctacgacgtcacttgcaatcttgtcagccgcattttgagcattgctga

SEQ ID NO: 26197 - DNA, 266 bp, Oryza sativa
ctgcactcacacatcattcacttgtggtggctggctgtcgcaagaacccacgaaaggaagcaagcaggcagcgagagctcctctcctctctggcttttcttctacctgctcccaatgccgatgcagctaatcgccatgaaattttcggtaccaaaatataaagaacacaccccacattcagagaatgatagagagagagagagagagttggagtattttgtgagagctccaatgaatgtgtcacagattgtcatcagagtatcaga

SEQ ID NO: 26198 - DNA, 296 bp, Oryza sativa
gcacctaactgcgacgaatcacttaaagatctgatatatgcctggatttcgcgattaatactttcaccccgtttgtcgtgtctttgtttcttattgagggaagcaaggtggtcataaaaaccgggaccggattgtatcttggaaggattggataaaaagccataacttctatccctaccatgatttattccgaccacgtgcggcgggctgccaccactgtcacgagaggggaagagattaggggaaataaattgatccacagtttttggttctagccaaaaactttccaatcctaa

SEQ ID NO: 26199 - DNA, 421 bp, Oryza sativa
agcttgtggctggtgctagctcgccgtatattgagctgctgctgcagctagccatgcacgctactggaagcgggctcagatctggatcgatatatcgacgtcaaccaaagaaccaagtcaagtcgtcgcgtctacctatacagcgtcgtcccagctcgatgattagctagcgcgcaccctccgatcggacactcaccccccatgacccatctgattagctagctagtttcagatgattatacgttttccgtcagatcgagttagttagttaggtcgcatatatactcgtatatttggttagttgggcgaacgatatagctgcgtcgaatgttctaactacgtcgtcgccaactcgatcgccgttaatttaattaattcaagtctccgctactacagtggcgatattcgagcattagctagt

SEQ ID NO: 26200 - DNA, 250 bp, Oryza sativa
tctaaaccaacaagagaaagctgatagcaaagctgagaacgaaacattcaatgctacaaatcagtttccattgtattcccatgagttgacattttattccaccctttgatccctgagacctcgacctgcagagataagcgtggctgggtaagcagcccactagatagaacacaaaaagccgaaccacacccttcattccggtgtatgacaggtcgaggtctacatgccaaagctctgccctttacacaac

SEQ ID NO: 26201 - DNA, 355 bp, Oryza sativa
taacacagaaaaccattgtatagaataaaccataccttgtgaagccaactggcaaaacgtgggggggagaagaagaaaaattaaaacttcgtcgagaaggctaagctaatcaagccgagatagcgcggatgagaacgagaatatcacggctattaagacctcggaatccacgggcgatgaagaccaaatcctcgagcgttctcagcaactccttcccaatcctcctcctgatcttcctcgccgcggcagcatccgttccccagaactgcatgtagggcgagcaagcggagcacgcggcccccgcgggcaagaggcgaccgtgcagatcgtctacctggaccgtcccgccgacgcc

SEQ ID NO: 26202 - DNA, 370 bp, Oryza sativa
  unsure (1)..(370): unsure at all n locations
atgaaactcagccttgacttaatcgaccggcttgatggacagattatcttttatgaatcttgaagctggttaagaacatgaagcctgaaatgggcagccgtttgtctatcttgagatccatagccncagcaaagatgtggaaaattggcgttatactgcagcaatgccgcccgtctgatgtgaagaacaagcagtatgcctattgccaaacaagcagtacgcccgccttggcgctgtgagtaatcagttcgagctaaaaattgtatcatataccttgtactgaagaaaaggaactgatgtacaanacatttctttagttgattctgcctgacaagacatgcaaagttgtcttttgtttacaagatataga

SEQ ID NO: 26203 - DNA, 488 bp, Oryza sativa
  unsure (1)..(488): unsure at all n locations
agcttgttgaaccaagtcaacgaccgcagtctttcattgcaattgcgccttgatatccgtaatgttcctttccaaaaatctatcatgaaatcagttattcagctatttttgcttttctattgcatctgcatggcatgttttcatttacgtctctaccaatttaatcagttatgattagttctgcgttgcaagttactacagaaagcagtaagcactcgtttgtagtgccatctagtataagtggccatattntaatctttggtggtccttccttaacttatttctgttgcctttgatgtcttatgcttattgaatatggctcgagttgaatggacanaatatttacattctattcctgacttcatttatgcctttgcagcagattagaatggccaaatatttatttccatctattcattgggtgtttatgcattggtaatgtagctaaantgcaaaaatacatgtgtataaacaatgcttaaatctat

SEQ ID NO: 26204 - DNA, 386 bp, Oryza sativa
tccataaacccacaactgagtagaacttgccactcactcgctaaataaaagtttccaaatgttttatggtagcaagtctgtcatacaacttaaaagaaattattatctgctgtcaatgtcaatcctctggagatagtcataacttaagccaaccctacccaaatctcggggacgagatttattttaagggggatagactgtaacatacccgaaattttaggacttaaaaatttcttgtcaaaatagttagaggttaacttctccaatttttagagccaaaaatttccgttttaatttaggtgatgaccaacttaaaccattgcatgattataagttgagaacaaaatataatcttttcattcccaacattagactagaaatgtcat

SEQ ID NO: 26205 - DNA, 411 bp, Oryza sativa
agctaatatacttgacggacgagacgtgtatttgatgccttttagacgatccagagcctagttggaaacaagacggctaagaatcatgtaagatcggctgataccccgatgctatctctattagtattcagagaaagagctagattagacgtttcaagacaatacttagtagatcggacctagccgatgcatcattaagcgtgaaaagaaacataagagcctagcaattcgatgaaaactcattcaagatggtggacacaccgcataggctggcttggcgtcgaagcctaaacctatcagcccgttttcgacgatagaggcgatgagggttagatgacgagactgatctagattatgcggtatatatgataactcggcgattcgcatagacaagattagagtgtcataaaa

SEQ ID NO: 26206 - DNA, 347 bp, Oryza sativa
tatgggactccttataatggcctacttaagtgccatatgtattgtaggccctaaaggagtacctaggctatctaaaggactacttcaaccatgaacgtcttgggtatgttcctccacctaaaggaaaggtggacaaacagtgatgatcaagaaaccccaaggtcttagcaactttgttaatgaaaaatgtatccttcctaatgattatgcttctcattggtcttttgatgcatcttatgttcttaggaagaacactactggtcgtgttgctgctaagtatgcttgcccacagggcaaaaatattctattcagagagtacctttagtgcctaagcacttgttctaaca

SEQ ID NO: 26207 - DNA, 383 bp, Oryza sativa
  unsure (1)..(383): unsure at all n locations
agcttaaccaacacgcatgactgaataggcgatatctattcatttnttaatggcctgggatgactttataatgtagcacaacaggtcaataattctttcttaaaagaacaatccatataatagtgaaacctacatgataaattaaaaatttctagaaacttgcctatctgagcagattctaaagatgtggatgagctaataatcaaatgagtgataatagtaggtaagacaaataaaggcctaatgtacaaaataaaaaggacctaccacacaaacctgtgagcttaatggttgttgattctctttatacatcagcaccttcattatcactgttgggggggtcaacattaagtgctgacattatgtgagtggaatgcccacca

SEQ ID NO: 26208 - DNA, 411 bp, Oryza sativa
tgatatgaactcatgagcattgcttgccttagcaacttttataatctcttcttcggtgacttgtcctttcctcccgtatgctatgttggcatgaattgtgtcattgaaaagtattggctcttggcttaccaatcccatttgatctcttaaccaactcaattttaagtttttaagttctactctgtctagtgagattgtgcccacaatgtgggtcatagaatcgctccagcaaagcaattactgtggacttttcactgccgctctctccaacaagtgcaacagtctgcatatgacaattggtttatagcatgtcagtacaagtttaattataaaggaaaataatttacaaaaatttgcattatttggaactttcatttgaaaggcatatttagttctctgccttgctcaatg

SEQ ID NO: 26209 - DNA, 363 bp, Oryza sativa
agcttcagagatcatcatctatgcgattatttcttgattatttacagccatctctaatgggtcctgatatatgcttgttaatttgcagtgcaagaagaggcaggatctatctcccaatggacgagctcgagatggccggactctctgaagatgacatcttcgacggccgcgtcacggacagatggagatgttttatgagggatcagatcacgagagcgagggcgtttttcagacaggccgaagaaggcgccagcgagctcaatcaggagagccgatggccggtgagaaatgacaactacatatcctttaaaatttccatctgaacattcttaattatgttaagttggttcacacgtatgaatg

SEQ ID NO: 26210 - DNA, 438 bp, Oryza sativa
  unsure (1)..(438): unsure at all n locations
cgtgagacacaaantcaagttcagtgtgcgtaagaatgctttcttcataaggcccaagctggccgtcgatcgaagccgtgacaactttctcattaatacagcctcacacaatctaccagcattgaggatcataaaagcgcgttatccagatgaaaaaagcataacacaagcccatttcgtttaaaagagaagaaaaagaagatcctgcggtgctgtacgacgttccagagcttgtgtgagaatcnttaaaagagaaacacagctacttgtagggcaagctttgaatcatttcacggaggagctaaagagcacagtctgccggaagcggaagggaaagacaaaggatcaagactaagagaagaactgcatgaaggaggagggaactgggaggcatggcgccggtggactccttcaggcttagatttcatcaactgagag

SEQ ID NO: 26211 - DNA, 380 bp, Oryza sativa
  unsure (1)..(380): unsure at all n locations
tgcagctggatgttcttcttgtgaagccccttgtttgatgcatgggctgaatgcagctaagaaaatctccctggacgattggtatatttcgcgggtgatgtcttcgaatctgaagtctagtgggtgctcaagttctgcagaatcttcataaaggaaccaaactcgagcatctttttgaaagccttcatagaagctgcagaaccaatctttaagcacgtcaaccgataattctgccccggcatcagttggtgtagaagcgtattctccgtatgatgtgcatctncgatgagtacgctcttctccatcatcccctacaatcggctctagtctggggaactcacgctctgatacggatgggcgattgacaaccctcataacta

SEQ ID NO: 26212 - DNA, 490 bp, Oryza sativa
  unsure (1)..(490): unsure at all n locations
agctntgaatgaatntcatcataaatagtttatttatacacatctatgtatttgaagtgaatacattttcagcaataaaagttgatttgtagagaaatacaaatttacagcaagaatcaatgctgtcaggcatggaagagaattgagttagatcacagtatcttattgacggaactaaattgaaggcaattttctgtcaaccactaatcacctgcgcaactgagttatttatatattacaatacanaattatcaagtgccaacctgcagaaagacacgttaatgcgtcacacacctatgtctaactgcatatccatgaaaatcaaggaagtccagtagaaagctacttttacacactcacagagtgtgagtaanaccaaaggcaaaggttattagtagaatacctcaagaaccactgatctgctcattttgaaagaaccactgatctgctcattntgaaagaaccacagactattaacttgangcacatg

SEQ ID NO: 26213 - DNA, 307 bp, Oryza sativa
  unsure (1)..(307): unsure at all n locations
agccgcacatatcatctaaaataatgcagcgctatattcttttttttggaaaggggaaaatcctgataattatcacgattgcattctgatgctcgagtttagattcacgaccatttggatattggttttggatagccatcacaacaacacagtagcaatagtgtgttatatatgacttgtgataaggtgcttatttcctgaatggtaatacacaataacaccagatgcaccaaatgctgtcagttntatagtactcgcttattgttacttgatatcttccttatgattgacacaggtactcaataag

SEQ ID NO: 26214 - DNA, 420 bp, Oryza sativa
  unsure (1)..(420): unsure at all n locations
ttaagtcacctgcngcatgcaagctnttctggcgctgttgccagggaagatnctattttttagattacctgacctaatactttctaattacctttgtataatcatttccctttgcaagctaaccttggttgtttttacttttgttgtgaaagcagggtagtacatgactgatttcaacttgccggaaaatttcaaagaaaatccagaagctttcttccagagcgtcaggccgtgagccactgctctgcagaaaactctactgacaaagaaaccagccgtaccagcgccaccgactttcaagactatagctgacaagactctccatgagttcgctgctccctctgctgagaatgtggccattggaccacagatcaacatgggagacatggatttcgacttgaagtccagcctcatcactat

SEQ ID NO: 26215 - DNA, 263 bp, Oryza sativa
  unsure (1)..(263): unsure at all n locations
ttctgtaaataaaaactgataaccagcggttctaattggatatatacgaagtgccccaattgtatgtttataataaattataatccttaaattaaataattagtaattcattgtagagggtattacattttctactgnttttcgngaatctattgggaaccaggttgtgaaaaccgacttttgggtattgccaaagagtatcacttttaactggtttttcttggttttcaccgaaccacccaaaccgcttttttacctttaaa

SEQ ID NO: 26216 - DNA, 446 bp, Oryza sativa
  unsure (1)..(446): unsure at all n locations
tagatccccctttttttctacctctagagacatcaatgttctcatcttcctcctcgctgatgagccccttgcctcatcccagggacactgacaaatggcatgcacctccttgttccttggatacagacatgatggtgagctccacacaagttatgggtagaaaacttttgaaattctgagtagaagaactttgattcgaaagttcaagggtttgatataaagtttttgagttttgagataatagtcttaggttcttaattagaagtgttgcgaccaaaatgatactctttccattctaaaatataacaatttatagcatttaaaaattgtcctaaagtataacaaattctccacctatattctcttttcaatcaatcacaaccttattccattcaagtcgacatgctnntttaatacccgtgtccaacctattacgtgtatattga

SEQ ID NO: 26217 - DNA, 273 bp, Oryza sativa
cagcactacatggccacaacaaacataacttgcaaggccggacgacgagcccagcacaccaacccaaggagcaaaacaggcaaaaggacagccaaggacaacaaatatcaacgcagacgacaggaaccactaagaacaaggccaacaccaaaacaaaggccacactaccgagagacggcccaaacaaccgcgccatcaagaggcaccaaaaggccaactgacaacacaaaacgaccacgaaacctaccggcgaagggggatccacaacaactt

SEQ ID NO: 26218 - DNA, 339 bp, Oryza sativa
  unsure (1)..(339): unsure at all n locations
agacagnattctgcactccactgagttgcaattggctctatttctataggtacatagtgcgttaattgcatggcgggcatatgcctcaatttcatatgtaatctctattcgcatatgatgataagtcaaatacacgaatgctgagttagaaaggataactcaaatagggagagggagacggtgttaacattacggcctatgcaatatactccagtgttgctgaaaccaacatgtagacgcacaacagaattgctaatggtagttcgcataacttataataaacctatgtttataccattatattcagtgtaaacaggcgttatgcaatccttctcttgc

SEQ ID NO: 26219 - DNA, 484 bp, Oryza sativa
  unsure (1)..(484): unsure at all n locations
agctntgcanaattattatgaagctactctactatatattgatccctatgatcgaagttatatactctataacataggccttatacacacaagcaatggagagcatacaaaggctttggaatattatttccgggcactagaacgaaaccccttcttaccacaagcttttaataatatggccgtgatctgtcattacgtgcgactatctccactatagaaagaaaaataagaaaggatcaaattttctagtatttactagaaaagggggctttctacatagggatcgtcaaaacaacgattttgccctatcagctgtaggaagaaaggacacttcacgagaatcataatatgaagaaagaaagtatggcctatactactctatggatagagttctcaaattgatagagaaagcaccgtanagatcaattattgaccgactgggtcgatacaactaaaaangactgcttactttatccatgatatg

SEQ ID NO: 26220 - DNA, 420 bp, Oryza sativa
ctcggcaatttggcgaagaaaaactagtcggatatattacagaattaaaacaaatacagggtaaactaagtatattaggcataacaagcgtttcgttcttgtagagtaaataattggattttgattgagttatttttctaagggaaaaaggaaaaggaggattcaaaatccttttttcttcggactttcccaaacacaaaatacctccttgtattcgcactctcaaatgagagtggaagaaattcgactttcatataatatcttaatagaattccatgtaatgatcaatgcattctttggattctatattattcgcatgtctagaatcctaccaagagaatacccctcattttatgtaattgaagctggattgacgaataagaaataaacataatactggttattagtgtcgcataaaac

SEQ ID NO: 26221 - DNA, 296 bp, Oryza sativa
  unsure (1)..(296): unsure at all n locations
agctggaaggagccagggagaaaagtcttaatgtctctactccactcatctacgccatgttcttcaataacgccggttcgagtacacttgatgctaccgaaatcttcgacaagctgagagtcgctccagatacttatttcaagaacatcaaagatgctggaagtatgggagcaagtctggcgttggcgatgaccaaatccctttatccaagggttgatatggatgccattgatggctttgcagacgggacgagcgaagaagctgctcttgaccttatcagtgatgcgcanaaagct

SEQ ID NO: 26222 - DNA, 269 bp, Oryza sativa
ccccttcactgctacattactgttataccctgctgtatctgtcacccatgtcctgcaaaaggaggttgccttcttcaaggctatgaaaaaataattttagccaactgggcatctttttaccttttgtttcaaaaggtgttatctcccgcataaaaataaccctgaaagggttaaccttcaatatcaccctctggagttccttgttgcaccgtggatgtttaactccccaatttccctaaaaaattcctaattcgtagcagaaacatgta

SEQ ID NO: 26223 - DNA, 290 bp, Oryza sativa
cccctgaacggagctcacacatacaattaacactgctgtgaatgaacgagtggctaatgcgcctcctcattgacgaccttaaagcgtctcatccacttatgaaaatactgaagacgtgcctcatcaactcttctactgaagtgatgaactgagcacctctcagacattctgaccacagtgtgctttcatctatatgaatgggccagcgcccaacagttgtacatacttgaccgacctacataaaactgcgccttgcttacctagatgtcgaagggtgtggtatccccaac

SEQ ID NO: 26224 - DNA, 444 bp, Oryza sativa
  unsure (1)..(444): unsure at all n locations
tggtccaacttaaagcagattgacgttgaccatagntttaacggcttataacccaaaacggagggagtatattataagacagggtaattttcccaaaaatacgcgtaataaggaaatgatcggtgtaataacaaaacccattcccgttccatttctattttcgattcgaaccgataccattttcatattgcttcggctgggaaaaaagtcgaaaccaacatccggtggccgggaaaatccattacccgtttcagccctcagcaactaagaacttgttgaacaaaaaaatttacaattttttacccattcattttttttacatgtaggcgccttgaatcgtgctttttggcgcccaccccttcacattaccgacttaactactggagatgcaagggttctggggccagaatcattggtacagaaaactagatccccaccctaaga

SEQ ID NO: 26225 - DNA, 450 bp, Oryza sativa
  unsure (1)..(450): unsure at all n locations
agctntganagcgttgaggcaaatctgcagggatttgtcctaccagattgtttccattcagccatagcaccttgaggttggaacagtttgcaagattaggtatctttccttgcaatgtgttgntgctcaagtagataatttgcaggtgatgcatattgccaagggactgagggatctctccagtaaatgaatttgcaggtagaaagagaaatttgaggaatgttaggtttccaagagaaggagacatctgcccaattaatcctctatttgtgaggtttagagagataacgcgatgtggagttttcaccctgcangagacaccttcccagctgcaaaagtaattgctgtcattccaggacatcanggcttgctgtggatccatactgattgccttcttgaactcaagtagtgagagtcgatctgtctcgtcccatataatgagctgacatg

SEQ ID NO: 26226 - DNA, 368 bp, Oryza sativa
  unsure (1)..(368): unsure at all n locations
tggacatcatcctanggatggattggttggctaagttcttatgacttatagattgggccgaaaagtgcatcaccttgcaaggacctggaggaaagcaagaccgttttacctctaacacccctacctgaagtcggtctatcttaacctgtttacaagtcacctccttggagtcggtgcccgtagtctgtgaatatcccgacgcattttcagaagaattaacgagtatgccaccataccgagagattgaattcgccataaaactggcaccatgcaccgcaccaattgcataaagaccctaccgaatggtagccaatgagctagcagaagttaaaagacaaatcgaagaattgaagaggtaaggttatgtg

SEQ ID NO: 26227 - DNA, 437 bp, Oryza sativa
  unsure (1)..(437): unsure at all n locations
agcttgcataacactgaaacatccatanaacataattcgtatgcagcagccggtgccacctcctgctcagaacccaagcttggtgcggcgccagtgcctgcgcttcgcgttatacctgaacaacacaaaccaaaccacgacatctcagcagatatgcctaagccgaatcgaacgcgggaggagcaaaagacttagcaagaaggaggggagcaagcaaatcaaatcacctgatggtgttgtcggtccgcatgcggatccagtaggggatggggcggttctggcgcatcttcttcgccagcttcttcttgatgcggaaggtcttgtgggacggctgctgcgatacgaaacaagcgagcgatcacatcatcgaaacgtcggacggccggcatggattccacgagagaagggcgcgagatcgaagagcgtaccatcgtcgc

SEQ ID NO: 26228 - DNA, 407 bp, Oryza sativa
aatgcagttactgtacatacatttgtgtttttcttcctgctagcttagctagtagctctgatacatgatcttgttgtctttgtaaaggacattgtgcgtgtgagtgggtgtgtctgttcgatcctctaatggacacactagtgttttgatcgagcaattggcagtgttactatagctagctgttttgaaggcatagcacagcgatggcacagtgattgtaaatgctgagattacaggacaaaatatgtgagtgtgcttaagacatgacccatgcctgccttgactaacattatcctcacgaggagtaaagagtaattgcagggagacctcgggcaacagtgccggcatgcaggaacaaatccgtgtcttgtcggccacactaatgtaactcgaaacctttgggtttt

SEQ ID NO: 26229 - DNA, 459 bp, Oryza sativa
agcttagtcgcaaaccttagcaatttaagggagctcattcttgtcttagtaaacttatctgaaaatggcgccagatggtgcaacgctctagtcgattcctgcccaaaacttcaggatcttcgtttgtcttgctgtgctctctctggcccaatatgtgcaacacttccccgtttgcactcactatctgttattgacctatcgtttaatagtttgcccgggctaattccagatttctccaactttcctaatttgactgccctccaacttagacgtaatgaccttgaaggatttgtctctccattgatctttaagcacaagaaactagtaactattgatctttaccataatccaggaatatatggtactttgccaaactattcatctgatagtcatttggaaaatatatatgttggtggaactgaattcaatggtataatacctaagtccatcgctgaactc

SEQ ID NO: 26230 - DNA, 413 bp, Oryza sativa
  unsure (1)..(413): unsure at all n locations
agctntgtactcttctgcccttgaggtccctataagatttgtgattaaaagggctgctgcttttgggggtgttggaagatcttggactgtttcggtctttctgtgtcatggggagatgcctgatatcatgcctggggatgaagatcttcctcctgtgaatcatattcctatccctgatcctgtcccgcagctggcacaccatgtggaagtctttggggacaatatgcaagaggatgcccatgctaatcagcatatttctcagaatagtgctctgtcagtggtggctggttctcataacatggtgctgtagaaccagggaattatctcttttgaacatcttgtccagccctcggttcttattaatctgttcttttggaggattctgtctgcttttaacacaactctctctactt

SEQ ID NO: 26231 - DNA, 441 bp, Oryza sativa
  unsure (1)..(441): unsure at all n locations
actacgctcgaagtgtgtgtatgaagtgaggaggtgaagcctctatatttatttaggtatgacggntatactatgtgaattgtcagaaatgccccgcaaccgccatcaggagatgattaggaccgtccataccaaaacctatgatcaacggcaattaccatggttcagccaaaccaggggggttggccgaacctgggctgggccctcctggcctggcctttggtcggaggactccctggaccttcctctatctatttcttggagccttgggttgatttactgatgttttgatgaagttcataaccctccttgtttggatacataattctcctcactttagcctgaatttccttccaacttcagggtttatcatctgcatataaatatataccaacactttgggaatatattcgattaagcacctatcactatgttggacgt

SEQ ID NO: 26232 - DNA, 434 bp, Oryza sativa
  unsure (1)..(434): unsure at all n locations
cagcttcatccactagcaaagcaactggattaacttcttatcatgtttactttcaagncaccgtgtgcccgggacccggggtagatatgacaaacgtgcctttttgtggacaaaataatgcaagatgccccttgataagaatgaatattgcattcaaggacacaacaagctatagcctatacctatactacttctactttgcaagataagttggcagccacaagaaaccagtttgttctgcaggccacataattgtgaagaaaacgatcgagatgacaaacaagataagctacatatttaatttcctcaaaaaagataagctgtgtattttgtgtgattatgaaggcatacatgtgcaagtatcttgtgtgattatgaaagcacacactgtgtctattttctctgtgtcttcttatatattaagaagcttatat

SEQ ID NO: 26233 - DNA, 371 bp, Oryza sativa
  unsure (1)..(371): unsure at all n locations
actaagcntctgtgccaatttaatcttagaaatgctattgttcatttatataagctttacgaaatatgcaaatgaaataaagatgaactaatgattatagaattagtgattgtgataaaattactataacttgatgaagaaacctggtgacaataatgttccacgtactccttatattgggctggtgtttatttccatttactccatgaaatgggtactacacttgtatgcatattcattatgcgctgaattaattaaggcttatggtatgtgtgggaaacgatgcaaatgctattgaccaaagtaaacgcttgcggactggtggagataatactattctccttatgctgttccccatatcatcaccccca

SEQ ID NO: 26234 - DNA, 457 bp, Oryza sativa
  unsure (1)..(457): unsure at all n locations
agctggatagcgtagatgcgtgcttgattactatctgttgcagaagtcattgtagccgagcacttgaataggtgatcaagccgaacatgcgcggngcaggacgacatataggaagccagagccgatgccgatgtcggagacgcgtagatatcgacgaggcggtggacgacacaaacccggtctctgatcgggagaaaaaaaaggtatatgcaacagcagtaccacagcaatcaacacggtagcaacctcctcacaatctgcactatagcagcctccccacacagttgatccagccaaccattggttaaaatccccaacttgccaccccttctctctactcgtgccgactgttgaggggtcaaagagaatagagagcatggatgtggcgtggaggagagcatatggtgtaacacataaatttggtaagccccgaagcatcatccgcctagagtcagta

SEQ ID NO: 26235 - DNA, 399 bp, Oryza sativa
  unsure (1)..(399): unsure at all n locations
ccgcttaattggcccagccttctcaccaacaagtaactccatgtgcaatatcctccatagtgagaaatgcccacggtaacctaatgtaataagaactntaaattctccatctacctgaacattggctattccatcagtcaccgaaacctcagatatttccttaggaagtgagatttcaagtaacttagcccgtacaagggtgcttaatttcttcaaagtaggcttttgttcatcttgaaaaagtgtgttctgagtaccaatttcctcaacacattttggcactctcctattactccctgtgtgtaggacttctatagcagatggaacatcaaaaatgggagcgccggcctgttgaacccttcatgctaaagacaacgaatggctgttgggtgagcatgt

SEQ ID NO: 26236 - DNA, 358 bp, Oryza sativa
  unsure (1)..(358): unsure at all n locations
agctngtaatgcttataccagcagattcctaaatcgatctgataagaggttcttggaagacaaggaggaatcaagcgtttacaccaatgtgtcccaaagtatcttatgtatctccgtactaatcgcagcaggttcatttgctgctgctttcactcctcctgngggatacattgcagacggtgaggatgctggcatgccattgctcaaagaatatgctgaattctcgagctacgtggctgcaaatagcatgtcgttctattgctccacatttgcgacatgtctgcttgtgcatgacagtctaacaaataggcgtgttaggaactcccaacgattatctctcacgaactggaattaatca

SEQ ID NO: 26237 - DNA, 351 bp, Oryza sativa
acaccttattaccagcaaataattaggaaatctctgcactgcaagtctgcaactatatctacatgactctgaatttcttcagattttgcaatcttgagaagaatcaagttcgaaccctgcaactttggaaagtaaaagaaagaagaaactcctctgtactgcacctgcaattgcatgactctgaattccttcagatttcgcaaacctgcaactgcaactacatctacatgactctgaatttcttcagattttgcaatcttgagaagaatcaagttcgaaccctgcaactttggaaagtaaaagaaagaagaaacttctctgtactgcaccttgccttacatgactctgaat

SEQ ID NO: 26238 - DNA, 360 bp, Oryza sativa
agctcgcattaaacacccaagttcccgttactttcttagtacgaaagtactcacccttgctctatataaatatatatatagctcctccgccctgaagagaagataaagtgaagtgaagattatggtttcgtcctggatcccagccgtcgcctgtggtgtcaggtgttaaaccgttggttccgctgctgctgctgatgatggtgttcgcctcgtccgtgtcgtccgttgcattctcgggctgtctgagctgcaacctaagttaagggaaataagtcctctatttattttaaggatttgcaatgattcatatttgtcaccgtgggtaccagcactatgtcctgggactggtactgatatcgc

SEQ ID NO: 26239 - DNA, 423 bp, Oryza sativa
tgacatggctagatggtgtcacacactcggtgatgattcttatagtgggtcgcaccataatccaagactttgtttcagatacttcgtaaatagtttcggaaaaaaataaatacgattgtgcaatattactttatactattattttcattcaaatgtaacgggaccaatgtgagccaataccatttatacaaaatattttattggactcttgtaagaataataagttcaaggtcgttgcatttctttgcttgacccttttttagaaagataatctagagaacatataaatttgttttctgagagtgacaactgataatgtacccggacagagaggactacggtgatctcgatagctgtcaccagctctacacgaacctctaatgaactgtggatacacaacaaatacaggtattcaacaatata

SEQ ID NO: 26240 - DNA, 471 bp, Oryza sativa
  unsure (1)..(471): unsure at all n locations
agcttatcttcatttattttctgcaaggcatattatttaataactaagatgccaaggtttaaggccagtaacatcttgcacaaaagctttgaataccttataagttggcatatcaggcttaaactactcttgccaaacgaccactatggttcgttgagttttcactaaaggatcagtctggtagctacaattttctaaaaaatgacaaagatcctcactattcaaaactctggccaaagaatggcccaatcctaatattcatgccaacagcctgctagcttcaatcgtactcaagaacctctctacatgatgagggaagtgaagtctcttgacgagcaccccactaacacaccccactagagccatgcatctntgatgcttnctttctaagggctgcagagaagcaaatgagcatgtagcattctgcattcattcgctaaccatcttatggggcctgactagagagaggga

SEQ ID NO: 26241 - DNA, 423 bp, Oryza sativa
gacctaagaaactcacgcttggaaagaatggtggaaacccaaatttattgttctcaagatagtacattcccctggaaggaatataagggcaactcaaatatgctccggaagtaaacctctaaattgaggaagttgactctctagccaaaccgatagttctagactcgcaaagttcggacatcatcctagggatggattggttggctaagcacataggacagatagattgtgccgaaaagtccatcactttgcaaggatctggaggaaagcaagtacgctctacccctaacacccctaccgcaagtcggtctattctaacctgtttacaagtcaactccttggagtcggcgcctataagctgagaatatcccgacgtattctcagaaaaataacgagtatgccaccagaccgaagaatgagttc

SEQ ID NO: 26242 - DNA, 307 bp, Oryza sativa
  unsure (1)..(307): unsure at all n locations
agcttgtctgtttcagattcggttggtgcgtgttgtttacaatcgtgaaagaaaagggaaattgtaggatttcgcttcgataagttgaccgtattgtggatgtgatatgcacacatgcccgtgttatgttaggtaatatgtgtgttangtaatgacgagcttgcctggtaggggtgtatcgccgtcttcgtctgatccgttgtgcgagggtaacgctgcaccttcttctttttttagctcggggcaggacctgaaacaattgaagaactcgatcctgtccttgcgtttcagctcccctttcagtata

SEQ ID NO: 26243 - DNA, 449 bp, Oryza sativa
tacttagaatatttttatttattatataaaatattttagatcgaagtttaactcttcccaagtttaacaggacagtgttgattaattttaagtcatgccttccccgaaaaaaaaaattaagtcatgcctttgacaagaaaaccaaacacacatagaggaagaagtaaaagggagagatggatcaagctagtaaattggttagggatggcaattttggccacgggtccgggtatacccgatccaatgggcacggacgtgggtgtgatttttgcctgccgaaacccgtagacattgtgggcaataggccggtttcattttttgcctgtgggtaacccatgccccgaccgatacatatgtattagctatattcgacgtatcttctaattcttatactcctttctcttgttcatttgtgaactaactaataataagttgcgagataatcaaat

SEQ ID NO: 26244 - DNA, 400 bp, Oryza sativa
agctgtgtgtactcacaagatccatttatagttcttatattatagtgttctgaacatgcagaaatttctgaacaaatttctttgtgtggacaccaatagtgcaactattctttctgtttctgacctggtttgatctttgttatattctttctacaggtatcatgttactaacttctttgcgccaagtagccgtttcggaaccccagaagacttgaaatctctgattgataaagctcacgagcttggtttgcttgtacttatggatattgatcacaggtaattagcgaaatggtgatttgttcgtctgtgtaaaactacgattttagattactggcgtgcacccatgacacttgttattccataaagagtccatgtatatacatgtgaatatcttgactga

SEQ ID NO: 26245 - DNA, 302 bp, Oryza sativa
gcatctgccggagtcctgtgagccaggcaatttaggaccaaagaggatattacacacacactattactaccgcctccttctaaacagagggattttgcgggaacttttaagaaaatgaactaattctggtgaaatcattctaaattcttaccaagaaacccttcatattaacactacatcttctgaagctttattatttgctgccaattggcacccagaagacaaatctattcgggtattcatctgggccatcggtaattttcaatacatcagaaaatctgaccctgttcttattcctgaac

SEQ ID NO: 26246 - DNA, 399 bp, Oryza sativa
agcttaaggatttcccagatggggctataaactcgaacagataaagaatacaagacctactttggaaagatctttaatacctattaggattcagccaagactatgctaaggattacaaatatgtccctcccaaatactgaagtgatccaagggtttaaatatatggccccaagtgaggttcacgcctagaatcaactcacctactatccatcattaatcgagccatacaccaaccaatgagttattgatgactgatccactgaccaccctcctgcattccatctcattagaatctcctacgaggcttagcctattagatcaaatgatttccatacatatcctctataccatattattattatttatcaatcctaacatgatgtaagattactattttga

SEQ ID NO: 26247 - DNA, 161 bp, Oryza sativa
gggcgtgatctgaactgcatcggactaaaaaccgcacacacataaagagactttttgtttcccatcaacaccggcggaattaacagaaacatctcggtaaaaacggagccagccccattatgacaaatggcgaacccaggtatatgccaccataatactaa

SEQ ID NO: 26248 - DNA, 383 bp, Oryza sativa
  unsure (1)..(383): unsure at all n locations
agcttctcanagctggtttcatcagagaggtactcctttcatagtggctagccaatccagtcatggtgcggaaggccaacgggaaatggagaatgtgtgtagatattactgacctcaacaaggcgtgtcccaaggatcacttcccactttctcgaatagaccaactggtggactcaacagccggttgtgagttgttgagctttctcgacgcttactccggctaccaccaaatcagcatggcgaaagaggacgaggagaagacagcattcatcacgccgttcggggtattctactacgttaagatgccgtttggactgataaccgcaggatacactttccagcgcacggtccagggggcacttagcaatcagcttgggaacaat

SEQ ID NO: 26249 - DNA, 450 bp, Oryza sativa
  unsure (1)..(450): unsure at all n locations
actaagctccaccatggagttataagggtacatcaggtggttctttttttacttttattngggaacacgcaggagatccgtgcattattttattaagcaatttctctttttatttgttggcatttaacatgaataaaatgtgcaacatatataggcatgtttattattgctcatctggtactcagcttacaccaatgccttttatgacaaatccacaaatgctatttcttcgcaacgaagtattatgttgcaaagcgtaattaaaggagtgcacttataacatcagttttgaagagatgtggctatacattaaacttcaacatcatacatgaatatgtgtacatgaagatcatatgaccagaccctttctctagaagaaattgatctatatctcacattccacaacctgtaccaacctgtccagtaactagcccccatcttctttcttcc

SEQ ID NO: 26250 - DNA, 414 bp, Oryza sativa
  unsure (1)..(414): unsure at all n locations
agctntgctgccgccattctctcactcgatctccatgtacatatgcatgaagaaagtaattaaattcaagttgctagctccattttttctctttgagctgctgataaaaaaaacatctctattcttctgtgcaataagccaataattaagcattaatcagagcgtacaagtaaaaattgttttcactgttgtatgtggatatatatatgtacagggatccaccaaaattaatttgatactacgtagtacgacatttgtttagggatcaacgattcacgtttcacttttttttacagcgtcaacatatataaacacatagatatgagagtatttaatatacttattactgacatactcgcttcgaccataaaaagaaaccatattctatgtatgaatggagtattctagtagtac

SEQ ID NO: 26251 - DNA, 428 bp, Oryza sativa
  unsure (1)..(428): unsure at all n locations
ntagttgctactgggcactcccttactaccacttatttgctgtcttattattccctttttaggagcaaggatcatctctgttaaaaaagaacaaggaatcattccttgaaattcttctaatgcctgagtctaattctagaatatagaatgaagtgcttctttccctaatgcacctgttgtagctatgaaacatttgatcaggcatggaagaatgcatggggcaacccaacagtccaaatttattactgctcttgatagtattgtcagccttagttgtgtcaactctgctagttaacccatttaattacttgccttttgtggcttaatctgatgtggtactaactgtgacattctacggggacatgtgccagccaaggaccaataatcccttgtcaaacagaacagtaacagcgcaactactgcccact

SEQ ID NO: 26252 - DNA, 477 bp, Oryza sativa
  unsure (1)..(477): unsure at all n locations
agcttcaccaacctatatacaattacgcatcattgatagttcacagaactaanaagagaaatagtgcgctaccagaaggcaccatacccctcttctgaaggtgaagttcgaaggtggaagtccagcagacactgcagctgctctggcatactcctccatgtgtttattaggatccaccccaactatgttaacgccatcggcatttgcatagtacttgagattagggcctgttccaacaccaagttcaagaatgttcttcccagcagtcatcaattgggaaaagagctttgatttatactgtgcaatctgcaaaactcattattgtgataagatcagcatgatcacggcagatgatcaaaatcacatcacaatccctgagaaaaaaacagtgataactntcttaacagggaagctaacatactgatgaaatttaagacatgtctgtactccagacacttagtgctactttgattctga

SEQ ID NO: 26253 - DNA, 445 bp, Oryza sativa
  unsure (1)..(445): unsure at all n locations
actcctcctccccgctcctctgttcctccgcccctgatgactctttatccacctgcgccgacgactcccccagcagcagcgcacaagaaggagcgtgttgattctccccgtccagcttcatcagattccttcttaaaggtgcctcctctgatgggattcgctttgatgtttacaaagcttgatgagatttatatgaaattgagcatgttgctgtgaccaaatcgcctttgtttttaagcctagataaacttatgtttgtagttacttatatcgttgatggtaacctgtggcatatcancaaattttcaccgagtaaatatgggatgcatttgatggatgattgggtgggtcgtgctatcatcaaagtagtttaagatggttttccatgattatttgaatgagtcttttggacagttaatttgacaattttggacccctacataaa

SEQ ID NO: 26254 - DNA, 460 bp, Oryza sativa
agctcgtgtgctctattctagtttatacctggctttgtatccaacattcattccaagctgggattcgatcattcatttcttgagccgcacgaagggcagtcgcctgcctacccctccttcgcatgtggtcttgtaaatcaggagatagatcgctagctaatccctgcttaaaataattctgcatgtacctacggaacgtgtcctccacaagctatgtttttaaagagaatttagtccttcacgtgtggttattaccttgttaattcatccgcccatcttatttaaagagtagttatggttatccatgttcaacgttggaccgcttatattatttaaaattttgctgcgattagcattattctctattagataatacaatcaaaatattattctatacgtaatgtattcttaaatcttttaataagacgaacatgttaatttagacatgaatacccacagt

SEQ ID NO: 26255 - DNA, 310 bp, Oryza sativa
ctcaatactagctgctgggcttacagcataggttcaaagaagttttttttttctaagcgcagtctccggtgtaaaagcttgggagcatattgcttcagtgagccaacggcgtcattgctccctgactttggaacattaacattttatcatctctatattcattggctgttagcttagagaactattaatccctggtcaaagtcaagaatttggtggcgtgcgcaatacagccttattgttatagctgtcaacagccgtcattagttctattgagaacttgcctttctccaaacttcaagattaacactgt

SEQ ID NO: 26256 - DNA, 414 bp, Oryza sativa
  unsure (1)..(414): unsure at all n locations
agctntagtatatttgtctggagatataatctcatcttttcttgacatatgtggngggcggaatgtcttttgtgttggtgtgcctgataatctgtaatccaataatttgagttcatggtttggcatgtgccgtcttcacgtctgcaccatggtttttcagtaccaccgtggcaaacatgatgcatcgagttatggagtatactcttatattataaaaaaaagaatattgtgctggttttctgcatatgcaactgaattgattttgcttattgatggattgagcaccaatccgtcactaactgggatctgtattctgcacatactgctggatactgtttcactatggtagaatagaatatttctcaatttgctgactatcatatctaccgttatgcaacatatttgttggcatat

SEQ ID NO: 26257 - DNA, 422 bp, Oryza sativa
  unsure (1)..(422): unsure at all n locations
tagcttcgacggactctcatcgatggtggttgttctctcaacatccttttcgctaagaccctggacgatatgcagattcctcacgtggaattaaagccgagtattcactggcggagcatttaaagacttttgtgaagacttcggcattaaaatttgttacgcctccgtggcacaccctatgagtaacggacaagtcgagcgcgctaacggcataataccgcaagggatcaaagcacgagtttttgaccgactacgcccctatgttggcaagtgggtagatcagctgccatccgtactttggtctttacgcactactcctagtcgggctaccggccagtcgccgttctttttgggttatggtgcagaagcaatgttgccgagtgaagtggaatntgaatcattacgatttcggaacttcaatg

SEQ ID NO: 26258 - DNA, 439 bp, Oryza sativa
agcttattgccatcccaggctaagcaatatcatggtatatacttatagagggagtagatcgtctggggtcacgctctcaacgtcatagggaagtcgcgcgtcactccttcgtatgtttcgtattgcatggtgctgctacttcttttgttccacgtcgtagcgaggatagcccatttacaatagagtgtagcgggagacgaacagagatgctggtcgtcaagtcaatccgtccaccaaagaataaaagaaaagaaaaaccaatgtgacatccgctggccaaccagcacgagtgtgggaggagcatatcgccgaggaagactcctttgacacagccctcctctccattcctcgtccatgcaagaatataattgttatctcttcttaagatataaaaggaggagtctgatgacttatgattagacatttgaaagaaatgatc

SEQ ID NO: 26259 - DNA, 376 bp, Oryza sativa
  unsure (1)..(376): unsure at all n locations
tgtttctgcctcanagcgcttctcttgtaagattgcttacactgcaagcttccttccgcgataagttattttctatgtaagttttcttccggcgtaagcttccttctgtactgagctttntacttacatcttagatcatccacgttaaaatagattttataacacctacatctgtcgtcaagaaatccacgttattctttaggaatatactatttgttatagcaaaattatactcgaggcgggttgcgctttatttactcctagacttctactgccaatgcgtgtcgcgtgatcccgtcctctagaacggcgaggaggattcattcgcgacttcatcgttgacccaagcgaacttctccaagaacgggctgggctt

SEQ ID NO: 26260 - DNA, 478 bp, Oryza sativa
  unsure (1)..(478): unsure at all n locations
agcttcaccacgtttctatgattgacttgagaaagaattgcaacttcatttataaagtcatcgatttctctttttacgacaatccttgatttcttaatggcaacaacttgcaggtctaaaattcccttatacacgacgccatgtcctccaccaccaatttcacgagatttatcaaaattgtctgtggccttctctagctcttgtaaagtcatgatcatcctttgaccaatatctgcgttttgtgataccaatcgtcctaatagcaagccatggttttgcctgaaaaaagtctctttcattcttttcatcttgcgcagcttcattntgcttgatataaagggagcacttagtgcgaggagcaaaagaattgtgccaccaccaaccccaagcccgatgcgtagacctaaatctcgtgctagacgaagataattcaatngagaaagaacttgcagcagggtcataacacacagtgtnttag

SEQ ID NO: 26261 - DNA, 372 bp, Oryza sativa
  unsure (1)..(372): unsure at all n locations
cgcttgtacttacacgagcttgagcatagatggtttctttggttctcttgagngcgcagcccgtattgggagcactctcacgatacacttacgtggaaagtgagaccttcttggaatactaaatcttattttatgtcaatacgtccacctaagatactcaccattggttttcggctctgagatacgacttctactaccaaggacaccaatatggcattctatgatggctgccctacctattttaggacttgggtaccccaacccttttttttctaagcggcggctgaatggaagacaaactaactggtttgtctgcttctagacgcatggaaagaaccgtgtgttcttatcgacgttgggcgagtatgatat

SEQ ID NO: 26262 - DNA, 435 bp, Oryza sativa
  unsure (1)..(435): unsure at all n locations
agcttgcaagagaaacatataaagtcaattgatctatctacattggtgnttctagaaagcgcaacaaataactgcacatgaaaatcaaaattacccatccagtagttgactgattcctatacatggaaatcaactttccatataactaactgcattccaagtcattcttccaaatctggctacattaagacggctaattatttcactttaattgtggcagtcatctgcgcaggggtatacaagactattacactacagcttcgttattcttggattaagataaaanatttaactcggtttgagttagtgcttccgaaattactaaacaatctagacattgcttgataatattagataaatttatnttcaaacttaacattattaatacttaattaattatgtgctaatagttttttttcattttatgcctggagt

SEQ ID NO: 26263 - DNA, 387 bp, Oryza sativa
  unsure (1)..(387): unsure at all n locations
tctaattggattancataacaaataagtctttaaggcttatatagtatacttgagcaattctatagaagcacattcctgatgcatntagccctcatcacatccatgtacatagctcattctctccattacaagatcctaccgctatcgtacctaaactaattaaacaatgttttgacctaactaactggtttgtacaattagtaatactctataagacgtttttgactttggtcaaatataaactacttcaagctatacaaagtttgtagagacaaatatagtattatttacaacatcaaattagttttattaaaactataattgaatatattttcataatatattaatttgcctatttgtttggggccttgttaattcccaatttt

SEQ ID NO: 26264 - DNA, 338 bp, Oryza sativa
ccccgtcttaagcacccccgctgcagcttttgaatcggctgacaaaatttcattgcacttcgcactatcacaacattaagaccttcaaccaaaaagatctattagttgtcgatggcgagcctgatcgtatgttcggcactgaacgggcccgcacactacccaagacgttggagcacttacgtctacgaggaaagtgcgtggctcgttttcgcaagtaggctcaagttcatccttttttctcttcctgtgttttgttcgcgcgcatgaccagctacgaatgatcctcgtgagtccgctccgattcgcgccctctcccttatgggtgagccggcccccat

SEQ ID NO: 26265 - DNA, 345 bp, Oryza sativa
  unsure (1)..(345): unsure at all n locations
ggctgcagataactctgtgtttcttgaaattcactctaaacantttttgatcaaggatcaggccacgaggagaacggttcttaaggggagacgccaaaaaggactctatccagttccatctgcatctcctccatcatctgcaaaagtagtttgtgctgtcacgccatcctttgagagatggcatagtcgcttgggtcattcctcagcacccattatctccagagtcattagcaagaataaattaccttgtctagatgagtccaataaagagccggtttgtgatgcatgtctaaaggccaagagccatccagtaccttattctaaatctttgagtatatcgaggca

SEQ ID NO: 26266 - DNA, 480 bp, Oryza sativa
  unsure (1)..(480): unsure at all n locations
ttaagtcacctgcggcatgcaagcttctgagaatgcacaaaggatcttgcgctattttattcaaacagagcaatatatgtgttctgtaacttacagcgccactgctatcttctcagcattatgagctaacttatttacttttgtgcagaagatctatacttgagaaacatgcgacagcaagggagtctttgctgctaaagacaaagcaaagtcctgattcgactacaaaagcactagttgaagctgacagtagagaccgagagttaacaaaaagctntgaggattcagacaggaaaatcaatttgcttgaggattcactgaacaggtttgaatattgttcttcatgctctataaccttgaaacgacttaagcaactatttcgtggtcagctatggcgttctcttcaaatcgatattaccttttaccacagaacatctgtatggctccaaccatatgatctctctttattgtacatatact

SEQ ID NO: 26267 - DNA, 423 bp, Oryza sativa
tggccgccggtacgtgggttgccgccttcgattgtttatgctccgagtctctactcaatctactagtccatgttttttctgacgagtttttttctacttacggccatctgacgggcttggactatatataatctctgaccgggagagccctcgttacccattagagattaagtgacaagtgagtgaaggtccgtcagcgacacagcgaagacaaaacggtcgatcatttgtaaataaaatagatgattagagggagggctcatcttcttttttctccttcagccccccctccttaactcattctatcaatggggatccaacgagaaatgagagagtcgagtccttctagcacccacgatggatccacccttacttgtaagttgagtgacaaataaatatagccaagtataattaataaatttt

SEQ ID NO: 26268 - DNA, 457 bp, Oryza sativa
  unsure (1)..(457): unsure at all n locations
agctntagtttcaggttctttatcagtggtagaatgctgaccatgatgccggggacggcaggggggatccttctgtggaggagcttgagggtgtaatcagatacttgctcacgggtggccctgtccttgcactctgcaccgggtgtcaacatgcttggcttgaggaggatgccctccaacatcacattgttctcggccatgtagaaaaagggtcttcgccacaccttctgcgccacctcgaaggtcctgtcgatgccatgctcaccgtcgaggaagatctcangctcgacaatcggcaccagcccgttgtcctagtattattcaagaanatngttcatgcttgcagcatcatcaggaaagagatttattatgttcttgcagtttttgttctgtaatcaagtntgatatgtacctgagaaatggcggcgtagcggcaaggcccaggcagcctcttcac

SEQ ID NO: 26269 - DNA, 341 bp, Oryza sativa
gctctggggtagatgcccatataactgatttgactgtatatagagatatcccaaatgagataaatctgacagggatgaagggttaatccctgcaaagcaattgttatataagcctattaattgcgaattatgtagactgccgagccatttctgaaggactcctgaaaattattgcttcgattgatatgctaatcaagttgccaaggtattggaaaccaaaagggaaaacccctgataattgatttcctccaaaaagaaatgtgaagctgaacagaaagttacctaatgaacttggtacatgggcttctagacagttatcaaatactgagaaatctgtcaag

SEQ ID NO: 26270 - DNA, 467 bp, Oryza sativa
  unsure (1)..(467): unsure at all n locations
agctgggcgaaggtggatttggtgcagtgtacattgtgctgtctctaacataactgaagaaagtatcactaataatatattcattactaagtgttactattgatttggtctgaacagggtactctgcctgatggcgatgaaatagcagtgaagagattatcgaagagttcagcacaaggagtgggagagctgaagaacgagctcgcatttgttgcaaagctccagcacaagaatcttgtcaggcttgtcggtgtctgcctggagcaagaggagaggcttctcgtctatgagtntgttcccaaccgcagcctcgatcagatcctctntggtaccaccaaacctactaatccactcaattttagctaaatatcttcaccatcttctctgcaagttcaataacatcaagctgatcattcactctcaacatgtttgttatcaatatcagacgccgacnagcgtcaacagct

SEQ ID NO: 26271 - DNA, 443 bp, Oryza sativa
  unsure (1)..(443): unsure at all n locations
tgatgtcatgttggaacatatgtactgtcctttnntctcgctttcttttnctctctnncttcttttctgaagtacctgtctgtattggaccctcgcagcttactgtctcctagatcatttctactcttttctgtgtggtgatatctctttgagggaaggccacagggcccaactttttatcgaaagcagaagtcctacatagtttttacgtaacactggggttaccggttttcagacataagcacaggctctcaagcaaaataacagaaaggagtgtggtgagtggtgatttttaataatcttaataattggaatattgctttccctaccttttctaagttgtgagagagagagagtgtgtgtacaagagcacgttcaatggtacatcaggatagcatagattgttaactaacaagttaaaaataaacgagaatattagggat

SEQ ID NO: 26272 - DNA, 458 bp, Oryza sativa
  unsure (1)..(458): unsure at all n locations
agctntacattgaanatggtaatacactggattcacttcgtataaaaagaacttcatatgaaagacttatcatgaagatcaaataatgcatgtcctaggttcaggtgccagtacttgcttatacgctactccctccgtcctataatataagagattttgactntctacttgcagtgtttaaccattcgtcttattcaaaaatatttggaatttatttattttgtttatgacttactttattatccaaagtactttaagcacaacttttcgttttctatatttgcacanaatttttgaataagacgagtggtcaaacagtacaagcaaaaaagtcaaaatcccttatattatgggacggagggagtacctgttaattttaaaaacaatattntatcatatatataacaaaataaataatttgtgacagtaatctatattgaacaattgtcgtctcacca

SEQ ID NO: 26273 - DNA, 445 bp, Oryza sativa
  unsure (1)..(445): unsure at all n locations
ctacgctccctctctntaaaactctaccagaatatagtcaaagcttcttttcttataaagtcaacactaccaaatttggtaacgtcgaaatatatcaaaatttggcgttaccaaattttggtgtgattaatttgtgaaccagcctgagaattcctatccacctataggcaagtctctccacgtatcgagtgactctgagagtctgagcgatacacttgtgctttataacagtttgacttgtacaacaagagaataaatggagtgatggaaaatatttctactttgacgtgaacttggcgattatattgtgccatggtgtcacgcgtacgtacatgattttgggcctcatttcggtgtagcttnctaggcactcttcctgcagctatacgctcgcgcgtacgatgaatttgtgcccgtatgatcatgagagnncactagaacaaac

SEQ ID NO: 26274 - DNA, 489 bp, Oryza sativa
  unsure (1)..(489): unsure at all n locations
cagagtcacctgaggcatgcaagcttaagagtactatagatgggacttcttgttgtctttgttgtanctnactactatgacatatcggccattgccaactattactatatggacttatgcagcagtggctcatgtgtagtagtagaacttagcttggaagttatagtacaggagcatatgcttgagagggcgagtggagatatccattactttcgctgcatgcatgcatggcaaaacattaatctgttgactgtgcaggctgctgctgatctctgcataggcgcagccttgcatgcatgcaaagatcgctgaagagatctgcacacttgtcctcatcgtctctttctcgatcgaacgatcacatgcacactctcacagtcacagtctcaggctcatctcacacagtgccacgaacactcagatcatgagagagatgatcgatcgcatagctagcagatgcagtacgtttgatgctttgttaaaagccct

SEQ ID NO: 26275 - DNA, 419 bp, Oryza sativa
  unsure (1)..(419): unsure at all n locations
aaacncaagcaagaaagaactgcantcgaagtgaaagatgaaaagaattgtgttattctaagcgaagatgacaaaaaggtggccacgcctgccggcacctactgatttcagtagcaacatgtcactgagccctcataatgacaaaccaacgaaccatgacatgtttagtacgtcgttattccggcttcagttctgttctagagatctcaagacgttaagaaacaagcaagcatctgttgagaatctgaaaatactgaatttttcagcttctatcttctgagataaatctgtcgagatataatcagcatataaatgacacggtttctatcccgaatgcataacagaattaacatatatatgacactgtttctatcctaatgcataaagaattacatataaatgacacgggtctatccgaa

SEQ ID NO: 26276 - DNA, 477 bp, Oryza sativa
agcttatctcttacgctccaggagtggatcagtcttattattaccgaccggcttgccttcgccgccgccgactggtgttcccgcctgcacggctggctcttatgccgccgttgttgggcgtctacgtcttcaccgaccggcttgccttcgtcgctgccgactggtgtttccgcctgcacggctggcctttatgccgccgttgatgggcgtctacgtcttcaccgaccggcttgccttcgccgccgccgactggtgtttacgcctgcacggctggcctattatgccgtcgttgttgggcgtctacgtcttcaccgaccggcttgccttcgccgctgccgactggtgtttccgcctgcacggatgggctctatgccgacgttgatgggcgtctacgttttgaccgaccagccgtcgcatccaccgctgactggtgtcaccgcctgcccggtggcctgtataacgccactgagctatatc

SEQ ID NO: 26277 - DNA, 327 bp, Oryza sativa
tactaagcttatggagtcaatttcagaggtatggtcccacgtcttatttctaccgagctgccaggaaactgcataacaagccacgtatctcatccagtccgaatctgatttgagttttgggtcgtgggcttagcccaatggggtgtgcgcccttaggcaaccctaggatggtcttaatcatatttattcggtagccatcatcgtttagagtccggttttgcttataattatttggcaagaacagattctccgctagaacgggttgtgggacccccaattccagtgcttaatcattcatatgcaaatcgaatgcaatctatcttgttc

SEQ ID NO: 26278 - DNA, 425 bp, Oryza sativa
  unsure (1)..(425): unsure at all n locations
agctnttccaactcaaggacagctaggttaaattgttacacttcatagctagactgctctgaagatgttcagatggcaatttatgtaacttcaatgccgtagcttccaggccagtccaatatatcaggacgcacgaagggcaggaacaacagtagtgtcagcaatctatggttggataatgttcacttgaagtgttgtaaaacaaatgtcacaatgttgcttncagtagactattgattattgactgatctttccttcaagtgtagtagagcgatgtagttttatctatcacttctgaagtgaattggtagagctcgtgccatgtctacctggtcagcttaagtaacatagaataataacaaacattctggaagggcacagatatctgcagcatgcttatatgcctatgatgttgtgcgtcacat

SEQ ID NO: 26279 - DNA, 298 bp, Oryza sativa
gagatcatgaatgttttatgcgacgagattttgttgatgctgctccgcatatgtctttctttcgacctactggtttgtatcgtatgttaaatacggtttagggtttaagttcaaccctactttctttcttctcactcctccgatcgacggcgtccttcgaagagatgagttctaagatatatgcttgtgctaattaatcaaattgcacgttgatcgaagtgtttgaattgagtaccgtagcgctctagtttaaaccgtcagttttaagctacctttgtagagatactcacccataaaa

SEQ ID NO: 26280 - DNA, 450 bp, Oryza sativa
  unsure (1)..(450): unsure at all n locations
agctttaagttgattatgatacacccatattattattgtagactatatcgccggttgcaatgtagaccataagattaaagtatagcatcctcatgtctagcaatataaatgtgcaaacagctcatattggatagctgagcttaaaatgaattctttgcttaattgataggtacaaaatatttcaagtcatcactatacatgggaaaggatgctaactagtaaataatgcaaatgatgaatttattgtcttcagttgtgaatcgttctangacatgagctcaaaggtgagtcttcaaaaccagtcagttgattttattgacaattcaatatcacattaatgcctgctcttgaatgctaggtgcaagaatgatcatgcaaaatccatgtttctacaatctcatccgttaataaatacatgtccttctggaaagtgcagtcaaaattatctga

SEQ ID NO: 26281 - DNA, 413 bp, Oryza sativa
tgtaagaaatgagaccaagaatgtgttattttatttgcttacagtcatttcgagtattgacccatgcgtcccaccaaccagttcgttgtgtatcgatggctaccagtaaaatgccggctaatgtgaataccctaaacgacacaacatggttagcacctactcataagcttatttcattcacgtttaagcatttagttaacaaaaattaaattggataccgcagagagtcgtagactcggagtatcctaactacaactaatttggacgctgcacaaacgtgcttgtgcctcggaccgcctcgaaccatagctcctgagcgaacaactaacaatgactaccacctataagatccaaaatactaatgccttctaacaacagaggctataagtaaatatgggcctattaacacttaa

SEQ ID NO: 26282 - DNA, 397 bp, Oryza sativa
  unsure (1)..(397): unsure at all n locations
agctttccagaacataacatggaagatagtttgttgcttgcatacaggcactnttgatgaaatttattcttgtcttagaagttacacgttctctttttatccttttacgacaatgtctcatgttggcatttatatgttcttttctaagtaacctctattccaaccttctcctatntgttacgtgtcttttccaccaatataacgccttaggcatttttttcaatgtatatgacatgaatatttttaagatttgttctcacctctagtgttactgataacaattggtcgagtggtcacaatgtccatctgaccacttataggttntcatgataagggagagagaggatcgtggaaacatcnactagaggatatgaattttctttgcttaagttaatgc

SEQ ID NO: 26283 - DNA, 322 bp, Oryza sativa
  unsure (1)..(322): unsure at all n locations
ccgcttggcgcacactanagagtgcgagagctcagattatctctctcagagccncctacctggcgcgccagatgacggagcgtggagctcctcaccgggagaccgcgcaggccctcctttgccggttcggccggggactcatggtgagattctaagctctctgtatgtggaaggttcgcgagatcggaaacacacaagacacgggcgatgtatacaggttcgggccgctgagaagcataaaaccctactcctgtngtttggtgatctgcgtatgaaggagctacacagtatgaagccaccttctccttgttctggggttcca

SEQ ID NO: 26284 - DNA, 481 bp, Oryza sativa
  unsure (1)..(481): unsure at all n locations
agcttggctntcgctcagggtccttgataatgattttacccctgaaagcgaaagtacgcctgaaggtcatcatgctgntgctgcatcatgttgttgatgttggtgaactgagcatcaacagaatgttgccattcttgcgtttgagctatgtgttccgtgaggttgtattggatctcccccgtctgcacatcaagggtgtccattctcctagtgatttcacccaagtcctaacgagaggaactcgagcgccattcacttggagatggaggcacaccacttgatctggaaggttgattgtctccccagtggatgtcatgaggcgcatgccaccggtcctcactggcgcttgcccaagttgagagtccatgctatagcgtagagcttgggtccatccgggtgcatccccagntggtgcccacctgcctcatanatctacatgggtatcgaggatgatgaactntctnntgtcgtcctgtcatgt

SEQ ID NO: 26285 - DNA, 357 bp, Oryza sativa
  unsure (1)..(357): unsure at all n locations
tggaggaactctccatcgatattccaagcaatctggtttgtcagttccgngagcaatttatcatggaaccaggaagttccatgggatgctactacatattaaggcaagatctatacatcatccaagcctgaagacatgtataatttgtaaggtcagtttcataaactcatgtcagcgattttttgcacgaaaacaatcatgtcttcaatgctcttctattatttttgcaattgcaacaaattttattttctacattctgatattgcctctgttatcaactgtgctttggtagattgatgatggtgataatgcattctctctatggattgctttggttgcagttaaatcctatttatg

SEQ ID NO: 26286 - DNA, 340 bp, Oryza sativa
gcttttgtcccaagctccaccaaaatcaagtgttcttgcccttaacatgtcctccaatatttgattgactcgctcggtctgaccatcggtctgcggatggtaggctgtgctgaaattcaaccgggttcccaattcctcttgcaatttctgctagaactttgaagtgaattggctccctcgatcagatactatctctttgggtactccatgtagacacatgattctcgagaggtagagctctgccaaacctttgcccgtatacgtggtatgtactggtatgaagtgagcaaccttagtgagtcgatccacgactacccagattgaatcgtggcccgatgat

SEQ ID NO: 26287 - DNA, 277 bp, Oryza sativa
  unsure (1)..(277): unsure at all n locations
tcncatccatccgaacatcttgcacatgcatgtagatttgatagagatcgaaataggagaagagagtggtggtttcaacctgcatgggtgcagcagcaacatgactttgtttccctccatttggtgagcttccttgccatccatggtgcgctttttttagatcccttcatgttgaacatctacagcaacattcaacaggtcattcatctccattattgcagctaggatgtggctgcagcttatttcggttgaagccagcttaggtaacgtctcttat

SEQ ID NO: 26288 - DNA, 368 bp, Oryza sativa
agcttaagtgtcttcaccccagtaccagagtggttctgaagaatgctgtcaattatatccactggttccttttctttttcatatgatgtgccctcgtaaacattcaagctgaatgtttcctgattgaatgtgaggttagggaagcatctccaagagcgtagaaatctacaagacagacaagccaagcaggcagcatctcgtagcggaataagggaatgtatatggcacaagatatcctgccataaaaatggataaaagagtcaaatcaaggataatgtggttcagaaaaagaatgagagttcatggaaaaatttgattgaaggattcccttttatcctgaccaatgatatgagtagctcttactgatt

SEQ ID NO: 26289 - DNA, 366 bp, Oryza sativa
tcattgtcttgcacatctatgctcctgaggtttgcttgatcactcccaacatccccaatacttggttacatcgcttgcaacaataaaaagggaaataaaatcacaaaccattgcctcatgtattatcttctttccttgcagatatacccaaccgcagtcagggctaccggagtcgggtttgcgagctcaatcgctcgtttcggtgggatcttgtgccctcttgtggccgttggtttggtgcacgcgtgccatcagactgcagccatcctgatattcatcacggtgatgctcgtctcaagtgttgcagtctcatactttcccctggaaacaagcggccggaaattgagtgaccacatcgcggcgtaa

SEQ ID NO: 26290 - DNA, 342 bp, Oryza sativa
  unsure (1)..(342): unsure at all n locations
tatttcccgtgtaagtcgatttgacaggtattatattatcgactttannaagcctgtgaaccactacccaaatagaatcatgtcctgccgacgttctgggtagaccggcgataaaatccattcctatatcctcccatttccactctggaatcttcaacggttgcagcagaccggctggcttctgatgctctgccttgactccgtgacacacattacataaaggcacatattccgctatctttcgtcgcatgctgggccaccagaattgttgcttcaggtcttgatacatcttagtgcccccgggatgaatggaatacaaaggttcattgagcttctttcatg

SEQ ID NO: 26291 - DNA, 423 bp, Oryza sativa
  unsure (1)..(423): unsure at all n locations
tggtagatatatctaataacataagttttgcttcaaaaatttatagtattataacaaaataattgttggtcaaaatcgtgtcctaacaaaacgaaatatgtcatatattttaaaaacaaaattttttatttgccactcaaaatttacgagtttccttatatgccatcgaaaatgtgctattcctttatgtcactaattgaactttttcttcccatatacgccatccgcatcatcatcttgtgttataaggatgtaaaagtacaatattgcccttttaatctcttgagggggatgtgtgcactatgttcttctcatgtcatccanattattattaaagaataatctcttaataagatataataatatgtgatatatcgcttcacaaatatgccagtgtaaatctcacttctataatttattttg

SEQ ID NO: 26292 - DNA, 417 bp, Oryza sativa
  unsure (1)..(417): unsure at all n locations
agcttnggagaagatgtcttaggtggagtcctgtctttatttctcagatgagcgcctgtgaagatggagccgtatgcccgctagtccgctgctgtttatttttgtttgacacgcctgaagtgcccttgtaataatgtaaatattatcgatgtgataaagatgtgcctttcatataatgtatgtatggtggaccccggctattcctgcgacggggattaatacactagcgtttgggaaaaggcaattttcccggtcgcgacaagctggtatcaaagccatctcgactgtatgataagccatatggataaaacctaaggacatattttataaataaaattatttgcgaaagttcctttttttcttcttcccctaatgctatatgcaaaggtgtactcttttctttcttcggatttcaac

SEQ ID NO: 26293 - DNA, 398 bp, Oryza sativa
tgccggcgaacgacggcgcttcggcacaaacggaggtgtctcttcgggtagagcgcgatgcggcgaactcaccggtgaccaaagaagcggcggaggaacaacggacagcgccggcgacgaggaagaagcggcggcggagatcgggttgacggcggtgacggagctccggcggtcttctgcggcggcgaaagggcggacgaggatggcggcgacttggcgaccacgacgatggccttcccgagtgacgacgacgaccgtagcgacggcggcgcacgactggagcggcggcgacgacggcggcgcgaaagctcacggggctagggcgctacacatgacggcgggcgaatgcaagggaggcgacgggtataggagagctcgggggtccttatataggtgca

SEQ ID NO: 26294 - DNA, 432 bp, Oryza sativa
  unsure (1)..(432): unsure at all n locations
agcttgtacagtntgggaaggggttctgtgagataaatataaaatctacttcaaccgatatgcccttaggcacggccatacataacatagaaatcacacgtggaaggggtgggcaattagctagagcagcaggtgctgtagcgaaactgattgcaaaagaaggtaaatcggccactttaagattaccatctggggaggtccgnttggtatcccaaaactgcttatcaacagtcggacaagtgggtaatgttggggtgaaccaaaaaagtgtgggtagagccgggtctaagtgttggctacgtaaacgccccgtagtaagaggggtagttatgaaccctgtggaccacccccatgggggcggtgaagggaaagcccccatagtgagaaaaaaacccacaaccccttggggtattctgcgcttggaagaaaact

SEQ ID NO: 26295 - DNA, 488 bp, Oryza sativa
tgaagctgccccttaagtcaactgactactagcatatatgttcatattctgcactattacgctagcaatcgaacagacttgcacaaacaatttcaaaggtagttctgcagtcacctaagaccgaataattcaatgcaacactctatcctgttttgatagcacagaaactaaatgacatgaaagttgcttccaggaaaaaaacaaccacattaaggaatatgaattataccaatgaatctacaagctaaaaatttgcacacatacctccaaacaacggtccacaagctgtcgacttcttgggtagtcaccatttctgtagtgtccaaccgccagcagatatagcttctcgctagtctgcagcgggctgctggattgacctaatgatgctgtgaaaacataacgaaattgatcataacagattaggctgcaaaaattatgtttagattatctgaaacatatcaagatatgagaccttcaagcatgcctat

SEQ ID NO: 26296 - DNA, 165 bp, Oryza sativa
catgcgagatgaccccatgacaagaggccaaactccccttattgggacatgagactttccacactctgttgacgctcccagaggtaatgaccgcgtgaaatcttgccttataaggtcacacgccaaaatccccgatagaattcaagcagaatgggcattaaaccc

SEQ ID NO: 26297 - DNA, 344 bp, Oryza sativa
agcggcctctagcgctagctaccatagctactagggtttcttctgtgccgccatgcaccgcttctatacacaacatcgccctcggaataattacatcccaccacgacgcacatatgtctccatacatcggcgcggaggtcactgtacacagcatcgtttcgcctaccgtctgaaatgattataaagccgcagaaattttatacggaaaactcttgggtaaatatatttacgatttaaaaaccaatactaaaaatcaaccaggatgataactttggtttacttttttcttctttctctgacataagccgggctgactgaattgcattgtgtataaaaaaaattct

SEQ ID NO: 26298 - DNA, 481 bp, Oryza sativa
  unsure (1)..(481): unsure at all n locations
agcttgaacctttgctcgtcccgagtgattgactattggaaacaaanacttggttggtgatcaggagttgctactatgctgcatatctcaaagatacatgtgtaaggtatatgtactctatctcagattaaataatctntggcacggtggcttacccttacccctgattcccacgagaccactgcttctccttgccttgggcggntgagagacagaacaacaattagagcaccaatcacccaatttttattcaacttttatttcggaagggttcaaatgattttgcaaaagaaagccaagttgctcaaatgattcactcagtctctccaagtgtatcaatttgaatttctcaccacatgttgcctttttgattcctactctaagggttgatatgtagagctcggtaggaatcagacatggcatacttgcattcacacttatcactangttcaaaacttatactagagcagattacttaaca

SEQ ID NO: 26299 - DNA, 396 bp, Oryza sativa
caagctaactgaaacaggatcttgcgcatatccttatattatgtcttgcaaccacacaggagaacattcagattgagccaagaattctgacacttcggcaggaacattccttgaaagggcatcaacagctacattgtgcttgccctttctatagacaattttatattgcaacccaagcaatttagtgaaagccttatgttgccagggagtgttaagcctttgttcagcaaggtgcatgagactatggtggtctgtcaagatcaggaactcttggaattgtaagtaagggcgccaatgatcaactaccatcataatagccaaacattctttttcataggtggaaaggcctcgtgttcttggtcctagaggcttgctcacataagctatagggtgctg

SEQ ID NO: 26300 - DNA, 442 bp, Oryza sativa
ttattcctcactgtatccatgcttattccaattgttctatttgttggttgattggttctacattacttcgtgtacaacacattggagcaaacagtagaatggaaacctcactagtaacacaaattagcttgactcccaaatggtgacaccatcacaggtgcacagcttcttgtagttctcgccaaccccagcgcttcttgcaatcacggcagctgcaatgccaggatctgatctgtcctcagtggcatacaacgcaatagagcggccaatcaagtcaacaactttcagtttcttttttgaagctgaaaattgggcttcacccttctctccagcttctagtgtttccaggtcaccaagaggctgtttcagaaaaatcatgcacataccgtaattactaaaatatagcactacccttgaaaacttttaaaagaagatatgatat

SEQ ID NO: 26301 - DNA, 349 bp, Oryza sativa
  unsure (1)..(349): unsure at all n locations
atccttaaggaaagttgattaatggctgataaaacttggtatatcttaggaatgtgagtcatggccgaatgtgactcatatcactccgagataataatatgtacacccagggtcttgtaatcatctccataaccgatgcattactttcaccatcgcacctttatcccgcgagtattagtttcgagcatggctgcattggttaagttcgatctccggcaatgaagttccatcaaccttgcttgtatcagcccggcgagaaacttctcgattaagtcttatattctatctanggtgatgcaagcattgcctatttgatatattgattctatcttcaattgcactactggtt

SEQ ID NO: 26302 - DNA, 294 bp, Oryza sativa
atggatccgacgacgatgatgacgatgatgattctgagatagcagccgccgtctggggtataatcaagaatgttataccctgcccatgggtgaagaggtctcggaaagaacaaagatatgactttgatatcacaaacgcttgtaagatctttgattttctacttctggagaaacagattcaactttttgctgggcacacaatctcatctggtgaggagtatgcaacaagaagtattgcaagtggtataattctgggtctcaatctaccactgattgtaatgtctttagatagca

SEQ ID NO: 26303 - DNA, 452 bp, Oryza sativa
  unsure (1)..(452): unsure at all n locations
agctngcaactgatacttggtagagcaagtnttatattatagcccactactagctgtaattcatctatagccaatctaatagttaattcatacaatagttgtttattatactattaatatatggtcccacctgccatacacacattatgtcttggagtccgtgctgcagctgactataaatctgtaggccgctgctcttctctctcttcctttatctctntaaaatatgtttacagctggcttatagcctctattgtacctgctcttagtaatcctccagatagaatcaatagtttggtttaatttaatttggtgttggtttggatctgaaatccncaggaagctacggaacacaaatcaaaatggcgatggcgaagcacatgatcatcctcatcctcggcgccacatcgcatgcattttcttctcttcacgatagtcgtgcttgcacacac

SEQ ID NO: 26304 - DNA, 404 bp, Oryza sativa
cttggaagagcacagtcccatgagagaggtttgttgcttattcgtgttctcgatggctcccgctttcgccgcgtgacatgaggaggtttctcatgtaatcggccaaacgtgttgctcgcagccgcaatatctgctcgtcaaaaccatgtggtcgggaagacttttaaggctgactacgtttgttcacttttctaacttatctacttattatctattttggttcttacggatatatttttcaacctaacggtgtgtattttaaaaaaatttatatgattgttgctttaaaatttatattaatatatttttttaaaaaaatacttaattagtcatctgctaataagttagtattcttgtttgcatgtgtaagatgttagtttctaattaaccttaacaaagaaaac

SEQ ID NO: 26305 - DNA, 464 bp, Oryza sativa
  unsure (1)..(464): unsure at all n locations
agctatggtaatataacggtggcttctatatctcttttactaaananaacaattacacagattgtgtgtaaattgcaagacaaatcttttaagcctaattagccatgatttaacaatgtgatgctacagtaaatatttgctaatgatggattaattagacttaataaattcacctcgcagtttcctgacggaatctgtaatttgttttgttattagactatgtttaatactctaaatgtgtgttcatatatccaatataaaaaccaaacccaaaaaatttttccaactaaataaggccataatctgaaaacgtgtaaaatgttgtgatattaactagagaacgaaatagagtgaaatctataaccgtagttctagagtgagtactacatgttattaacaatgtaaatatattaaacgacagagtattgtanaagtacaaattataaatagctganatttgaatt

SEQ ID NO: 26306 - DNA, 469 bp, Oryza sativa
agctgtgtacggagcacgagaagcacgaccttctcgcttttgtttattactggcacacatggagaatagaagataaaagaccagaagaggagagaatgaaaaaaggctattatagctagcttcagcacgaacttcaatacgttatgtgtgtatgagatgtgataccatatgttcatgatctatagataactaatgtatgaatgagctgtcatattggccctaaatgattcgtagctagtgattgggatactattaaacttgctctgaggaagcaatggcttatctataaattctatatgaatggcccaacttatataatttgtttaagcaccgtacatataactcagttagaaatactctattgataaatatgtgtcatagatattataaaatattataaaggagctgtcttctctctttatcgaaagtttatttcaatatcttcctgtctatactgtcagacccaccg

SEQ ID NO: 26307 - DNA, 210 bp, Oryza sativa
  unsure (1)..(210): unsure at all n locations
ncgtcgctgcaccttggagcccgcgagccctagcctgtcttttttggttgacnaccactagcctgcttctgctgggtcccctacacacaccatatcctcggagcccccgctggatgaccctcgctcatacctctccagagttccctttctctgatgaagaactggggaaggataattcgatccccatcgtcttgattccacatactggca

SEQ ID NO: 26308 - DNA, 486 bp, Oryza sativa
agcttcctctgaactgatataccgtgctgttgttatatgaggaaactactccacatgccatcatgattgcaatgtttactgttgctgatatatgattaacatgcatattcaccttttctcattttctattacaattgtgaaagccttgaatcatgtggatagctgattggccatgtttgcatttgaaaagcactagtcatggggcagcaaataattgacatgtgaaagttgttaacatgtgttaagtaacagccgacaatttctttttgtttttttaaatgcgccatcttacagttccttcttattcagattcctacaaatatgaatggcctgattgaatatagagcacatcctttctggttacaaaaatactgtccatcacatgaggtggacggtactccaagatgctgtagttgtgaaagaatggaggtacgttcaattaccatgtttgaatttataaatctgattcagcatacttggtcagat

SEQ ID NO: 26309 - DNA, 449 bp, Oryza sativa
  unsure (1)..(449): unsure at all n locations
tgaaaatgggaagaagggggaggctccctctttgaagctgttcaatgctggagaccatgcaccagcatatgcaaacaaagaagtgtatgcatcgatttttacttcttccaagaagtcagatttcaaggagacatactcatgccggtcacttccccttggaaggaactgaagcgatcttctattgagagatggtaatggcttggaggtgaacatcctgcactgatttgcttcatagcatggttcacctgcaagtttcttcattgtaattntaggtgtcggtgttcttcatgctntgattactgatgtggngctctgtggttccattgtcaaggaagcaaagtgtcggagtatttgaaagatgtgtgaaatatgtaatagtttgataccattaacaagcaataccagctctgagatcttctgtagcagcttggtggaataaagttgcttat

SEQ ID NO: 26310 - DNA, 386 bp, Oryza sativa
accacttgcggaccgctaggtggacaggctggtgtttcccgacgcggaaggtctcctgatgggaaacaacattgaaaccggcccggtatggcccggactgtatacacttgctccctctaaagtcttacttgcggggatgggacattgcatgaagaattttatgctgatggagccacttccccagaagagggaaggtggacattcttagaaaaccacgatgattcaatggcgggaagctatcctttggatcaaataaatgggggacagaaccgtcgttatttaaagtgaccactggactaaaatttgatcagactatgctagagtttaagtttgatgaaagatatgggaaatagctttatgttaagaacctgaacccttccttgaat

SEQ ID NO: 26311 - DNA, 455 bp, Oryza sativa
gagcttccgccttccgcgctcgcgagggcgaatgtgtttctcatctggtaggcggctacgctggtggtgaggttcgctgtaccggacggacggcgagaggctctctcgggtcggggcgtacgtgagaattatcggtcgacggtcgttgccggcacatggccgggatggctcttctgttgacagctcacctcctccgaggctccgactagtagtgtgccagtagtgttaggttttgtaccgttgtggtgggtacgtcgttttccggtttacttcgaaagaacaccgttggttgcaaataattatattcgacaccaacttagtagtatatgttttaaattctaatcattgtcacagtgttgttacagtactagctccttattattaaacagatgatattcattttattattggttcatatgagcacctcgcgtgatggcgtagcccttattattttg

SEQ ID NO: 26312 - DNA, 382 bp, Oryza sativa
  unsure (1)..(382): unsure at all n locations
tgtcgtcttgtgcacatagaccatgtacaaaatggattctctttagtccatggacctgntgggaacatgttcggagtgggcctaacagtaacgagcaagcacatagatctattactgtccatgcttggtgaatggtgattgatagtaaagtcatgtggtagtactgatcataaatattgatgggcttgtaatcaccgatatattcagcattcaataatttacagctgcatgaggaatcttgatattacattactgacacatttacatcctaagattggagttctgtcattgctttgttgcaggggagatgctcactggaccaacaacagctttgttcatggatgaaatatctaactgggcttgatagttctagcacatttca

SEQ ID NO: 26313 - DNA, 362 bp, Oryza sativa
acagactgtaatgtcagtgaagttactttttctagccaatcattgcctataataatgccagggtcttattgcatttatatctaaagaaaataactgatattttcactataaggcccactaatgacaggtgtgctagggccctacttgacaattctgtccgttatgtcaatgagccaattgtcagctgaagggtttgaaaaacataattgatgtacgtattgtacaaatatttaactagctcaaataagttgccaagataaaaaatgggtgttctataatttcttgtttgctagcatcaagaacttcatctaagcagttacttcaacaagccacatcaactacttacatacatgttattatga

SEQ ID NO: 26314 - DNA, 339 bp, Oryza sativa
tgctagggcattttcggggcaatattatgaggtgttctttatcgtgggttgggacgcggtacgtgaaacgagtgatggattagcgcactactctctccttcactcacaaattgatcatcatataacctcatgaatacggattttattggagtgcaattcatgcatcacaggaggagaatacgtgcatgctaagggtgtacttgtgcattatacgtgcatgctaagggtggacttgtgcattatcttaatcaatgtaagtatgtatattgtacaaacattatatagaacattatataatgatcaatttggaataaagggaggattaattaaggattagct

SEQ ID NO: 26315 - DNA, 383 bp, Oryza sativa
agctcgcttcatagtactccagagctcgtcttattttggactcgccgggaggcatggtgaagccgcataacgtgcttcccattggcttcgggtatgtactactgattactccactcaccaaaattaattattcacttctgactgattataattccttttttagtttccgatccaagcgtcacgtgagacagcaaaaccacccccaagcatcaactattgccaagctctatcttgagatgaagagatggtacagtacaattatgctactatcttgagagtaatcttgcttttgaagaaaaaataatcaaatcttaatgatgctccattgttctgcctttgctattctttaccctcttgtgacattcacaaacacttgcatatgt

SEQ ID NO: 26316 - DNA, 341 bp, Oryza sativa
ggctcgagagagcggttcgtttactgcagcccctcatttgaaatcagcgtgatgctggatcttcataacccgaatttgttggatatgcaacagaggagctgtctaataacagcatgtgcagcaggcctgatgaagtttgctgcaaccaaattcaacctgaactcatggcaggccatgtgagatcactagtccacatatcatccatggcgctgttcttgctgcacatccatatttatatagagatgtgttggcagcagcttgaaaagcggcatgattagaagtccaattttatcatatatgataagttatctattacagagtagcttaacttggaaatggat

SEQ ID NO: 26317 - DNA, 439 bp, Oryza sativa
  unsure (1)..(439): unsure at all n locations
agcttgttgtntcattcttcaggcagtataattgccaagaatgcaaagccgccgacaaaggacaaagttgacgccatggtggagtgactggatgtggttgataacactcaacttctacattgttgaagggatccgcaaggattgaaaataccatgagctatcaaagcatctttactgtcttaatgtntagtacaagctagttagctttctaatcaatgtatcctactaaatacgatgatcaagacctgagaggttaaatgcatggtttttggaatatttgtatgaaagcctgatttgcatggtttctgcgtatttagtcgtgacatcctgtctgcactttctttcacgttggacacaattntgatcgatcaatcaagcaaattacctgactcgcattagcatgcagcatgggcgagctcatatttcaattattacattt

SEQ ID NO: 26318 - DNA, 445 bp, Oryza sativa
aaaactagctgcttgacctcgatatctactgcattgttctttatctatatgcgaccacgccattctttggtgtttatgatggccatggaggtttgatcttcattctcatcttttctaacaaatgtcaaacaattcatctgttagaccacttcacgcgttggttaaaatatcatagaagtcacaatcctctataaagaaaggacggcgtttcctattaggaacataataacagttgattcatccttcaatccttcgttctctatctgtacagtcatgctgagttatttacccttttctattcaggagctgaagtagcaatgtactgtgcacaacgatttcatactatgcttcttgaggatgtagactatatcaacaatctgcccaatgcaagtacgtctggatgcttcaggttattttctacataattatatcatgtactctacat

SEQ ID NO: 26319 - DNA, 452 bp, Oryza sativa
  unsure (1)..(452): unsure at all n locations
agctcgataacatatcttgatatgaatttctttctttaaatcacagaattcaattgcaaggtcagtgtttagtatactagaaagttttttccctgcctatagttaaaaataatggttgaaatcttttgcagtggctgaattcattgattatcctagatgttgggaaatttggaaacaccgaaatgactgcatattcaactgagtgaatccaaacgtaatggagatgttgcacgcagagtcaacagaagttagtctttagtgcctagctggagctcttgcgctccaagttttcctttgtactaagctgtcgtanggtggttntggtcatgtgtcgccttgtgggtgtgttttgggtgtagggctcgtgagctcttcgttgtatgggtagtagtttccttcttaatgaaatgaacaaataaaatctgtccaacagatatatgaagaaacaatta

SEQ ID NO: 26320 - DNA, 310 bp, Oryza sativa
  unsure (1)..(310): unsure at all n locations
taatacatctcacgggttacatacgaggnctgtaatttattttgtgtactttaaaaatgtgtccgtatatccgatgtgacacgataaaactctacccctatggatctaaacacagcctataatttgtaatttgtgcagcatcagcaattatctctttgtccgctgcaagtcaacttctcccagtttgcattaaatcaacgaagttccagaactgagccacagagccaccccaaacaatgacacttctggctattaggaatcgcattccggccatccatggacgacattttccgcatgcagcaacgtcagc

SEQ ID NO: 26321 - DNA, 396 bp, Oryza sativa
  unsure (1)..(396): unsure at all n locations
ggctctaagagntatcatagatgggcaaacatgcgttctggtcattgtgnctaaggctatatggaaaccctgtttttctttgctccttgctacataataataagtattcagaaactaaagagcagctggagtggtagatatgacaaaaaggtcattttgctacaaaaatggaaggttaaattgttgacattttgatagctaaagcgtgcgaatgaacccgcttcaatccttctcccatgggaaaatctctatctttactattataaaaaatgaagatggttttggccgtacttttggacgtcatccgtatacgagcccaattttatggtctttgctttggaaaaccgaaccgatttgagttgggtttaggacgtattcgccgttgccgcggcacca

SEQ ID NO: 26322 - DNA, 492 bp, Oryza sativa
  unsure (1)..(492): unsure at all n locations
agcttgatctcgcagaggctggttgcgatgtgcctcactataatgacttgagagcatgtacgtagcttctcagtgatgggatttctctcggtaacggtctactggtgaggccgatgcggcggattgcctgtaggattgctagctttacacattgagggatcttgatggcttcaccaagttttttcccatccaatttgcctttatatctttcccagggtgatgacatttgccagtttccataatgttggcttgtaagtaatttgctgcaagaagtcatactgatcgatacgtccatgccatggttcgccaatttttgactcgaaaaatgaccttactagatgcttcgtgagtcgttcactcacaaaccaagcctggttctgcacatacttgcacaggacaagtaatcttgtccagtttganaccaagtatgtgactattntccagatactcttgaacattacacagaacatgaacacccatgtcatgatgatg

SEQ ID NO: 26323 - DNA, 403 bp, Oryza sativa
  unsure (1)..(403): unsure at all n locations
tgatactgtaggagactgtggtcgagaattgatcgtctatcaaattaatgctgaacacatgcgctgctgatagatgcacactgcacaggccacaggggcacacggttattgcatgcaccacgtggttaggtttggacccgacaaagataaactttgngccgaaacataagtccgtcaccaataggtcttatcggtgacgagctcgtaatatatgctcatgaaatatgtatgaacaacgatatttgtatcggtgtttatttcgatccattaaagatgatgaccgtgtgatggtgcgcaagaccaaacacgggatagaccgtcacagatatgcagttatgtacaagtgccctccggtctaacacccgtggatctacaataaaaaatacaattgaaagcctttggt

SEQ ID NO: 26324 - DNA, 480 bp, Oryza sativa
  unsure (1)..(480): unsure at all n locations
agctttctaanatgcattggaataccgagatacttaacaggaaaagaacctagcttgcagccaaagatattagaatattgatcattatatttctttgcttgaccaaaacaaaataattcacttttgtgaaaatttattttcaagctagacaacttttcaaacactgataaaatcaatttcaaattcttgacttcttgtaaatcatgctccaaaaatatgatggtatcattagcatattgcaaaatagataaaccatcatccactaaatgaggtattaccccacttaacagaccagcatctttagccctcttaattagtaaagctagcatatcagccacgatattaaaaagaatcggagacagaggatctccttgcctaagccctttataggtttggaagttatttccaacttgatcatttactntaataccaacatgaccaccttgaatgaaagaagctatccattgacaccatttatgt

SEQ ID NO: 26325 - DNA, 440 bp, Oryza sativa
  unsure (1)..(440): unsure at all n locations
ccttgaaactacgcnttactacataacaataggataaataaagtattttctatctagagacacatcataacaacaattatatcatcaagttacacacttgtcataatcaaaattaaccataacaactaacaagaggtatatcaaaagcaagtggagaaatagtagattntatctcctttggttctcacccaagatctctcaaaccacacaggcaaattgcatgaaacttggcaaaaatgatggtctatgagtcacttacaaactggtggagtatgggcccctacaacagcgaatcaatggacccccacttgagtttatcccaaggagcggctacaaaacgaggagttcgctacgttagtaaacgagacaaaggtgantatacaggctcaagcagctaggaggcataacaccctacttcaacgggcctttttttggatcta

SEQ ID NO: 26326 - DNA, 388 bp, Oryza sativa
  unsure (1)..(388): unsure at all n locations
agcttctcgggttattggtctctgccctaagcatctaggccaaccccgagaagatacgagctatagagcggatgcgcccncccagcaagcttagggatgtgcaatgtgtcaccggttgcatggccgccctaagtcggttcatatcgaggctgggagagaaggcgctacccttatttaagctcctcgaacgctccgggccgtttacttggacggaggaagttgaacgtgccctcactcagttgaaggcgtatctcagctctcccccagatctggtcgccccggagccaaatgaacccttgttactctacttagcgacgaccccgcaagtggttagtgcggcgttggttgtggagcgcgatgaggacaatcctcattccgcgcaccccca

SEQ ID NO: 26327 - DNA, 277 bp, Oryza sativa
tacccgcgctctctaggtgatcaccgcttcgttcttctttatctccaacggaatgttccaatgcttgccaaccttggagtgaaacaaatatagcgacatttataggtgctgggatttcaacaatgatcgatcgaacgtaccggcattgaagatgtattataccactgcggtttggtatgatgccaagtattgcaggcagacttcatagtacccacagtggtagaaaatggcggcataatccctcagtcacggggatcgttgctcagtaggataagtc

SEQ ID NO: 26328 - DNA, 398 bp, Oryza sativa
agcttatctcttacgctctaggaatggatcagtcataacatcaccatcggcttggtgtcatcgccgctgactggtgtcctcgcctatacggttgggtggtcacaccgttgttgttgggcgtctacaccttcaccaaccggccgccttgtccaccgccgactggtatcctcgcttatacggtcaggtggtcacaccgccgttgttgggcatctacgtcttcaccgaccggcttgccttcgccgccgccaactggtgtctccgcttgcacggctggcctactatgccgctgttgttgggcgtctacaccttcaccaaccggccgccttgtccgcccgcgactggtgtcttcgctgcacgactgacctattatgctgccgttgttggacgtctacatcttc

SEQ ID NO: 26329 - DNA, 441 bp, Oryza sativa
  unsure (1)..(441): unsure at all n locations
ggatcatgtggacgccttcatggaggtagagcaacatacactccttttcattcgagaccttgacagcaacttcactgtcaccgcctttaaagccagccacttccccagcaccgtaatgttcctcttctagggagacttcttcggtcatgttcttcacactagcgactgtcacttgccccttttccacctnctcactgactacgtcttcctcaaccgcaccttcgtcgccacctactctctctcacttcccaccaagcaaggggaaaggaccggtagcagcaaagagaagaggaagggtccggtcgccaccgttgagcatctatctgctgaccgccacccttctcccgtcaggcaccgctcactgccatcgaacttctccgcactgaacgccctggaggcatanatcgacatatgaagagagggaagatatgtggaataaga

SEQ ID NO: 26330 - DNA, 469 bp, Oryza sativa
  unsure (1)..(469): unsure at all n locations
agcttagcttagcttaagcctaatcttaggcttatgctgcggccggtgggggcgttacgccattgctttctgaanaggacactgtcccctttggctaactgcaagctactactgcagcttaacatctctcactatcaggtggggcccacctttgacagatggctctgctgttcagtatagtagggtcccaatttggaagggttaaagagcttttgttggttttttttaattattgaagcagattatttgcttcacatttaaagaaaaattcaagaaaactttatttggttgtattgtacggttataccctttatgttttgagctacttgtatttgttaagattatttntaaaatattaaatctatccatataattaagtaaaaaaattgtaacaacaacccacttaattatctaatttaaactcagccttatagctaaaccaagtaatggttcttcccttgaaactctc

SEQ ID NO: 26331 - DNA, 352 bp, Oryza sativa
  unsure (1)..(352): unsure at all n locations
ctctgaacacttgngaattatatgctcccatattatcttagttagtntgaatattaagcagttctcataacgctgttgtgtntttgtgtgttaatgcatagtgtttttgcaggttatggtacagtatggtttcacggaaataccgaagaagtatatcctgaagaggtggacaaaagatgctagagattcaatcccaaagcacttggaggagtcgtacttgaaagataaggaggcggcatcatcgagaacttatcggaacacccttctgcacaagtctgcacttgatattggtagacttggtggtactagttcagaaacatatgagaagacagtggaagtgttgacaaagctg

SEQ ID NO: 26332 - DNA, 400 bp, Oryza sativa
  unsure (1)..(400): unsure at all n locations
agcttgtatgaacanataatataatagtctatatgtgttaccacttatatctgcagatgacttagcgaacaaaaaagagagaagagaagcggaccataaatatatagcaagctataatgctacatgctctatcaaagtttgtgaaggaattgctaggactaggtattaatgcataataatatatatctatagctaacttacttggctactactcctactaaattggtcgacgatacggcaagtcagcattttgattccaaactttttcctcaaacttccaacttttacatcacattaaaacttttctacatacacaaactttcaactttttcgtcacatcgtttcaatttcaaccaaacttttaattttgacgtgaactaaacacaccctcatcaaacac

SEQ ID NO: 26333 - DNA, 269 bp, Oryza sativa
  unsure (1)..(269): unsure at all n locations
ttaagcggtggaagtgggaaaccgaagttgaagaanatatgacatatgatattccaaatattgtaaattagcaaacatatatatttttaaatgaaaatgagaacattagataagggagtgaaacaccttgtaaattaacttatccaaaatcaacatgggaggagcccatttcatttgccacaagagtcccgtataacattaggccgtccctactccccggtgccttcctacctgtcccaatttcctgagtcatactctacctatttttc

SEQ ID NO: 26334 - DNA, 307 bp, Oryza sativa
  unsure (1)..(307): unsure at all n locations
ttagagtganctgaggcatgcaagctagcgggagctatagcgggcggatgcggatttgtttngcatgctcacgcacaggacgactagacgaaccctactgtactcaccctcgaacccaacgacgaacgacgacggccggcgacgaaatgtgtggcggcggcggcttcagccgactgcggagacggggctacggtgacctggtacagcggggagagagaggaagagcttcaccttgctcctgcgaacacaactgtggtgactgcaaccggcggcgacgacagaggcggcggcgcggcgcggatggagc

SEQ ID NO: 26335 - DNA, 400 bp, Oryza sativa
  unsure (1)..(400): unsure at all n locations
ntattcctactagatactatagagaatacacaatggattagtcgtgcttaccggacaaatggcggcgctgntatggctatggtggcgctcgggcaaccaagggtcaccggcggccgtaattcacgtgtggagtgggttttggatggggattattcccgatctgcttggtgtgtctggggggctatcgcccacctttagttttcttcaagtgctatgggatccaggaaggaaaccgtaccatgatcttgatcatcatcggactcgggcatactcctttcaagatcggcagaatttgaagataaatcaaaccggtacgactgggtaagcctatggtctatggaccagacaaacactattcaaatggtattatggtctggaattgtctaagatttttgatccc

SEQ ID NO: 26336 - DNA, 362 bp, Oryza sativa
  unsure (1)..(362): unsure at all n locations
gctttagagcantggtacatatttcagaacatactgtatcttgatgttctccaaattatcgaattcatcttgaggatgtcatgcttctttgaaatattgtccgaacttatgtcaattttttcttttgagaacataatgggcattcttttcttggacatatataactcgcgagtttttttacacgaatagacacttgccaataatatgtaatattgtcgacgagatcgcgtgtatacaatgcgaagttgcgagttcgcgctcgtgggatgcgaattggggcgacaagatcatggaggtccccgcacactgctgtgtgggtgctggccacggaacgatgatggcttcacgccccctctgcgtga

SEQ ID NO: 26337 - DNA, 371 bp, Oryza sativa
  unsure (1)..(371): unsure at all n locations
actcagctttgcttatgggtctatagactcttaacaaatatgatgttaatggcctataaaaaacatatcgcattttaaaagtgttactaaataaagaactctgaatccacaactgattttacatatgtcatgaaatctcactggaagaaccaaatgcattccaatttttgtcatgaaaccacactggcagtaccaaatgcattttaaatatttaagtatattaagcattaataacctctaacaacacattacagaatatgcccataacaaatatatatctcttaaaaaaataaacatatgaaaaagaaacttcttgccaagaaacngtaaaaacatcaaggtactatgcaatgggagtataaataccacta

SEQ ID NO: 26338 - DNA, 305 bp, Oryza sativa
agcttatgagattagcatagatgtttcttattattctactcgaggtctgagtccttgtatggatgggctaagaatttgaactttcattctggtccattgatatctttacaattgcctgtctctatttgccttttcatccataaactaccaatgggttaatttaggtatttttgctttccaattccaaaataaggccactagttttagtcaaaatgatttcaagctggtattctcaagactaagtacagcgatgcttatgctaacgtcagataattgaatactccctccgtctcattttaagtgca

SEQ ID NO: 26339 - DNA, 442 bp, Oryza sativa
cagctgggccttcaccgacaatgacccaggaagattcttcttctataagttattttccaaatcacaaacaagcacagagagttaaaccaaatgaaactatcactcaggttcactgctggaagcaccacctaatacattgaggaagaaaaaaagggagaactataccagagaagtacggtcagcagtgcttaattgaacattttcttcactgtcttcaacatccatgccattcttcagtttgttgtccttgtgctatcagcgattcaatgcaaagtatatacaatggtcaagatactaacaatttgctatttcttcaacagacagcacaagaagcaaacagggaaacaactagtgcagaaagctatccgcgagattcttgttcatctgaagccggctatataactatattacaagtgaaaacaaaactgagaaactgaacata

SEQ ID NO: 26340 - DNA, 444 bp, Oryza sativa
  unsure (1)..(444): unsure at all n locations
atccttanagncacctgcggcatgaagcttgtgaaattcctctaccaacatttgctattctccgatgccaaagccacctcatgtcagacttatccactaagcatgtctcatgtttggctttagatgacgaaaaatacacaagataaagcttgtccttgagaacaccctttaagagtaccgaggagtcatcccttctaaatacggctacatcaacattcggaaaaaaacaattgttgcccatggaacataattgagaaacggacaagagattatagtttagaaattttaccaagaggacgttagaaatggaaagatcattggagattgccatcttacccaatcccattactttttcttttccatcgtccccgaagactatgttctcttgcgaagtgccatttggatctaaggagcaaaacattgattcttcttcggtcatgtgat

SEQ ID NO: 26341 - DNA, 387 bp, Oryza sativa
ctacgcttagcagtgtgagttctggttgtccgaagatctttttttattacacgtgatatctgctaaaggagtggctgtggaccccgaaacagtgaccgccgtcactgaatggaagcaacccaagacagttactcaagtccgcagtttcttaggtttggcaggatactaccggagattcatcgagaacttctccaaaatcgctcgacccatgacacagatgttgaaaaaagaagagaaatttgtgtggagcccgcaatgcgagaaggcgttccaaactctcaaagaaaagctggttttctcgccagtgttaatcttgccggatactcgcaaggaattcatggtgtactgtgatgcttcccgccaaggattgaggtgtgtgctcatgca

SEQ ID NO: 26342 - DNA, 370 bp, Oryza sativa
agcttaccccagcaatggagatgagcagtgtctatctctgtgcaaggacgcccggccaatactgcagccgttgcggacgacggcggcggcttgccgccgatggctaagacaagtcccgtgacctgaagaacggtggggacgagcggcgtggataaacgacgcgacgggcgtggcaacgagagtggatggtggagaagcgggcactgcgccgcgactgacggcggctgcgaccggcgaacgggaacgcggtgacggcgatgagccgcgcgcgggcttgctgctatgagacgaagatgacgactgactgctgctgctggatgaagacgccgagcgatggtggacgatgatgaatgacgacaacgatggctcg

SEQ ID NO: 26343 - DNA, 417 bp, Oryza sativa
gtacctgcctttctctgtgacggcgcacacacacatttacgtgtacactgtacacaacacacaagatcaaacccagaaattatcgcccccaatgtcttcaacacaagacgccgtcgcagaggatctcacgtgcgatcgctgagcccgacaccaccacacgggctgggaaaattcatgtgccgtacgctctttttcttttttctgcacgggaccttctgcggccggccgtttcctaactgctgctgcagccgcggccacatgctcgttactgtcgtcatcgtccgcgacatcttcctcttcttcccccttcttatttgtctatgagggcgtagttcccttctttgcttaagcattatgcactgcacatgatgtagaatcttgttggtagtgcacattgatcgaacacgcctcatcgga

SEQ ID NO: 26344 - DNA, 414 bp, Oryza sativa
  unsure (1)..(414): unsure at all n locations
agcttgagccaatgagtaaatattctcttctcttatttcatattataaatcgctgtgattgtttctctaatcaaacttctttatatttgaccgagtttatggataacattggcaacatctataaaatcaaattagttttattaaatgtaacactaaatatatttcgataatatgtttattntgtattgaaaatattactatattttcctataaagttgatcaaatctaataaagttttactataaataattcataacaacttataatataaaacagaggaaatagatgatatatntctacattaacgggaaactgctatagtctctcgaggagtatcccctcgttttgtcacaccatctaatagtataaaaaacattgcaatattcatcaacatatataccactcgacaaaatc

SEQ ID NO: 26345 - DNA, 342 bp, Oryza sativa
tgacactttattagttgctgaactagtgtaggtgtttttgtactgtagtagccattattttttcctgttcatatgctaacatattgttgatgttagtatttctgatggaaactggcatttgtgttataacaagagctgggagtactgcagttctcgtcttatactaggctactagcactcctctgatctgatggccaacattaacatggcagatactgctccttcctgtgatacttacctgttgaattattgttaatatcttggtaatcctcttagagacttagaccacaggagaaaagacgaatcttggggtcaccgccaggaaaacgctacggacaacat

SEQ ID NO: 26346 - DNA, 374 bp, Oryza sativa
taacaagtccattcagtatattttaattgcccccattttacatatagcatgcctttacagcttacataaactatttataatattcacctaagcaacccgatttacacacacacacaccaaaaaattagatgatagttttcgggtacctaccattcaatttgctgctgtggtttaaaggttgatggatttggattgatcatggtcatttgtacttttggagtctttatctttagtgcattaacccaacgtcccaacccatgatagagtgcttccgtctttcggcgcaacacttgtcatcagatcctgccagctagaacctggccgtccaacaatgcatactagtatacatgggatactaagctagcttcttcaca

SEQ ID NO: 26347 - DNA, 360 bp, Oryza sativa
  unsure (1)..(360): unsure at all n locations
tntctctttcccttaaccttaaccttagtacttatagtctttttgagtcccagaaaagatcggtagcaattccccacgttagttccgcccctgggtgatataatccaaatctttatctctatgcgtgtaatagtatgatctatccagcttgttgtacatttttttaatgtgcagtaaggtgctaatagcagtttgtattttggggtttaacttgacctctatgccccagcttgtgatcgcccctgctaacttctgttggtggatctttacatgatattattgtttttataagaaagctgggaggtctattcttctatacccagaggcctacgttattatttatcccaagtattaaactga

SEQ ID NO: 26348 - DNA, 408 bp, Oryza sativa
agcttaatagatttataaggtgtgatatgatcgcataaatcgatagatataatagatcaggcaaagaaaaacatacaatcttaaaccaagaaggattatattaggtaggatcggctgaaactccgatacaacctttattggtaactatagggcaagtcagttcttacaattgtaactacaacttagtagatcaaacccaactgatgcagcaccaagttataattaaatttcataggtctaaacgagctgataagtgctatttagggtgatgggtacatcaatcaatctaagataacaatcttgtttagacagtatcagcctaatcataagtgaatcggctgactggaataaacaataatgttggcttagattaagcaatgtatatgataaataacgcttacactaact

SEQ ID NO: 26349 - DNA, 288 bp, Oryza sativa
taagataccaatgcgagttcatactcctggaggtggttttatcacaactcactactgcccatctgtgacagttgaaattcataggttgaattttccagcccaccttattcttctctaattcaaggacctatatgtcatacttggaatggaatgggtgacaaagcacagaagagtgattgattgtgccagccgcaccatcaagttgaccaatgcaaaaggagaggtggtaacctttcagtctctattgccgcagaagccacggatcagtttaaacccagctgctggtga

SEQ ID NO: 26350 - DNA, 408 bp, Oryza sativa
agcttgaataccctgtcatgccttctgatgtatggcgtctgggctgtactaacacaaaggatctttactataccatgagtaagactgttcctccatgaaactttcaccttctgctgatcaacaaatggtaagctgaccattatcaagtagccttggtcatcttcataaatcgacttggcggcagtcacaggcccgcgagcctttttcatcaccccacaaaattcgtgctgccatgaaggctgcactactgaatgcatctccacatcttgttgtgtcctctcgccgcaagagttgagtggcaagaagcattcctcatccatggcatgcggaaacacctccttcctgcgcttgctgctaactggggagagatccatgccatcttctcctgagtgattggagggtgatgac

SEQ ID NO: 26351 - DNA, 404 bp, Oryza sativa
  unsure (1)..(404): unsure at all n locations
ngctctcatcaggaagaaacttgcttgcctcttgaaactcctggcggaactgcaaagcctgttggttctgcacaacaaaatcattcaggctaacatcangcaagacaccaaccgggctcaacaacgactcgaatccttctgagaaagtaacactgctgccgttcgaagacgcgaacgacgaagattgcgacgggaggttctcacgaaccggcttggtctggagctgatagaattccgtcgggtcgtacggccaggccgccgccgattccaccatgccccccgtggggatcagatccccgtacagctggggcgtctgcgagaaggcggccgtggggaactcgaggaccggcgtctgcggtacggcgccaagcccgtcggaggacgagctacagttgcagggactg

SEQ ID NO: 26352 - DNA, 418 bp, Oryza sativa
tagcttcctccggatgaaccgtgggatgctggtttgatatagttagcctgcagcgttggccagttcggacttcggaggatacaaataagtatctacattcacaacacaaccattctattcatgtgttcttcaccagcaacatctgttcaatctccaaataataataataataaagaaaaaaaacctaattaaacaacatcttcagttcacctgcctttaacgaggcttcggttggctttgtctgtaagagcttggtcgatcgctgctgtaatcgctgctagtgttttcctgactcctcggcgctcttcttgatcgtggaccgatggactcacccgattacatgatggaactgtaggtatcttctgcgtacgtagtcctaaacatagagataagaacttctctatgccgtttgccttgc

SEQ ID NO: 26353 - DNA, 341 bp, Oryza sativa
  unsure (1)..(341): unsure at all n locations
actaccctcttatgctaattcactcctattcatccttgatacttctcaacaaanagcattagttatcctctaattgagttgtcattaacaccaaaacaaatgaggggtcctagatgcactttcagtttggcaaactaatatccgcttcactcttagctcgattattgagtaaagtgcattggaggtccataaacttctgtgggtgtgtcatctaggtcctagaactctcaaaatacattattgtgtccctcaacttatcttatgtgtcatatagggccaaagtagttactactcctactcacatctaatatgactactcaaaataatttcttatgagttta

SEQ ID NO: 26354 - DNA, 401 bp, Oryza sativa
agcttaaaacatgcatgattccaacacctatgttatgaggttctatcatcatcatcatcgagtatttacactctgtatatgtatatcgagctcaaagtgggtaacctcggtaggaaattgctaaaaacaagatcgtaagctatgatacctgcgagaacagtggcaagatagtaataccagcatggccaccgaccacagggacattcacttttgcagaagatcacagcaatcacaaagattataacagcggagatacaatattatcataaaatccacagctatatgtaatgtcaatgtcccctaaaattatgagtaaaagatcatggtcataccaattatctggcacattagccttttcagcatacaaagatttagcgcgcacaacattcagcgtggtcaca

SEQ ID NO: 26355 - DNA, 449 bp, Oryza sativa
  unsure (1)..(449): unsure at all n locations
ctagagatagtgggntataactttatagagagtatttattctccagtatagtatataaaaagtgactcgtagtactgaacgttcagttgttcagagattaaccaaaaatgtttggtcttttccgaggccagcagaaccacagaatctgtcggtcaagagagagataaaacaaaaacatgactggctaatgattggtcaaagcaaaaacaatgacaggctaaactgaagctgatctagcaatagtcagccctcatgatcaacgacgaagaacgacaggtttcaaaagagataaagcactaaattcttggccacgccggccctgtgaaaaaaaaaaagggtaacagtatccaattcccatcgacgctaatcttcctcagctcattcttcatcaatgtcctacaagatggctgtgacttatcaggtnttttttatcagttgatcatgacagc

SEQ ID NO: 26356 - DNA, 372 bp, Oryza sativa
agcttaagcactacttccaggcccacaaagtcatagtatcatcacagtaccccttgggtgaaatactccgaggcaaggaagtcattggccggctcaacaagtgggcggcagagctatccccgttcgatttgcattttgttgcacgcactgctatcaagtctcaagagctagctgacttcatagctgaatggacaccggtattcgctcccgagcctgaggccgtcgaacaattctgggtggtgtcctccgacgggtcgtggtcgcacaagggggcaggcattgcggcagtcctcattacgccgaatggtatgccgattcggtacgctgcaaggctgcagttcgaccaaccaacaacgcagcagaatacgaagc

SEQ ID NO: 26357 - DNA, 375 bp, Oryza sativa
  unsure (1)..(375): unsure at all n locations
tgatgtttgcttctgtgcacttcttttatacgcatggtgactatgctcataacatacaggggctgntgagctgcctgtctgcatcaactactgctgcaacaagaacagttatgcaagcacgagcatgaatgaagcaacgggctgcatcagtcctgtctggcgaacatccccacagcttacagcgtaatagtaacactggacacaattgcgtataatatctgcttagagagtgggttatcttgggtgcggagtaacnaatgtaccatgacatgctaaaatctttaactgcttttttgtactgacatgcactatggatatcccagtggctagacactttgccgcacaaataaacatgacaagtcatacagttcaaaa

SEQ ID NO: 26358 - DNA, 443 bp, Oryza sativa
agctctgttggttcattcttcatgcagaaagatagccaagaatgcgaagccgccgacaaatgacaaagatgacgccatggtggagtgactggatgtggttgataacactcagcttctacattgttgaagggatccgcacggattgaaaataccatgagctatctaagcatctttactgtcttaatggttagaacaagctagttagctttctaatcaatgtatcctactaaatacgatgatcaagacccgagaggttatatgcatggtttttggaatatttgtatgagagcctgatttgcatggtttctgcgtatttagtcgtgacatactgtctgcactctctttacagtggaacaattttatcgatcaattaagcaatacctgatccatcacaggagaggggcgactctatacaatattcatttcactcagaatactattgt

SEQ ID NO: 26359 - DNA, 332 bp, Oryza sativa
  unsure (1)..(332): unsure at all n locations
gaccatgatactcagctgattgaccttcgatatcagcttgttttgatctagatctagatgcgaccacgtcattctttggtggttatgatgggcatggaggtttgatcttcattctcatcttttctaacaaatgtcaaacaattcatctgttagaccacttcacgcgttggttaaaatatcatagaaggcacaatcctctataaagaaaggacggcggttctattangaacataataacagttgattcatccttcaatccttcgttctctatttgtacagccatgctgaggtttttacctttttctattcaggagctgaagtaacaatgtact

SEQ ID NO: 26360 - DNA, 340 bp, Oryza sativa
  unsure (1)..(340): unsure at all n locations
agcttgattattcccttctctacatgctttatctcatccccaacccanaataaaagggagaagaaactatgcaaatactacaagtgaagggggccaattgaggagaaaacatgatgcatgagagattcacaatctcacaagctgatgacgtgcgggccgctggcgattgtagccgacatacatgtatccgatcaataggaagaagagaggtgtcatcgggccgggcgtctatcggagggcgcgggcgaggccggataggatgctggagaggcccatgcggaagcggaagatggcgccctgagagtactgcgcgcagtcgctgaagactgtctctatcgcc

SEQ ID NO: 26361 - DNA, 441 bp, Oryza sativa
  unsure (1)..(441): unsure at all n locations
agcttatagnaggcttatagcttactattatacttgctcttaacccgcttggactttaatactggatttagcgttggtgtgtctatgttaaaaaaaaaagagtaaagtcaaaagacatgcgaataattaactggctaaactgtttgggtggccactgtccacatgcccacatcatcttcaactgggcctacataggctntacatggtgcatatatctcggcccattaacttgttaacccatctcggcccaataagcccaacacaagcgctacaaaatccccatcgcttcattcttcgccgctattccccctcccgccgtcagcgacgncgttgcaaaccctgtctcgcggctcggaccaacggcagccatggtgagctcctgtaaccctatcgaccgaacttctctgttattctcttctcgcccgtgtgcctcactgatct

SEQ ID NO: 26362 - DNA, 382 bp, Oryza sativa
tcgctagctagctccctctgtatcagtgtatcaatcttctatctgccaatgcctgctgataactcgggttctttgcccagtccggtggcggcgatgtggtgccgacgttcgcggtgggggcggcggcggaagcggagtgcgacgtcagggtgggggaatattataataaatagtattataaataaatattcacatcacgatatgtataataattataataattaaagttctcgcttatattcctcactaataatttaattaaaaaaacatttatatatataatcataatactataaaattatttcattatttattaatatactgatacaaatacatataattattttacatacttcacttaataaataaagcttaatttata

SEQ ID NO: 26363 - DNA, 445 bp, Oryza sativa
  unsure (1)..(445): unsure at all n locations
agcttggaatgcggtccgcagaagactgatatgtagccgagttcttatcgtcttggtgtaactggtgatactgagctgataaagccagaaaattcaagttcttatgaggagatcaagtttggcagtctttcaaatgtgttgaaggcaacagctatccatgagtgcaggctctgcggcaaggtcttggcatctggatctgcattgngaggccacatgaagtcccacagtggtcctgctcataaaaaggttgcaacatttcccaaaacttctgtgactccatcaagaaaacagctgcttgaagtgcaaaatgagttgcatgaactcaaccttccagctctcagtaacagggactgcagcagtacaaggacagagtctgaactgaacccatggtgggttgcatgcagcattcaaagtgagcgaatgatgggtgttgtctgaaatgtgt

SEQ ID NO: 26364 - DNA, 377 bp, Oryza sativa
gcttgcctatcttggtctaagccaggctctaatattgttattcatcctaagccactcctaaagtgccctgactaactaaagacactatttaggaaactcatctctcaatagaggacacccctaatgagtccttcaaaatctgaggccatttgatgaatatactttatcccacaatgggtgtcccggcccaaggtagtcctatgtgaaacgtctgaaagtacccctccctgcttgcccatcagcccaccggcgtgctcctcttatattcctcccctatcctcagctcttctagacctctcttctccactccgatgatttcttcctctctactccacgccggcgtcagcccaccggcgcttgtcttcgtacgtttaccg

SEQ ID NO: 26365 - DNA, 358 bp, Oryza sativa
  unsure (1)..(358): unsure at all n locations
aagcttactgttngacaccttttaagatgcattgtaccaactcctaaaaagttgagtaactgcggtataaaaggagtttaaggtattgggcactagattacgcgcacttttgcctaagcaaaaagatgcctaagtccctaaaagaacgtgacaggccacacctgacaatatgggctgcagacatattacgcctaggccaacaaatatgccttcgacacccnttaaaggatgacgcatgtaacatgctcccgagtaataaatcttttcgggtgatatagaccaagtgtagctcatatgaataacttctgatctcagtgattatcctttatgggagtactcaaaatagatataacaattg

SEQ ID NO: 26366 - DNA, 375 bp, Oryza sativa
  unsure (1)..(375): unsure at all n locations
agctcgctgatgtacgaacagatttgctctgttactctgtcaacccgtttgttgaactgaataagcagacgaattgcacaatgcacatgtcacatgcttatgctcccacagagaaggcacgccgattgctaaaatgcagccttgtaaaatactacaagtcttcaagagacaagaccatctntctgttacttcactttgttgggacactacacttggtcggatcatgatttatgactcgggtcatgtctttgcctatgcatttctcatacccatagctgtcaggttccaaccaacacggctttaattgatctaataaggtctccctttgtttcttttccgtcaggcatcagctatatatacagagatcacacctat

SEQ ID NO: 26367 - DNA, 292 bp, Oryza sativa
  unsure (1)..(292): unsure at all n locations
tgcattatacacctaagttcccgtgacttgctgagttctaaagtactcacccttgctctatataaatatatatatagntcctccgccctgaagagaagataaagtgaagtgaagattaaggtttcgtcctggttcccaaccgtcgcctgtggagttgggtgttagttcgttggttccgctgctgctgctgatgttggtgtattctcctccgtgtcagcagatgcattcttcggttgttctgagctgcaacctaaggttaggtaaataagtcctctattattttaaggaattg

SEQ ID NO: 26368 - DNA, 381 bp, Oryza sativa
agcttctgtcttgatcctgcagttgtattatatcatagcctgcgtgtacctgcttccattcattgcatcatatttgctctagttacaccaataagtgcaatccattggcatgagcaattgagcagcttgaactgaatgtcagttctctatccataaagattgatgttgtgggctttgtacaaagcactatggcgagtttgcaccaccaattatgctgcagaagccaactttgctttctctgtttgcaagtgaagggaaaggcagccattgatgttgtctgcaacccattggggaagtatggtggagctcttattcaacagttcatgaaccttacatgtggctctttagctaactccaacccctaccttggtggcatactgc

SEQ ID NO: 26369 - DNA, 399 bp, Oryza sativa
  unsure (1)..(399): unsure at all n locations
taacgtgaactaacggctgtatataaggagatgtacatatgtttngtgcacaatatgcatggccagaccggctagaagacacttattagacgctcataacccttggattccctttcatccctagaaaagaaaatccgtgttcccttctgttgctttttaagttgcttctgcttcatctatatatgtccaggatcccttcttgtctgtatatccaattntaagcatggntggcgctgccgtgccacctacataacgtgagttgaattgatctttctttctagaggtgaatttgctctgaaattatggtttgctcttcaatcatcatagnggccaataaatcccagttgctattatccccccccccccaccaaaataataatccaagttgctaattggaag

SEQ ID NO: 26370 - DNA, 486 bp, Oryza sativa
agcttatagcttgatctgaccaatgctgtgctaataattatatatgggcgaaaccctcgtggtctcatattaattaattagcacgtcgtgcatatatggttagtgcaaccgaacgcgccaggccaacaactcaattctttatatacaggtatgtcataataagtacatatagacgggttcttttaatgattaaatacaagctgtatacgacgcccacacatcgccgcacataatgcacggaaacttccgtgaaaattaacgtttttataacagttattaaattagaattagatgaccaatgacaaatctataaatagtagtatcatttaactggcatgacaagcgtaactgtgtgagtaactataggaaatggatttaaaccttgattaacagagtcatcatgtattgtttgctattctacggtcacatatctattgcttatccttaccatgtcgatcatattaacacagaataatataaatatgt

SEQ ID NO: 26371 - DNA, 406 bp, Oryza sativa
  unsure (1)..(406): unsure at all n locations
ngatcatgatccttttccggtgaatacaattgatttttatgacaagaaggtgttgattcggccggagcaagccgaatctaccaaggggaaaggagtgatcattggagagcctatgcctaagatgatggtgccaaaaaattctgaggttagtgtttggaaggagaatatgagtgaagctttaaattacaaaactccaagaaagactaaggtgacctttgatatgctcttgaacaagtatgagaagtaaggtggcgagaagactcgcaataaaggtaaaaggccaagaatcacctctagggagcgatttggtcattcaccaagacaatcgaagccactttttcttcatcatcctcaagtcatgccatgggggggttgtccaatgccgccgccggggtatccttttccc

SEQ ID NO: 26372 - DNA, 444 bp, Oryza sativa
  unsure (1)..(444): unsure at all n locations
agcttcaatgctacattgcgggttaagctcttcactttaatagttatctgngaaaggatggctaaagttattttcaaatatgtcccttgagtttgaggcaagaggctcgccacatacgaggctgcacatttgagccacatgtgaaaagaatactcgcaaaaaccatttgtgtagtagtatgatgaaaataattatttatacaattagataattagaaatccctacgtgaaagtaatggtactcgtgcccatattattgtttgccaacaattgatagaaattgatagttctttctgttatgtagcataattggctagatcttttataacttattattgtatcgtgcagctgagatgcacctgctgattttttctcctatatgctgcattttcttaatgttgattaatggatgccttggtgcatgtgagtagtgacactatatata

SEQ ID NO: 26373 - DNA, 464 bp, Oryza sativa
  unsure (1)..(464): unsure at all n locations
catgcgtnggctactgtgtcgtctctatgactagctttgtcaatgtctnatgttgggctccgtcatggtagcttatgttagattagttgttagtgtggtgttgtaattgtggtttttgctcagtttttccaaattaactggacattgttaggtttggtctcgtttgctccttaaaatgagacactcttttcttaatataaaacgtctgcaacggcctgaccgttcgaaaaaaaaaattctttctcgcatggttctgctagcagtaaaggcgcgaagaagcagaaaacgccgtaaagctggccagcgatttggagtcttatccttggcgaaatatgtatgtaatatgtgtgtggtttaataactacttaaagaatgtaagggtacctgcaatttgtttggtttataagctaatgaaataattgtattccttttgaaaactatatatcgggatgttgattgcatat

SEQ ID NO: 26374 - DNA, 439 bp, Oryza sativa
  unsure (1)..(439): unsure at all n locations
agcttgtctcgatcaggctaaaagggccataccagttgcattaaagtgcaatatatgggtttactgtccatcagagtatggatgctactcgccagataaatatgaacacaaacatcaagagtgctggttgaaacaggtatcatcatgttgtcttcttttatatttgatgacggngtagttgggtacttcctattctgctttggagataatgattctgaaaattatacctaaaaatagagggactcatcagttcctgttatgttctttccatataactattttgtcctctatatttaaaaatgactgcatacattgaatctaattggtggatatattagaagttatcatgcatatcttatggcatggccctgctcgtaacttggttgtggtggcttggaggacatgctttgttttgttgccaaacaaaccaaatcaattt

SEQ ID NO: 26375 - DNA, 436 bp, Oryza sativa
aaactaagctagaacacagagagattagccagcccttttgaatttccaatatcctgtccatatctgtctatcatggcgcttctcaacatcaaggacactaacagggtcatgtttttggcgtctcttttactcatggccatggtctattcatgtgctgcacaaggtaattataaaagagtttctgccatcttaatttacaaaagtatcaatacgtataactcaattctccatccagccataaatagatgttattttttatatatagacagtcaaatttgaagaactttggacacactatacatatcaatactgtcatttatcatgtgaagaattgcattggcaaataattgtgaaatatttttttaacccggcgttttgtgctatatgagccatatatttgtggggcatctgaaaagataacaaatatggggttcat

SEQ ID NO: 26376 - DNA, 405 bp, Oryza sativa
gtcaatatttttaacaatctaagggtgtgctttccacaaccagagcgagacaagtttcagctcggtcggggtgagaagtaacaaatttatttatcaagatctttcaaagctagtgtttgccaaaccaaaccgattttttccaaacttcccaatatatagttggccccaaacgaccaatcacttccagggactcccggtcctgctgtctaccggacagctaattgcttcccaagcattaggtgttccaaaccttagcaccttttcataaaacagggtaaaacaaagactacgctaaggaatcacctcacatccgcccatgaccgtgggcacagctgttcgaacagcttgataacctctgcagagggggtacactttacccgcacgacattactaacccgaataccc

SEQ ID NO: 26377 - DNA, 444 bp, Oryza sativa
  unsure (1)..(444): unsure at all n locations
agctnttggttttaggggcattcgcgtcattttaaagagtttttctctttgatcaggctagaagtattctctagcaaattatcaatttttcaggtgtctttcaaccatcacacatttttacaatatttaccagcaaagtataacaattttaagtgtcttatgtcaaaatttgccttaagacaaaatttacaactatagggaaatctcaacttggacatgaatagccaaattgcagatagtttactttccattccacttgagaataacttgtgaaaaaaatgttctttcaagtccatctctttgttaatttcaattcgcgttcctccctgtttgtaaataactagaaaaaaaagttctgcaaagagggaaaaggggaaaactaacttccatgtcaggattaaattcgaccgacatcggtaataaaatatgatccaaataaaaata

SEQ ID NO: 26378 - DNA, 435 bp, Oryza sativa
  unsure (1)..(435): unsure at all n locations
tctcgtccttgccttactaagaacccggtttgtccgaccccttcccggtgttcccaactattggcatgcgaggcttccctgaatcgactagttacttagccagggtgtcccattccaccttgtggttgcactttgattatgttcgatgagtttcccacaggaatcggtccttatatgcgaatacaggacagtgccacataggcacaacccccgcatcgcgagttttcacaattcattttattntcaaacacaccgacaccacatgtcgggttttgaaggcttcacaaacccattttccaagttttcgacaaacaacggtgtatgtgggatatttggtatacgcgctcagagagcacgaataccgaggtaccacaagggtggagcgacaatgaatcacggtagtacgacctaccgannatagtgcgactactgggt

SEQ ID NO: 26379 - DNA, 454 bp, Oryza sativa
  unsure (1)..(454): unsure at all n locations
agctngaccacattcttcatgatgcctttgttcgtccttgtcttgctcagtttttgctgccagttagagagaaccatctagctaggtttttgtcagtctcggattatgtgatgatgccgcattatgggttgattttagagtagataaagaaagtagaaaaaaccagctttgagacataaaaaccttattgatggctttgattccgccttgctgtaaagaaaaccaacattgtgtgcatttctgtttaaaagcctataattgttgtcatggtttaaaaggcagaaatgcatcgcgagcaaagctccggccgatgttggcgactcgagccctggaggaagcccatcaaatttcctcaacttgatcaatgacaaccctacagacgtggcgcaggaccctgagaaccctcatggtacctacattngtaacaacagtagaataaatagtgttcaataat

SEQ ID NO: 26380 - DNA, 454 bp, Oryza sativa
  unsure (1)..(454): unsure at all n locations
tagaatgtaaataagaaaaaaaaaattgtccacataacttagtggtggattntctgagtgctaaatagttggatcgctcaagcagtgcttagataccatgtttacaacaaattntggtggtagagtgccatgttaaaccgtagacggcaagtaacacaattctgatggatgaaaaggatagtagtaattgatgtatattttacacaatgtatatggccacttccaagttccaagagcttgcattgcatactgaagtgctgctgttccagatgatcaaaggctcaaagtcatggccatcacttctcaagcaagggctactgtctacacagtgcagtttcagctgccaaacaatcttcactccggttaatttctgctcttgtaatgagctactgtgctggtggtcatctcacctgcctgtagttaanaaactctttaagtagagcattaatttatc

SEQ ID NO: 26381 - DNA, 447 bp, Oryza sativa
  unsure (1)..(447): unsure at all n locations
agcttgccatactcctcttcgagtatggttttatagctttcctaggaggggattcatcacccccatcaaagtgcttgccgttgctccaaccatcttgctatctttgtgggctacggctatgtgatcatttaagaaggaagtttggtatttcaaggggatgtttcataccgctcatcaagttgtcatgtatgtgggaagaaggcatacctgtcaaaggaaagttacacatgcatttatttaagtaatgaaagaaagggtgaaagctttataacgaggaagaatgcaaatgacatccttgatattaccaggggcatgaaaactgtctaattattggacagctcagataagttgactatagagaaatagtccttcgctgctgactaaggtggccagtgatgagacatatttcncaaagagagagagagagagagagagagagagagagag

SEQ ID NO: 26382 - DNA, 443 bp, Oryza sativa
  unsure (1)..(443): unsure at all n locations
nntaattgcatcctcatgaagcattntgagtagtattacattttaaaacatttgcacgcatgctctgtgttcctctctggagtcagctggacaacacaaaatgggtgaccaaagcatctctgtcctttgcacgatgaaggccaacaaagctttggattgatgtcgcaatccatgcgcatgtgagactagctacacgcatgaattcgatcggtatgccaagaactggcatgagagctacgtgtgacttgaccattgctttcctgagcgttattctcttcggccagctccatgcttaattggaccattagccaagtaacatcaacattcacatgcccacagatgatggaaaagatagtgctcttttgtgcctttaatgccttgtcctctggtcaagaaaacaatanggctttcattacaanaggaaattaaccaaaaaaaaaaac

SEQ ID NO: 26383 - DNA, 444 bp, Oryza sativa
  unsure (1)..(444): unsure at all n locations
agctngaagatgagcagtacatgtgacgcttattagactttcggctgggcttctacttccaaggactgattaaaggagggacaaaaagcagacgtcgggaaagagagcgaaaggactgcaggctgagaggagactgggccgagagtgagaggacttttcctaattcggcccgaaaaggaaaaggtgaattttaattacttttccaattaaattaatcactgaaatgatctttgaattgttaaaaatacttctattgctcaaataatttcaagaaaaatcttgaaaatacttggaccctcaaagtatttaacaaaattataatcagaccatttaatgattaatttaatatgtggataattactgaaatgttctttgtatgattaaaattaagaattcagctccgaaaaatccgagaaaattccagagagtataattaaccatgga

SEQ ID NO: 26384 - DNA, 484 bp, Oryza sativa
  unsure (1)..(484): unsure at all n locations
ngaaacttgtgatgaatgcanaacaatgatgaggataaattttgtgttttcatattataaacgtactctcgttgagaaattagaacatctaanacaaggtgacaaaaccgtgcaggagtactttcataactttaaaatttgtatcacttatagtggtttaaaagaaagcaatgagaacacaatgactagattttttagagggcttaattctgatattcaggctgggcttataaatgtgacatataatcatataggccacttgttcatgctttcttgcagcgttgagagcaatattttaaagaacccaagggagaaacaagctatgcttgtgcctcatattanctgacatttgtanggagctcagaacattcaccatgaggagaagagcgatatgctcgagatgtcatctncatcgctcacgaaggaagaagagaagactgatgcacctacattatctgaagagggcataaaanggtaaataaat

SEQ ID NO: 26385 - DNA, 456 bp, Oryza sativa
  unsure (1)..(456): unsure at all n locations
cgactgtcctgtgaggtntacgcccgaacttgccgaccaattcttcgtggcgaatccctttggtgaaagcgacgatgataacgtcgtctgtgatgtctgagatcttgttacgttgttcagaaaatcgccggatgtaatctctaagggattctccggacttctgaatgacgttgtagaggtcgtattgtgtgccgggacgctcgaaggtgccttggaagttggcgatgaagtggtcgcgtaattcggcccaagatccgattgtaccacggtgcaatccatggagccaggatcgggcggaatccgctaaagccactggtaaatagttcgccatggccttgctgtctcctcctgctgcgcggatggcgagaccgtagacggtnagccacgattctgggttagtggtaccgtcgtacttctctatttcagtctgcttgaagccggctggccaatccactc

SEQ ID NO: 26386 - DNA, 410 bp, Oryza sativa
agcttcgcagaaccctcatcgactgtggctgtgcactcaatatcctcttcgccaagaccttggatgatatgcagattcctcgctccgagctaaaaccaagcaatgcgccttttcacggcgtaattccaggattatccgcaactccactcggccagatcactctcccggtcacctttggcacccgggaaaacttccgcacagagaatatcagctttgaagtcgccgatttcgagacagcataccatgccatactcggacgcccggcgttagccaagtttatggccgttccgcactacacttacatgatgatgaagatgcctggtccccgaggagtcctatccctacggagcgacatcaaacaagccgtcacatgcgacaaggagagttgcgacatggcccagacccgcgag

SEQ ID NO: 26387 - DNA, 506 bp, Oryza sativa
gctattacggacactatgaaactcaagcttttatagctggtttgctatggtgaatttcaataatgtagtcaactctaggttacactcatcatattttacaaagcagtcggtatatcactcggatcatgttattcagggatttacaccgcatatgctacatattaatatcaagtcgcttggttaactataattatcgaagccactcggttggttggattatttattccttgactatatgcttggtttgttcacttaaccgcatagtcgagggctacacctattaggtgcatctagtcgatgcacctgactttatttttcagccctccacagtcttcaaatttggtaaaagtacttcggagaccatgacaaagatgattgaagcactcggctctggagtaatctggttcgagagaagattatcttttctactgcgaaggtctcaggggctactgtggagattatggtacctcatacccatacggcatggttatccgactatttatatg

SEQ ID NO: 26388 - DNA, 432 bp, Oryza sativa
  unsure (1)..(432): unsure at all n locations
agcttgacgttgcgaaccactgtttctattaccaggggataccgccccgggtggaccactctgtcaggatgatccgagcggtcaaacttaattatcgtctctgaccaccgaagatattggtgcgtgtcgggctgaacagcgttgatctccagttcggttagcttttgctttctcttggattcataagccaggggtccgccaaagatgtggttgagttccttgcgatggtcttgaaaaccagacggggcatcgtcttcatcatccttcttctttcatgtgctttgatctccatcagaggtcttgcgtgcgttcttggcgtattgttctatgaactgtttgtagacgaagcaatctttggccgcgtgattggagtttggatgatgcggacattgngagttcatgatcttgtcaaaagtgttgacgagtgaacgt

SEQ ID NO: 26389 - DNA, 433 bp, Oryza sativa
  unsure (1)..(433): unsure at all n locations
tccttnaatagaacaatttgcttaaccgaatatattatgattttactactgacaacttgacaactctcatcggctaatcttaagactctgaagccgatgctgactctaagccgatgactactccggacttaccaaatttcactgttaacaaatggaaagttgtttgaaccggaagaggcatgtaatcttcgactatgtgtagaaaacatcattattttatcccattatacgaatgacgttaatacatatagaccaccataaccaggattttggttttataaggtcatgtttgcacggcctcatatctcatattctcattttatccgaacgttataaattaaattactatggtttaagatctcatattttctctaaaatcaaaaatagaggatttacctagatattctcaattattgaagactcagaaccataa

SEQ ID NO: 26390 - DNA, 433 bp, Oryza sativa
  unsure (1)..(433): unsure at all n locations
agcttctcattgtaacaaatcagcaattgccctcagcaaaaatccggtgttccacgagaggagcaagcacatcgctacccgctaccactacattcgagaacgggtggaagatggctccgttcatgtcgagttcgtcgggactgaggggcagattgcagacattttgaccaaggcacttgggcgcacacgttttcaggagcttcgctcccgcattggcgttgccgacgtcaaattcaggtgcaagacttagggggagattgttggatactttgattaagttagcacctgttctaccgctttgttagggtaggttttatctcctgtcttttacttgcatgttttcagggctcggntattagaacgagcgcgtccataagccccgtgcgtatgttcacggcgtggcagtaatgtagcgagtcgcccactgcacgat

SEQ ID NO: 26391 - DNA, 473 bp, Oryza sativa
  unsure (1)..(473): unsure at all n locations
ntacttagaaatattctttttatttgctaataagtgagtcggataagcatatgaataagcgaaacaatgaggctttgtgtccgaattagagcatcattaaacaatttctgaaaacaatttcttcagtagcgatgatcgaaagggattcgttgaactctaacaattattaaaattgttcttgaccacaaattcacctggccatatgattatcattacctattttctgcaattaaatttatgtattttcattctgttatattagtctcctgctgtttaaaattacatatcattctaccttgtcctaatttatgtcaaacatttctatccttgacagtcaatttctagaaaattgtataagttaacaacatgcgaattatatattacaaaagtatttctcatgatgaatctannaacataaatcttatgatattaaactatatgaaattttaaatnntgatggcanaacgtacaaa

SEQ ID NO: 26392 - DNA, 379 bp, Oryza sativa
  unsure (1)..(379): unsure at all n locations
agcttctcccactcagcccaatggtcgaactggcagtggcgcacaacctctctccgagcgctagcggtgacgacggggagcaaaacccgcgtcgtcgagctcgtactccaccgtccccctctcgccgatgtcttgggcgggaggaggtgctcgagggggtcgaaagatccgcgacttcgccgcccacgggcgatggagaaggacagcgagacggngagcgtcgtctcctcgtctatggcgatggcagcacgccccagggcgcgctccaggctgcgggcgcgctcctgcgtcacccgcctgtcatccccgatccagagactccagcccgacgttggctggatgacgtggccgacttggtcatgacggcgcagcagcgcct

SEQ ID NO: 26393 - DNA, 400 bp, Oryza sativa
  unsure (1)..(400): unsure at all n locations
taccacggatcctttcgatgaccaaatgtgctcattatcatttgtgaaacctgtctagaacatcctttggaacaggctgctcaagtgcacaagattacaagggtaaaaacatatcattcaatcagccatcacatgaactatttaatgacttgagtgccatatatgtctgtcgccttcaacggattatttaaaggatacaccacggtactcatcacaaatntctcgaaatattacagactatacaccaaggtattgaaagttgacacatattgggcaaattaggcataaattaaccaatgatctatcacacatattgttgggtataagttacacaggaggcatactcaccatgttggccgccttataattaaaggtaacaataattggaacatgacactta

SEQ ID NO: 26394 - DNA, 422 bp, Oryza sativa
  unsure (1)..(422): unsure at all n locations
agcttagcatatntgctaaatgaaatagttatgttatttagcgtattcactaaaaaaaatagtagaaatgttacttagaatcattatacttgtgtatacagtttcagatccaccatacctgcactatttatgcacaaagagccaaaactgaaagtctcacatgattcatttcattcatgattcagacattgagttggaggcaggaatctgcctttttcgacgatgcattcctagttcagttttaggataatgtcttggtttgtacaggtgatttttgccgggccggccaagataggccaaccaaatttactaagattgatgaatatgtactggtttgtacaggtgttacctgactatttcatttcaaagaccagcttaacctgtttgttatcaccaggntgtggcttaacatattccgtata

SEQ ID NO: 26395 - DNA, 480 bp, Oryza sativa
  unsure (1)..(480): unsure at all n locations
cgttgganaactnttcacatcacttgataaatctttgtcctttatgatgtgtacacaaccttcagcgttgtcaccagtgccacagggctccttaaccgaaagagattcctattcggctcctgcagctacaaattttgtgaataatcagccagtgatggctatgtcttctttgatgtcttctgtttcagagcaatctatgagtgaaatgtcacgaaatactggccctgacagaaaagtcacacataacagaagtgtctctgaaccagactttggcagaacccccaaccaggtgcttcttagactggaatgttttcttgatgtgtttcatttctcttttctgaaattggaactctcacagggtgcaggattagataatgcacacagcacatcatgttcaggtagttcacgttttggatggttgctgcataagacaatgggactttgttcaagatctcatcatcaggtgcttgctaaaacatt

SEQ ID NO: 26396 - DNA, 452 bp, Oryza sativa
  unsure (1)..(452): unsure at all n locations
agcttgaactgtatntaaaaaaaaatgctttaccatttggtttaagacagcccgtgacattcaactaagttgagaaaaatcccccagaccgcagttgagcacactcaacttctcgtggggagcacgcttctaccagtgcctgcgaggggggatgtttcttgggcaaaacctgggttcaagcctgggccggcatcccctctactggagtctctaccactgcgccgcaagcgcgtttacaaagcttgaaatgtacaaaacaggattgtggaaaacccattccatttatcacatttcaatgttcagaagttatttagatattcattggccattggtaagtttcatttccatcatggtgtagagcgcactacatggataaaacagaaatcaatagcatcttgtcctcatgtacaatcctactgggaaatgtacagaatttgtaaacaaatgtacat

SEQ ID NO: 26397 - DNA, 438 bp, Oryza sativa
  unsure (1)..(438): unsure at all n locations
ntaatagaaaaggatatcaccaaaagatcataaagctaataataccgtgttccttttctttgtagagcagtgattatcagatttttgaagactgatatgagcgcaaagcatttgaatccagattgtgtgtgtgcctgtactatatcaggtcgacagatagtgtttacagatttgtaggagccaaaagtcccataccgctatggcaggcttcgctactttattattttattgatctgaagagaggttgccaagtttgattcgacgattttgtcacggatcttctgagttactgtgtggcacaatttctgatgctggttgttgaaccgatgagtngatctgattttttgggtggcaagtattgttgccagtaaaatatatggaagggccgaaagatttggaaatgcactcagcgatcagtttcaataaatcatcaacata

SEQ ID NO: 26398 - DNA, 442 bp, Oryza sativa
agcttgctcacttaccgatcaagggtggtgtagtttgttttgtgaatgcctaaaatggcctatgtttatgtgaggttttgatccttctatgtggcatgagatatccctgggtcggcttgggaaaggctttgttgcgaacctccgataccgacgggtgttcggaataagttcgtatcttgtgggtaaagtgtacccctctgcagaggttaactaactgttcgaacagccgtgcccacggtcatgggcggatgtgaggtggttcccgttgcgtagatttgtttgcctgtgctttgtgaaaagttgttgtggtgtgggaatcgtaaccagaatcagcctatgtggcagatggacgacctgagtggtcagaaacgaatctgtgtgattcgggatgtctgcgggcatcatagactatgctctccgagtggaagcggattgttgtgct

SEQ ID NO: 26399 - DNA, 356 bp, Oryza sativa
  unsure (1)..(356): unsure at all n locations
agcttgcacagatcaaattgaagctcanagcagcctcttatatgtcacagtaaaagaacataactatgttgcttaaaggatagcaattgcatctcattccaactatggcgaaaaatctataatgaccctgcttaccttcattgcccacaaatcaaccaaagaacaaagaagtggtacaagaatttctgatggctggtgagatatcataccaggagaatagtaacccaaagttttgatctttgaccacaggccaaatacattctgagcgctattcaagattacctattcagatgacaacgatgttacaagcatgatcagaaaaagccaaaggccgaaagatttattttgtttatata

SEQ ID NO: 26400 - DNA, 448 bp, Oryza sativa
  unsure (1)..(448): unsure at all n locations
tccctgatcgtcttacccgcagcactataaaaggacgaaatgggtggcttgntggaggcaccaaacattcagagacatcgagctctctttgatctctcgctgagctaagctagcatttgttcatctgaagtgttattccagttaagttcaggttcagtagcagcagagggcgagctcttttcagagtaatcgaggatgcctgaccacaacggggtgaagaagagcatactgagcgtactgtgcggctgcttttctccaccaaagacgaaaggttgagatgagatcatggcttcatgtacatcgatctgtagtgttattcatcttgttcagatctagaattgttctgtgtacatgagaggtaataagaggccggtgtagtggccgtgcgtcccagtccatcaggtagttntccattgattnngattgactcctgaggttatagttgtta

SEQ ID NO: 26401 - DNA, 460 bp, Oryza sativa
agcttaaatgccaaccaactccaagcagtttcagatcaaaaagctcatgacaacggaaaacttgaaaaagaaaaaaaaaactttacaagtcttaaccaaaaaaactctaaatttacacacacacacacacacacactaaaggcaacacattcttacacatttcaaactccagttctatagcgcaaaacaagacttgagtgttgaaatatgaagaaagtttcccaataagacgagagaaaactgaacacgtcatcacaaataaagcacgagatattcccaaacgcagtttgcagcataagtcttgccatatgagacgcctagttaagaacaacgtccatgcatccactggcactcaaagctcatgactggaccatatccacaccccaccatagctgtggaagaattatggccatggagttgatctgacacaaatgcacaattgctttgcagaacaactagc

SEQ ID NO: 26402 - DNA, 480 bp, Oryza sativa
  unsure (1)..(480): unsure at all n locations
tctacagtcatgatccatcttcaggccataagaatggattcactcttcagatataggaaaaatgctatattctcaacaatgtcgatgcatcttattttgagaaagcttgtgagctcaatacagatttccttatctgaaaacaaaaatggtctaaataaccactgagagagaaactgggatacaaaacatgaaaggattggaagggaaataatacgtaccacatctcagcaagcactgtaggaataaaactataactcagcaacaactcacacaatcagaaatgaaggctgaatttattaaccatgatacaaaatggccaatacaacactttntaactaagtattggcagcctgccaacaaatgggcatcccaactcctttgtctattgactcatagtcgcatcatcactcanaagtgaacagtaacgagcatctaaacattagtagtgttgcactttgaaacatcaaacaccaaaacaat

SEQ ID NO: 26403 - DNA, 433 bp, Oryza sativa
  unsure (1)..(433): unsure at all n locations
agcttgtccttaagtcataccatcgtggtagtagaggttagataggactattgcttagtctctcatcctcagcttgaagactcgaccataccattgaacatactctggcggtccatacggtccagtagttccaagtggaggataagcagtcctgacatcgacgcgcgaaggtgggtttctttcaatatacattccaacaggtggtggaatatcttctgctggtgcaagcatggcatcctcaccaaacatgaactccggtgtataatgtccctggcgataccttggcataatgcttctttctaaagtggctaccctggtgcggacgcgttgcagctcagcaaaggttgagtgataaagcatatctagtgagcgcacaaagtttgcaagttggaggtatggngtatgtagtcctacacctatttcagctaaccct

SEQ ID NO: 26404 - DNA, 463 bp, Oryza sativa
  unsure (1)..(463): unsure at all n locations
tcttccanaactttgaagtaaactgactgcctcgatcagactctattttcttagggacgctatgcaaacacacaatccttgccatatacaattccgccaaccgacttccggaataggttgtctttactgggatgaaatgagccactttggtaagtctgtcgactatcacccaaatagagtcatggcctgatgacgttctgggtagaccagtgatgaaatccataccgatttcctcccacttccattcaggaatcttcaaaggctgcagcaaacctgcgggtttctgatgttctgccttgactcgctgacaaacatcacatactgctacgtattctgcgatttcacgcttcatacttgcccaccaaaatctttccttgagatcctggtacatcttggtactaccagggtgaatggagtataaagtatcatgagcttctttcagaattgcatcttttaaatcttt

SEQ ID NO: 26405 - DNA, 395 bp, Oryza sativa
  unsure (1)..(395): unsure at all n locations
agctngccgttgatttattggtaatattttttcttccactngtattaattgtgccaaaatggcacttctttctgtgctccggccatagttttcgaccgtcggggtcagaaaagattgggctgaatcaacgatcgattgtttgatggtcatatgggactgaagaccgaaatgctgagctctagcttggagcaccaagtcaatggctctgtttaaagagctggaggtttaagaagcagctttagctagtgagaatctgaaagctactgcttcatttttctgaattctgtcggagtggttctagagtccttcctctcagaaggtcatatgtagtctttagctagcattgcccgttttggagatttctcgggagtgtagcgttagcgtggctctacccc

SEQ ID NO: 26406 - DNA, 344 bp, Oryza sativa
ttcaccgagtctagggactaacctatctaacgattcaattggtttccaccattgtcagttaaattacggaaatttagttagcagaatattagtgcctaatggctgacagtactgaccagtgaccaaagatcacctggtaatggtcgatcaccatcaaatttcacctcaagtaggagcacttgtgattttgtgaatacaaataagctgattatttcttagctacaaaagaatgacatgagttttctttctcacatgagattggcttacgaattccacaaaagaaaaaaaaaactttacatacttctgtacgcgacccgaaacgcataaccgatttgattctacac

SEQ ID NO: 26407 - DNA, 422 bp, Oryza sativa
  unsure (1)..(422): unsure at all n locations
agcttggtctanaattcccgaataattagtcttttatgattatattggtaataatccggcaaaggggggattattcagagcaggctcaatggacaatggggatggaatagctgttggatggttaggacatcctatctttagagataaagaagggcgcgaactttttgtacgccgtatgcctactttttttgaaacatttccggttgttttggtagatgaagagggaattgtgagagcggacgttccttttagaagagcagaatccaaatatagtgttgaacaagtaggcgtaacggtggagttctatggtggcgaacttaatggagtaagttattctgatcctgctactgtaaaaaaatatgcgaggcgttcccacattaggggaaattttgaattagatcgggctactttgagatcagatg

SEQ ID NO: 26408 - DNA, 485 bp, Oryza sativa
  unsure (1)..(485): unsure at all n locations
tctgcaatntctgaatcaccctgtagaatggcctgttctcttctgtcggaataggtagttccttcccctagaaccgtacttgagagtttcctacctcatacggctcagaaattgctatcttaatttcccttgtcttaactgaattcgatttctcaaaaatcgatccaatttcttcttgggttacgcagaagaagttaattacctaagtttcaaaccctaaattttgatcaataatcagtttgatcttttctcccacctgcagaaaaatgaagcatagatagacctatatccttcgtccgaattttctgaaaggtaactatctcggtttcatatatgaaatttctatagaatccttgaaaaagactntntccccataagcaagaaaaaagaacttactatctntgggatctgatactacaccgctgcttaatcccttagtggatcggctctattacataagcggattcctaaattntgccccatat

SEQ ID NO: 26409 - DNA, 441 bp, Oryza sativa
  unsure (1)..(441): unsure at all n locations
agcttcagatagttggagaagctatgtcttgatatctgcatatagnnngngcaaggaaaaatgtttaatccttgctatgttntgactacggtgtctcgagttcaaacggttgtccaggctgacagcgtccgtatcaaactgttgcccgtagcatgttttgggagttgggacggcacggttccaaccctccaataattttctggagctgtatatgcattaataatgtgtagcattttctaatctgaaaatgtagtggtcaatattagcaagcattttatgcattaatagggcatctactaagcgaaacatgttgtcacttcgtcagtgttgttgcgcctangtcaaaacggtcaaaaaaactatcaaacttcgccacaccttgtaatgtatccgacatggacgtataatagaagcattaagagcagatcattacaaactttg

SEQ ID NO: 26410 - DNA, 440 bp, Oryza sativa
  unsure (1)..(440): unsure at all n locations
tcctaattcccatcctgatgctcgttggtcgacatgactntttcaccactatgcttctcttccattggagctagcttctactgattgttaattaattactgtcaaattagctatagtttactttgcaaatcctacgctgacttcgagagatgctgcctttattagtggcagatggcagtagttcaactgctatgcaattgccactgtccttgtgagaggacatgaaagcatatatgcaatcagaaagtaataaggttgtggaagtctctgcagtctgtacctaagctactgtataaaatttcttaatgaggctgaagagtagaagctacattctcctaggttctttctgtattgtcattctgcactaaccagctttgatgcatggcatctttcagaatattagttaacatgtctcttaagcatgccgtgaaatattttca

SEQ ID NO: 26411 - DNA, 441 bp, Oryza sativa
agcttctagaagattcaccctttattttattactgcgaccaacagtcaagctcacaaaggtgagttctttcaagaatgctctgcaggacaacatctttgctaattaaagtcaacagaactcattaaggcatagccaacctgccttgcagctcacgagagtacatgcatcttcacttggagagggtatatatattgatactctcctctagtttactaatggtttgttcttcccaggatctaattcacgggatctccgatcacatagactgggttaccaccatagtataactcatatgggtctcaaacccatctccttcgatgcattgtctatcacatttcgtgatagtcccttcgtgaagggatctgccaggtttctcgcttgttggatgtaatccaacattataacttcggagtttcttaatttcctaacagacttcaatc

SEQ ID NO: 26412 - DNA, 431 bp, Oryza sativa
  unsure (1)..(431): unsure at all n locations
tcaatcctttgaatcaaatggacaaatagaagaattttctatatgatntgaatcatatgaaaatcctacataaatcctttgattcaaaggggcccttattgcatatctgctatggttattgaaactttgtatagctttgatatttatgtgtacaagatatttaagctaataattgcatactcccttcgttccaaaataactcaacctataattggatgataggatttgacctatcctggaacaacaattctggacaagcccttccgagctaggttatatcctactctangtgtgtgttatggttctaagttactccattttggaacagatggagtatctgttatgggtattggtatggntattgaaactttgtatgacttggatatttatgtgcacaagatattaagcaaacaattgtgcaaggtctgtac

SEQ ID NO: 26413 - DNA, 363 bp, Oryza sativa
agcttgaggtctaacagtttattgattgtgtgattgggtgattgcgtgggattatgttccggatggtcactactagaaaaagcatttttgccgatgttgggtatttattttcgcagtcaaacatgatcctcggagccaaatagccacctacaaaaatgcaaaccggggtgaaactcgttgtccacatgcaaaaatacccttcatttttgcaggcagacctcttatatggtccgcttgcgaaaatagacttggaacataaatagaactgacctaggccagattttttctaagtccttaatctccctcacctctcctctcccgtgtccctccccttacccctcccctcatatattcttctctccc

SEQ ID NO: 26414 - DNA, 474 bp, Oryza sativa
  unsure (1)..(474): unsure at all n locations
ttnggttcctacaagatatattgataagatacacatgatgatttgtaattagttagctatatagggttacatgtataaacgaagtgaaaaaattacttanatggaggtaattgcaaatttatactacatacaaccgttcatactcctacataattaattttgcagtagcagttgtttacgaagaacctgcagtatttctaaactgcccactggcttattatgttgaacgaggtatatctagcagatttgatgatgatgatgcttaattcgtttggtcatgtttaattacattttgtagggtatacgatgtaccctacacaatttctccaatttgtgctcagttgatcgaaacaactcgcatggtgcacgcgtcgcatgatggacaaacaagtgcagtggacccagataacatgaggcaacaatgccaacatgtatgagctaagcgacaaccggtcagttgacaactttttttaa

SEQ ID NO: 26415 - DNA, 439 bp, Oryza sativa
  unsure (1)..(439): unsure at all n locations
agcttgaggaaatattatatgcctacacttgtgaacaaccacataacttatagttttcatccaactgaaacctgcaataaagacatgacaactttggtgtgtttagttccacgctaaaattgatagtttgaaaaaattagaacaatgtgacgaaaaagttaaaaatttgtgtatgtgtagaaaagttcgatgtgacgaanaagttagaagtttgaataaaaaagttggaatctaaacagggcctttggcagataacactagtccttagtaggatggcttcatttaaattatctggaagcctactattttcggatgcgcgcgcgtcttctgctcattgcgctaatcttctagcttttttggttggaattcctatttcacacgtcttgtgcgacatggacggctgtgggatggcgcagtgcttgtcatcatggagtacgta

SEQ ID NO: 26416 - DNA, 411 bp, Oryza sativa
  unsure (1)..(411): unsure at all n locations
ggggaggtgcaccacatggacgtcaagtcagcgttcctcaatagtgagctccaggagatggtatttgnttagcaaccacccggcttcatcaacgccaacgatcaaggcaaagtgtacaagctccataaggtgttgtacggtctccggcaagctccttgagcgtggaacgccaagctagatagctccttgntgtcgctgggtttctgttgcagcagctcagaacatggagtctacacacgtgccaccgccggcaagcgactgatcgtcggtgtgtacgtggacgacctcatcatcactggtgatcacactgaagacatcgctggtttcaaagaggagatgaagaatctcttcaagatgagtgatctcggaacactcaaatactacctctgcatctaagtgactcaacgcagt

SEQ ID NO: 26417 - DNA, 437 bp, Oryza sativa
  unsure (1)..(437): unsure at all n locations
agctnttggcactgtgtttcatcgggggtttcttatttcataatacttgtgttctgcagcctagtaatggaccagtggctagtctccctgaggtattacagtttccatgttatctgtatgtttcattgtttttatttttgctgatctgtaatgaattaatacaggcacattaatcttgctcttactcatgcatcgtaaataatgaagcattttacaattgtcactgtttcaatntcaggtcgatgctccactggatcctgttaaggagctaagcagactgatatctgagcgcaaatttgatgaagcatttacaatggctcttcaaagaagtgatgtctccatagtgtcttggctgtgctctcaggtattatagcctcgactatgggtattgagctattcccattttcatcctttgcgaacaaacacaagaatgtcta

SEQ ID NO: 26418 - DNA, 475 bp, Oryza sativa
gagcgatgatgatcaagtgcaccacactcataacaactattcggtttttctatctcactgggcctaacattttgatagctcgagaaaattcgatagataacaaaaccaagtcgtcgtcctcgaactgttcgagatgttcatcggaaatggcattaaataaagcataaacagaagacttcgatgaagaagcaccaacatccaaagaagtcgaggaagatatcaaagcactagacttataatcaactttacgagcaagaatattcatctcatgagtgtttagttctgtgtaaagcgaatccaaagtcaaagtagacatatcaacagactcctgaattaatgtaactttcatctcccaaatagacatgtcaagaccattcataaagtgaagagatatctcatatagtcgaataatagcatcataagaagactcaacagatctaagatcactcaaaactttattataccgagaaagata

SEQ ID NO: 26419 - DNA, 449 bp, Oryza sativa
  unsure (1)..(449): unsure at all n locations
agcttgcagtggaatntgtaaaccttgcatctgttataaaaagggtaactccattttgcttccaatgcaacagaaagcattgtaatggacatttccaccatgcaacacacaaaatcttcggtactgggactatctcaactccttatattaaacaaaagcaaattatttaactaaacattaggagtaaattatgtcataagtcgtcagggaaattaacagattttcacactggccactcagcacacacaggagtggtcgaactaatttcagctaggcagtctagctagtggattgatacaactacaacacatagtagcaggttaaaagctacatagttaagaaagaggacacggcgctctctccatcagtggatatatggtaccttgtactgaacctgatagccattaccatagtatgttgtgtgggcaggtgacatgccatanggagct

SEQ ID NO: 26420 - DNA, 460 bp, Oryza sativa
ggtagatattgttgagatataccagcgccacatccaaagctgtaaatgtttgagctaaagccacaaaatgagcataacgactgaatttatccaccacaaccaaaattcagtcaaatgtagaagatttcggcaaaccttcaataaaatctgagagagaccgtttgccaagcatgatcaggcaccggtaatggttgtaattaacctggatacttcactcgttctgcctttgcttgagaacaaacagcacattcagtcacaaacgtatgcaccgctttcttcaatcccggccaagcaaacaaacgcttgattctgctgtatgtgacctgaattcctgaatggcctccaataacgctagaatgcaaagccatcagaattttatgctgcaattcagagtgaacacctatccaaattcgacccttgtaacgcaaaataccattcaccagagtataattgggatatt

SEQ ID NO: 26421 - DNA, 447 bp, Oryza sativa
  unsure (1)..(447): unsure at all n locations
gaccttaagcacctgggctgcagctntgtaatgggatcctcaccaacgcttataagttgatcacaatgaaatcaccatgagtgctcatgtcatttccaaaaacattttcgacggcagacaagcactctctcctgtgctccacttgaatggtctttttcctctgcgaaaaggagtcatgctcaacatttgattgaacagaatcacctatcaaaaatgcttacatgataaaccatatttgcaaaaagagaaatcacgaacatgaaattggacagacttcacggcacttacatgagatgctctcgagctgttcggcagcaaggacaggtgggcttgacacaggcatatatctaacattacagtctgctagatgtgtcgacaagctctgcatcaaattcactatgtgaaactgtgatcccagtaaagctaagccagctaggcaagtttata

SEQ ID NO: 26422 - DNA, 413 bp, Oryza sativa
tagagtagtttgactttgaccaaagtcaaaacgtcttataactctgaaacggagggagtacaatattatacttaacaaaaaaagagttttaaacgaaggtaaagtatattgtcaaattgctatttagctatcaaagagctcaccgtctgggtcttgtgtatcaaatgccttatttgtgaagggagaaatagggcatttttttcacggaattagaactagtttgtatgaaaaccagtcaaatttgtgttctagagaaggtctaaattatgttagttcttgttagctaatcatgtcgcatggcacatgccaatgttacttgagtacttaatatctcgcatcaggtctgccttgagctaccacatgtgttcatatcttggtttacttgtgatcaccaccggtcgcgctcatgaaat

SEQ ID NO: 26423 - DNA, 434 bp, Oryza sativa
  unsure (1)..(434): unsure at all n locations
agcttgtctacttggtataatttaatctatccgttcactgttcattttgagaaaacatatctaaatgtgtgtgtacacaaaattagctagcactcttcgatctttagnttcttaatttctttctctttccttctttggttctatctgaaagaaaaggctagctcgcacaccccccaccatgataaactctttgatcatgaacctacccacgtgcacctaatcttttaagagtctatttgactcacaaatacactattccatccaactcgtgtaagccgtatacatgtattcgtacatgtaaacagggaattaaatttgaaaagatattgttcattcaatttctttttagaatattcgggatgtaaatttttttcagaaatataccgtcggtctcgcccaaccgttgtgtgaaaatgacatgagagtgacgttgc

SEQ ID NO: 26424 - DNA, 505 bp, Oryza sativa
ggacacttgaaactaagctaactcccataagtacctgtgatctgcttcaacaagcactgatgctctaacatacttgaccctatctcctgaaatagttaaacaaacaattagaaaagttgttttgacctttggcaacttttcgacctttgttcaagttcagtaagtactaaggccccgttctttttagctaatggaggtatggattattcgtgccatgccacgctttcaaaagtacgatttctccaaaaacattctgcatcaccgttgcttcaataactttttctaagctattgttacctttataatctatagtatttaattaatccatgtattaattaatgagcggataagctcatttggacaggccctaagaaggtctagcttgaatatcatatttcaccagtagatacaatgctatgaacaattaagccaatacttagcatatttgccagggcgttgcaacagctctcaaataaacattccataagtctagccatacataaat

SEQ ID NO: 26425 - DNA, 430 bp, Oryza sativa
  unsure (1)..(430): unsure at all n locations
agcttatgtttaatacattatacctgtnttaatatcttgatatagagtagtatcggagtattagccaatacacgctagatttatctgatcggctatgctataaacatatataatcctgttattaatatatatttcgatctaagtgatttatactgtctcggcatggtgaccgatctatcccaatcacttggattaagtatatattaatataagaactatatatcgttaatatctacagccgatcgaataaatttagctccttactatctatttataaccgccgatcgattcatatatgacatcggctcaaagataaatgatatgtcatcggcacctagccgatcggctatcatttatagatctaaccacgaattctttgtctctatttcttggtgattacaggatcaaatcaactagcacgctcatacat

SEQ ID NO: 26426 - DNA, 390 bp, Oryza sativa
tcgcagaaccctcatcgacggtggcagtgcactcaacatcctcttcgccaagaccctgtatgatatgcagattcctcgctccgagctaaaaccaagcaatgcgccttttcacggagtaattccaggattatccgcaactccactcggccagatcaccctcccggtcacttttggcactcgggaaaatttccgcacagagaacatcagctttgaagtcgctgatttcgagacagcataccatgccatactcggacgcccggcgttagccaagttcatggccgtcccgcactacacttacatgatgatgaagatgcctggtccccgaggagtcctatccctacggagcgacatcaagcaagccgtcacatgcgacaaggagagttgcgacat

SEQ ID NO: 26427 - DNA, 446 bp, Oryza sativa
agctggaagatcccctctgcattttcccctatcttccgccacatgtagtaatgatcactggccgatggtcagagtgcctcggatccccattgacaacccgaaagctcggaaacttcaccctccattcctgatttgccaccgcccggtccagatgctccctaatatagccctcttctgtgtggctattattccgccaggtaaacatgtctccctcaaaaccgatgtcaatgaggccacaatcagctaaagtgtcccggaacttgtccatctgagcttggcacttcggcctacctccctgtttttctgcagctacgagtatctcattaaaatctcccgccatcagccatggctgagctggattcatcgccaagcttcgcagagtgtcccatgtcttgaatctaagatcactttgtgcctcttcatacacccttatatatctccaactt

SEQ ID NO: 26428 - DNA, 495 bp, Oryza sativa
actaagcttatacgaatacaaacagctctgacttcctatgacgtactgttaactgtctcaaaaccacctaacactgtgattgtgtagtaggaccttctggatgaaacctcccagaagaaaaaacaacgtcaaagacactgccaacacccattcggtaatcggactaggtttttacgtgaatgaagagaaccactatcatgattcctccaaggaggaaatggtgtccacaaacatcgacatcactggcaatggtcatagaggcttttgcccaaagctgtcacatctgctgaactcgtctagcgatgccataatgaaggtattgtgggttatcgttgttcagctcgccataccggatgcactagctccgagtccaccataactttatcattccaactccactccacatctaaaccctcaccacacagccaggacgagaaccctctcaatactatctatgaatcaactaatcgacaactacttaacatgacagatccg

SEQ ID NO: 26429 - DNA, 445 bp, Oryza sativa
  unsure (1)..(445): unsure at all n locations
agcttggngagttnttntcctcacttagtttattntaatctgatcaaattgtgtgaagattggttgagtagagcactcgatttgagtaggagtttgtcagctcgagtgactacagtttcagcttgtgcaacatttggtagaatgtcaatttaaggggtgaaacggtgtctgactggactgtttttggactgcttggaggaactcatagatcatcatttatgccaagttttgtgcaatctgcttctgtagtttaggagatatttgctaaaaactgaataggacaaaagttgctacttctactacttgatgctggtatacttctggttagttgctacggctgatgttgatgataccaagaaacttgatgatatagctactggtgcgatgtgtctctagatgtcttagagaagactctacttttatccattgctgatgcgcggatcgg

SEQ ID NO: 26430 - DNA, 414 bp, Oryza sativa
  unsure (1)..(414): unsure at all n locations
gcgagggatactctatttcgtgttcttctcgagctagctcgatgatcatatatgcaggcagaggccgctggttntcacgttcggctagctttagagaggagcaagctaaaataagcttatagctatatacagaccatctttacagtagtgcatgacagaggagaaccacgacgatacagcgagagagagaggaggctagaaaatgtttagcctcatctttccgcttatgatagtatgtcaaaactgaaatttgaagtttattttaggattctacattgtggattatcttcagctattgcttgtatattactaagaacacatatataaatattctatatataaatcatgtttcgcttccatatatatcgtgtggcaccggttgatctatacttgtatggttgcttcaacggcaaa

SEQ ID NO: 26431 - DNA, 460 bp, Oryza sativa
  unsure (1)..(460): unsure at all n locations
tgtcatcattggagatggatacaaagacatagcatatgggttttaaccttcattntgcttttgtatcaatgctaacatgtcaaagctgaagtgctccggtttaagctctggtagtggcacatccccatcgagatattgcataacttgtcgcacattgggcctaacattaggaaatgggtgcgaacacatcaatcccagctttagtacaagacatgcttctcctatatcatagttaccttggatcttgatatccattgtatcaagaagtgatcctttgtgccagttctgaagcacccaatcaaccaagataagttgtctgccttgtgagtcttccttgataggcttttgcccacaagtaacctcaagaataaatatgccaaatgagaagacatcagtaagagtgggtgcctttcctctgtgtactagctctggagctaggtatcctatcgtgccacaacat

SEQ ID NO: 26432 - DNA, 351 bp, Oryza sativa
  unsure (1)..(351): unsure at all n locations
agcttgtatagcacgaactatgcactcattatgcccagcttgattcatacctatgaacatgcacagtagtgagattaacagagcaacaatgaacagctcaaagtacacatgacattntagtagatctgctgacccagatcaaatggatggaaaagcatctttggcactatgaacctctcattggtcaacacaaattcctgaataggaacaacccagttagatgatgccaaataatattaagcatgtaattatagctcgagatggtacattttgactaagttcaagctttttcttatccttcaacttgctcctatcgctgtcagaactattctttctaaccgattcttcatt

SEQ ID NO: 26433 - DNA, 474 bp, Oryza sativa
  unsure (1)..(474): unsure at all n locations
tcgcggcggattggagatgacgcagaagcagagccagttcatgtgcaggggaagaagaagaccatccctcccaaccgccatggcaaggcgccccacgtccgcaaaggtacccccgccgcaaagatctaccggcgcctccgtccgtccttccgtgccgttctctggtgctcttcgatgcttccctgtcgccctgcgtgttttgattggtcgctcgattcttgcagggaagagggccgtgaagccgaccaagttcaccaaggacatggacgccgataaggtagactcggtttactgaatgcttgctctattcatcaatcagcacctgctttctccctttcggacataagatgttatttggggcagcatttggagattgggggtctagccttctctgagctctgaagtaggcaagaaacanacatgaattaaactagtgatacatgcaaaccacatatgttctggttttgagtgata

SEQ ID NO: 26434 - DNA, 441 bp, Oryza sativa
  unsure (1)..(441): unsure at all n locations
agcttcggcaagagcttggcttgtattatcttgaaaccgggtgaggagttcttgcatccgtcatccgatatataggcgctgtcacgagcatgtccaacaagatcgccgccgagataagccttgcaggcatccagaatgtgcggcgcgcaacaagtgaagtgctccttgacaaaattctcgaaatgcttgatcaaggaaaagaaagaactatcagtatacacatcttatttcttaaaggggtgactcttacagctgacttggttatatataagattaaacatactaaactcttgtgagatccagtaattcacatgaagcattacaaactaaagctatagcattcttaattctgaacagcgtttagattttggtttcacaagattccaaacttctttgaactataccaatcattctgaaacatggatgtngtaaaatgtattt

SEQ ID NO: 26435 - DNA, 476 bp, Oryza sativa
  unsure (1)..(476): unsure at all n locations
tggctctattttctccatcttatgaaagaaaaacttatattttattatgatgtgacctattttcaaacaatgagtttaaaccagagcttctgtagattcgctgtttcactatatgtcacgacttatttttgattaagttttgtttggacggaagaagtgttctttgcgtggacagaaatcgaaatggtactccctccgtccaaaaaaaaaagataaacactagattttcgtatccaacttttgactggccatcttatatgaattttttttataattaatatttttattggtgttaaatgataaaacattattaatactttatgcaagacttgtccttttaattnttttttcataattnttctaaataagagggacggttatacgttggacacggaaattttttaaggacggaagaagagtangaggtatgaataggttggatcggcgatgacaggcggtccaataatgcagatgcg

SEQ ID NO: 26436 - DNA, 364 bp, Oryza sativa
ttcaatttatcgctcagcttagacatcacctgccgataaatccattctggattgaaatcttgggacactgtaacccaaagagagttgttgaagccatgcgtagtagcactacacatttcgcacagcagatgcctggtgagcttcgtcttcccggccccggccattcctacaattacgaccactttcgttccaggatgttcgaggatctgccgtaccttacatctgtcctgttctcttcctttgacaaggaggttggcttctttttgatcggcaagagaccacgtatcgtctgggtcagcgccgagaccaagctctggctgctggtgcttcggcggcggcaggagatcggcgacgtatgtactga

SEQ ID NO: 26437 - DNA, 472 bp, Oryza sativa
  unsure (1)..(472): unsure at all n locations
tgctggagtaaagcgagtgccctcaacananagggctagccttaatggtctggggaagtccttcaacctttggaggccccactataagcatagcaagaccactaagttaaagaacaaacaatagaattatgtgtgtactgtgtagatgaggtaaaaaagttactttcaatgtcttttcatcctttgcccagctcctttccaaaaagaggtattctgcaaaccacatggaccagccaataacctgcaaaatgcaatcacaacattgagcatgtctgcatgcaatcaaaaccgctaagtactatatcagaagatagataactgaatgcttcgcatgtctgtgtgtctgcatcactgagatactagtgcacattacattangttatggatctccagtaattacaaagaactgaacccgataggctgcttcttcatcagaattctagcaaaagcagaacacatcttttctgatctt

SEQ ID NO: 26438 - DNA, 444 bp, Oryza sativa
agcttcgcctcagactccttgtaagagatttcattcttggtcatgccacccgatctgcctgcagggttgaactcgcttttagtgagctccgcactcgacacaccaaacagctgctcaaaaggttgcttagcccaaagggatcttgcacttgggtttgggctttgttgcattgagaagatatcccctgggagcttatgtggagagagctcatcaaacgccaagggagctgcaggcctggccaccgagtttgtatactgagatctttccgatgcaagcctgctaaggtacgactgggatccaatggtaccaccacccaactttgattcattcaacagagcactcctgcttgcagcaatcagtgcagatatgtctggtgagctgtggtacttctttgagtaagctgatgaaccagcattttcattcccgtcaagagtggaagggaca

SEQ ID NO: 26439 - DNA, 439 bp, Oryza sativa
  unsure (1)..(439): unsure at all n locations
agctcanattaattagccagtggaaaatcaaattacagagttgcttaattntcttactagtagaacgcaacagtaaaaagaattaacagcagtgaattattagttaattagctagggagttgaaatagtttagcggtcatgcactactgatttttaattagtgcagacaacgaccgcgtgtgtgtatatgcatgtataccttttactgtatcttcagattgtgtatatatatcatatatgtacaggaaaagatttatatatcatacatattttgttgtatatatatacgtatatttctgtacaagtatatgtagacagtattttgtcatcttaaataattttttatcatattttaggctgactttgctggttgtcggattggtgcaaacatgtacaattaatgttaagaaaattaacgtagctaatgtgtcaacatgtt

SEQ ID NO: 26440 - DNA, 451 bp, Oryza sativa
agcttctattccaacaacagatttcagattataaatttaatccattaatgatgtttggctgtcgttgaaagatttgaacatctgcaacatgaaaaaaacaatgcaactcatatagcactgattgatagaaaaacattatctattaatatccataaatttgaaataacttagttctgtgaaattaaactacgtaaagttccttggaccattgcaaattgaactccttgtgtgtactcatacttggagagcactagggttttttgtctttttggaacagctctaccttaaaaagtgcaaagagaatacaattcacaaaaaaggtagatcaagacacagaaaatcccaacataatagccaaatgaagtgtactgtgcacttgcttcaattttcaggtgtaacatctatatttataactgaaatcctatagtaatagttgcaatagagtagttat

SEQ ID NO: 26441 - DNA, 380 bp, Oryza sativa
  unsure (1)..(380): unsure at all n locations
aactaagcctatcatgacataccatgacccaaaggtctctaagcttatctttgttgccaaccttctcacccacagcgaggaagccctccaggaagctatcttattatcaaggcatcagttggagtcaatgaaaagttacctgaagtccccatttgctgagcaagtttcacgagcctcttagataccatttgtccacatacttgaagagggtctaggccctatcctatatattagagnacaatgtacacgagccaacattcaacccctggatacaggagctgtcaatctatacttaaccgtctgtaacatattctcccaatggagctcactacaattactctggtaatcatttgtgcgtgctctaaatatataaaactcaa

SEQ ID NO: 26442 - DNA, 421 bp, Oryza sativa
  unsure (1)..(421): unsure at all n locations
ccagtccttttctggaacaagggtagctgcaatcttctcaaactcccgaagtaattctttctctgagtgaactcttactggttccactggtttttctggtatatccgtgtcccctggtaatgaaaaaaaaaaaaggtatagtacacaaggaacatagtatatgtatcacaagtgtgaaatatcaatcataatttggatacaaatttcaacatatttgctggcagaggaccattcacttctaagaaaatactggtttattgtggtacattgtatactcaagtgctcgacagaagtttcaggaaagacagctcaaccacatgccttcatattgcattaaataaaagtagtgctccactaaaccaagaaaatatgtaagagcattngaaccggcaaaaaatatatgcacatcaacatatgaaag

SEQ ID NO: 26443 - DNA, 474 bp, Oryza sativa
  unsure (1)..(474): unsure at all n locations
tctagaactgagagagagaaggttggaggtaggaggagaggtatgggttagagatctacaagggtgcccaccggccgcccaagtcgccgccgccgccgggagcttcagctccgccaatccaattgatcaatcgatgtgtgctgcaggagcagcagccttcactttctttactgttgcttgggctggcttgggcttgctttggagaatggatgacatggcccattagagctcctaacactntagctcgataattttcagtaactgaactcgtttggctgccttgttcatgtactgattaggaaagagtgaggtcctttattgctgtttagtctttgtctgatttactgaacagtagcagagttcacagattagcatgaacaatggttttgttttgtctcttagggtggcttgatctggcatgtgccgtcactcgatgagacatcacgtgttctagacactcttcatcacaaaagc

SEQ ID NO: 26444 - DNA, 444 bp, Oryza sativa
  unsure (1)..(444): unsure at all n locations
actttatttacttacctttttatttttatttctaaactttattcaaattaatccaaaaacttgtgctattaattggataaatgtcttaactcccttctttcacttgtctttaaatgccgcgctacaagcctgaatacttgtttggtgttgaaggtttttgccaagagttgcgtacgatatcctttgtcattggatttgggacttgccctttttatgcccagattcctcatgatcgtcatgaagagaagtgccgagtcaaagtcaccttgaacagtaatagtgaagatatcccctcagtgatgttcgaagctggaggaagaaactacatccatgcatgtcangaggtggcaaggatcgccataggagagctccgcgatcgttatagtgatcagttggccgacactgagtatcgctaccatcctcgtcaaccccagggaagtgacc

SEQ ID NO: 26445 - DNA, 462 bp, Oryza sativa
tcactaaatataacctatgtgcaccagcaaaacgctgggaattgaatgtatgagttgcaccagaatcaaacaatattgttgccggtatcgagttgacaggatatgcgcccaatatgacctctggtgctgaccgtgcctcctctgtagacgcatgattgagacgggcctgaacaagcttgggtccagcacgtcttggcttcgggcacttaccaaccatgtgtccaggtttgttacaattgaagtagagttcgggcttttctccaaacttcttgagctgttctggctgagttggcagagttggctgaactgactgagctggactcattaatggacttggagtcggattgaggctgtgctgctcgctgttgctgtgactgccactcttggagttcttgttgaagctaccccggtggtagggacagagctgtcggatattcatggttgaatgtccaccctgatgtc

SEQ ID NO: 26446 - DNA, 411 bp, Oryza sativa
  unsure (1)..(411): unsure at all n locations
agcttatgtttaatacattatacctgtttaaatatcttgatatagagtagtatcggagtattagccaatacacgctagatttatctgatcggctatgctataaacatatataatcctggtattaatatatatttcgatctaagtgatttatactgtctcggcatggtgaccgaactattccaatcacttgatttaagtatatattaatataagaactatatatcgntaatatctacagccgatcgaataaatttagctccttactatctatttataaccgccgatcgattcatatatgacatcggctcaaaagataatgatatgtcatcggcacctagccgatcggctatatttatagattaaccacgaattctttgctctattcttgtgattacggacaaataactacac

SEQ ID NO: 26447 - DNA, 390 bp, Oryza sativa
tcgcagaaccctcatcgacggtggcagtgcactcaacatcctcttcgccaagaccctggatgatatgcagattcctcgctccgagctaaaaccaagcaatgcgccttttcacggagtaattccaggattatccgcaactccactcggccagatcacccttccggtcacttttggcactcgggaaaatttccgcacagagaacatcagctttgaagtcgctgatttcgagacagcataccatgccatactcggacgcccggcgttagccaagttcatggccgtcccgcactacacttacatgatgatgaagatgcctggtccccgaggagtcctatccctacggagcgacatcaagcaagccgtcacatgcgacaaggagagttgcgacat

SEQ ID NO: 26448 - DNA, 409 bp, Oryza sativa
  unsure (1)..(409): unsure at all n locations
agcttgataaagctntatatggtttatttctgcacctatagcttggtactctaggcttagcaagaagttatatgatatgggattccaagggtccaaggctgatacttctttgttcttttataacaaaggagatttgattatatttgtactcatttatgttgatgatattattgtcaccagttctagacaggaagctgttccagccttgcttcaggatttacaaaaggagtttgctctgaaggatcttggagatcttcattactttcttggtattgaggtaactaaagtgtctggtggtatagttcttactcaagataaatatgtcaatgatttgttgagaagagtaaatatgtttgacttgcaaaccggtagtacacccctgtctacaagtgagaaattgtctataaat

SEQ ID NO: 26449 - DNA, 457 bp, Oryza sativa
  unsure (1)..(457): unsure at all n locations
tgcattanatacctaaattcccgtgacttgctgattacgaatgtactcaccctngctctatataaatatatatagttcctccgccctgaagagaagataaagtgaagtgaagattagggtttcgtcctggttaccagccgtcgcctgtggtgttgggtgtttgttcgttggttccgctgctgctgttgttgttggtgtttcctcgtccgcgtcgtcggttgcattctcgggctgttctgagctgcaacctaagttaaggtaaataagtcctctatttattctaaggatttgcaatgattcatatttgtcaccgtgggtaccagcgctatgtcctgngactagtactgagatcgcggtttcgtaggaagcggttcgcgcttgttttcctacgacacgctccagtcaggtgccattgtatggcggtaccggattggngtgtgacacgggtactacgtga

SEQ ID NO: 26450 - DNA, 469 bp, Oryza sativa
  unsure (1)..(469): unsure at all n locations
cccgggatacttacagtcacctgcggcatgcaagcttgtgaactcttcactntatgttatttatttgcctgtgcataacagaaagaggtcgagaagcgtgaagtgctaaaaaggcaaggtcatggtgaatatagggagataactgaaggggacttcctaggagaggtcactggcagtgaaaaagtcatctgccatttctaccaccgtgaattttaccgttgcaagtaggacataagttgttctttaaaaaacaatacaaaatgttttatgattgaccctgatgataattcatggacacctatctaaatgtttcctaggatcatggataagcatttgaaggcccttgcaccaatctatttgggaactaaattcatcaagcttgatgctgaagttagaatgcgatctctattagcattcagttaattgtattttataacaaagatgctgtctaatcttgtaaataactaat

SEQ ID NO: 26451 - DNA, 468 bp, Oryza sativa
  unsure (1)..(468): unsure at all n locations
tatcgtgcaagcatgtcacattatcacccaccagttattactatntagcatattttaaattctatacaagcatgtcacatcatcacttctagcgattactattctagtcattttaaatcccatacaagtatgacacatcatttataatattatatagatatcaacatacaatatgtcaaatcatctccattacattatttttccaacagttcaactttgattatttgtacaatatttaacatatatacatccatgaatcctggagcaaagcacgggtatcacctagtagtatcatatatgcccattctatcattggatcatgggaaagccaagaacattttccaaaagaccatattgccccttctcataatcataagaaataaacttccattcaaaaatcaaaaccctccaaccattcgattataaaagagtgatcaggtggaattagcataagcactgaaattatac

SEQ ID NO: 26452 - DNA, 423 bp, Oryza sativa
agcttgaaggcacctttctctatctatcatgcacacagaagaaaaacagtagatcagcgtaggcaacattataactattctaagtaataattactacagattactacagtactacatcatcagcagattgatgtgattgaatatttataaaaaaatctatcaaacaccaaattagtttcattaaaactaatattcagaataatttaataatatgcttgttttgtgttagaaatgcagctataatttctataagtttgatcaaaattaatttaaatcaaataagagaatgttaaaacaacatataatatgaatatattacgggtgtaaagtgttcttcgagtggaaccctctcgcaatgccgaagttggccacgcgggtctcaacgccggggaggttccgatagtcgttgctgacgggatcgta

SEQ ID NO: 26453 - DNA, 467 bp, Oryza sativa
  unsure (1)..(467): unsure at all n locations
nttcagtaaagatgactntggagaaatggaggtgctngacttatcttcaaatttgaatattatcagttttctaaggttccttgtgagattatactgctaatatactgtcaatgaaagaacacttgttatccaagtgataatgttgcttattttccctgcgcgagtgttttcctttttgtcgtttaagtgctatttcaaaaagaactcttttatagttatatactcagtagctcagtgcttcggaggaaccccaatgacttttgtcaatcatgaaattaagttgtaccaatacattttgtttctttagtgggaccagccagctatataactgttatttgttgataattttggtgctttgatagcttgcttctgttcatggccctatcaagtacgataggtcgtgtgattcttgcaagttcctcgcaagacatatgttgtcttttgttaatttatctgaaagcatttat

SEQ ID NO: 26454 - DNA, 447 bp, Oryza sativa
agcttatggtttagagggttttatccactatgcagtgcagttcttgtaggtaaattactagatgaactcaattatgaaatatgtgctcagttatggtctagaggtttttggtcgccacacagtgcagttcttgtaggtgaaattactagttgaactcaattatgaaatatgtacatagttataaagcatctggagaattgctagctttatgcagtcctgccacattgatctgtttacttttcatcaaatgctgattttcctcttcatggatgttcgcgatgagggatcgaactgcaactattttttgtggtcgattacattggtccatcaatgacttccataaagaatgaaattatccagatgtaaacagacatttaataagtgatgcttatcttttgtaaacaactcaaattatgtgcaagtcagaccagcaagtgacctgtaaca

SEQ ID NO: 26455 - DNA, 376 bp, Oryza sativa
  unsure (1)..(376): unsure at all n locations
acacatgaaactcagcttgcaattggccactactgacttccgactattattcacacatatttcttgcatttagaaacatagttgtatttgctacacaagatgtaatttgtagctgaattttttgctgttatcaatctttgaacagcaactttatttataactctgaaatcctggggaggtccatttggattttggctgatttctcctattttaaggaacccttaaattgctgtaatgctgtggctgtgaggaatcaaatccaaaatcttattctccgttcatttagttctagccttttagatttttaatttctccatggtgccatccttaccagtcttatccatctatnctttgtttgatgagttatgtgcttctt

SEQ ID NO: 26456 - DNA, 414 bp, Oryza sativa
tgatggtttcacaaaaattgcagtgctcctacgtttcttcatgcatctcatataatggagtactccctcactctcatttagcgcagtcatgagtttccgtgtccaactttaattatccatcttatttgaaattttttatgattaatattttcattgctattagatcataaaatctgaatagtactttatgcgtgacttatgtttttttaatttttttcaaataagacggacgattaaagtttgacacagaaactcatggatgcgcttaaaatagaacggatggagtagctttttaaatgggctgtaaaacgtcaattaaccctatcgaaaaaagcattagggtttcccaaaccatcggtaaccacgcggttaccgcattgtaccatattgcagtgggggcacgatagggttact

SEQ ID NO: 26457 - DNA, 477 bp, Oryza sativa
tgccgttcgccttgggaacgacgaccgtggtcgtcagccatttctgatggatgacctcacggatgaatccggcctccagaagtcgcgccaccttctcgtggatgaaggcttgacgttccggggcctgccaccgcactttctgccggaccggccttgcgcctggccgcacggcgagacggtgctcaatcacctccctggggaccccgggcatgtccgccggtctccaggcgaagacgtcggcgtttgcccgcaggaaggagacgagcgcgtcttcctatttgtcgtccagaagaccaccgattcgtgtggtcttggacgggccgtcgcccagggcaaccttcttgaccgggacctcgtcgcacgtgaccatccgctgtcttggtgcggtcgggacggaggtggcgagcctctctttgtcacccgcgggcctggacgccgcggcgaggtggtccgcgcgctgctccatacaagcaagcg

SEQ ID NO: 26458 - DNA, 300 bp, Oryza sativa
tatattttgatggttggtcgcttgggtttaaaatgctctatgttttctataacctgatcaaagttaaaaaggtttgttaggaaaaaagtctaaaccacatttaattgaaaccgagggagtagctgctatgtagtagttcattatgcagtgtgcaggacccaaaagagtacattctagagtgtagattaacaatgactatgctataaagggagcactaaatctttaaaatcaggctcaaggagcaattcatataagcattcttttaaaatagaagtctacatatatgataaatattatcga

SEQ ID NO: 26459 - DNA, 428 bp, Oryza sativa
  unsure (1)..(428): unsure at all n locations
taacaactcacaaccagctggtgagttcaccaattggtctattctaggaagggggaagtgatctttgggacacgtcttgttgagatcggtgaaatcgacacacattctctacttcccgttggccttgcgtaccatgactggattggctagccactctagatggagaacttctcggatgaaactagctttgagaagcttgtcgagctcttctcatatggcttgtttcctatctggtgcgaatctctgtagtntttgctttactggcttggcatcgggtcgcaccatgatatgtgctcaatcacctccctggggacccccggcatgttggacggctgccaagcgaacacgtctgcattgtcgtggaggaaggtaatgagtgcgagttcctatttctcatccagtgacgccccgatcttgacagttttgtc

SEQ ID NO: 26460 - DNA, 446 bp, Oryza sativa
agcttccaagtgaagccccaaccataactcttggtatgcagccacctatggcatggccagaggttggcatgataagcataaacaacttagaggtatggttctaaatgattagaaagaagatcataataattttatttcatactaagtatcagaggtgtacaccctttagttggcccagtaatgatattgcacatttaatcatacaggtcagatatgcagaacatctcccttcagtattaaaaaacataacttgtgtgattccagctgagaaaacagtatgtattgttggacgcacaagtagtgggaagtcaaccttagtacaagtactttttcggattgttgagccaagagaagggaccatcaagattgacagcatcgacatctgcaaaattggacttcatgatctgagatcgagaatatgtattcttccacaggatccggtgatg

SEQ ID NO: 26461 - DNA, 433 bp, Oryza sativa
  unsure (1)..(433): unsure at all n locations
cggcaacctttcattctnttctgcttctagaacggaagatatgatgggcctaatggtcattccaatgaggttacagccatttntcagaatctgttccccgtttttccaacacacacatgacaacagagagtatacgcaattaattatgcatgtgtatacgatatgtaagtacgtcgtccttgcatatagctaacgttgtcatgagtcaaaacatctctgtcgagcctggatgaaaagaccaaccattggtgtcgtcgtgtctgtatatctaaagttcaaatgcattctaatttctgtatagttttagccggcatatgctgcgaaactatgccgctgggttggtctggagactacactactataggcatttctgtgtcctaatcactagggagaggncgtacgtcctgcaagcatccttcttaacttaacatgc

SEQ ID NO: 26462 - DNA, 447 bp, Oryza sativa
  unsure (1)..(447): unsure at all n locations
agctntaagaagnatggctagctctttgtcgaaactagatttcggcaatactaaaggtggtagcgaacaagctgtaaaaatggatgggttatgagacaaaggatttatactggttcaggccctctcgatgagaagtaataccctactcctgtccggggaaatattctgctgattgtgttattgatttgacaatctgaagggtggttataccctcaaggagccccccgacctctccttatataggtagaggagtcgtgattacaagatagaaaccttatcccttacgatctaagttctatagatantttacaattgtcaccgagtaaaactacaagatatnttctcgatatacaagttaacataatacctgagtccttatctntacatattctattactatgtgttacccccaataaccagtcggataacacaaccctgtgagtatat

SEQ ID NO: 26463 - DNA, 428 bp, Oryza sativa
  unsure (1)..(428): unsure at all n locations
tatcttggcgcgactggatcacggtcttgttctctggtaccattacttgtatggctatntaaacatgaagcatcgttagtacctcggaggctgcaaaacacacgcggttctgtctttttatgtcgtcagataatatagttcttgtagctgttttgattgtccagtctctacaattggccgatgcatcaagcagtagcaacgcttcgtttctttttggtaagagttgtcaaatcaaaatggaaatgcaacagcaattgccgcttggtgataacaaaaaaggagctgatctatataatatctgacgctaagctcttgcttgaagtcatcggatgttagtgctaacaagcttgctggtgtangactgtagggcaatttcattggctacttgcggatcacacgattagcaccccataattagtgatacgtgt

SEQ ID NO: 26464 - DNA, 447 bp, Oryza sativa
  unsure (1)..(447): unsure at all n locations
agctttcatgacaaggcatttccaaagcctaccttgtttaccatatgccgacgagaggggtcccagaccaacaacaggttatgtcctagaccatactgtgccaggaagcccaggggtcctccccgacaccaccccggtgaatccacatgtcgctcggcatcaaggctcccctgataagctagttactcagccaggggtgtcccattccacccatgtggtcgtacttgacttatgtttggatgaaattccaaggaaacggtccttaagtgcgagagcgggaaatcgtacacccggtacgttccccggttcgcggtgttggaaattcatttagttcgcaagcaccgacccaggtgtcgggttttccaagtcttttgtaaaacccaagttntacccatgaagtttttcagatattaagtttgaaggcgtccgtcgatacctcgcaccggt

SEQ ID NO: 26465 - DNA, 465 bp, Oryza sativa
  unsure (1)..(465): unsure at all n locations
tttgctcatggatctatactctanaggctcataaagttaatattaattatgatatgttctggctagtacatgcataaataagagcctcactaagatcctggatgagggggacttaattnttcaatcaacacccactaagttaagcttgagtttatttgggtactatagtgaagtataggtcttgttgtctcggtgacgcataatgttgttgaagacacattgccttggggagctattttatttgataaactcgtcagttagtctcaaaatcaaggggagaatgttgngttgatttatcggctaatgccggttagttaggataaggttaaaatcccaccggttttcctatcctaacaagaaacaaactaagagataaatctgntctgtgtgatcgatacaaaatagaattcgattttagaatgagataaacccncgagccccaccaatgtcgctatataaagaaag

SEQ ID NO: 26466 - DNA, 425 bp, Oryza sativa
agctttcaaagtcttcagatgagaacttttttctgattgtggcaatcataccctgaaaagccaaatcggcttactgggcatcaatcaaactcaagcttgtacacttatttctcatctccctgaatctctgaatatactcatgtactggctcatcatgcttttgcttgatcaacatcagatcaaacaattttatctcatgaaatccactctaaaaatagctatgaaacttgctttctaaatcagcccagctgttaattgatccatatggtaaagaagaaaaccaagtaaaggctgacccatctaaagacaaccggaataatctaattcttaaggcatccacagccgatgcttaccgcattgagctaaaatcggctaatgtgctcataagtgatgtatatcttgccctagaactttgaaaatctgga

SEQ ID NO: 26467 - DNA, 453 bp, Oryza sativa
  unsure (1)..(453): unsure at all n locations
tcggcgaaggcgaaaggagagcgcgcgccgacgaggtggacttagattctttntatttctaagcttttggggttntttctttttctttttattttttttttgccgagctgagctgagggtgagctgagctagacgacggcgagagcgagcgagcgagtgtgaaagcgaggaaaaaaaagtgacgggtggtgaggtggcgaaaggacgagaatgcccctacaaggcangaagggacgaggtgggtgctgactcgtgttcgcgcctttttgtcgtcgcttgcttttggacgctttggacttttttcgcccacatggaggaatggaatataccgcgatggatattttttctcttcgttacttccttccgttcacggcgtaagtcattctagtatttttcacattcatattaatattaataaatctagatagatatatattgctagattcatttata

SEQ ID NO: 26468 - DNA, 444 bp, Oryza sativa
  unsure (1)..(444): unsure at all n locations
caagctnnttgatacctcgcattggcagtacccgctccttgaactttacattctcatgcactctagcagtgagaatagcgggccaactgggtgaaccggttcagaaattcttgcaccgttgtatttccttgtcgcagccttctgaactcgttctttttcatgcgcatcaccacagcaggcacgaagttctcgcgaaaagctgcagtgaattctttccaagtgggttctccagcatcttcttcccgagctttcttgtaagtattccaccaatcgccagctggtccctccagttagtttacggcgaagatcactttgtcggcttcgcgcacccggacaagggtcagtttcttctctatgatgcgtagccaatcttctgccttcataagctcgtctgccgtaacgaaagtgggtggcttagtcctcataaactctncacagctcgat

SEQ ID NO: 26469 - DNA, 394 bp, Oryza sativa
  unsure (1)..(394): unsure at all n locations
ntgttctgcttcagcaattggtatgccagctatcttccttgttccgctgctattcatgtcgcccaattnttgtgcttgttgccgaagcttgtgtggagattatgggtaccccatacccacacggcatggttatccgactagtaataagggataacatatatgtatggaatatgtaacagatcatgacttgggtattacgtttccctgtatattatggaacggcctanagtccttggttgataagattgtaaagtagatttaggaaaccgataccgtattggttaaggtttctatcttgtaaccctgccccccaacctatataaggtgggcaggaggccctctatggggcatgagacanactgatcatcagatcaaaatacattcggcggattca

SEQ ID NO: 26470 - DNA, 340 bp, Oryza sativa
ggaactctacagcagctgcggcatgcagcttgacaggttcagaatctttgcttcattaacagttgatctctagcgaaccagcaacaaaagaacaaatgtggtattatgttatcaggactcctaatgtcccaagaattttcaactttacctacttccccatcccaactaagtacaaccatttctcatctaatttctctacttggttcctcatctcaactaatcgcaaccatacccaattcaatttcacctcttttcttaatccccaagaataccagaagttcttatatcttggatcagagtacaatttatagaacaaaaaatatgttcagacccaaattca

SEQ ID NO: 26471 - DNA, 481 bp, Oryza sativa
  unsure (1)..(481): unsure at all n locations
ctttactttgagcaatatgcagcaacagcctntactagagcattcagactggnntttcacttcccccagctggacactgtctattccccacactttggtgaaacctttggctagatccatttctgatcatacaccttgtgtggtccaaattggaactaatattcctagagctaatgtgttcagatttgagaatttttggattgaacatgaaggttttttcgacttggttcagtctatctgggataaccatggttcctcccatgattctgctaaaaatatttcttcaaagcttaaagctttaagaaagggactaaaaaaatggagtaagaatctttccagactccagaagcttatctctaactgtaataatgttatctcttttctggacagcatngaggaatacagatatctctctttgctggagtggaatttcagagtttttattagatctaagctgcttacttacttaagatattagcaa

SEQ ID NO: 26472 - DNA, 440 bp, Oryza sativa
  unsure (1)..(440): unsure at all n locations
agcttatggcatcataaaggcctcttggttgagaaattataactctatgctgattgaaacaaatatacattcagcaaacttgatgcacaaatcaagcatatatttcatcacattctcgatgctggaaaacagatagtaagatctagcatcctgatttttcattttttaaaaaaaaactttcacaagttagcaggaaatcatattgttagagtatatggtagttatagttatattagaataggatttatttgtgtggactccttccatatctgtaatccttctttatctcaccctatgtactcctatatataccgcgccctaaggctcaatgcaattgatccacgttacgcaatatacctctctccctatactatccaatatggtatcagagcgagcgacctataaccgctgctcacgcttncgtcaccgtcggcccggga

SEQ ID NO: 26473 - DNA, 485 bp, Oryza sativa
  unsure (1)..(485): unsure at all n locations
ngttgcggacattctgcagcagctgggacagattgtccttctattngtttatctccagctccttcttgttcagaatattctcagagacctaagatgataacaagggcatgattaaacgtttaagaaattcaaacaagttgaaccaaatgaggtggcaagcatggaaaactgctattcatatgcccaaacaaaaccgcattgtaataatgtcaggtgggttgaaaaaccttgacgtctatgagcagcacaacttgagaacagtagtggcaagaggatcctaaaagggactgcgtgccaaagcactcgctgccttatgtagtattttcattatctcgactagcgtactctataattttgttagaacaaaataccaatataagcatgcaaagcaaccggtcaatctgattcctaagaaaagaaaccatctcacatcaaaagtgtccacactatacagtcaggaaagcgcaatgaagcatagaacaaac

SEQ ID NO: 26474 - DNA, 363 bp, Oryza sativa
agcttcactaaagataacccatgtgctctttttaaacgcttggaaatgaaggaatgagttgcaccagaatcaaacaatattactgccggtgtcgagttgacaggaaatgtgcccaatatgacctctggtgctgactgtgcctcctctgcagacgcatgattgacatgggcctgcacaaacttgggtccagcatgtcttggctttgggcacttttcaaccgtgtgtcccggtttggtacaattgaagcaaagttcgggctttccttcgaactccttgggctgttttgactgagcatgcaaagctggctgaactgactgagctataaacattaatggacttggagtcaggttgaggctgtgcttc

SEQ ID NO: 26475 - DNA, 410 bp, Oryza sativa
tgcgcaacaccatggcacaattaatatatgctgattgaatatatacatatagataaatattaaatagaattatactgaaacagacaacaattacttagtaaacaaacacatgttttatagtttaaagaacaaaagtaatatgagtaaaacataaaatgacttaaacctagtcgcgcaaatgcgcgggccaacctgctagttatattcaccccgacatcgcccgtgaccacgtgcgcaccgcgtctctggccgccaagttgctcgtccgcctctttgtgtcgtgccgcgtcaccgttcatcagctgattgacgatcgacgagctacacctccactacattgatgctgagttgacggcgcacccgcattatgcatgggcgaccgtggaggccgccacgagcactgacgtgtc

SEQ ID NO: 26476 - DNA, 420 bp, Oryza sativa
  unsure (1)..(420): unsure at all n locations
ntacctcttgccggagatcgaaactaatgcagcccaactcgttagcaagtactcatcaaaaacaaagaanagtaaatggtggcgatgcgccgagagtgtactaaacttgatgttttttgtttacacggtctcggatcatatttatacccaaaatacatagaatgtccttgccagagatgactccacttctattacaacttgaaaatacgaacaagtcccttaggcagactcttactgaaaatatctataaggaaactaccaaaatatcctaattaatatatacaattgccttcttcagactcaatccatacttggcaataattgtacaacacttcgaccgataccgacaatgattctatgattatcttgccgaaatcggctacatcggcttccccgtatccaattcggtgcagccgatgc

SEQ ID NO: 26477 - DNA, 442 bp, Oryza sativa
  unsure (1)..(442): unsure at all n locations
agcttataaggaggaacttgaattgatccatggcaagccatccgataaaaccacaatgcttcggccaaccgggtatgccattaccgaggataatcagaaatcttccgcttaattaatttgatcaagctcttgttagatgcctcggcctgcccattagcttgtgcataatatggtgaagaattcaacaatttgatacccacgctatcggcaaactgaacaaactcatcggacacgaagattgaaccttgatcagatgtaatagtttgaggaataccaaatcggtagattatatgttcttgaacaaattgaattgcatccctagaatcaactttcttcaaaggaatggcctccgcccacttggtgaaataatcagtcgccaccaatataaacttatgccttntacttgatgggtgggttatcataccgatcatantcaattccc

SEQ ID NO: 26478 - DNA, 434 bp, Oryza sativa
  unsure (1)..(434): unsure at all n locations
tcactgcttatgctggctacactcatgatgcacgtgaatctttacattcttcatggtggaccgtcgncatatgaggactacatacttactcaccacattctgtgcctggctatgttatttgatatgcattttgatgaggatcatggtaaaagaaacgatacctcaatgaatgatgtgggtctatttaaaccacgtagtggaaccatgcttaccatatcaatcaggggaagagaccgcagacagactatttattggcgcagcgctgattgatcttctagatgattatacaggatgcataatgctggccctactgaatcaagcatctcgtctcattttgaggaaattggatgctgacagtgacaagctttcattacttcccgccaccgagaaaagttgctaacatggattcatggctattactactggcttgacat

SEQ ID NO: 26479 - DNA, 428 bp, Oryza sativa
cagcttcttccaaagcataccgctttctatatgtatatgacgatctctaaacagatggatcttatatgaatcgtatgatgaagtaccacatgagtggatatataggaaaggaatccaaatctgccgaatcgctcatgttatgatcttctacatcctaggtcttcgcgttccgtcatttggcttatgttcttcatgtagcattcagatcgaatgactctatgaaattacgtcgatacttctacatattatgggtaacgtaggagacatccctattttcccccgggggtcttaattaccactgcttagctttcaattcgcctctgaccatcaaattaaatgtgaataacccgtcctcctctctttgaaacaaggggcgcttccggttctgtgcgtgcttcaacaatattgcttctcatataccatatctt

SEQ ID NO: 26480 - DNA, 430 bp, Oryza sativa
  unsure (1)..(430): unsure at all n locations
ntccncagccccctttcatcaatggactcctgacgtctacgattgagtgtggntcgttcgacaaattcctacctctatatctatctctgaggggtttgggttttgcaaaactccatagatatgcagaagagaaatgctatccccactccgaccaagacagaacttttaccaaaagtttattgtgatctttttgttcaaataacaattaaggtgaagcagggtcaggaacaacgaatctctttatgataaacagatccattttgcaagctcgttattacgggtagttcctacaaagaatcggactaatgacgtatacaatgcttgaattatcgacgtagatgctacatagtgggttctcatccttcagagactacgagtgtaataggagcatccgttgacaaaaggatcaccctaagatgatcatctcatg

SEQ ID NO: 26481 - DNA, 418 bp, Oryza sativa
agcttgcatcttcatatcttaagacacaactctgtgttctcatcataaagaaatctactccatgctaacatctagaaggaccataaccttaacttcaagaacttgtttttctgtcaggactccttgggcacttagatattgcagcttggcaaagggacaggcccttgatgacctccaaatccccctaacagcttcggcgaaacaaacggcttccactgttgcaaaaaagaaaaagaaaacgacaataccttgtaagccagctgcaaaactttattaaaaacatttttctttaaaaaaaacatgtccatttcgctgcctataaaacacctaagaattgctaagggaagtaacaaaatgtacatggtggacagttcagttggagaataaaaacatatttcattcctcataagcagaacac

SEQ ID NO: 26482 - DNA, 429 bp, Oryza sativa
  unsure (1)..(429): unsure at all n locations
taaaactcagcttgacagaaactgataagntctgaattcttatattatattattacaacaattngcaagcacggacaagtgacaacagtggcttggatgctgcttcaattcagcacagcaagcaacaggatcaacctatccaatcttgttctttttccgcgtcagaactcataagtctcagaataagcaacgaccacccgaagattttctaaaccacgccatcttcagcacaccacgtggtattgggccaattaattaagcattctgaatccatctgcagtccatataagattatgcatgtgaccaaggagttgcgtgtcaacttcagttgaggcctttgtggatcaaaatcatcttgctctatagtctataccaaacatattttccttttcttctctgtaattggaaccctgacattataatcttgta

SEQ ID NO: 26483 - DNA, 450 bp, Oryza sativa
agcttccaaataaacttatttctgtcaatgtaaccattattaattaaagctaagtacattaatctaacagagaactagccattctgatgataattccatctaaaacaatcaaaagaatcatccaactggatatgagcaatagaagcacataaatcataccaaagggttaggttctgtccaactaaagctcttataaaagaaacatttagcggaaccaaggccataacactggcaatagtagcactcttccttctgacaatagcatataaagaaggatacttatctctgaaggccatgtttcctacccatttatcctcccaaaatcttatatgttgactataattcacaatccaagagcccatacttaaaaaggtggtttttattttcatgagccctgaccaaaaatgagaaatcaccttgttcctatccactcgggttatagagttatta

SEQ ID NO: 26484 - DNA, 484 bp, Oryza sativa
  unsure (1)..(484): unsure at all n locations
tttgtcccaagctccaccanaatcaagagcgcaagctctcatcttatcttccaagatttgattgacccgctcggtctgaccatcagtttgtgggtgataggccgtgctgaaatttaaatgggtccccaattcttcctgcagcttctgctagaattttgaggtgaactgactccctcggtcagatacaatctttttgggtactccatgtaggcacatgattctcgaaaggtaaagctccgccaaccttttgcccgtatatgtggtatgtactggtatgaagtgagcaaccttagtgagtcgatccacgactatccagatcgaatcgtgacccgatgatgtccggggcagtccccgtataaagtccattccaatctccctccatttccattccgggatttgaagaggttggagtanacctgctgtgtcttggtgctctgccttcactcgttggcaaacatcgcagagtgcgacgaattcagctatt

SEQ ID NO: 26485 - DNA, 424 bp, Oryza sativa
agcttacagaattcctgaattgctgtagagtctggcgatttgttctgcgagaagaattcaaaggcgtcattcccaccagcactgatgaggaagatggattttgacagcaatgttgacgctttttcggcgctcaatatggtcgaaatctggtctctgagatctgagaagtactctatctgctttgtcatgctgattgtagtcccctggtgcaatgataatttgttaagtcagttgtcagttgtgtgcagcaaactgtactagtagttgcactttggaaaagtaagtaaccaaattttgaaccacggagcagaatttatagctttagttgaaggttggaagaaaattttcaactttaggtagcaaccatgctcctaccaaacttcctttttttctggtgatcataaatatatatgacttgaaattc

SEQ ID NO: 26486 - DNA, 381 bp, Oryza sativa
  unsure (1)..(381): unsure at all n locations
ggccactgttcatcagggatgggaagatatcaccatggcctgtagggttcctganaaaatgtgtaatgcaaaggttgtaaaaaattcaaattattcgcctagttcatcttgctgatgtagcgatctatgaagaatggcttaccagccatccttgcaggtcttccccttggaaggccatggcaagaactcatcggctaccacacgaggatactggctctgcattggatcaaatttgttttggtgtcagtagcattttgtaaaacttggcgaaaacaaggaaattcagcagacatgcctgattgaaagtatggacttcaatgttcgaattggtgtatttctcaacaatctgcaggaaaagcgtgccggttagtactctgaaat

SEQ ID NO: 26487 - DNA, 101 bp, Oryza sativa
tatccattctacttcaagtactctgtaccaatgcaggctatctcaaaacctgctgccaaacacagatttgtatcatctgatctcgatgatgcagatgatga

SEQ ID NO: 26488 - DNA, 481 bp, Oryza sativa
tgtaccggcagccttacactgagtggtttgagagagttcctctcccctatcggtatagttccggacttctctaaattttcgagacaagatggtgtgtcaacttatgagcacattagccgatttttagctcagtgtggtgaagcatcggctgtggacgctctgagggttaggttgttccagttatctttatctggatcggcttttacttggttatcttctctgccgtatgggtcgatcaatagttgggccgatttggagaagcaattccacagctatttctacagtggggttcatgagatgaagttatctgacttgacggcgattaagcagcggcatgatgaacctgtgcacgagtatattcagagattcatggagatgaggaacaaatgctttagcttgagtttaactgacgctcagttagccgatttggcctttcacggtatgattgcttcgattagggagaagatctcgtctgaagact

SEQ ID NO: 26489 - DNA, 370 bp, Oryza sativa
  unsure (1)..(370): unsure at all n locations
agcttcaggtatgaactttagttgggtctcttgtataccaacaacatcacttaactttgtaagctatacacatgagaaaatagtccaacgcaaaactgaaacatcacagaaatccaaactaaaagtatttacaactgataaaaagactgccaaaacaatgagttttgctacaagnntttttgttgcaaacttctgctatgacccacaaatgctgtacacatggtccaatgtaaaacttacatcttcattttcaactttttgcagatctgcttgtgctttctgccttgactgccaacagggaaaagaaaacagaaaatgtatcatacataaaagtacagctaaaatgtaaatttatggcagacccttcaca

SEQ ID NO: 26490 - DNA, 470 bp, Oryza sativa
  unsure (1)..(470): unsure at all n locations
ggttaatgaanaccgatgtaaattctatatcttaaataagataagtgacagtactatggccccgttcgaatccatttaaaagtgtggattaaattttggattatagtggtatgcttttcaaactgttaaacggtgcgtttcgtgcgaaaactttctatatgaaagttgttctaaaatatcagattaatctattnttcaagtttgtaataattaaaactcaattagtcacacgttattaccacttcgttttgcgtgaaacacttaatctttatcttcatcttcagaagattcaaacaccacctatctatgcctagttgcctactggtgtattaaattaaggtattaattgtgtcactgttgggtggggcccattcaggttcgtttatttgcccggctcaatggaagatgggcatgggaaaaccttttcaaccaaaatttggcgcacactaaanattagatgctaagcaaat

SEQ ID NO: 26491 - DNA, 297 bp, Oryza sativa
  unsure (1)..(297): unsure at all n locations
agccttcgggctggtgagttgggaggaggatgatgtttgtatacctgnagtanggcgcaacattcttctcgcccgccgtttcgttccactcttgcatggtcgatggaagaggagccggatgcggcaacgttggcggaggggtcgacgccgccttggcgagcagtatgtgcgccaccctgcccgcagtaagatgtcaccgtcgttcccattacaggcggcctcgacgcctatagagctccctcgccaagctctgtcccgccgctgcccttcctttgtatctctcaccacccctncatt

SEQ ID NO: 26492 - DNA, 387 bp, Oryza sativa
  unsure (1)..(387): unsure at all n locations
agctcctacgcagcacggcggtggagattctatgcgtacagctgcactggatgtatctgttcgtgctcacggaggccattgtcatcctctcgacgacgaggctcacgaacctcgctggtttgggccggcgtggacgacaagtgctttcacatggcgggaagcaccctatataatctgaacatgttgcccaccacctgcccaccaccctcagcctctacttcttcatctatttcatcggccatggcgtcttcccgaccgtgcactccttgatgaagtctaagaaggattntcctaacgtacactgtgtaaaatgtatntatatgtcttacttgatagtaagttggcttaattgtgtgataacaatcaacaatgtaaatttagaattat

SEQ ID NO: 26493 - DNA, 435 bp, Oryza sativa
agcttgtagccaggtgctgtgctatatcttataacagacaattctgtcctgaagacttgagacagatgtgaggtctcacaggtgtagtatgcgtgttagcagaacggtcaaatcgtcaggactcatgactacgtggatgcgtgcggtgctgctccgacggcaagagcaaagcgggcatcgtgtaggcatcgggctgtttctgccatctcatacagtcatactccatctcacaactgaaaatcagcccagaatttttcagagatatcatggtgtgaaaacagcctgctaatgaatcaaccacgaggaaaatggagccaacatggtaaaacacaatcatgacaggcacaatccataatagagagaaaaaacgtggttcaccagaaattactattacctccgttggtccgccctaaaatataacaacatttagctatg

SEQ ID NO: 26494 - DNA, 381 bp, Oryza sativa
tttcatgcaccataaccagactatgggagaggaacacatcagtacacggcccaaacgccgcctaaacaaacatgtatcacgaaagcatatgctctctaggataccagccaacccaccatgcaaagccgcgcagccggtgtggatgttcatactggaaaacattgcagaagctgaactcacaaatgcatttaaaaatcgggtccgctagcagtcccgcgagaactggtagatcacctccatgggaacagagcagatgacgaacaacatggcttcaaggcatacggagcagcggatccatgatagcaagagaaaccaaaccttgaatactgggcagctcaagcaacggctgaaacaggcgcctatctgcttactcagctatcc

SEQ ID NO: 26495 - DNA, 439 bp, Oryza sativa
  unsure (1)..(439): unsure at all n locations
agctntaagcaatgcccaatggattcgattccgtaagttactgatcttgacgtctgtacacctttatttttcacataaatatcgatgcatatctgctcttgatatcatatcagacgtttttgttcttccatacagcgcatcgactagtacaggcaaaaccaattggtttggtaccattctttcggcggatacaaatttcctgctctgcatacccgttcatcaaattccatcacgttaccgtatgcctttgggtataatgttatatgtaatagcatatgccttgcagatctggaagatgattgcaggtaagtcgtcgatcagaattatataggcttaaattgcagtttattggttccagttgatcaaacttgtctacacagcaacatgcaggtttctgtagacgcccttggctgtattggntttccttgcacacaagtac

SEQ ID NO: 26496 - DNA, 484 bp, Oryza sativa
  unsure (1)..(484): unsure at all n locations
ntatcactcatcctcctccgagatttcagttagccaagaggtataatggtaagaacccaccacatgtggcacaggctcgtcatcacagaagaatggcctagaaggcaattgcagactatcaacaccaccttcaagcatctcaatgacctcactcattgttggccgatcatgagacttcatctgaatgcaatgtagcccaacaatgcacaacttcttttccaactcatgcatattaaaggcagtgaccacctcacccaactcttgttgaaccagctaattatacacccatgatggataatacgcttggcttgagctcgacatatcctgcttagagttccttcgccctccaaccatctccaacagaagcattccaaagctatacatgtcagatttgctagatatggcaccanagctccgagatatcatctcaggagcaatataacctattngttcccttgcagcgctaacaggcacaaaactatta

SEQ ID NO: 26497 - DNA, 380 bp, Oryza sativa
  unsure (1)..(380): unsure at all n locations
tagagagcgactaaaatgacagtgatggaactccactttaactgcgctgggtggaagcgaagtgagaagatgcctttatagtgctcaatgccaatagctaatgtcagtggttcatgcggttccacccacaaccgacattagtagcccaagagcgccacaatgtaaggcggtggtgacggggcgccacccctggttcgggcgaaccaggacaaccggcttaggccactgacttgctccctaagtatgacacacgggcnccttatggcgtgcgccgcggataatacttaaatatgtcggttttcttgggttgtggcccctaaatcttttattgcgcctgaatatcgaagccttgttcttaattggcagtggtttcatgcaaa

SEQ ID NO: 26498 - DNA, 477 bp, Oryza sativa
  unsure (1)..(477): unsure at all n locations
actaagctgatatacttgtcngtttagacaagggtgaggttttactttttaatctttgactatgaatcatttgtaaaatatttgtcttttaaatatgatgattacatgtatagagtcttaaaaagtactttaataaaatcatatatatgttaacactattatacatattataatataaaataattgtcaaaattcttttctagagatcgtgctcttgtctaaaatgacgagcattatcaacccggagggagtatgttttgaaccgtgcaatattttaaacagtataaataattaacccctaaataaagtatcttacatatatgctacatggactggaatatctcaaccaatntattatatcggcattatgatataagattacttaatacactagtcacattattccttntgtctcatggctcttcgatttaactattatctatttataattaattgaaaatcggtacacttgatttg

SEQ ID NO: 26499 - DNA, 362 bp, Oryza sativa
agttggtgccgtccttcaaacggacatcattcctaatgactcatctgcccttaggggactcttcattgctcctgagtcaaacaagaccacacggtactactggggttatatatataggaacatacatctaagaatgacctctcctgaacattgatggggcgcgctctatcgcgccgtatttgaactctccactagacttgatgatacgaggggtttacaatgtgtagaagctctgatagtactcggaggagaagaatggagatcaaacagtcttggatcatgacgagataggcattcattttcaaggttctaaaactcagcagctagtattcattcaatcacctcactgtggaatgcatata

SEQ ID NO: 26500 - DNA, 440 bp, Oryza sativa
  unsure (1)..(440): unsure at all n locations
gctaaactatagtccctatcatatctgatgttnggacactaatttggagtattaaatatagactaataataaaactaagtgtataaatgagaactaattcacgagacgaaatttttaagcctaattaatctataattagcaaatgtttgctgtagcatcacataggctaatcatgaattaattaggctcaatagatttgtttcatgaattagtctaaggttatggaatgtgttttgtaattagtctatgttcaatactccaaattatcatccaaatatccgatgtaacagggactaaaaaattttagctccatctaaacagggtcttagccatgcaatgatatgtacaacacatcaatatgcatatgatgcatatgaccaattattatnagtatgaaccaacttaatgagctagaaatacaaagctggtagtatttatgc

SEQ ID NO: 26501 - DNA, 445 bp, Oryza sativa
  unsure (1)..(445): unsure at all n locations
tgcaagctggagattcagangcctgaagaatattatttgnttacagtgaacgactctttggatggtcaaaagcctgatatttttccatcggtgagatccagtatggttgaggggctactaccacaaaaggcagttgatgatcttaattataggcttcaaagtctagtgcctggtgattcagaacatgttccagtacttggtcctgatgcgctgggatcccattctcatgaacggcgttatcaggctgaatctcaaaatctttatcatcttttacaaggtagaccacctgcactggctcctcgtcctatgatggatcacattggtaataggaatcagcaaaccccgtttgacatgacacaagcgatacagcatgatcctcaccgttccttttcatcgaacatgaatcctatgcaacaatctcttcatgctcctcgggcttctcatg

SEQ ID NO: 26502 - DNA, 440 bp, Oryza sativa
tgtagtagtgtgagcactacttattcagcacagtgtgttagttttataacagataggcatacctatgacgaacacgattgttatctttttcccacgaggtggaaatgactcaatgtgattctgcatcagcagccagtaaatagcaagtggtgaatatatacttgacttgacaaatacgtatggttggacagagcaagtggacaagaaagatgaacaaaagctgcaaccataagtgaccttaaatttcttttggaaaaatatatgaaaaggagttctttaaaaaaaatatatattctagatcttggtatgaccaataataggtcataacgttgaagtatgcatgtttcttcacatgtaaatctgccaatattcttcaaattttcactaacataaattggactgtagacaagaaaacaggtaatattttccctcatacaaac

SEQ ID NO: 26503 - DNA, 435 bp, Oryza sativa
  unsure (1)..(435): unsure at all n locations
catgcaagctaaacaagatcccactcttatgcgaatttatcatngaaatacttaaatgttgaaatagtttaattggtaaatcacttatattgatcgtgtaatccattactaccttaaataatttgtttgagatatgctgaaatttatcaagatntcaattaaggtggggttttatgaaacactgagaccatataatatgtggttatgtgccacacgttataatatcaattttttcctcaactttgaccaaaaacccggtgtgtgttgaaatttacttaaatctgaaagcaatataacatcatcgaaaaaaatgccaaaactcatttggtatgaagacagaattgataaatggaattgatgatgaatctgctaaacttcatgaatcacatcatgtttcaaaagtgcattgcatacaaatgcacccgatctctcact

SEQ ID NO: 26504 - DNA, 471 bp, Oryza sativa
  unsure (1)..(471): unsure at all n locations
tatactatataaattataaattaacttctttattttcatgctctctaatanaagctagagatttgattgaagagtcaatcaatctgttagctatgggtcaagttgagatatggcttataaatattgacatatttagaatatggtaattaccatattaataagaaacggtaatttccacaagaatacggtaaatacggaaacgatcggtataacagcaaaaccatttccgttttcatttctatattttttaccatttctatttttatttcggtcgattaccatttccatatggctcggcccgtagaaaatcgaanacgaacgccggtcggcctgtagatacccgtaccgttttcacccctagatataccagtgttgttgtcactctcgagctgtagttaattaccacaagaattttcttgacttacagttatacccaagtcattgtcaaaggtacaaatatagtgatcacat

SEQ ID NO: 26505 - DNA, 324 bp, Oryza sativa
  unsure (1)..(324): unsure at all n locations
agcttgctacgatgatgatacttnctgatatgtggngtaacacttcaattggcaggtcataaacatcgttaaaaggaacattcttatataacaactcaacacatatgaagggaatatttaaagtcctaatgtcaaattaacccacttactatgaataaaataatatatctgcgaaaaaacatctaaagttgacaactaatgaactcagctggtgcacattatattgcaccagtattaaattcttcacgaagttatcattataggattgcttttacaatgtgtagaaactaggatagctcacacaagaaaaatatggaaaaaaag

SEQ ID NO: 26506 - DNA, 442 bp, Oryza sativa
  unsure (1)..(442): unsure at all n locations
ntatcgntccatgattggtagctggctttaccttaccgcatctatgccggatatcatgtttagtgtttgcatgtgtgcatggtttcaagccgctcctaaagagtgtcacttattggccgtgaaaaggattctaagatatttaaagcattcctctactattggcttgtggtacccacaaggtactaagtttaaccttgttggctattccgattccgattatgccggttgcaaagtggatagaaagagcacatccggcagttgccaaatgcttggtagatcccttgtgtcatggtcatccaagaaacaaaactctgtagccctctctaccgccaaggcggaatatgattcggcgggtagttgttgtgcccaattgctttgatgaaacaaacatttgtgactatagcatatccttcaccaaaaccccactcctatgtgacaatga

SEQ ID NO: 26507 - DNA, 445 bp, Oryza sativa
  unsure (1)..(445): unsure at all n locations
catgcaagcttcacttgatttctcanaagagactggttnttttgggaatgtcataatgacaaataatattcaagggcagaaggaatgctgcattcangaagtatggatttctccagaaaaggagttcattgattctctccaaactgtttggattgtaaaatgacctatttgtgccagagaaaagaatagaagaagcatctaactctttcatgctacatgtcccttaacccaagtacaagataactcatcatacatgatgtggaactatacactattgtgtcaattactaacacaaactaatcttaagcttgaattaacttcatcagacaacaaaggggcatattctaataaaagcgtacctttgcgagccaatattgtttcccacaaacgagttgccttagacaccaaatgggaattctgtccagatgaacttgagatacgttca

SEQ ID NO: 26508 - DNA, 376 bp, Oryza sativa
  unsure (1)..(376): unsure at all n locations
catataattaattntccaaagganatatgaggagtggagacggctcgtcagtggctcggctggaggtcgtcttcaacctcccgactgagcggaagtagcgagggaggatgcggctgggcgcggccgggttggcgcgaggccggcacggcggcggccgatgaaggtgcggcgagctcgagcgacccaccgactgcggcagcggcgcgtggcggagagagggcgagtggcgcaacatggacacgccatggcccgagctcgggttgcaaggggatagggtgctatggctaggatccaacaaaattgatgggagcgtgaacatctacggggtatggggattcgatttcaccagctagatggagaggggagttcccgggat

SEQ ID NO: 26509 - DNA, 437 bp, Oryza sativa
agcttaatgtattcttttctcggatgcatgatggatcttcacatgccatatcatctccaaattttaactgtggcgagggatcggttgactgaaatgagttgaaatgaactgaagtactccaatgtccaatctacgaacaggtttgattggcagcggtaaatcctctgaaagcacattattctgttcatccggtcctgaatgttctatacacaagcttactttgcatgtcatgcatgcacacatgacacacccacgaggccatggccagcccaggcagcgacgtgacactgaaaacctgtacagtacagattatagagaggccgacgcagcgagctgctgttcagtgcatcacaaacagtgtcgcacagacagtagatacagacaccgtagtaggaagatattgtacacctttgctgcagctcacattttgaaaaact

SEQ ID NO: 26510 - DNA, 470 bp, Oryza sativa
atatgagttgcaattatcatgccctcactctgttatctttgcctatctctttttaaatttaagagacaccatgaatatttcagttcatacctacaaattttatcaagttcttggtcattttgttgcctgaaagagtctgtttttaagcttatatccttgcatttgcatggtctatactgtgtctacaactgaaaagtttatattcaccacaaatttagtaaccatcatgtaccgactagagcttaacatcatgatttggttaattattacatcaatgtttttgttgtcttttcaaggtgactcacttgtttttcatagctgatgttgccctccgaaatactaatgactagccaatacaccccagtaaataattcgttccttatggagcttagccttatgcaatatttgcctttgaccaatggaacccattaatctattcttgatgaacaacaacagaagcaacttgaact

SEQ ID NO: 26511 - DNA, 445 bp, Oryza sativa
  unsure (1)..(445): unsure at all n locations
agcttgacgccagcatttccctctttatgtcagccaccaactccttctttgcatcattgtaatggtgtcctggtgccgagtcatgtgcatggctgtggggatgggttctcatttctcttcgcggtccctatggtagagtgaggctaccgtgccctctacaaggtacgcgcaccgttacgaaggcatggtttcatcctcgttgttggctcaactcatatgttcatacccttgcgaaggagtacctttttttctatatataaaaaaagaataatattatgggagcttgagtacattttctctatgcgaatgacctgccttataaaacttttaaggtattttaaccatatnggttgccgttgtttttaaaaccacttgtaaccataatacatctattgatgttgtgcataaaagcatcaccagcagagtgtcaaaattcaatccccta

SEQ ID NO: 26512 - DNA, 426 bp, Oryza sativa
  unsure (1)..(426): unsure at all n locations
ntggagaggaggtcttangtggagtcttggcttataccccagttgagcgcctgtgaatatggagccgtaggcccgctagtccgctgctgtttattnttgattgtcaggccttaagtgcctttgtaataatgtaaatattatcgatataataaagatgtgtcttttatatcatgtttgtgtggtgtaccccggcttttcctgngacggngattaatacactagcgttcgggaaaaggcaattttctcggtcgcgacagtgaggcaaaattgcctccgttgttgtagtcgttcacggcacctcctactggcgcaccagctccggatccagctcctgtcggcgtcggcggcggcgcaacttctgtcggcggcggcgcaccacctccgccaatagcggcggcagcaactccagacatggcgatgagcagt

SEQ ID NO: 26513 - DNA, 426 bp, Oryza sativa
agcttaaccccgaatcgctctagttcggtcttttgttatgttatgttgttggatgcgtcatgaatggattatgtttatctatgtgttagctaatgtttcattctcttcttcatctattaagctcatttctccaaccgctgcaatgtcttcgatcccctcctcttccttatccgtccttactaaataaattgcgacaaagccatgaaaccaaaaatatattccaataatgaaactaaataatccaaatattttaaccaacaattaaatactacaatttcccacaaaacattatcaaaaccataatataacttattattaaaaccataaaacattacaataatattttcctttcttacacactaaattaacttattattaaaaattaacttattattaaaaaatattacaataaaaaaatgggcgaga

SEQ ID NO: 26514 - DNA, 439 bp, Oryza sativa
  unsure (1)..(439): unsure at all n locations
tcgaagagatccaggagctcattcaactaggaggactcttgagtccggttacgttgctaaatgaaatagaagacatagtcttatggaaaaggagcaatgtgaccacatattcggcaaagagtgcctatctctttcaattcatcggctctcagcaagacaaggtttttctgttgaattggaaggcgttggcacttccaaagcaaaaattcttaggatggctcattctgcaccaaaagattctaacagccgaaaacatgttgattcaacactgggagtgcaactggattngccccttatgtagaggagtcttcaaggatactgatcacttatttcgacaatgtgatttctggtaagaaacatggaatcgtgtctctgctgtacaaggtattcaaaataaccagactttctcctctctgagagaatgatgacatacatcatg

SEQ ID NO: 26515 - DNA, 458 bp, Oryza sativa
  unsure (1)..(458): unsure at all n locations
ctcacagncacctgcagctgcagcttaaatgaaatgtggctttcttgaattacttatctgatcttgcatctgattaaatatttatattttttaattaaatttttatactataatctctcatgattaaagtataataaaatatatatatatttgaaccgttaaaatttagtattttatatgtgagaagagaatattttaactatatttcgagtatgttgcatgttctatttattttttatatttcaatcattaatacttaagttttaatgttccaggtagtgggttgtcagtgtacaatcaatntttattaaatattgtatttcttttaaacatttaaccaactgacaaaatattttttccttgatcgatggaacaacaccctcgtttttttatactactccatccagaaaaaaaataatcctagcaatgaagctgcaccgtatggtgtgttttttgat

SEQ ID NO: 26516 - DNA, 482 bp, Oryza sativa
  unsure (1)..(482): unsure at all n locations
ntccttcagcaactcaaccaaccacactgcattttatgtactttcccattggcccacccgaaggggaatacaagtcaaggtgcacctaattggttaccaccgattcagccgggcctgggagtttcgccatggaatcaaggaccgcagttcgacttcgtcaacgctgctcaagcaccaactgttcggcagcaagctccaattccaggcttcgaaacaaaccaagcaccaatccaagctgccacaacgtggtcgcagccaatttttgacccatccatggcggctcagcaagtacctccagttggagccgggcagtcgaataccatggcccaacctcacgcacaagctgcgatattgcccttggccacaccgtacccgcatcanagtgcggtaaacagggcgggaggcgaaaaggggctaccgctgagttggggaatcaagactcgtctaatcccaccccaattaagttcccacccgcccgcgct

SEQ ID NO: 26517 - DNA, 449 bp, Oryza sativa
agcttatgttgatgatgtagtcgtcaagactcaagaagaaggatgatctgattgcggacatagaagaaacttttgcgaacatccgcgccttcaggatgaaactaaaccctgaaaagtgcatcttcggagtactgtcagggaagctgctcggatttatggtgtctcgtagaggcatacaggccaacccggagaaaatcaacgccatcctcaacatgaaaccgccgagctcccagaaagatgtctaaaagctgactggttgcatggcggcgctcagccggttcgtctcacgactcggcgagtgggggatgccctttttcaagctgctgaagaaaaccgacaatttccagtggggacccgaagcacaaaaagccttagaagacttcaagaaacttctcactactccaccagttttggcctcgccacatccacaggagccgctactgttatat

SEQ ID NO: 26518 - DNA, 477 bp, Oryza sativa
  unsure (1)..(477): unsure at all n locations
ggggtggtgaccattgttgtggaagcgagatggtgacaaactatagcgattcatatcttgtgggtaaagctgtacaaactctgcagagttctctaaactaatcgattagccgtgctcatggtcaagagtgctttggtgaagtgtcatgagtatagactatgttttaaattgtgaacatgtgacatgatttgaaattggataaattgtgtcggagatatgggcccggnggtatgtgaagtgtggggaatctaccttcccatcctgccgtgtatccctacagcctggtcctgcccccgcagtccgcgaaccgttggagcggccggnggggtcgaggcctcngngtgccacgtcatgcccctcgggcctttgcaccgctttgccccgaggccccttgccagctgccatttggcggtgggagcgagcgaggagggtgcccaggctgagccttctttatgcgcgcacgcctccactgcccct

SEQ ID NO: 26519 - DNA, 441 bp, Oryza sativa
  unsure (1)..(441): unsure at all n locations
agcttattaaagtntataaatttattctatttaataattaattatcgaaattataaaacttgtctgcatcttttcctaatgtcaaatatttttattgaacagaggggattantttatggtggtggaccttatctaacaacgtcacatactcacatttgccttatttacaggctctgatggtgaacggtgagtatctcaccttctgtctgctactgatccactangaggatgcagttgacaggtgatgtttgttgtctacttaagaagctnttatacatgcacctgngtgacttaaattagtccctggacctttgtatgataaataactcgataaggtccttgtgtatccattattngtaatatatattaattaatngangggtgtgattgcaatttccaaatttttttgagctgtacaattgatccttgcatcaatttgat

SEQ ID NO: 26520 - DNA, 424 bp, Oryza sativa
  unsure (1)..(424): unsure at all n locations
ngacgcattatgcgatcggcactgacgtagagtttaaggtgtatcggctgacgaaatatcgcacgaaacattaaatactttacaattggagagactaattttgctccctcttgaatatatgtaagatgcacatatatcgtagtacctccgttttcattttgttctaatgcgcgcgcgcatatatatatatatatatatgtgtgtgtatgtatatgtatgtatgtatgtaagattttgagttccactaacataagtctcgctcggagccaagagaggcctaaaactctatccctgaaactctgtttttgggattngtaaatcggctctgaggtgttgaatatattgatctcttcgagagatcacctatatcaagttcctccaattaaaaagtggtgtcacatgtttatccacccacacaaatctc

SEQ ID NO: 26521 - DNA, 425 bp, Oryza sativa
agcttgaaagcgtgcacacaaacacacattatattgtatgtctggcctagaagcagttagatacaacaaagatccaatcatacttctatactctttgtgatcaacagcttcaccatcttcatcaggatccaacacagctgtagaaccaattggtgttgaaattggcttacaattctccatcttgaaccgtctcaaaagatccttcgtatacttcgtttgatgcacaaaagtaccttgaggtatttgcttaatttgcaatcccaaaaagtacgataactcacccatcatgctcatctcaaattccctgcgcatagtctcagcaaaatctatattaccaataatttgttccggcggatgtcgtcgttgaatgtgcaaaggagcagcgacttttgaagttgatccacgttctgtatcagtactggtcg

SEQ ID NO: 26522 - DNA, 413 bp, Oryza sativa
  unsure (1)..(413): unsure at all n locations
tcagtgtggcaactttctaaaggtgatatttctatttggagtttaccctgttgctctatttgaaaaaacattcatgatcatcttaatcttgataatcttccttttcacatgcctgataaggtttctgatctttgggatgagaataagaattgggatgctcagaaaataactcaaattttttatagtgcagctcaacattcaattatgcaggttcagattatgcagggagaggaggaagataggctttgctggaagtacacaccctcaggagttngttcagctaagagtgcttacaagacaatntacaatgaaatgtaccccaatcaaaatcaggtcagtaatttaacaaaaaatcttttgaaattaatctgaaaacacaggtacatgcctnccagagtcaaaacttttggatg

SEQ ID NO: 26523 - DNA, 406 bp, Oryza sativa
agcttctcccttcaggccattcaccgtgtcgccacctggcaaagtgcaagtggcggcggcggcggcatcggtgtccaagacccggcgctgcacgttctcgccgtcacgtttggtatcacggctcgtgtcatcgccaggcaaagcgcaggctgcggcgtcaaacaacaacaacaacaagggccggcgatgctcgttctccccgtcacggttggcgacaaggctcgtgtcgccgatcaaggcgaggttgtctctgaacaggagccgggacggtggcgtccatggcggcggcggcatggtgtgcgggctgaagcagcgaccgggagtcagcatgacggtgcggacggtgtcaagcaggataccatcatgatgcgatgatgaattgatcttggctgggtggtcttcactc

SEQ ID NO: 26524 - DNA, 420 bp, Oryza sativa
  unsure (1)..(420): unsure at all n locations
tctacagtcatgagccatcttcaggccataagaatggagacactctntatatataggaagaaggctacattctcaacaatgtcgatgcatcttattatgagaaagcttgtgagctccatacacagctacctgtattgaaacatcaagggtcttactccatgaacgcgagtttagaggatacacaattcatgatacgatatatttgctaatatactgaatcattaccggctgagctgttgagcacaaagcgcttcttttcgtcttctagatcttatctccttatggctgactcgtgccggcctatacatcattcgagcagtgtttcgtcataattttcgtgagaaagcaattgtgatgttatcagatagtccgaacaaaccaactctaggtagcactatgcaatattttcatcatgacact

SEQ ID NO: 26525 - DNA, 421 bp, Oryza sativa
  unsure (1)..(421): unsure at all n locations
aagagctntatgagtatcagagttatgtatgaagagaccaattccagtactgccatctttccaagaagcatcaatatagcaacgaatcactgaagcaaaattaagagctgaacaattgttaacctgatgaatctgagaatcatgatcttcattttgagcattaagatcacaaacgaaattagaagacatgatttgtgcagcaatattgacttgaatgggtccccagactttctttntgaaataaaagtcatttctagctttccaaatcatccaaactaaaatgaaaaccttttgcaaagttactcagaatttcctatgtcgaaattgtcatcaatgaggtttgcaaagccattatatgaattgttagtagttagctcggtgtttcaacctaaaaataatttagtaggagagaagtaactcg

SEQ ID NO: 26526 - DNA, 446 bp, Oryza sativa
  unsure (1)..(446): unsure at all n locations
ggtagttntttaaggtgtgtttgttgccaacggtacttatcttttgcagacaaaatggtgagagtcagtgtcctcaacgatgctctgaaaacaatgtacaatgctgagaagcgtgggaagcggcaagtgatgatccgaccctcatcaaaggttatcatcaagtttctcatcgtgatgcagaagcacggtaagccttctctctgtgtttatgcatgctcactagtaatacgagctgcaaacctatagttcatttgtcaggagtattgagactggtgccttaactggtcatactgtatatcctcaatgtaggctacattggtgaatttgagtttgttgatgaccaccgctctgngcaaaatgttgttgagctgaacggacgcctcaacaagtgtggtgtcatcagccctcgcttcgatgttggtgtcaaggaaatcgaatcatggact

SEQ ID NO: 26527 - DNA, 421 bp, Oryza sativa
agcttatcatccacttgtgcaaaacatatctatcttcccttttttaagaagcacttgaatcagttgggcaaatgtatacttagcaagtcaagtttcaaatcaagtaaaagaaaactgtgacctcagctaaaattgaccttcgggatcacctctgctagatctccttatatcctgtttgaatagtgggaaaatttcgagaaactcctaatctgcaacttgcatcaaatccttcaaaagatatggtcccaaagtttccaagaaaaaaaggaccaatgcatttaacatagaatcttacgctcagatatctttgaccagaatctctagattagtagttcattttagttctggttgttttacactattaatttaatttggactataactgtcgtttattaccttcaactgctttacaccaagcaca

SEQ ID NO: 26528 - DNA, 472 bp, Oryza sativa
  unsure (1)..(472): unsure at all n locations
taagtcagctataaacatattntaaagagataattaaagattttgaagagcagcgggctacagatctgtagtcagctgcagcacggacttcaatacgtaatgtatgtatgataggtgggaccaggtattaatagtacagtaagcaactattgtatgaattgactattacattggctatagatgattttaagttagtagtgggctatactattaaacttgctctaattgttttatgccagagccataattttatcctttcttttgaggaataaattntatactacggagtaacttattacgcgattcacgggtgaatatctgtttacttatctttntacttatacttatatttatcaatcaaaatttaaaatttcaactttaaatttgaagttgattttggggggtttgatcaaaaatcatttttcagtcttttgttttngatcactaaaaacacgtatatacaaggtttatt

SEQ ID NO: 26529 - DNA, 436 bp, Oryza sativa
  unsure (1)..(436): unsure at all n locations
ctctgggtccttcacgtnaatgagttgtttcgatttagttatcgcaggatatctatttttaaacttcgctagctgacgcctgtctaaattgcactgttcagcgtaccagntcagggttctgccaaaatcattctatggccgtgtttagttacaaaataattcttcaaactgtaacttttccatcatatcaaaacttacctacacacaaacttccaactcttctatcacattattctaatttcaaccaaattttcaattatgatgtgaactaaacacatgcacgtcttacagtagcttctgggtgtattatagaagactgtattgtttgattctagcacaataactcacgtaaagtgacggctgtgcgaaagtgctaaaccaaaaatgcagtccacgcgtgtaaacacgtcaatgccacctactatgacttatattt

SEQ ID NO: 26530 - DNA, 306 bp, Oryza sativa
  unsure (1)..(306): unsure at all n locations
actaagctaaagcctgaatccctttatgcatatctggatctggatccttngttatattcctcttggtgatggcagaagtggccaatgtgggaacaaagtcgtccatcaataacaatgaagacaccagtcggcggcgacgaaggctgtcgacggtgaaagctaagatgcccactaatggcggcataataggtcagccgtagtagcggaaacaccagtcgacggctacgaaggtgagccaacggtgaggacgtagacgtccaacaacggctgtataatatgtcagccgtgtatgcggaggcaccactc

SEQ ID NO: 26531 - DNA, 451 bp, Oryza sativa
  unsure (1)..(451): unsure at all n locations
agctngcaacaatggtggttgtgtcccttttaagttttatgttctcactgtctgcaaaacatgcatcaagaacatgttgccgatcctcatctatcaaccaagttcttgtactagtggtcacactttcatgttctacatgactgacatcatgatctatgttgtcttgtccccctcctgaaattgtgaggcaagaatctgttttcaaatgtgatatatacttgcaaaatgtaatttaaatgggctgcgattacctgaatcctctagttctactccataaccaatatccacatgattggcataaacggcaaagtcgtcatctattcattggaacaaaaaataactttcagcttcagactttgtaaattatgcatactgattatatggaggaaatagatgtgtttatcactaaatgtgaacattgacacacattaagttgtaaaaatgatttgat

SEQ ID NO: 26532 - DNA, 466 bp, Oryza sativa
actaagctgacacaatgacacatggtgacgtctttctaggtgtccctgtgctaatcgtgtgtagaaagtggcaatatggtcactttggctggcgtccactatggaaagtctgaactgcttggttgttattgcaatgagcttgaccattataatgcatttgtatttattggcggcaagcccagcaacaatgacacacgttctttgtaaagttggagctgatgtgtcactattgccacaagcccggcattatcataatgttgtacattgggctctatctgtactcgatacttagatgcttgtgggttagtgttgaatgtagatgtatgacctgtgcttgtctgccgttctaaccacaaaggtgatagtttcgactagatctaaagtagtgaaagaattattctttctcataccacaataagccacatcactcaaatattacaaccgttggacaaactgacaaaaaaac

SEQ ID NO: 26533 - DNA, 395 bp, Oryza sativa
  unsure (1)..(395): unsure at all n locations
ctgcagctacagntagctcggtatctatttgtgtattataatctttatatcttgtgagaaaggacctggatgacacgcccggcgttggaaccctggcttgtcaacccacccacacgatattgaactagaatgcaacagtcaatagaaacaccggacatttagtaacttgggatcatatgagcattggagagcatgacttgccttgctctcgcactgatgagacctcagcatcatcttagagagacagcggagcgacgaaacggctgagatctacgcgactaacaaaacacactagcctaacatgcttttagtctacatgattcagagaacaaaaccattgtaatggacgtcttgcatttctatgaatttactgggacttgaatgggattaaacgg

SEQ ID NO: 26534 - DNA, 417 bp, Oryza sativa
  unsure (1)..(417): unsure at all n locations
tagcatggggtgacacatcaagcattacattngcaggcttgatgtctccatgcactatgcatttctcgcagtcatggtggaggtagagcaaagcagagcccatatcaagtacaatcttgtcagttgaattaaacaggttagcaaaattaatttggtacctttggtgccaagttaacattttctcaaggtcgtagagatgcttgtcaaggcttccttgagccataagttcataaacgagaaggagctgtttcttgctgtcgctccagcccacaagcttgacaatgtntctgtgcctcagttgcgtcatgactntcacctctgccttgaactccctcaaaccttgcgccgattgttcttgacaagattgccttctggacaacaccttgatggccacatgaaagtcctggtccctcaagt

SEQ ID NO: 26535 - DNA, 454 bp, Oryza sativa
  unsure (1)..(454): unsure at all n locations
agcttatgcagttcgtacaggatgatttgtatagtttatggagaagaanaggaggaagaaggtccatgttgagcagaatgatatggtgacagcatttgcgcgtttcgaagcgagtgacagtggggtgggattctctagctgcctgctggatgtgtctgaatttcctcagggttcatacaagatgaagtggcatgcgtgctgcatcgacaaagatggcgcctattatagcttgctgcctctcaacgacggcgcagccttctccgttcgctcgtctccaatgcagtagagatactgctatgttgtgttgccattgtcgccgttgctgctgctgcaagggcatttatctgtctatataaatcatcagttgtaacattatggaagcaatctccatgtgtaccaccagtgtttgtcattctttagatcgattataatgagtgcaatatgcacatagttt

SEQ ID NO: 26536 - DNA, 424 bp, Oryza sativa
tatctcgttcatgtgtcaagcttgtcccacataggagaagatatgtcgttatggaagagagaagctaggctataggcagctactacggtcgataccagtagctaggttggtgacaagaaaattaattaattaattattaattaattaattcgtcttctctgttgttacatcaatcggccaatggcggcatctccccgtttattccattcaaacggaaactgcccaagtaacccatcctttccatctcctataaataccgtaccatctcctccacagctcaccatccaaatcaacagtaatgttctacagttagtgagatgtagagagagatatggctagctaatccatgagagaggtctagatagagagagggagagatgatcagttcttcagaagaggctactactagctatctagcttcatg

SEQ ID NO: 26537 - DNA, 344 bp, Oryza sativa
  unsure (1)..(344): unsure at all n locations
tgatattatagtagtatttggtagtttataacgggtgtctacattacaggatatcattatttgggggtatatgctgccgatgagaggtgggccgctgatggtgacagctcaatacgggtattcctccgcgcctgtatataattctaagttaattccctatggagggtattcctccgtatttatccccggttgtatggtcatgactggctgtcgtaaggaacttatcantcagaggtggcttctcgaagtaccacgagggcatcggatagagggtattatctagtgtatcagttaactagaatgtatttatattatgtatactacaagtataggaatagattatc

SEQ ID NO: 26538 - DNA, 431 bp, Oryza sativa
  unsure (1)..(431): unsure at all n locations
tatgtactntactggcagnnncagttatatcatattttgactatgtcaaattctagcacattttagtattatcaaaacttgagagtgttaaatgtgtttagtttaaagccttaccaaatcaaatatttgagagtagaaacttatggaattattaaaatgtgatagagtaacaattgcaaataacatgattgatttcttgtcatcctaaaagttgctaatactaaaattcgattgacgtaaaaatggtgacagtttatattaacgacgtctcaatatgaatacattattgaagcatgatgtatataacgtatattaaaaataaccatatgatttataattaataacaagaaaatacgataatctataattcatgaatggtcaaactgagatacaccgtcaaaaggatgaataaatagtcttcctccgttaca

SEQ ID NO: 26539 - DNA, 443 bp, Oryza sativa
ctttattcccttgatcaattggttcttatactgcttcatacgtgggtatcaaattttttattcttccacgctgcatgaatcttaaagcacatctgatggtccaaattcgaatgttttgaaagaaaaaataaattattagataatatttttattttagtgtacatattcaggtataaaattatttacaatatcttctattcataacctaaagtccataacaaatcagtctataagtttggaattgatatttccaagtatataacgtgttatgggtgctgctccacttaacgtttcttttaggagagctttatgaggtcagaatctaacttattggcacgaattatgtgcttctattgttcatatccagttgaataactcttctgatggttttagatggagttatcatcagaatggtcagttttctgttaggtcaatgtacttag

SEQ ID NO: 26540 - DNA, 430 bp, Oryza sativa
  unsure (1)..(430): unsure at all n locations
tatgaatntagatgaatatacgttcaagtctcactcatatcttattcttaatgaataagctacgctagtgtgaagattcaaatctgaattaactctaataactgcgaaatggtactgttcctaattcattatttttattcctaaactttatccaaaactccaagtgactgacatgtgtggcttaagagtgtatttacttattcttcagaattaactttctaaatgaaaacagaatagagttattgacaagtggggcccactctaaactctcctctctattctccctctaccttcctttattatctgttctctctctctattctttaacctatatccgttttcttttccctctttctttgcttatttatcctccggcttctctctactctctctctggctcccttgctacccgggctgctgtaaactactc

SEQ ID NO: 26541 - DNA, 445 bp, Oryza sativa
agcttgatggcgaggtgcaaccaccaccattcttagagatccatagcctgagtctgggtccagaagggtatccatctgttaaaaaaaactcaacctaaataagaatataatacattctaatagaacgaatcaggataatttgctattcagatttgttacactcgaatggatcatatttctaaataagaatatgatacattctaatataatgaatctagataatttgctattcagatttgttacactcgaatggatcatatttccttttaggtaattttttttaaggacggagagagtctaatcacaatctcagatacttcacctataaaaaaaaactctccatacgagcaggccgggccgaacaatggtgtgaattcggcccactattgggccgcgacggagaatcacgcgcgacggaccactcaccttccgacctgggagccac

SEQ ID NO: 26542 - DNA, 476 bp, Oryza sativa
  unsure (1)..(476): unsure at all n locations
ggcactgatcctttccctgtgttgtatgtacggcaaacaaatgatgtgttggatatgagagatggaaagttctgctttattagtgtcctcctaagcataatgaaacaactagaatgtctatgcctatataaaaaaaacctttntcctttcagtacacttctatatttcgttgctgtctgatgaagaaatatcctcagtgattagttgttgtgagaaggacgacctagttagtaatagtgtttttatggtgcacactacttattttaaaagataatactgtacatagttgtaagaagtttgatgagcactgcatgatgatcacatcgaatttcttattgagtcaagcttggtgtgagtgagtgagtgaatggcaatcatggatcccacatgtgccagttccatcggcaagtgtaaaattgctggcatactgtttgcatagttcagtttgcacttctgctctaacttttattttttat

SEQ ID NO: 26543 - DNA, 458 bp, Oryza sativa
  unsure (1)..(458): unsure at all n locations
gacactatanagcacttaagcttatccagaaaagactcggctcgaggagacaagattaccagtgtttgacagacagagnctattgattaatgatgcaatgtttgctctacgaaagttagtgtcatctccgatcaggacatatgtttttctttttatcttcaggaaattttatatcgcgtcttacttggactcttatcagcctatgagtataaatatatatacccaacgtttatgtaatatatctcacagatcaatataactactcttggcgcatcgccaccctcattttcaaggattgtatatattaccggcggaacttggcacctaacgcgtggctgcatcggttttgatcttcgacaaggggaagtactatgtatgtcggcttgcaattgactggctcattggtgttgacaggctgcatcctttgcctcttggattctctgtttagtcggatcttt

SEQ ID NO: 26544 - DNA, 445 bp, Oryza sativa
  unsure (1)..(445): unsure at all n locations
agcttgacctggtcgaacttgtgagatgtttatagccctgtctggagaagggaggcgcatctcggagatacctgcctgagaaaggaggataggcctctagtcaatggtgacggcactggaaccgccgtcggatgtgacagccgctgtggtcagcccgtctccagccaggacgcgcctatcgtctcgtcctcttatcccaccgcgccacgtttatctattcacagctggcgctctcagggtggaatttatcaaccacactaccagagagtcgtaccattttcacattttctaataagaagataccaccattcacccttataacatagataataatagaggtgcagatatggaatacttacatattcatgaaatattgttcgncgagatctgctctttacattatatccagatacgcacgactattcacgtattatctcaagcatac

SEQ ID NO: 26545 - DNA, 411 bp, Oryza sativa
ataaaactcagcttgtcatcatcgtgcgcgtcttgctatagtgtgcttcaggtgaacccaaccgccgattatcgagtggtgagctgctaccatctcagaaatatctctggatccgcacaccgcggcgtccccctctcgtgcgctcatgctagccgcatgctcgctcacggaggatactcagctcgctcggcctatctggccctctatgaaggccaacactctattgcttgcgtagaactactatggcatgccaggggctctgcgaaatgtaaactttttcatgggcttgcgtcgctgcatgactaatcttcttctacagaagcgagatatatacagccacttagctctgcctttttacgcccagaaactaatatacggcgaataacattcttctcgactgcgtggttaccc

SEQ ID NO: 26546 - DNA, 436 bp, Oryza sativa
  unsure (1)..(436): unsure at all n locations
agcttgcaaacctcaacatatgctagnttctttgtgcatttacttgagactagttgatttaggttttgaattgtgcaaaaccattttgatttacgcttccacatacgaaactcggttttagccaaaagtttgaaaaaccgcctattcacccccctctagtcagcctccttattctacaaccgctcgccatactccggtctgatcggcctaccctagccggtctaaccgcaaccatcagacatgtgcatgttcatcacttgataacattattcatcatcactcctatctgactggtatacatgccctggtccccccggtctgaccggtgcaaaaaaaaatcaattatcccacatgccaattaatcaagatatgatagtctaatattctagaggtttctataggggtaagatgtgtttgtgttttataactatgagtg

SEQ ID NO: 26547 - DNA, 467 bp, Oryza sativa
  unsure (1)..(467): unsure at all n locations
tgcgagcactagtatcagcctgcaggcgagcagcatgcacattcgtcgatgatgctcctctaatatagtcagagagagaagtgcgcctcttacatgtgagagtgcgcctcttacatgtgggtctatggagagatcttctgacgttaaatcagagaggcatggtggctgatatatgggtccataaatgatgagtctcatatatcagtgaccatgtgcgcgctgtacactaatgtgagaggatttggtttcgtttaagcagagcacacaacctctgaatttcttcactgttactagttgcatgtttcctctgtttctcctctgcgggcataaggcataagcgagcatacaagatgtaaaaatgtatagcaagttttttgaactaaaagtgtgaatcgatgaacaaaccaagttgtactattattcagagaattcangggagcgtctctgcatccctccgagataatatg

SEQ ID NO: 26548 - DNA, 380 bp, Oryza sativa
ttcgagctctttaacactgtgtctgacatatctattgtctgcatcttataaatgatgcccaaactcgtctggattagcccggaaaaggaattatggctcaaggtgagattgaacaaaaggttgagatgacccaaatcaagtggaatacctcctgtcagattgtttccagccaagctgagaatctgcaatcttgtcatgctcccaaatgctacacgaatgcgggcggatatgcgatttgccgccatgctcaagagcgtgaggatggtacacttgccccagtcggaggacagctcaccagtaagcttgttgccggagatgtccagctactccaggcttgggtgcacgctcgacgcctccgagatgttgacggtgaagtggtt

SEQ ID NO: 26549 - DNA, 471 bp, Oryza sativa
  unsure (1)..(471): unsure at all n locations
tctctagaaatgagtacatatcaagtgaaaacagtccaactgttgtaaaattggaaatttcaatctccaccattctcttggatcccaacggtcaggatagttcgaggtcaccctatcacacctatttgatgcacatttgcataaagccgcccgcacacagcctggattttttgtaaaaataccccttaactatctcattgtatactgcaatgcccttaacaaaagtagagtatctaaaccaaaggaaaacaaaagcagctaagttcagaaatattncataagttttagttcaagtactgtacaataactccataagtacttgacaatagctccgtaagtactgtacaatagatctatagatatgagagaaaaatgcctgatgactgaagcatgttaaacaactgtacaataactccataagtaccaacgacttacaatagtgtatatgaacttgctgtttggtcttaacat

SEQ ID NO: 26550 - DNA, 440 bp, Oryza sativa
  unsure (1)..(440): unsure at all n locations
agcttctcttgtaatctntgaacctatctgtatgagcagcgaccccgcttccagtgtttgcttgtgttgtgtggtcttgtcgcgctctggttggttggctcgccgcttataacaagtttaatagtaaagctcactgttacttaacttgtataataagtcaacaggttaactttattttttccattctctctctttctcactctataaatttaatgcatatttcttggaggttgtgtggagctagctcttgtatgagagccaacactacccactttttcctatctctctcttccatataagcatatagcttgcttagagcatccacaatggtaaagtaagatgctatctataaaatatgtacatctcagcaatagactagatttatagtaaaccacttcaatggtatgtctatatagggatctatagctctctaatccatt

SEQ ID NO: 26551 - DNA, 394 bp, Oryza sativa
  unsure (1)..(394): unsure at all n locations
tggcaatctgatagntggtgctggatcatatctttcttctgcaacgagtttgtgcatgtaactactttcggtccatcatactccttaagatatatgattgcatttttatatttacaatgaatcacctctgctggagaacaaagaatattttgtggtaacatcataaagaaatgagttaaatatgttattagaagcacacgatgatgtatgaaaaacaacaaataggaagagattgaaaactataagcaaaaggaagagggctaaacgtacagaggtaagtaaaaacagcaatcgatgatgatatgccatagagagaaacctgttatttagntgctcatgatccatgcatgtcttagaagataccgtatatctcaacagaaaatataagagatgg

SEQ ID NO: 26552 - DNA, 424 bp, Oryza sativa
  unsure (1)..(424): unsure at all n locations
agcttgcaagaattcagctgtagcacagtatctgttttatacatcattntggttnttgtggcagcgtctatgctgtcagtagtatccacagcttgctgcatatggtgcagccatcgctctgcagcctggtgggtaacagggaatggtcgatgccgtgctatcagggcaggatgtcctacaaagaaaaatcaaataggcagattttaggtcaacaagttattcaggcggttgtatttgatacatgtgctgatgtgcacagtgacagagtgatctagctgctattggttcgtaacagaggaaaatcagagaacacatccaaaatttactcaagggcaagttacgcgaaacactaagtacaagcacatattattgggcatcatcacacaattcttgcgccaatatagatcaactggcagattggtga

SEQ ID NO: 26553 - DNA, 446 bp, Oryza sativa
tcacctgagctgcagctattcccacagttgccaccaatttatgttgtatcggtacacttattactagcagccttaatcatttgagcattagaaaaatcatactcatcaaattgtttttctactgctagctcccaattaatgtatgcagcggaatcatactttccatcatagactggtaacttacatgcaacttgtgcaaaattatagtcatgtacctcatatgcatcacgtgaagaagtcgtcatatcttgtcgaaggtgtagatgttgacgttgagcatgaccatcttgtttccccttgcgcaatcctgccatggttagcagcaaacaagaaacatagacaagaatatacacgctcctatcaactactaggtactggcagctcatatctcacacacactcatagctttaacaaagctcttacaagatcttaccaatgcaagtgga

SEQ ID NO: 26554 - DNA, 447 bp, Oryza sativa
agcttaatcaaagagcaatatccacacgcttgttttgttttttgcactattaactcatgaatctaaccgagatataataatatacctgaatcctcgcatatagaaactgtctgtgtattctgtatacataactactagtttcacaaaatgagtgcaaggtaccaatctctgtttagaacactcaaaccatgtttttcacaagagttctttacttgaacatgttataagaacagaaaatgcccgctgctcctatgggcatcccctcaactccaacgttggagaaatgggaaaactggataaattccctaaaaagcaactatatggtgcaaaatatgttatgtgcgcataccaagtttcacaggcaaattcaaccatactatgaataaactggactatgaagttatgcatatgtggaacacttgatgacctacagtcaagatacttttg

SEQ ID NO: 26555 - DNA, 376 bp, Oryza sativa
  unsure (1)..(376): unsure at all n locations
agaaacaagaaccatgtctagtggtagcacatggtacactgtatatgctgtaccattggatagcaagaagatgataaaaagaacttcacaaaagggtaagatcaagtaccaaatgcttcgacttttcttgtgcaaaacaacaaaaaaatctgatacgtactcgcaacttggagagggtgtatttgaggttcggaatagtatacaaccatcacagactcccaagaagtttgatgcataaagcgctcatggtaccaanggacgctcggaaacacctagaataatacataaaagcattaacactttttgaataatataatatatagtaaatcaacttgctaccacattggtacactagcactgaaggtggatcttgact

SEQ ID NO: 26556 - DNA, 399 bp, Oryza sativa
  unsure (1)..(399): unsure at all n locations
agcttctttccgacacttagtgttgtgaataatgtattctaaaagnttacaaaacaatgctagcccttctttgcatactgcaaccccacatttccgtgacttgctaagtacgtatgtactcaatcggtgtttttcctctacaggaagagtgaagtgaagttgaagaatagagttttcttattagtcccaagccattgcatgtggattgggtctagctatgttaggtttcgttgatgcttttctgcttgccggttacactccaggagttaccccgaaggtgtgacctcttaaaggggcaatctatctatagtatgtttaattgctatgatgaatctctgttggttgcaggtacaagcaattgtatcttttgactggtaccaacagcgagggtttgtggga

SEQ ID NO: 26557 - DNA, 446 bp, Oryza sativa
  unsure (1)..(446): unsure at all n locations
tcgagaatggtccggaaccagtacgacaccgacgtgacgacgtggagccctgctgggcggctgttccaggtggagaacgccatggaggccgtgaagcatggctccgcctgcgtaggactccgctcccgcacccacgccgttctcgccgncgagaacaaagccgcctccgagctctcctcccaccagcggaaggtcttccgcgtcgcagaccacgccggggtcgcgctcgccggcctcaccggcgacggtcgcgtcctctcccgattcctccgctccgagtgcatcaaccacgccttcgtctacgacgcgcccctctccgttttcaggcttgcgcttcgccttgccgacaaggaccaggtccgtctcggtctccatcttccaccctttcccatcttttccctctctcccccacttgatctctacaggtgcggatggactacatgctg

SEQ ID NO: 26558 - DNA, 472 bp, Oryza sativa
tcagagtcacctgcggcatgcaagcttatttctcgtgtaagttgttttgacttgtatgatatgagcgactttagtaagcctgtcgaccactacccaaatggaatcatgtcctgccgacgttctgggtagaccggttataaaatccattcctatttctttccatttccactctggaatcttcaacgggtgcaacagaccggctggcttctgatgctccgccttgactcgctgacatacatcacatagagccatatattctgctatctcacgtcgcatactggcccaccagatttgttgcttcaggtcctgttacatcttagtgcttccggggtgaatggaatacaaagtttcatgagcttctttcatgatagtatccttcaactccttattatcaggcacgcagattctttctcctagccacacagatccttgctcatcttctatataaccgatggctctacctcttctcatg

SEQ ID NO: 26559 - DNA, 471 bp, Oryza sativa
  unsure (1)..(471): unsure at all n locations
ctcagcttactgttgaccctttaagagcattgaccaactcctatataagtgagtaactgcgatataaaaggattntaaggtattgggcacttgatcacgcgcactttggcctaagcaaaaagtgcctaagtccctaaaagaacgtgacaggccacacctgaaaatatgggctgcagacatattaggcctaggccaaaaaatatgccttcgacaccctttaaaggatgacgcatataacatgctcccgagtaataaatcttccgggtgatatagaccaagtgtagctcatatcaatagcttctgatctgagtgattatcccttatggaatactccaaaatagatataataatngaatcccgactggcgcaagtattcgtttgtaacccttatggngaataataaatagtccagtctttgagcatagaaaatagacccatgatcacgaattcatattgcatgtatccagagca

SEQ ID NO: 26560 - DNA, 295 bp, Oryza sativa
aaaatgccctccttcattgaaagcgtatctaagctctcccccagttctggtcgccccggagccggacgagcccttgttactctacttagcggcgaccccgcaagtagttagtgcggcattggatgtggagcgcgatgaaaacaattctcatttcacgcttccccaccctgtgccgacttggcccggtggagagcaaggaggagaggcttccgagccgaactgtggtccaaagcccccgacgaccggagttggtccttttgccgcttgtcagacggtgctaggagcccccgacccc

SEQ ID NO: 26561 - DNA, 446 bp, Oryza sativa
  unsure (1)..(446): unsure at all n locations
cacataaacactcagctctgacttatcaaaccttcacgagagcacctattcgttctatgtatactgatattcctgcacgctctgttgtaccattctcaattatcccacttactcattatacaaatatatatggcttattcgtgctatactaaccggctttacagacatagattcaaattgccatctgagatactaataaaatccgtgcttgaaagatccctccncgataagcattggatattcccatggcgccactcaaaagtagcatcggccattgtcacctcggacgatgtatccgcttgaataaattcaacatcatcgccgtccattgaattaacattgatgcatggagaacgccactaaattggatgaatccacacgacccaataacattgtgtaccttgacatcgacatgagaaagcggtggatcgtctgtttccacgtga

SEQ ID NO: 26562 - DNA, 411 bp, Oryza sativa
agcttggtctaaaattcccgaattattatttcttttatgattatattggtaataatccggcgaaggggggattattcagagcacgctcaatggacaatggggatggaataactgctggatggttaggacatcctatctttagagataaagaagggcgcgaaccttttgtacgccgtatgcctactttttttgaaacatttccggttgttttggtagatgaagagggaattgtgagagcggacgttccttttataagagcagaatccaaatatagtgttgaacaagtaggcgtcacggtggagttctatggtggcgaacttaatggagtaagttattctgatcctgctactggtaaaaaatatgccacgcgttcccaattatgggaaatatttgaattagatcgggctactt

SEQ ID NO: 26563 - DNA, 427 bp, Oryza sativa
taagcttcataaaagctagactattcttattttgtaccgcgcattttaccttctgcttgtggctgtctcgcaataccttctacagcttgtcctgcagcagtaccttgaccaacttcaggcccaatagaagcaagacctacggtcaatccagcagcgataacggaagcagcagcaattagtggattcatgatgagtacctcgtgtcaaaaaaaagaaatggttaaagatacaaacaaccaagaaattcatatttctaagctctattggacagaagtaactaaaaagtgcaaaatgaaacgataatctgaattctccgaactgcttcgagatcttctttttagtttctaatcattagaggttgggggactcattattctatttctatttctttccaaccaactgatcttttattgcatacttctttgtt

SEQ ID NO: 26564 - DNA, 397 bp, Oryza sativa
  unsure (1)..(397): unsure at all n locations
caactggttctggcgaagccgcccttctctgggctggatgccggggcgaaccagtcctggcgaaatcattcttcttctgcatggcgaagtcgtccttcttcggcgtgcactcgtgcgacccttcgcctcgcattatacttggctcgtggtcttcgccatgggatacagcagattttgtcgaaaggactcatgccatccgccaacaaacatgttatggagaagaatttaaaagttgcataccagctacattgtagttgtggtgtacttacattgaaatnacaatgtaattacactacgactgtattgtaattacatctggcagatctttaggagaacaattgtcgacaatttatagcaaaattgacaaccttgatgtgatctatataagctgtgcaaa

SEQ ID NO: 26565 - DNA, 414 bp, Oryza sativa
  unsure (1)..(414): unsure at all n locations
agcttgctgagtacaaggggcattctttctgtgttaaagtttctggggatcatctcctatttcccggnggtggcactcagttcaagaatggtgcacttcactacattgatactattcagcaggtttatgatcattatccgagtagcccttattacattcatactttcatgcatcactcatttggtttgcacaagctgtaggaaaatctaaatgtattgtacttgttaacatctgactcccttaataacattctataaagttggattggacttagggaatatcacacagctactagttttgttcttttgtaagcgttttccttgcattggtacataaataaaaaatgcactctctctggacataactacttgggcttttggactcaagcactcaagctttcgaaactttgactaa

SEQ ID NO: 26566 - DNA, 69 bp, Oryza sativa
cccggattccgggcggctggatgttttcagaggggtggggcatccacaccgggggccagcaggctcacg

SEQ ID NO: 26567 - DNA, 432 bp, Oryza sativa
agcttgagcggcaggatctggtctcgcttttctgccctagccatcccgttgcctcccatcgtctactcgcgccgtcacatccacgcaccgtagttgtcttaccgaagtcgcccacaatctgagtgccaaatctggtctcgtcgggtccagtctcactgaatctagccgtgggctgccacatccacgcagggttaaacctttcggtttagtcgatttgatcggacctcaccgaaatactgaaatttcaaaattttgatccgaaattcctgaaattttaaacaaaaattagttgaatttgaacaaatattaccaaaaaatcacgaaaaatataaaaaattaaaaaatttctgccgaaataatattgtctcgaccgaaattttcaaccctgcatccacgacgggcgtctaattaacaacctcattgctgcctgag

SEQ ID NO: 26568 - DNA, 479 bp, Oryza sativa
  unsure (1)..(479): unsure at all n locations
gcgcagctgcgtgagattcttgagctctttcangaatgccttgccacctgcgacgccgacattgacgacgcccagcgtgtgcaatgccgtcagctcctcgatccccctgngcacctcaataccagagcaaggatcaccagcatgcctgcctctgcacagatcangcagccaggatagcaaagcatgtgttgacctgcattttggttgtgtctctgtctcagcagctgctaggcttgcagatgtgccttcttcacccaatgtgactttggtgccaccacgaatgtactgcagcttatgcagcttgacgatgactgttggcaatctgacaatagaggtgtgcctgatatccanggtctgcagctgcctcaggccacccaaggagtctggcaagcggctgaccattttgcatcctcgtaaggaaaggaacttcagacgaagcaggcttacgacacgctcgaggtcgtcattngttacatctg

SEQ ID NO: 26569 - DNA, 431 bp, Oryza sativa
  unsure (1)..(431): unsure at all n locations
agcttctgtacgtgttaacttcttgttgttntctgaataaataacataacttgttataatctctgatattcagaataggattccatcagttgcttatagtgcctttgaatcaaattagaatatagtaaaggaaatatatgtacagttttctacttagaaaggaaacatgatttattattcaggtacaacatactaacctttacaatgaactgcagatccctttttttcctttgtctggcaacagaggtagcatattgacgacatatgtaaacatgggtttcttgaatgaataagtgccttggtggctttatgttacatataagatctattattttttttagtactggtatatattatcagtgatgcaagaaatggattaccctgcgaaagcaagaatggcatgggatctggtatatagtgccactataata

SEQ ID NO: 26570 - DNA, 321 bp, Oryza sativa
ctatctctctctctcagcatgggagacttggaagatatgaaaatgtaccaccatggcctttcactattgaattggacaagattgctttgatatccttcccgcgtgcactacatcagttatgggcgaattggtgtagttgagacagatcgactttatgcatttcatcacaagaggtgctcgtggactgataaaaattacatttcacaacctgaacatatgagagagctctatgcttatttgatgatgcacgacacccactccactatccgtgtatcaaatctcttgcctagacgtattttatcctgtgtgagcatgaactgt

SEQ ID NO: 26571 - DNA, 164 bp, Oryza sativa
cctagagctaatcccttaattaatatatgcgcctgatgattggaattggcactgagggatatttcttgggttccacatgtcacaatatattaacaggagttttagtggaatgttcagagccttggaaatacatttaaccaattacaaatcaccaaagtgcaatt

SEQ ID NO: 26572 - DNA, 395 bp, Oryza sativa
  unsure (1)..(395): unsure at all n locations
gctntccataatatcgaagatacatcatatgtttatcacattntgaaaatccccaagttggaagaagctgcttactgatctgtcgattttagcttcttctgccctctcttaagtggcagcaggctcggctagaaaaaatccatttgatacgaaagcatcgatcttagcttcttctactctcttaagtggaagcaggctcggcaagcagaaatccatttgatacgaaagcaaagtccattttgggacgattgaagcttggagtttgtatagagatgtttggttccttggttggaggggttttttttcaatgtgattagaattccttgttctaggtggattcgtggctatgggcaaccatatttttagatataaatatatgaggggttcaaaatagc

SEQ ID NO: 26573 - DNA, 475 bp, Oryza sativa
  unsure (1)..(475): unsure at all n locations
actaagctttatagttntcctcanattcaaacactagntgcatatatacattttgctttgttggaactaaccgaggggtgaaactcttgctattctaacccccgtcgggttagtctgttcttgctccattgtgcagaatgaggagccgattgtctcatctgtccaaggggtgcggctcttcatcaagtcatcatgatgagtctagtactcattcatcagctgatgtctcgttggaagacgccgaagctccgcgacgactcctgaacgacaccgacctcgaccttgtctgtgatcgggagagaaaagcctactacatgctgagcaaccgggagtatgctcatacacgagaatactctctcggagctgctgaaaagatagatatggatgttgaatcttctgctatttggaaagctgtggttggcagagattgcttgggtagatgagcctggtctccgttgctactttgcatttctat

SEQ ID NO: 26574 - DNA, 392 bp, Oryza sativa
  unsure (1)..(392): unsure at all n locations
atgcaagcttctcccagctgcatgccactggccttttatatctctccctttgcatcaagntcactggctctaaaaatgcaattgaaagggctttagatttggagagatatggtttgtgataagctgggaacccaatgctcttagaatctaatcctcctatctgtttatagctagctagttagctatcaagctaaggttgctttgaatttgatgcaataatgagattatatacacaaggtacccagagatgggcttcttgcttcttggtgctcttggagctatttattaggagaggatggaaatttttttcaaggttaatttgcattgaaatccctaactttttggtaattacctaatgcatccctgtctttcctttagtatttcttcagctg

SEQ ID NO: 26575 - DNA, 506 bp, Oryza sativa
cttaaaactcaagctgacacttggcacacaagagagaagatgctctttggatgcttggagcatctccacactcccaaggcacttcttcacctataaatacccctctcatcctcacttgtaaacacacaccatgatgcagagctgaattacaagaggctctaagtatactttagcttctctatatgttctatagtatacttagaagagggagagagtaaagtacaagaagtccgaggaatctcggaagtgtcggtaatcatctccttattcttgtactttgttaattactctggttcaatagaaatatcattttgagtaattaggatttgcttagcgagaattattcttggttagttcctaattagtataagggatcattgttcactacagtccattaattatatagtgattgctttagtatttagctagcactagagtagttattaattgcgtatacgtggtgtctgtgaattaatttcaatggttgctgcgtatccacagtatgt

SEQ ID NO: 26576 - DNA, 398 bp, Oryza sativa
agcttgaaacagacttcttgttgtcctattatctgtttaaatgatcttctttttctctctgaattctctcgcagtatttcccggccaagttgagatggtgaagaagagggagagaacataaaaaaaattggtcgaaattatcctgtaatatgatgtaattgcaggagttcagttggctgtacaagtatgtagtagtacgtgtacacattttgtatgttaagagcagaatttgttgggagccatgcacgtggaataaaagttgccggtgattgttctttgtaaatgagctcttgtaggtgggatctgaacatgaaattgcattctaaaagaagggttgaaatttgcaaagaggcgtgcagattttttgtgtgtcgaggaaagatgagatgaactgagca

SEQ ID NO: 26577 - DNA, 471 bp, Oryza sativa
  unsure (1)..(471): unsure at all n locations
ggcgaagaaagttgacctctgatcaggtccgaccttggctaatgagtatgttgagatgggccgcanattaaacgaataaccttctttgaagaggccagctacggcgatgtcgatttgagttactttacgatgtgttctccttaccatgacaaggagtagctagatttcatgtttttttttcttttatggatgtcttcaccataaacatggcaaacaaagctgtcgttttgtatcattgtatgtgtacttggaaaattttcttttgatataagcattcacccaagaaagaatgttgtacacttattatatataagatgtatgcttgcgggtgccatgaccttgtattatctttacattgcgtttcccaagctcaaaccatgcatcatggcatcagatatgctagagttagaatctttatctagatctttatanacctgatgcatgtgtttgcacatggtagccattttttta

SEQ ID NO: 26578 - DNA, 450 bp, Oryza sativa
agcttgtccacttgattccaaaaggagaacttatattaattaacacctgatagatacaaagctgctaatctagctagccgacgtcatatgttaaatcattcacacacacaaataaaaggagacgtgcattccaaaagggtcgcggtctggaacgtgcatgtggggctacttcgtggtgtgacccagtgatgccttctctcccgtcctccataatatcactcacaattttaaggcatgtcaccttcaattcgaacataagaataaattattctcaattcatttataaagtgacttaaattttatagaattattgtaaaatacttatatagatgtgtttttcaattaaaaacctcgttttttttgtcaagaacatttgatgatggtgccgcatctttggcatgaaatatttttgactggaggtagtgattaatttcgggattcatgtaaata

SEQ ID NO: 26579 - DNA, 464 bp, Oryza sativa
  unsure (1)..(464): unsure at all n locations
ctcagctngtatggcggctggcattctcgggattagggcttacatctttatgacactctaatcctggccatgtaaatcgtcgagttatcatatatgctatataatctagatcgaccttactatctgatctcgtcggctagcctctatcatcaaaaacagccgataggatccgatattatcgtcaaattagattatatagcatatccaccatcccgaanaggcttccattggcttttttagatcttatgtttctctttatgcttaatgctgcatcaattgtgtgtgatctactaagcaatatccagagccataatatctagcttgcttcaatctgtgatcactgaacttattcatganaatcaatatggtttcataaagcaaaggacaattcacgactgtttggtgtggactttngaattccttcaccaatgtcatcagagcaaanaagaaatcctcattctcaa

SEQ ID NO: 26580 - DNA, 440 bp, Oryza sativa
acctgcggcatgcaagcttaatgtctgctacagatggttcatatgtaccttcagaaattgagatttggatgatttattctgacatttacaggaaaactgatcccagagggaccaaagtggggggacaccaatagaaaaagaccaatatattcctctagtacaatatcccttcttttgcatgagattccactgctgcataaagactaatgagcattccaaagtattccctccgtctcaaaaaaggcaaaccctgactatgtatctgtctttttttttttgtgacggagggagtatgaagttgctcagtagtccgtaccaacaaaagggtattaacatctgatgcagaccattcaagttatcaagctgcgctttcataaatattggatctgcaaaaagggaacaaatgaattgtgctagcttggtatttaaaatatagagat

SEQ ID NO: 26581 - DNA, 471 bp, Oryza sativa
  unsure (1)..(471): unsure at all n locations
cacaaaaactcaactgatgatgttgctgccactcatatgnttttctctcttctctggtcaagaacanacgattaaccgaactgatatgctaagtttccttcaacagtgtgattttcagtacatgctccttctcacatttcttctaaataaaatgctgatatcacaaactaagcttattaaatcatttagaatcttgaattacatctgctgcgaaactatccacaaataaatatcaactttattggcggtcaaggcacgtcgaatttaactggacaaaaattatagctttgatacacagctaaaaggctgaacgtaaaagcaagaggtcaactgagactcttgattaatcctgttcgttgaaattaacaaagctcgatcccatcacttatttgctgcctcttatgacatgaggcatctttactgttcacaactaccattgaactaaaataaatatatgaatccgtagtgtgc

SEQ ID NO: 26582 - DNA, 383 bp, Oryza sativa
agcttgcttgtattatccaatacgttcttttatactggaaacttcaataatgcgctccaagtcatcctgcattgctacaatacgctcctgtttgtacaccaatgagctttagtgtctaacaaacaagaacaaagcatagtttgaacaagcgggccgaaatatttaccatgtaactgaaaatgaaagctcgataaaagcaactgccatctctgtcaactggtctgaagaaatcgtatttttcgctaagaagctgtgtatagaatttcaagttagcagaatagttaaatgtatactgacaaaaaataatgtgcacaatatatgaacataccgcgagctttttttttatgggattgttttcgaattcatcagccaaatccacgata

SEQ ID NO: 26583 - DNA, 199 bp, Oryza sativa
gaaacagcctatatgtacctattttacaacgaattgcagtatatggggggacactataaaggggattactaatctagacaagtgctatatctaatctacagccccctaacatatatactaccacgtttggttttgggtgaatcccacacataaaacacaaaaaaacaacctatattgtgtaactaaaaatcacacagtt

SEQ ID NO: 26584 - DNA, 343 bp, Oryza sativa
  unsure (1)..(343): unsure at all n locations
gtggacaaaatatcttccatgactctctaaacagaaagcatgcgtttgtcctccctcattcagctcgactgcattcaagctccaacctccggcacaccccagacttcaagtaggacgactccagaatgattgctgaaaagccagaatccgcggcatatagcttataacacttcaccgcgtcatcataagttttgaatctcaatacgacccgcggcgcattctcatacaccttagcactcccaccgggatactgctcactatcatngtcatcgactaagatcacctctttgncttcggcaactgtaacaccgatacgggattacctcccaaatcctagcatagc

SEQ ID NO: 26585 - DNA, 349 bp, Oryza sativa
  unsure (1)..(349): unsure at all n locations
aagacttcttactatncatacttactctccatcgtatactttctgctctctctcngnngactcggtcaaacagattaagacagcttccccaacgaaaagatcttgcatggcggagaaatatccaagaacacaacaaacatacaaacaagtcacgtgaaaatatttaggagccacataatttgactgagacgacaaagaaaatctgtccacggaaatatatatactcctatgccgcaaacaacgttgacgtaatgcaatacgattttatttgattacttatgacaattattattcgtacaaaatcacatacatagcatatgtcaatccctgtaattagcacgtgaggttg

SEQ ID NO: 26586 - DNA, 441 bp, Oryza sativa
agcttatggcacactgacacgctttctatttttcaccattatatgtcagggtagcaactgccttctgttgccattggacaatgagtgagctcactgtaagtaggtcatacctacaactaccttattttctataggctttcacaaacaaatagatgaatcaaaataagtattttcataggtgataagagggagcttgcatgttctattgagtactgaccgacaaggcataattaggataacattcttatttatgccagggcaaaataatggagttgtctaacgaatgatgattgatgaatccttttggtcttctctttctttttctttttccatccatgcagccggttaatacgtcatttttaagtagtcacacagctatagatcataggaagagcatgtagtggtccaagatgtaagagggccgtgacaactttggcacac

SEQ ID NO: 26587 - DNA, 377 bp, Oryza sativa
  unsure (1)..(377): unsure at all n locations
tgccttgtagtacgtaccttgctgactcggtatcataaactgtgctggacttggctgattcaccggtgatcaatggatattttggtgatttgttcaagttggagaagtttatagctccaccctacagattccataaaaatggggtagttaagatcacaagagagtgctcccacaaggattttagacggatgagatattagaaatagatgagattntttctaatacaacgaatctgggaaaaagaacatgtccagatatatttaattttgtgatatataccttgacagcggtgttgttgccgccgagcacgacgtccgattggaagtagcggtcgatcgtgctcgccgcgactgtaaggatccactgcgccgcgttca

SEQ ID NO: 26588 - DNA, 437 bp, Oryza sativa
agcttgagggtcggcacatcataacggatgtggaagaagatggacgtcctagtgccccggccgaagccgccaagaactatgtacgtcacaacggttaggttgtgctggataacgtgcctgtcagtacggtgtactggcgaagaacaagggcacgcggagatcatgagagctttgtcccagattcggagaaagagatgctgtggaccacaatgctcgagacattcacccttcctgcgggtacagaggacaaagtgaaaaggtggactctgaagaaaatggcagaacagtttcagagcttcaagggagatctgtaccagaagtatatactgaaggggcagacaccgaacttcgacacattcccaaagctaagggatcactgggacgagttcgttgcatataagacaggtgaacaagggcaggcgatgatggaaagaaac

SEQ ID NO: 26589 - DNA, 433 bp, Oryza sativa
agcttgtgttgaccctattatggtatattaccatgaaccttcggcgtttacaaagccaacctcgatgtagtactgtctacagtagtctgcagtgcaagaatgcggaggtagtaacctgaacgaacgatattttgagcatcccctttcgaagatgtgcattcaagtaacatgatagccacagctcacggtgatagtacattgttcacagctgcccacttatgggaatggtcgttatctgaaatgtgagtggtccgttctctccgtaacaaatttgcaagaattcaatcttctgataagaaccgtacatggatggcgaggcctgactctgaccatcaaccaactgcttgtctaatagcatcactccactgattgccggcattcctgcggtcgtgcaaataaatacagctctgacgagctgcaacctgaatggagt

SEQ ID NO: 26590 - DNA, 127 bp, Oryza sativa
catatattaatcacgtctgtggtgtgggtgaactgcacgaacactatctgcaagatccatatccacgtgttctcctgaaacatctcagcttcgtgccttgcactagcctgccctaccgtcaacaaaa

SEQ ID NO: 26591 - DNA, 418 bp, Oryza sativa
  unsure (1)..(418): unsure at all n locations
agcttcccggtttagctcgctttaatctttcctgctgcatttgtaatcttttatatttttgtaagacgtgggtctgtatgtcaacaattgtcatttgtctaccctggctggttctggacagggatttaatgcacattcagcttagaaattctggttcgagaattttctgagtgtgacatttcccaagtaatgccaaaatcaaagtttcttcagaatgttgaccttgagtcaaccgcaccaaagagaagcggcaaaggtgttgtcgttgcacgggttcaagagcttgaagctgaacttgaggtagagatgtaagacgcatcaaatcttataggtacgcttgatggtcagcaggaggagttggattccttaaagaanaaggtagctgattcataagaagcaagggagctgaagttgcaag

SEQ ID NO: 26592 - DNA, 431 bp, Oryza sativa
  unsure (1)..(431): unsure at all n locations
aagcttcctgcgnttctcttctaacaaaaaggatttgtactctactctctggaaactactaaaatcatgtgccacaagttccaccttgagaccagagatgagacctattatgaaatgcctctggcgatctgcatctctaataacattctctggtgcatagcgagcaagagtagtgaactgagtcagatattgctgcaaagacttgttatcctattgaaaagtacggaattcttccttcttcagctccttgatgccaggacatagtaatcacgagaagccatatggaactcctcaaaggtcaaggcttccgggtcatccaagcctcccctgagaatctcataccagtctaaggcagctcctttcaactgttggactgtgaaacgaactttctctccatcggagcactgagtgatgtgcagctgtcatttcat

SEQ ID NO: 26593 - DNA, 343 bp, Oryza sativa
  unsure (1)..(343): unsure at all n locations
caagcttatntttacactgaggaatggattagtcataacatcaccaccggcttgccgtcgccgccgtcgactggtgtctccgcctgcacggctggcctattatgccaccgttgttgggcgtctacgtcttcaccgatcggccgcctcgtccgccgccgactggtgtttccgcctgcacggctggcctattatgccgccgttgttaggcgtttacgtcttcaccgaccggcttgccttcgccgtcgtcgactggtgtctccgcctgcacggctggcctattatgccaccgttgttgggcgtctacgtcttcactgaaccggccgctcgtncgccgccgactggt

SEQ ID NO: 26594 - DNA, 484 bp, Oryza sativa
  unsure (1)..(484): unsure at all n locations
ctaagcttagaatagggcacccctctggaggtacatttcccctatnttccatgctagctgcagccgatacggactcgatagccacgatagccgatgcccaagcgtacaacaatgggcttatcagacgtgtagtatccggagcctccggtatgcgtgacgtctccgcctacatcttctctcttttcaatgaaaacgagaagcctgggccagccatagagagaaactttggcttgttctacccaaatggtcagaaggtgtatgaggttgactttatgggcggtggcggtggcggagcttgccccacaaagacaagttggtgtgtggcaagaacagatgttgggagtgcagcattgcagtcagcattggactttgcgtgcggtaacggcgcggactgcagcgctatccggcagggcagtgtgtgtttcgaaccaaacaccttggttgcacacgcgtcgtacgcattcaacgactactaccaacgcaa

SEQ ID NO: 26595 - DNA, 434 bp, Oryza sativa
  unsure (1)..(434): unsure at all n locations
agcttggtgtcagggttacagataaggtataccctctacccttagatatacaatgtgtactgatacggtatacccacgcgtatacggatatttcctgtatacattaaagaaattcatcacgtgacagaagcggagtccacagatagaaggagtcctactcggacagaactgggtcgttactgtatcgtgtagggtccgatgtctccgagttctacttggagaccaactgacctgcggtataaaagggaccccccgggaggacctaaggcatcgaatcttatcgccaacacattcaccacaacctacgaagccggagcctacaggagccaagttgccgggtgatctagtcgaaccaactcgactaaggtcttgtcggtatcatcgagttctactattccctcttgtatatgtggnttccattatataatcccata

SEQ ID NO: 26596 - DNA, 412 bp, Oryza sativa
actcagcttgaaactctaactactcgtagctacaggcatccattgttgtgtttgttggaatcaaaagccaactccggtggcattgaggggcctatgccggtccttccagaagcaggcatcgggcgccagccgtgccgaggatcgcatcggctcggatttgcagcgcttcagaacatacggtgcatatgttgcagcgccagtaaccagtggcagctctatcttgaacttctgctccgcagcttctttgagtggtgatttctgcacaaccggaggtggcatagacaccaagtttgctgatgcaggcgctacactctcttctgtgttcttagcatcactggttccttcagcattgtctgtatccttgagctcctccgatggagcggcatttgaaccagccttttgttggcggtgg

SEQ ID NO: 26597 - DNA, 414 bp, Oryza sativa
  unsure (1)..(414): unsure at all n locations
agcttattagttgctattatccaaaaaatactattgctagtagcatgcgggcgaaaaatcaattgataagacaaaaggtataactcatcaacctatcaaaccatgctgtcttctatggtttaacctagagtgtatttacggtactctctattactaacataaactgatcaagaccttcactatcattcttcatccaacgatttatatctaattattgtaaccattgaaataatgatagtagaaaatatcgtattcttagggaatattttttattttttaatcttttaatttttaattttaaaaataaacccatctaaaatttattttcaagatttgaaccttntgatcatgccaaccatgctggcgtggcaaaataatattgtcaggccgctcccatttgcatgacaagttatt

SEQ ID NO: 26598 - DNA, 496 bp, Oryza sativa
  unsure (1)..(496): unsure at all n locations
gcttatcgaaccatggttgaagagtgtagagtcctttaactagaagttgttctatattttatgggtactnntggaggctacctttatatctaacgagaaatgttatatccttttcagatctttgntattcctgtgttgattggactcctgtntgagttactggtcattgtacccatgagggtgcctattgacgagagtccggttttcctgttgtatcangattgggctcttggattaatattcttaanaatatggactaggctggtaagattacacaaattngtgatcantttgtcacctcagttaatttgttgattgtgctccttagaggtcattgaggtaggtttgtgctgattatttggcttacatacttgtttcaggttatgttggatcanatggcacctttggttgatgaaagctggaggacgaaagttgagagggttagagaggatggcttctccccgttgagaggctatgggtcctgatgaaatcatat

SEQ ID NO: 26599 - DNA, 421 bp, Oryza sativa
  unsure (1)..(421): unsure at all n locations
gcttaagattagtgaacttcagtgagcatctatttcgttgagatggacggaaacatcttgatcttatatgtagcccatctgctgttgctgatttctcgcgtgtgttaatactagctttacttatgagcaatcatgtcagcatctggtgaaatttgtaaccgccttcgagtgtcaacatatatttttgctcttcactgttntcaagaagactggacataacctccactgtattttctgttgccaaaacattggtatagagttttttgtataaagattcttatgatgctttcacgattaaggaagacacaaataaagtaactttgctctcagatcaagaactgcccatctgtgtttgattgaagcacagtgtatggtttcacattctgtagtaagggacaagaagcagaaaatcatgtgtttt

SEQ ID NO: 26600 - DNA, 391 bp, Oryza sativa
  unsure (1)..(391): unsure at all n locations
cccgcgatcgacgaanatccggttaccgcatcttactcaaacaattgaaaacctaaacataagaccaaaagaaagatcctatttatactaattagtagtgacattaaatagatctcaattttatggaaatactggaagttgaacggagtcaatcagagctacggattgagagatatgaattttggaagtttaattggaatttctgggcaaaggaagatatttgtggaacaagaggaaattgatttatgaaatttatagaaataatattctcaagaatattattgaccgtcactgacgtgcgggaccaaggaaatgatttatggaattttgggaataaggaattgatttatggaataggggaaaaaggggttattaaatccctttgaaaaag

SEQ ID NO: 26601 - DNA, 444 bp, Oryza sativa
  unsure (1)..(444): unsure at all n locations
gcttaacaactggtgccgtggaaaggcgattgtgaactggagcggcgcgcgccctggttagaataaccggtcggcgcaaggcggtgaatgtgactgatgatgcgcccgccccccgtctgttctgttctgttcctagcattggcatggcgccaccacgcagcgattagaatagggccctgtcgccctagtgcgcggtatgtccgcgggcaattccagtcaccggagatgcggcggctgcgtttcggaattaaagtatggcggcagcacgatccatcctgtgcaatctgctgcccatctggaggtatatttgtttatcccgcgccaatcatgggacgctctctctcgcgcgcgcgcgggcgcgcacgccgnagnccatcggncaccttgccgcgccctcccgtgttgcgccgcatgtgagaggacggccgcgcttcatgtgacgct

SEQ ID NO: 26602 - DNA, 474 bp, Oryza sativa
  unsure (1)..(474): unsure at all n locations
cataacaacaaggccattaacaggatgaagcatgcatgccatangatattagtctagaagcatgctgaatttcttttgctccagaatggcatggaaagcaaaatataaatataatnttattcacgttgaccattaaggatattgacaactctttctggtggcaactgttttcagggatgacaagaactttattcaaattgactattaaggatattgaaaggaagtttgcttgcaaaagtaacaagaagactgttggtttaaggacattgngagtttgttgccattaagtccatcatttgtaccaactcaatcagcaaaaagagccaactntgtcacacatgtgcaacatactgtcaacatgtaaatggaccacatcactaacaagggttctaatggtatcttactatccttaaagcacagtttagttgtcgattgcagnttaaaaataactaatgtaaanattagaaagataca

SEQ ID NO: 26603 - DNA, 328 bp, Oryza sativa
catgaagcttagatatgtagtaggttttgttttaactatggagaagaacgcgagcgaactggttatatacttatggagagatcttgctatgctagtttatgttctcaactcgacacatgtactcgcattaacttacggttgatttttttattggcgggcaaatattgtgtggcgtctttcgacaaaaataaacatttgtaggatggaactcctaggctactaacaatgtttcgacaaaaaataaacgtttgcataggggcaccacatatgtatactaacccgtgagaagaacactatatatactatcatgccccgatgcatttttgtc

SEQ ID NO: 26604 - DNA, 419 bp, Oryza sativa
  unsure (1)..(419): unsure at all n locations
agctttggagaagaagactcaggtggagttctgtcttatactccagntaagcgcctgtgatgatggagccgtatgcccactagtccgctgctgtttattcttgattgtcacgccttaagtgcctttgtaataatgtaaatattatcgatataataaagatgtgtcttttatatcatgtttgtatggggtaccccggcttttcctgtgacggggattaatacactagcgttcgggaaaatgcaattttcacggtcgcgacagttcgattcaagttcctccatataaacttgtttatggacattaagttgttttaccatgggaaggtcgaattggctcaagaaggatagacttacaaaatgaggttacagccgatgaatattacaatatcatggccgatgagagggaggacttggttcaat

SEQ ID NO: 26605 - DNA, 428 bp, Oryza sativa
  unsure (1)..(428): unsure at all n locations
gnctcattaattnggcggctatcactccctctatctaagatgtatgtgagttcaactcactaatccactaaatgtgatgaacaagttcccaacaaataaacacttgcacattcacaacataatgtaacacttattacaacaaaatgtgtaggcaaatgtggcacaaaaataatcaaagcacttctcctggttagagaccttgatggtatcttgaccatgttcctccatattgcgctggagagaggacagagacagaggagggactcatggatggtgcttacatggattggagctcatgatcttagataccttatcacgatttacacgacacatgggaagaccaaggttcattggagcagcttctctcgctgagattaccgcagacattaatggngaggaccgaaaggttggcatgtgtgatggacaac

SEQ ID NO: 26606 - DNA, 441 bp, Oryza sativa
  unsure (1)..(441): unsure at all n locations
agcttagactggaggaacaatcctttattttacataaatgngccgagcgtccaaagtgtgggtgcagggatcgctggcaggtggctacatcctttgctgaacaaacatttcgaaggagatattttgtctgccccaatgtagacaacgatttcgttgtatgtctaaccatttacaaaatccgctatgatttgcacaaaattactacccaaactgaataacattactatttttacagggcaatccaaggatgggtggatttactcgatggatcgacaatgtcactccatcatatcatggccagaagataacagagtcagaaacacaagtagagtatcaacgattgaaggaccacgagaatgcaatgcattctgaccgacctanaaggggccgataggttaccgcatgcttgattcgtcgggatcgaacaaattgtaccgtgta

SEQ ID NO: 26607 - DNA, 457 bp, Oryza sativa
acctgcggcatgcaagcttacaaccagattcctcactatcatttctttttctgataaaagaaaaatataagttgacaaaactatcaagagattagatgaaaataatgcaaaatgatttgctatgaatattcaaataattcgtgcagtcacacacacacacacacacacaaaagttatcattatcgggagggtactgtaaaacttgatgtttgactagtttacttttgttgaatattagattgcttgcatgaaaatgatgagtagattcactgtaaaatccattatgaaattcaaaaataagattacatctcagagaccattaaagtaaacaaaaaatgactcctgctaccagagggaatacacaagtgattgtaagcgtgaggcttcacgttcagtacttacaagcgactccagatcatcatcttcacgagcatatttcgataatcattttcagcgt

SEQ ID NO: 26608 - DNA, 420 bp, Oryza sativa
  unsure (1)..(420): unsure at all n locations
agcttatcgacaatattgtcaggcgtaatcagctagcatcaggcagcagaaacggactagcatcacaaaattgtcagaaacttaacgataatccaagcataacatctgaacttcgctgccttgtgcaagccgctttggctgatgatgaggatgcatcaatcaaatgaggcagctggcatggcgtcatccgttggggagatgttgggccttcggatctagaagccaggcagccctctctcctggacatcagcctccacaatcctctttctcgtcgccgccctcctttccggacaggatctgagtaaatgtgaacacgagtttgcaggagatgggaaagcatcgccactgcttgccgtcggagcgcttgcgccgcagctcctccggcacggcgggcgcctncatccccatcccccataccct

SEQ ID NO: 26609 - DNA, 482 bp, Oryza sativa
  unsure (1)..(482): unsure at all n locations
tgacttgacttccgaacagacatgaagctgatatctggtcctctagggttgacaactaanagaattggagagattgggaggagaantttgaaaaaccgtttcacaaagaaatgccgaaaggcgagaggagacaatttgcaagtagggttttcagaaaacttgtccttagggtttgaccatttggctcaacctatagtcaagttggctctgataccactttgtcacgcccagaaatttagcccaaatttccagactattttgtgtattaaatccctgtccaggaccagccagggtacacaaaacgacaagtaatatacagttccaaacataaataaagcgtataatacttacaaaagaggcacttagtcctcgcaccgaaacgaaaacagcagcagcggaaaaaggcgatcctagcggtgcttcagctccactccacaggcataactcaactggggtctgagccttggtcctctaacttcgtc

SEQ ID NO: 26610 - DNA, 346 bp, Oryza sativa
  unsure (1)..(346): unsure at all n locations
agcttgacttcagcagcggtgcgacttctttccacangccatccctgacggcagcgacgaaaccaacctcaataagacagctcccactaggaagatcttcagctcttgtgtgggggaaaagagagcaaagctgagtactattcactgtactcaaccagtcatacccaaagaggaggtatgatgccagatatatccaaagaggcttagggttcatttgcattaagcaagcctttaaaagcacgttttggaagccggaaaaccattgtagtaatttattaatattaaccaatcattgtccaacgctacaccacactgtaacaggcccaacccaccacttaaactacac

SEQ ID NO: 26611 - DNA, 373 bp, Oryza sativa
acatagaaagatctgtactattgttctcacgagcctgtagctactgactatatgattgtgtagagcatgagtatagatttcacttaatggtagtgcctagaaaattatgatgatctgccctttaagttgcttttagggtgtattcaacggtttaaatcatgccgatcatacagaccatcactatatcactcacgcatgttgttcaatatagtttagttattttattgacaatagtaagcttggattcatatcatcgcaggtttttttattgttcctatgtgtgcgtactttaaatccatatagacccttctgcaagactgcagctatgcttaacttaatatcaggaacatctataatgtaatatggaaatagc

SEQ ID NO: 26612 - DNA, 435 bp, Oryza sativa
agcttatattccaagcttatcttttatatctgtaagaacacatttataaaaattgtgttcacaaattatttttaatttgtaaatatgccgtttggattattccccgaaaaaacgaaacaatggggccgccgcagattctcaaatcaaggagagtgactcccctaagggcaagggcaatagaagagccgattgcttactctaattcttatccaactcatttagaacttgttttacagttgatgtatacaataatagtctctacaaggctcaacaatccaggcttggccaaccaatgaaattggttttgcctggcccatcaagcataccgggccatatgcatgctgcgcttatgccatgtgggtcccactgattgcatggtagcctgtgcaaaacgggcgctcatgcaagcgccggctcacacacttctcctcgcat

SEQ ID NO: 26613 - DNA, 61 bp, Oryza sativa
  unsure (1)..(61): unsure at all n locations
taattcactttataataagagagaatcaattatntaccactgtctntatcacacgtctacg

SEQ ID NO: 26614 - DNA, 440 bp, Oryza sativa
  unsure (1)..(440): unsure at all n locations
agcttgtatcaaactattntcatgcccatctcatctttcgtttagttctgtatgttaaaaaatcatattgttagtttctttttgcatcgtacattcgaagtggtgcataaaattcacgataaaaaaattagtggtcaaagttcacacaactcaatcatcaacattaattatccgttaaaaaacggagagagagagagagatagagagttctaattttctcttaatatatctcacttatttttctttttcttttttcagtccagtctactctatccctgcgtgcctggctgtacctgcatgtactgatctgcagctcagaattatagaatggcagcatcgattcatccatgatctcctatagtgtcccaggggatgcatgcatacatgcttccatgtcgacccgctgcctgttttctcttgtcagcttccactctggcagc

SEQ ID NO: 26615 - DNA, 335 bp, Oryza sativa
  unsure (1)..(335): unsure at all n locations
tatgggaccggtagaatgttcttctatcatacaaagctagtattatatatgtgttcaatgatcaacaccactaagagcaaagctgtgggcataatttatgaagaaaatgaaattcacatgccgcttgttcaattatattgtctagatgcttatctcaaaaaaaaaatctagagatgccatgctcacaaacttggcatgtttcaaagcataatggcatttcaaanaatatatatatttcaaagcataaaggtcaaatcacgtgcaaaatttgatgcaatatattagatgggatcaatcatctgattagtttacaaaacttaccaaaggattgaata

SEQ ID NO: 26616 - DNA, 320 bp, Oryza sativa
gcttctcggttcttggtctctgccctagcattatgccaaccccgagaagatacgagctatatagcggatgcgcccccccagcaagcttatggatgtgcagtgcgtcaccggctgcatggccgccctaagtcggttcatatcgaggctgggaaagaaggcactacccctatttaagctcctcaaacgctccaggccgtttacctggacagaggaggctgagcgggccttcactcagttgaaggcgtacctcagttctcccccagtcctggtcaccccggagccagatgagcacgtgctactctacctggcggcaaccccgc

SEQ ID NO: 26617 - DNA, 438 bp, Oryza sativa
  unsure (1)..(438): unsure at all n locations
ttcgccaggtaccatgtggtttctctctctctctnttctagnggaaattatgtatgtaaaccttgggtatagtcttatgatgtccatggagtatgtagtatgcggattcgagtaaactatagttcaaaattgtgtactaaatcctctgtatcttttccactatatgaaggctgacaacctgcggcagcagactcttcaacagatgcaaaggatactgaccactaggcagtctgcccgtgcgcttcttgtgataagcgattactcttcgcggcttcgtgcccttagttccctctggcttgctcggccgaaagaatagcaagcgcaagtaactngactgcaaccacatttttcgggnttgggaggtgatggtgatcttacctggaagagttgacaatcctgcataggacttgattcggagatatttgcacatactataat

SEQ ID NO: 26618 - DNA, 427 bp, Oryza sativa
tacagatcatcggtattctacttattgattaattctgtctcaagaggtcttacatccggatcttcttgtggtcaaagggtaatattgccggcttcatttacccgtgggcctcggtatttgtatcaaaattatcaagattccattgctatttgtagaaaagatgggtgtcttgatctatttgtcacattcacatcaaatccggcttggcctgaagtcaaggaggctttagcacgaattccaggtcagcaaccatctgaccgtgctgatattgtcaataggggtttcaaaatgaagctcaatattttaatggatgatattaaaacacgtgaattctttggccctaataatgctggtaatatcttttctcctttgttttgtttcaaacaataaatatcccttaaacttccctgtgcaactctaatcatgc

SEQ ID NO: 26619 - DNA, 491 bp, Oryza sativa
cttcactgggtgcttcagaatcagctttagtgctgagggacgtgttcttgatccatttcgtactaaacttgaacctgaaatggtagaagcactattctgtaccaatgattggattgctggatatagaagaggtgatcacttgtgtcatctttcatctatatttttgtaaaaggtattcttgttagctgattttctattaataagctaatataacattcttccaaattttttacattctaattaaagggtcggatctattcttaatgatctcgaggttgcggagaccttggttgctaatatgacactttgcgagattgatgatatggtatgacactttattgcataaattttgttgcaatacattatgtagtcctatcgtcaaaataaatgtatattgtttgctcatacttataggagaagcaacacagcattgatgatgaagaataagtgattaactgatgcgtgaaagcttgaacggcttgtttgtgtgt

SEQ ID NO: 26620 - DNA, 359 bp, Oryza sativa
  unsure (1)..(359): unsure at all n locations
tgccagcttacatgtnctggcgccgctggatgcatcttcttaaaccacagagaggctggtgatcgattccacgaagccaccgtatacgatagctttcaagatgtcccaatcatccctttgctctggtgcaggagtatcaatcaatggcatgctcgcatcaggccctatttgcactgatgaatgctcacgtcgagtttgtgactcaactgcttcaagaggaatcacaatgcctcgacttggtttatctaccattggcctcaccacatctgcgagtcatatatgcaatgcgacaaataatatatgtaaagctggctcctcaataatggtgtgaacacaccacacccggtataaaattaact

SEQ ID NO: 26621 - DNA, 287 bp, Oryza sativa
  unsure (1)..(287): unsure at all n locations
ataggaagaattcctatatgaattgtatcctatgaaattcatataaaaatcctttgattcaaaggggccctcaaagaggttcattgtaagttatgttgatgcactgttccagatccgacaaaatcctggtgcagacctgtcaaaaggaaaatgtattgcaagtgctacaaagggtactgtagtcacctcggctctcangattattcagccaagttgggaaagacatgtactgtgatggatgaaacttaacatcgatggttcctttgattgcagcattgggggggggg

SEQ ID NO: 26622 - DNA, 341 bp, Oryza sativa
  unsure (1)..(341): unsure at all n locations
agctttttcttttcggatctactaccatttttttttgtttctgttcgagcatgttagggcctcacacgtagactgctaaagcattgtctttgctaatgctcgtttgtgctgtaggagggggaaaacattttttttctcgcttatttatgggtatatgtattcttactgctcatatgttgcgattaattagtaaaagatgttagctcttttgggatagtgttagttcctagttgacctagttgttgctggcagagcaaccatatttttacaactatgctaatgagctgtctcttcatttntgcttatacgtgctcgtctgctggattatcactgttgtacta

SEQ ID NO: 26623 - DNA, 377 bp, Oryza sativa
  unsure (1)..(377): unsure at all n locations
agccgcgccactttcccctcgctagctgtgtgcgcaccaccaccacccaaccccaagtgcatccacggtgttgatcacgcttgacaccatggaccgaatcatgagacaatggcgatctctgctgctgctgctgctctgcgtcgtccgctcgagctcgctgctgctggtgagctcgcagacgtcgtcgtcgtccgtctgactcgtgcaccgtcgcgctcgccggttgcgatctcatcccttcaacaccaccggcctcaactgctttcaggcatggagctcgcacgacttcatcctcanggtaagctaagcttagctttgagaatcgcgagatcgttcgacctgctttggttctcgcttgacgtatcaatggcgatgcg

SEQ ID NO: 26624 - DNA, 383 bp, Oryza sativa
  unsure (1)..(383): unsure at all n locations
agcttggtctctgacgagagaatgtgctgtttctattacgtagtcangtagagctagaactgtcagtttcacacaggatcattcactttctcttcagcagctcaacaaaggctcgccaaatcacatcaacaagaatgcttattgtataatcatccctcgtgttcaccaataaatctgctgcggcttattggtattgtatgactaaaaacaaggttcgtggctatagctgacatccctaaatttgtaatccatcttggaattaacaaaaaggtagcacacaatttgagcccaatctctgcttaatttgtcggcaggacgtccaacttttatcagatcttcacggtggttacatgcctaagaagcatctggatcacttcaaggga

SEQ ID NO: 26625 - DNA, 400 bp, Oryza sativa
  unsure (1)..(400): unsure at all n locations
gganaagaataaagttggttctctgacaataccttgaagtgaatgagtaacagcacacgttgcgtcggggcaacctggatggacggtcgacggcgaggtggtggtgccttggactgacagccggcgacgctgcccctggatggacggctggcatgccggcaatcccccggataagcggccggcggagccctggacggacggccggcggtgacctggacggtcggccggcggtgacctggacagccggccggcggtgacctgtacggccggctggcggtgacctggataggcagccgacggcgatcgggacggagctagcgcgaggagctcccataaccctagcctggcggcgtgggcgctgtttctcgcgagatagaaaacgacgcgaggaatgagcgag

SEQ ID NO: 26626 - DNA, 389 bp, Oryza sativa
agcttgcccacaggcacgccgaacacgctcttgtcggggttcagctttatgcgggcggtgcggagactttcgaaagtttccgctagatccgagagtaaggtctcctggttgcgtgttttcacaaccaagtcatcaacataggcctcaacattacgtcctatttggctacccaaagaaattcgagtagtacgttgaaaagtaggacctgcattctttaacccgaaaggcattgtcgtataacaataagttcctatgggggtaatgaatgcagttttttcctcatcctccctagccatgcgaatctgatgataaccagagtatgcatctagaaaacacaaaaggtcgcaccccgcggtggagtcgacaatctgatctatgtgtggcagggg

SEQ ID NO: 26627 - DNA, 153 bp, Oryza sativa
actcagcttcatgacagctacatttgtaaaatgtttctttggttgtatctcttgatacctcttggcccatacattaacaattttaattactaggaagtaccccctccgtttcataatgtaagccattctagcatttcccacatttatattgat

SEQ ID NO: 26628 - DNA, 450 bp, Oryza sativa
  unsure (1)..(450): unsure at all n locations
ttaagtcacctgcggcatgcaagctntcctgaccaatgtccgaccagtgttgtgtgacccacagatgccttcatgtatatcaaggaggaggtgtttgccatcatcggacgagacgcatttgagaagtaccccgtttggcgctttcttgtatagatcgttgccgaccatacagtagatatttgctttacgggttattttctcggcctctatatcgtcctcgggcaactcctcgctgttgataaatttgattagtgggatgcgccagtcatctatggtcttgatatcggcaacgacgtgttctgcctttgtggccttcgagctaatgtcgggggcggctgggctaacttcgccgctaacctctttactaatggcttcgtcaggatgtctagaaaagtgccgggctcgagcggttctcgtctggacgcacgtcgtgctagttcatctggctcg

SEQ ID NO: 26629 - DNA, 470 bp, Oryza sativa
  unsure (1)..(470): unsure at all n locations
ttaagaactgaataaagcattaagtcgacaagctagcacagttagcctcataaggttcagaagcacaaagggaaaaggctatctaccgatttctacaaaactacatgaaaaactgagtgcatatgaaatgcccgtgaaaacaagaatttaccattctcaagagcttcttgtgtcgtctgaagcgaagacattgattcagctagaggatcaccatcttgaggaatccaactccactcattgtcttcattntgctcttcagacctatccaaattaaaatacccccttaacacacccccaccgtgacttttatatgctgattgaacctcttcgctttgccggtcctcgctttgatccccgtcatagctcatcgacattatttgatgcctgttgttgctaacagcaccacctgcaccagatgttacaaagtaagactncaaaatgcaagccttctccttgtccctcagacccct

SEQ ID NO: 26630 - DNA, 428 bp, Oryza sativa
  unsure (1)..(428): unsure at all n locations
gaagnttgtatttttttaagctaatgtttttctaatatggngcagctctggtgtgcggaattggagccttgagatcattcgcgcttgacaagatatactattggagggagagggcctccgggatgagctctctcgcctacttcatgtccaaggacaccatataccacctcaacaccatcgtcaagcccatagtctacctctctatgttctacttcttcaacaaccccaggtcatccatctgggagaactacgtcattcttgttgccctcgtctactgcgtcactggcatcggctacactttcgccatcttctttcagccaggctctgcacagttggtgagtgttgtagatgtacttgtatgcacgctggattaatttccagtagaacaaagatagaattcacgatgcacatttttgtggtaagctata

SEQ ID NO: 26631 - DNA, 431 bp, Oryza sativa
atggggcttattatcataggtcatattcttatattctaggagtgctctattctatgctagcaatatattatatcaatctagaaattattatatgagctacagtcttctaagttctttgggatggggatggaactatggatccactggtcctaacaagttttatttggaattatttggagctaccatgcgtatatatacttatttatatgtattgtttaaccactattatgtgttagtacctatactaccaaattaaggtttagagctatggatgaacagagggtgccatatttcactctacttaggtgaattacattactagctggtcctatagaaatttggttcacttcatttagactaaagatgaatcttctacaaatcttacaaattcacatgttgctctatgttggttattaattacatacatattt

SEQ ID NO: 26632 - DNA, 432 bp, Oryza sativa
  unsure (1)..(432): unsure at all n locations
agctnttctctagtataactttacatcttactgacccactctaccagtttgaaatatggatagcctatcaggggcaatgaaacacttgatgaattgtcttgaatttttattctaatgcgccctagaaattagctagctatagcttcaattcttcgtagtttgaaccatagcaaagagccaaagatatattaacacttgccagatcttcttgtttttttttaaatggtttggtccaactctagcccaatatgtatgtataattcattcaagcaacgtagagcctcaactaatagataccgatttgccccatnttttttagaaaaaaccatgatatttataatgttattgtaatgaagcttgcttaccataactattcaaatatatgtgatattagaaagaagggcccaatccaagttgcaaatactccctcca

SEQ ID NO: 26633 - DNA, 476 bp, Oryza sativa
  unsure (1)..(476): unsure at all n locations
tgcagngagattntgtaatgctgatgacctttctgaacatatgtgcaggaacaacatggacctgcatacacaaataaaaagaagaacatggacatgtgtgaagacctgaaatatttaatattaaacacctcaaatatcactaatggatatcccacctcatccattaagagcaagccccactccctatttcgaatttcttcaattatcttctcagagtcttcagaccgtttacctccaaatgcaaccatgttatatgtagtcacaactacaccggccattccacggaatttctccttgttatctgatgtaaaacggctgatatgttcatcttttatagttgaccaaagcttgaactgaaatgcccattgatcaactgatacagcatttgtggccaaacatatacaactcttcttgatacgacatgcagcagatacaccaaccaaggacttgccagcaccacaaggtaacacaataat

SEQ ID NO: 26634 - DNA, 424 bp, Oryza sativa
  unsure (1)..(424): unsure at all n locations
agctttggttcagagagagccacaactcattgagccagcggttggcggttgccaaacaccgcaggtatacttaaaaggataaaggttgcttanaagcgttgaataacttcttctttggacaagaaccttgacttgatcgatttttcagctaccctaatctgatgggttcaaccttaccagatgggataattatattatattgacaactcaaaacggcctttgtcctataaaagtggtggaatgatgaaacccatcaatcgtggtacgggtggttgtgcaggagtagctctaattctcgtcatcattgggcaacagaagttgctnttgcttagtagcacctttgttcctcaaacattgccaccagctgttatttctattcagattttgacggatatatntatttatagtactgcaacaaatctat

SEQ ID NO: 26635 - DNA, 506 bp, Oryza sativa
  unsure (1)..(506): unsure at all n locations
ctattacggacctatgatactaagcttccttactacgataataggtgtgctagttgnnttttgttggntctaaacangccatagctgatagctntgcatactctttgaatattgtaggcagagttcctgccgttccgctgatgcatggtgagtctggttaggtagatgagtctatatgggagatggccgctcgattttctgtggtgtttgattggagggcaaggtaaatggagncggccggaataaggaatattccctcaataagttagatgagtgcatccggatgatttggctcgatgaagccatccagttttggattgtgtgatgtgtcctattctgattagctgtggttaggttgattttctgttaagcaactctccaatgatctttttattctagaccgtgtatctaatttatgatttgattacaccatcatattttgtatatttacatctttaaaacaagatctcggttgagtatatcttgataagaaagtatatatgaca

SEQ ID NO: 26636 - DNA, 369 bp, Oryza sativa
  unsure (1)..(369): unsure at all n locations
cttgagaagatcaagagtgatattaatatatggtcatcataagagngacaagcagctgctgcttcaactacaaaagaagggtgtggatcaagtggatctacatgtactcgttcagctattgctgctccagtctcaacaagaccaagcaaacaacaaagcagtagacatgtataaattaccagagtggaactacgataacatcatgaaaatagcaaggaagcttaagaagcatatggaagcagacgaggagcttaatgagcaaattagtgtagaaaagagaacaactaatcaaggaggaggaggagagaacaaggaggagaaagacaaaggagatggagacagagaagaggggaatgatgagaacgagaa

SEQ ID NO: 26637 - DNA, 471 bp, Oryza sativa
  unsure (1)..(471): unsure at all n locations
gagctaagagaggtgcatactngcatgcatatactcctatatttcangggttacaaaacactatgccctatgaacacacatattcctggctaggtaggctgctagctgcatagtaatatcaaatgctaaaaagcaatcgaacgagattaaattgtgtgttgggcttgggatgcatcacgagtgttaaaagctcaggaaactggccccacaagtaagtcactgtcattctttcctaagattcctccttttaactttcgtgctagtgatttacatgcttcattttatatgaaatatattttcctttgtagtatatatccggcaaactgatgggattctctnttctctcagtaactgggatagctatcgcattcttggtccgagctggtaagcaacactatggaggagcangactgtgctacttgctagttggctagagcagcgagccaccgatcctangcatgccagagatgt

SEQ ID NO: 26638 - DNA, 354 bp, Oryza sativa
gctgcagcttatggtaagatggacccaagctatgtgttactgtcctggaaaccgctttaactaccacaaccgtcataaggacccaccagtcagtgacccagagaagtgtggaggccttctgggccagcccaggttcggccaaaccctggctgcgtctgctcaggttggctctgcacgtggacgatcgggatggcttgctgatggcgggtgcaagggcaaaatggacaattcgcatggctacaaccatcataccgaccctataaaaggaggagctcacttcattctcaacatactcaagcaagttcaagattcctcttcatactttattttagtagttttagtgctaagtggagt

SEQ ID NO: 26639 - DNA, 430 bp, Oryza sativa
  unsure (1)..(430): unsure at all n locations
agctngcaactgaggaagcaccatctccatccagtgatgctgccatgccaggctctgagcctagtgcgccgccactcccgaaatctgcagaagatgacatgtctatcgatgaggttgacattcctatagaggacatggatgagccctgtgccactccagaagagacaccaatggaggaggcgattcgagtgacccgtgggaggcttaggaaacgtattgccgcagntccactgctgatgcggtgcacatataactgctgcctttgcattctattcacaaatatggcttcaaagcttaggcatccctgttggttgcacaatattctgttcacatatgtcttcagcttaggtgactctgttggtgcagcaacaattcttgttgttattattgttgaactgcttctagtaggttctccactgttgctattgct

SEQ ID NO: 26640 - DNA, 184 bp, Oryza sativa
tattttttttttgaggaaaatgctcaggaccgccaaatttgtaggggattactggggcccggtaaccaaatgttaggccatcaaaaaccgaaattgcagctggcaccctcaattttttattatcccaaaaaatggagaagaacacctttaaatacattctaccttaaacttgatcttttttctt

SEQ ID NO: 26641 - DNA, 406 bp, Oryza sativa
  unsure (1)..(406): unsure at all n locations
acgcccgcccctccngaaagttagaaacgattactattctagtagctatagctaccttgtgcgctgaactaacatcatgcaaagaaaagcatcgatagcaacatgcttttcatagtcaataaagtggagcataagtgccaccggccaagtagtttctagctaggtttgtttcaaagctattagtcgtgtccgttccggtttgaggcgccgctattgggatctccataactattacatgcatgtatggtggagttacgttttcgcctttacgtgacgtaggagatgaatattgaacgtcgactatatagattggtataaggataagtggatcgatatctcgttggatccggccatatgcttgtgcccatactatatgtgctgtgtggctaagagatccttgtgtgca

SEQ ID NO: 26642 - DNA, 331 bp, Oryza sativa
atcccccacacagccatcacttggtatagttcataaggatatctcccaattttttgatggagatgcaaagcttctcccttaaatcatcacgcccgataagaaaaaaaattgttttccaaatcactggcacataccttaattgcagcacttatcttctgaataatgcgatcgtgttcgcgaaaaaactttgtgttcacgaacgcgatcaaaaactattgtcctgtcctcttcaaatgatttctagtggatcaggcaacggtagatgaggtatgcagcaatagaccttccaatagagaaacccagatcttcagatatgcacttgatcaacagc

SEQ ID NO: 26643 - DNA, 485 bp, Oryza sativa
  unsure (1)..(485): unsure at all n locations
ntacctattcgtcagagatcgaacccgatgcagcccaactcgtaagctaaaactcgttgaaacaatgaaattaaaaaagggtggcgatacaccgaagtattattgaactgtcgtcctttgatcacaaggtgtcgggtcctatttatacccaaagtacataatatatccttgttggacacggctcttatgtctaatacaatttaaaacacgaacaagtcccctaggcggactattaccaaaaatatctctaagaaaactaaaaatatcataattaatagatacaattactcattttcaagactccaatccttgtgtggtaatggctatgaagtgctttgatagatcccgatgatagatgtgggaccgtctttntcaagactgattgcatcggcttgactccgttggatntggcgccaacctatatatggcagccgatgccgctcgtggccgatatgcaccctactcttcttaaacagaattcctcc

SEQ ID NO: 26644 - DNA, 361 bp, Oryza sativa
tgaggaccttgccgtgtaccggctgttcattattatatagaaggaggacacagagccggtgaacgctgtcgccgcggcgtctagcacggacaagccctccacgccggaggcactgtcaccgcctacgccaccgccacggccattgctgaacatggccggatcatcgtcggcaacgtcgctactgccaccgcaattgccaggcctggctgggtcgtcgtcgacgatgccgctggcactgccactgcagatgcctggcctgcccgggtcgtcggcggcgatgacgctctgccgggcttggctggagagatgacgtccatggcggaccaagcgaacatggcctcgacgtcacaggcgtcagcac

SEQ ID NO: 26645 - DNA, 434 bp, Oryza sativa
ctaagcttacggggcgaggggtgatctaaatcttgcgttcaccatcaattgaaagactcattgtcgtcggggtggtcaccgcataagatctggcttcttgagactttcaagtgtcatgcaagccacggcgtctagcccgatttcccccaatttctcgtggtgtgtattgtacagcacacgacaagcctctgacgctaacgcggcgctgcaatgtgttatgttgggcccctctgattccggtggctgcaaacaaaaatattgacatattgaaattaagcatgaataatgggccaagacgctaaccgtccaatggaagatttatcctaacataagttcattatatgaatcccacaaaaaagagtttattatatgataataaatattagttctcaagtgcccttgcccttgactctagccatctcacgatgcatgtt

SEQ ID NO: 26646 - DNA, 353 bp, Oryza sativa
gcttcgcattgacgttgagctgtttgttttctcattgctggacacagcaatgagtttggcacgtgcatatgagttgagggtgcagatagaaaacccggtcccaatcgaaccgggcaagccacccgcacgcgcaccagcaactcgtccagccgcgtaaccagcagcgccacacgttgccccaatagcagcagtagcatctgctccagccgctccagcagcagcagcgcgtgccgctgcgcctgtccgggctgcacgcgtagctcggcgcactttgacgccagaagagatgcaatcccagtgtgaggcgggcctttgtttcaactgcgacgaagaattcacgccggggcatcgtt

SEQ ID NO: 26647 - DNA, 486 bp, Oryza sativa
cggcagagcggacaaggaagtgggaggaggagatgatgcattatctccgggaaggcaagtccccggcggttcctttcggtcgtcggcgaagtgaggccaggcagaaggcctccgccgaggacatcgatgatggcgatgatgacctacgtttccaagaacctgtggccaccattgccactgtcgatggaggagcgtgtgctcacgtttctcgccggagcctcaaggctatgaagcgagagcttctggctgcggcccctactcatgaggcgacgcgccgggcgcggtggtcggaagttgccctcacttttgaccagaccgaccacccgccgtgcgttgtctggggagggcagattgcgatggtggtttctcccaccgtttgcaacgtgaagatggggcgtgtcctcattgatggaggagcagccctcaacattctttcctcgcagcctttgatgccatcaaggccccggggatgatgctcctgccgtc

SEQ ID NO: 26648 - DNA, 335 bp, Oryza sativa
accacccgccgctgcaaccgggtggctatgaggactttttttttatgcgtggctcactgccgtttcaatcgaaatcgccgccactgcttatgaatggcaaccaacccttgcgcgtcggcgctaccattttattagacgttatctcgaatctgccttatcggtatatacttattagggtagactagcggtttaggcccaaacttcttaaaaaataaccccgcctgcactatgaggcgtgtattcttagcattgccactggagcctacaacgctgtgacctgatctcaatgacacacttgcccttggaatattgccagggaaacgggcaaaattcct

SEQ ID NO: 26649 - DNA, 380 bp, Oryza sativa
cttcggacatatttctgctggttggcgtaccttaaggccacgcccataacacgttaccaagaagtatgtttggtaaattatgaggattatctgctatattccagatgctgtgatatgtaaattaaaaaaacaaaacttggtcggcgggggaaagaccgccctctcatattttcaagctaagaagaaactccagacaaagcttgtttagaaaggtcactaaccctgtgcccttgcaaagaatcaatataagagcacctctttgttacaagtgtcttccttttttttcttttaccttacaaagataaggttcagccatgcattttaatatgatgggagttaaattcacgttcaatatgataaatagtgggtcattccgatac

SEQ ID NO: 26650 - DNA, 260 bp, Oryza sativa
caccgcagctgcactggactgcgataaatttatttttcagtcaagcaccggaaggaagctttgagcgaaaaaaccactaagataaaagggattatcgaggggactacctaccgattggcgaggtgcagcagatggctccggagtgactttccatgggatactgctgggatgatccctgaaatgcttgcctggagatctcggaaagaaggaaattttctaacggtaaaaagagtacggtagttttcgggatacgtatatta

SEQ ID NO: 26651 - DNA, 450 bp, Oryza sativa
gcaagcttagagtgtcataaagatggaagcatcttattccgagaacgcaagccgccataacaagttttacctcttgttgatgatcgaaaccgatgcagctcaacccgaaagcaagaactcatcgaaacaaaacgaaagtaaagagggtggcgatgcgccgagattgtattgaacgtgtgttagtttgattacatggggctcggggtctatttatacccgagaattacaaaatatgtccatgtcggacacgactcatatctctaacaaactctaagataccataagtcttcgcgtcagacttttgccaaacatatctctaaagaaattacataaaatatcctaattaacagatacaattgcctcctcaggactctatccatgtgtggcaatcatcatgaagcacatcaacctataccgacaacatatgctgtgtcatatcgtcggactcgg

SEQ ID NO: 26652 - DNA, 186 bp, Oryza sativa
  unsure (1)..(186): unsure at all n locations
tgaccgactccggtgcggccgggccgggctccacatcaactattctcaagcccaaaatatcctctccagccacgagcccgccacgcgctccctcgccttnttcccatctcgaccgtccacgtgtggcccatccgtgagctccacgcccctatatctatcccttcttataacctccacccgtaccac

SEQ ID NO: 26653 - DNA, 424 bp, Oryza sativa
acctgcggcatgcaagcttaaacagtgccatctgtagactgtgtctggagctgttggtgtacgagaattccgcatatggcaagcttttgtcccaagctccaccaaaatcaagagcacaagctctcaacatatcttccaagatttgattgactcgctcggtctgaccatcagtttgcgggtgataggccgtgctgaaatttaaacgggtccccagttcttcctgtagcttctgccagaattttgaggtgaactgactccctcggtcagatacaatctttttgggtactccatgtaggcacatgattctcgaaaggtaaagctccgccaaccttttgcccgtatatgtggtatgtactggtatgaagtgagcaaccttagtgagtcgatccacgactacccagatcgaatcgtgacccgatgatgt

SEQ ID NO: 26654 - DNA, 429 bp, Oryza sativa
ctcgtcgaatttgagtcttttattggtgtatgccccgactctttgtgttagttgggaaacaactgaacatagagtcaagaactatagcttgtcgtcgagtagccatctcttgagtgaagatatgtgttgaggatgtccgagtagaaatattgaagattggaacaccacttgttgtagtaaaataatatggcatcatatgtggtgacgcatgccgagatgtcgaagctcttgtagacgtcctggctggtgaagtagcaaaacttgcgaagtagcagcaatagagtttgccggtgcagaagacaatgaagataaagtcgctccaccatggtgataaagtttcatagttgtgatgaagtgaacatgagtcggcagcaacagaagcgaaccggtagcgaagacgcgttattgtgaagataaaaacgccggtcg

SEQ ID NO: 26655 - DNA, 394 bp, Oryza sativa
  unsure (1)..(394): unsure at all n locations
agcttgtggcaattgggaggtggcctgttacacttaagagctttaagggtgatggaaccacttatgatccaagtgacgggaagataaacgagtggccaagtttgagcatggatgaaaatctccagatgattgctaagattgctgcagtttgcaatgatgcaagtattgctcactctgagcatcagtatgttgccactgggatgcccacagaggctgctttgaaggtatggctcattagtgcaataaaatatgttctctatgttgcttcacctaatgatcatgtaatatctggaaagtgttaacggtgatgttttgcataacatagaacatagataaacacatgggaattacttctaatcatccatgtaacttattntgaagttcatatgtgtag

SEQ ID NO: 26656 - DNA, 372 bp, Oryza sativa
tcagctgcctgcaatgctccttgatttctcaggggtgtctgcatcatctaaaatgtgtaccactctcgatgcgacaagattctgcaagctgagtctcaacagctgatgacacgtcgtctttcatgtaaccagaaaataatgatcactactgaatgccagtggaacccttaatgagaggttgggatgattaaaagatgcaaatcacctttaacatcaatattacaatggttgcaagtgttgacgcataaagagaagcttctacgttggcatatggaaactgacgccaatcgtcagccagaaatgtgtctgccttgagatgaatgatccgattcctcatcatatggcgttggtgtagaaattggtcagtttaac

SEQ ID NO: 26657 - DNA, 420 bp, Oryza sativa
  unsure (1)..(420): unsure at all n locations
catcttattttgatgcttatcagtagcacacattntgtgctgtagagtaaatatatggtggaaactatgtagaacaaagcacgaatgttctccaaacatcacaaaacaatcgaatatgtagctaagataatatttgacaccatacaaaatctgagggtgaaatttgactacgtttgatagataatngataaataatggacaaaaagacaatcaagaatagtttctttctcttcgctgtttgttagactcataccttgtgaatgtacacgagcttgatcttgaacttttatatggntacctaaatagtataacattacctatatgtgagttttgtcttagacttctctgataagttttgtgcataatttccaacgttccaccttagtaatggtttccacttgcatgtttgtcccattattt

SEQ ID NO: 26658 - DNA, 148 bp, Oryza sativa
  unsure (1)..(148): unsure at all n locations
atagaataactacctgtctcgcccattcgcgtnttggcttataaaccatattctattaattntaaatnctacaacttgacttgtgagggtatttataactcgattctacaactaattcagtattattttttggtagggggggggggcg

SEQ ID NO: 26659 - DNA, 331 bp, Oryza sativa
caattgggagagggcgtaaacatatatttatatcccatgccttcaaaatatgaaaaattcaaaaaaggggagttatagcaattttcaatagcctctttggtcaaatttacaaaactccttttagagaccaaatttttgtgaaatactctcaaaagtgcttcaatatgcatttcaaaatgttttggcaaggcctttgaagtaaaaatttccatttgtgaaacaaaatatccaaaatgggctccatattatcttttatgaacttgcctttgctaaaaagagatatttcctataaaaaatctattgattttttgaaaagatctaataaaaagtt

SEQ ID NO: 26660 - DNA, 496 bp, Oryza sativa
  unsure (1)..(496): unsure at all n locations
ttagctgattntctcgccgagtggaccgagtgccaagaagacatgccacatgttatgatggaatattggactatgcatcttgatgggtcgaagaggcttacaggcactggagctggggttgttctaatttccccgaccggagaaagattgagctacgtattgtggatacatttttctgcgtcccataacatggcggaatatgaggcgctgctccatcgattaaggattgcaatctctctaggcattcgccgactaatcatccgtggagattctcagttggttattaatcaagtcatgaaagagtggtcttgtctaaatgataatatgaccgcttatcgacaagaggtacgtaagttggaagataaattcgatggacttgagctcacccatgtcctcggacataataatgaagcagcatacagactgtccaattntggttcagaacgggaagcagccccttcagatgtgttcgtcgaacatctctacgaaccgaccg

SEQ ID NO: 26661 - DNA, 392 bp, Oryza sativa
tcgggatgtgtttttcttacctcatcatatgttggtcatattggctgtgcccctccttttctaatcctatcattaccattccctgctgcaattataattcatgcatgcatcctatatttgcagtcttccaacaatatcaaaatatattgccattgtctctcatgaatgagattgcaaagtacagctacataaataaaattggtctccacaatccttggtaacatagcttaactgccattattttcgatacactttgccaaaccaaacagatttcagataaaacatttattgctaatcaatatgttatccaccacaataatagctcgagatataattcttaatcatacatgagtctaaatcaaaataaatcaaagaaaatatccctctgatct

SEQ ID NO: 26662 - DNA, 483 bp, Oryza sativa
  unsure (1)..(483): unsure at all n locations
ctcagctggctntgctanggtccttgtaaggatngaacccctgtatgcgagagtacgcgtgaaggtcatcgtgctggtgctgcatcatgttgttgatgttggcgaactgagcatcagcagatcgttaccattcttggcgttgtgctattagttccatgaggatttactggatctcctctgtctgcatatcaagggtgtccattctcctagtgatttcacccaagtcccaatgagaggaacttgagtgccattcacttggagatgaaggcacaccacttgagctggaggcttggttgtccccccattggatgtcatgaggcgcaagccaccggtcctcactggcacttgcccaggttgagactccgatgttgtgacgtggagcttgggtccatccggatgcattctcaattgctgcccaacctgcctcatacatctgtacgggtgtgaggatgatgaactttctcgtcattccttgcatgttgg

SEQ ID NO: 26663 - DNA, 440 bp, Oryza sativa
agcttgcctgattttcgtgtgcagaagattagaatggaatgcaatagagtagcccatgatttagctaaatttgccatgcgtacgaaccattcagctgtttggcgtatgcaggctccttcttgtgtttttggggctctggcaaatgattgtaatcacattgatgagtaatcaataaagcgttccctttccccgcaaaaaaaatgcatgaaatattaaatatatgctaaaaaataactaataatacagattgtgactaatttgcgagataaattttttaaatctaattgctccatgatctgataatatggtgttacaagaaacatttaataataatatattaattaggctctaataaattatctcgcaatataaaagcgagatttataaattattttattattactactaaattaatatttaaatatatggtcatatatgtg

SEQ ID NO: 26664 - DNA, 436 bp, Oryza sativa
  unsure (1)..(436): unsure at all n locations
ggcccgcgggtacaccanacacgcacttatcggggttcagttttatgcggtcggagcggaggttttcaaaagtttccgctagatctgaaagtaaagtttcttggttggcgcgttttacaaccaagtcatcgacatacgcctcaacattacgtcctatttggctacccaaagaaattcgagtagtacgctgaaaagtgggacctgcattctttaacccgaagggcattgatgtataacaataggttcctacgggggtaatgaacgcagtttttttcctcatcctccctagccatgcgaatctgatggtaaccagaatatgcatctagaaaacacaaaaggtcgcaccccgcagtggagtcgacaatctgatctatgcgaggcagggggtaaggatccttatgacatngccttgtaaggtcggtgtagtcgatgcaca

SEQ ID NO: 26665 - DNA, 426 bp, Oryza sativa
  unsure (1)..(426): unsure at all n locations
tcagtgatatgctctttggtcagactagttaagggacaggttgagttgttcactacaaatacgatataccccaactaaaagtacactgaatctgataaatacagagtacaacagttggacagaaataagtcaattgaaataacagaacataacctggataaaaaattattctaccttggtttttgacacggcatcaagtgccatcagatcatatgctcaatacctgctcttcaatcctgaatatggtactgcgtcgataatcatttctccatcaatcagagtcatctcatgtagtcccttggatcggaaaagaaataaggttaacggtgtgcatgacgaaatgcagtacgaccttttctgcagaacaataatgggatcttacttcattaagattcctatggngaaagcgcatntgaactcttctga

SEQ ID NO: 26666 - DNA, 320 bp, Oryza sativa
  unsure (1)..(320): unsure at all n locations
gcttcggagcgtcgaggctgcgtgcagttaatcgtggcggtggagactggagtgtgctgtgctgctgttgttntagaccgcgccgtgcagtgctcggactccggcgctttaccgcttttgtcatactgtcgggcatacgtacgttcgccgcggcgaccgctctcagcttgagctctcgcgtgcgcgcggcggagcgtattcggtggcgagcgcgcgacggcgacgccgatcggggctcgtcaccagcttaggaagaagcatcaacagcatcacgtacgacacggcacacacacctcgtcacttcgttagctcgatcgctc

SEQ ID NO: 26667 - DNA, 372 bp, Oryza sativa
gtagcactgtgtggactgaggtgtcgcactccgctctcttgggatcatacaggggaactccacctgctcgggacagaagtttttaatgaggccgaacagaaagtcttagctgttatggaaagaatgagaatcgcgccatcttggcacatcatctatgcagacaaccgcctaagggagctccttatccaagtatgggataatggtatcttcgtgtcactccgctcaagggagtacaccgctttctaaccacacgaaaagtcgcccctctcctctgtgggaccatattcgattttggaacgcacgggtgaagttgcttaccagcttgagcttctcttcaacatgcttggcatccataatgtgtgtcacgtctct

SEQ ID NO: 26668 - DNA, 430 bp, Oryza sativa
agtcacctgcggcatgcaagcttggaccactgtatgcgttaatgtgtgtggtgcgagaagcaacacttcggccttatgagcgttgccagcctctaccgtccttagttcgacgtcgaggcgttaaccatgaacgtccccatggaggaccaagagttcccacagagactgtatagtggctaaggggtagaggaagatatatataaatttaaaaggtattgaaataatcttagaattagaaggtatttaagtaaataaaggaattcaaataaaattgtaaaatagaaaatccctcgcaaaaaaaaacaaaattaggtatcaaagtaaagagtttgaatttatacaaatttatgtccgacattcactgaaaattgatctaccgtttgagagatatgggttctttgaagttgaatttgaaataaataaaataaaa

SEQ ID NO: 26669 - DNA, 440 bp, Oryza sativa
ctggagaagaagtcttaggtggagtcttggcttataccccatttgatcgcctgtgaagatggagccgtatgcccgctagtccgctgctgtttattattgattgtcacgccttaagtgcctttgtaataatgtaaatattatcgatataataaagatgtgtcttttatatcatgcttgtatggagtaccccggcttttcctgtgacggggattaatacactagcgttcgggaaaatgcaattttctcggtcgcgacaagctggtatcaaagccatctcgactgtgggataagccaagtggataaaacctaaagacatattttatatataaaactatttgcgaaagttccttttttctacttcccctaatgctatttgcaaaaggattactcccttcttccttcttcggattcaactagtactagatggtcacgtcagtgaa

SEQ ID NO: 26670 - DNA, 434 bp, Oryza sativa
gcggctgcaacttaccatttggaaaacacttctttttcttaattagctcccaagtcagcccaagtttttccatggatcttggagcccatccaacttaaaaaaccagaccgatttctattctatccacttcgattgattccatgccctggctgaatatcacattttggctggcaatgcatatgcatatgcagaatctttggcagggagcctgcaaaaagtcttggtccctttgactcctgtacacatgcaaacaactcatctctgcagaaaaaaaaacactgcaacatgttcctggggatgattgtgtgagatgagatatgtgatccatatcatgcagatgcaggtcataaacatgtgcagggcacagtgactgaagactgaagtattactgatctgattgaattctactgcagtaatgaagagataagtggtaa

SEQ ID NO: 26671 - DNA, 469 bp, Oryza sativa
  unsure (1)..(469): unsure at all n locations
gncactcttaccgggagatgagagctgccggagagcctgatctccaccagggacacatataatctgccgcatcaaccaagaataacttgcgtagtgtcctgtgattcaaaccaagacaagttgtaccgctgatgagaaagaattaagctaaatgcacgcatgacacacaaataagtcatttgagtgatgaccaaccggaacactagccggcagggatctgtgcaatagaaataggcagaactgtgaggaggggtgtactttgatccttctggaggaaaccttgggcatactntgtgctttgggtcaatagctgatgacataaaataaagcgtaatcgggccatggtatcctactgcatgactattgcccagacaaagatataagagcatagacaaactcattctgaaatgtggaaatacatgccatctaccagtctagtgtaagaagatataatatctgcttcaatgaa

SEQ ID NO: 26672 - DNA, 387 bp, Oryza sativa
tcataactaccaatagaagctgttgtactgtgcatctcaagaaactaagaagttaaaatcatgcataccatggttgatgaatgaggtatctctcccattagaatcattgatgatagagttgggaagtgatgatatattctcctcaagggacacggatacactaacattgtttctcattgcttctaagcctgatgagcattgccttctttttccaatatataaatggcgaggcttctttcttacagatgtttttggattattatctggaagtggctgggacttgctcaaattacctatgcagcaactgtacttgatgaagtaaacatcatagatgcttgatgtgtgaattgccccaatgatagcattgatatagtagtccttcatgaa

SEQ ID NO: 26673 - DNA, 485 bp, Oryza sativa
  unsure (1)..(485): unsure at all n locations
ttacggacctaagatactcagcttgcatctgttccattctgtccttccatagcatatataacactattatttcttggtgcacctgtctaaatgaattcgaacctttggtctggattgacaagagaatcatattttcgtcaaatacaaacaagagaatcgtatatctacgatcgtacaacaaaatatttctcaaaacttggtgtggtgtgcatacccagtgaagtaaaacagcaacaggtgattgcaaaggaagcgatctccacctatagtaatctttccagcttgtcacgagtgtggatacattatgttcaggctctgtacacaaaatcaaatgcttctaggagccatgaaatgaaaatagcgccaaccacctcattacaatgagatatccacctgtgcatgggcagagggcgcttcccatactccaatcagttggtttgctgtataatatgcacacagagcatanaagtaaaattagctgagac

SEQ ID NO: 26674 - DNA, 339 bp, Oryza sativa
  unsure (1)..(339): unsure at all n locations
agctntcagcattaggggaaagcgactgttttgcttctgcgactgatgtattaccagctgcaactttttccagaagagcttgttcatctaaaagaaacctcaactcaacccattgccaatggaactttgctggttggagggtatccagtagttgtataagtctgtcagagagtttcaactcactctcttttgcctcgccagactctgaagcacatgaaccatctcctagaattgccccagctgttttacaatcaacaagggaattcaaaaatagccgagcacgaagaggtataaatgccattgcttttgaacccttatctgggttatgcatttcaagca

SEQ ID NO: 26675 - DNA, 467 bp, Oryza sativa
  unsure (1)..(467): unsure at all n locations
tgcgaggctactggagcagtgcagcaagctgcaagacaggatctactgcacgctctccatatacttctgagtcatgagcacttctttttgtttgaaggccacatatacttcctgaaggtttgaaggggcaactagaactagctgtagctgttacgctcctgccttctttgttgtaagctgctgtaacattagtatcatgctgtgaaaaaccatttttacggccatatgagtgggcccagagtagagtagggtctacatgtaagagattccaaccgtactaaagagaattttttttttaatttggcgtgatccaattatcagctnttccatagtccaagatatctttggtcggtgtaaccatcgctattacacctgtcgggcttacgggagtggattaagttaagaattaagaagaggatgaaggtacgaattcgttcttcagatatgatatnggttaaaataaacgt

SEQ ID NO: 26676 - DNA, 438 bp, Oryza sativa
  unsure (1)..(438): unsure at all n locations
agctttcttacgacgagaactatctntttcttcagcttcatccataagggtcttgatcctgcgtgactggcgacgacccttattatcaactaataaatttgagtcaggaacccaattggcttgccctggaggaggacgagtgaaatcacacacggcacgccaaccacgcaattcaccacgccaagttgcttcccacgattcctttctaaagtatggagaaacaaaaatgtttccatcaacacccccttttgcggaagcagcaagaacatgggaacatggccgatgtaacaggtaaggcttgttgcaattgcatttgcaagcgtgatactctggccacaacgtgcattccaatgtgatgtcagtagtcccaatgccgacaccactcttgtcacgaagtcgtatctcaaataacaactctctattcccagcaggccacac

SEQ ID NO: 26677 - DNA, 466 bp, Oryza sativa
  unsure (1)..(466): unsure at all n locations
taaggtattcaaacaaactaatgagatatatcacatatcacatttctattgtaacatttaaatgttgtgagacatcgttacaatttatgagaaaaataccatttcaactcaacatggctgaaaattccaaatcgtatagacctctgattgtttttgtttactggcttatcaacaaattggaaagagaattagatcatggcccaaacaacctacttggaaatggtactaaagcaattaagtttcagataaacttcacctatagtggaaaatgggcaacacaaatccttaaacaatgatatagctcattagcttgaatggccaagcaactaaatcaaaatcaaaatcaaaatataattgcttcatccattgacataaatatggagtcaaattgtgacaggcggcaatcacagaaacagttccacaactaacaatatgtcagaatatcttaaagcatgtngtatatgat

SEQ ID NO: 26678 - DNA, 431 bp, Oryza sativa
  unsure (1)..(431): unsure at all n locations
agcttattgagatggagtatctcttctactaataactatactacattactggagcatcatcagcatcaggttgtcgaggcggcgatgactgttgcacatgagatggatgctctatcatcaaaggcaaactaaacgcacggcgcgcgccacctgtttgccgttaacattaggcacgaccccatcgaccaaatcaagagacagctgcaccatcaatccacatgccccccctccccctgcactgcaccttcaaacaggccgctctgcagggtcagtcaggcacttgtccctttttttttctttttgggtctacaggtgcttcttcttgccaatgaatgacgccatggatacacttctcatatacagtatctcagtagtaaatgtgtgcctgccgaccccgttatgcaggagcacatngctactggatgtaataa

SEQ ID NO: 26679 - DNA, 482 bp, Oryza sativa
  unsure (1)..(482): unsure at all n locations
ctgcagcagacgaaaggaagctagcgatgctgaaaccatctatatcacatcctcatggaacatacggacaaacaatttaagggtcctctgctgaaggcccatctgatataaccctctacccaagcttgtgtatgtgaacctgtcccttatgaaggccattgtggtcgccactgcccatgcatcatgcatccttgcaaacctaacataaacatcaaccaaggagttcccaacagctgcatccaaagattcaaagctggtcttgagaatgtatccatggattttcctggcatgcaggatagctagcgaggagctactgcctttgagaagagtggagacagtgaacgagttgggaagcaccccgcttagccgcatctgagaatatgccacaaacgcctcctcatctctgccatggcatgcaagttcagcgatcaacgcagtccaagacacgacattcngcttgtcgactgcatggaaagtgtgca

SEQ ID NO: 26680 - DNA, 180 bp, Oryza sativa
tgacactgctttgtttcataaaaacaaaagaacatgataaaagccttttgttattctaaggtggacacatttacaaattattgttaacaaacacagaaggagacgtgcatgttaagaacagagggaaaaaacaaaattcccttgtacaggacagaacaaaacagagggggaaaaagatgc

SEQ ID NO: 26681 - DNA, 397 bp, Oryza sativa
  unsure (1)..(397): unsure at all n locations
gttcaagcgacaaatgggcttttntatatcaatcataacaaccgcacaaaatgcaaatgcaaaactggccaacttcaattcatatgttataaggaaaaacaacagtttctcatcataacaacggctgggaatggccacagaaggcattgactcgtaattggaagtaccacattgactataatatcaaaatcttatagtaggcataatatggaatcccaaaagaaaccaaacaatttagcccatcaaggttaatttttgagctgcttcatcctagaatatcaaccagagccctcagcccatggattaaaatgctttgaaatacagacaatcattcaagcattgtacggcatggcataatgtatttctgaaggttataatgttagagttttcaacttta

SEQ ID NO: 26682 - DNA, 480 bp, Oryza sativa
  unsure (1)..(480): unsure at all n locations
ggagatanactaaacattattataagcaaagtgtgttacacttttcactgacgtgctagtgacaaaaccaattcgaaaccagaatcacttcgcagtgccaaaagctggggcttttcttgcggggaaaaatatatgggtgttgtcatccatctgatggctatgctagtgaataaacgtacttcatcatcttccggatcgtgatatggagtaattatgtttagctctagtatttgtctacgcgtcgtaaaaactgattattattattattcttntttttttgggttgctagccgcttgtgacaattgccatgacggcattgcattcttggaagttggatatgtgttccgcgcagatataaagacaagataatcagataagcatagtacttaaccattgaatatatcgtcttgcagacaaaatacatgatgtttctactcttcccttaacgatggcaaacgaggggaaagagcacatatagtg

SEQ ID NO: 26683 - DNA, 394 bp, Oryza sativa
gcttcatcttagtatatctcttcatccctctcctctagcttcacttgcttgggccgctattggtctagctgctgtttgcgctctggattccctgtggtagacttctagatctagagttttctttgcatttttggaagttccgaaaattccctgcctagtttcgaaattactgcttctgccttacttaagtttttaaattagcctattcacccccctctaggcctaattgaccctttcaaagggaaatattgtcttcaagggaaaaggataattccaaataacacttaccattctcaaatctgaaacatgaaatcaaagttgtcatcaccatcaaaaagtgacaatgttcccaattatagaaattgcttgctcctacagaagaattaaatcttct

SEQ ID NO: 26684 - DNA, 494 bp, Oryza sativa
  unsure (1)..(494): unsure at all n locations
actcagcttcattcagcatctgcttaaccacctggccatcagtatccctaacaacaaaacctcagccaccttgagcgggtgttatcatcaaaatcaccatcagtgcgttaaccttcaggttagggtcatctggtttctgccaaaatttaagcatgatgtccctagtaagttcaggtctcccaaaagattcagccaattcagaaatttagcccacaaccactactagaataaacataaacaggccaaaacgaatnttccaggtggccatctacttcccccgcacttcaaggcctgtgaaaatacatgaattttgcaggcggacattngtcctcgcctgcaaaatgaatttcgcangcggcatctccatcttcgcatgcgctatagccacccgcctatgaaaatgttatcggcgaacaaaaaanaacaccactcacccgcttgcacccttccttctcttgccgtgccgtcgctgttgccgtcgccactgttcgtcg

SEQ ID NO: 26685 - DNA, 447 bp, Oryza sativa
  unsure (1)..(447): unsure at all n locations
agcttctgcaacttgtgcttagtgcctttctcttatagaattatcttaccttcaccaagcttgcgactgcaataggaacacacaccaagttatttcatacacataagttttaacgaaattagtcacattcgagaatgaagataaaacagcaccactgtgaatgtttaatgccctcatacaactagcagagagggtgaatatgagagaggtcaagttccagcagatatactgtcacttgaatgaaatcttggcaggaactagtaacagaagaaaaaaaatgatagcagggcaggccatgttttaacatgtgtttnttttatcagaagatgtagagtaaatttcacaaaactacatgtattttgaccaaattatcacanaactacagatttaaggagttatatcatanaactacacatttagtaccaaattatcacaaaactgcagatt

SEQ ID NO: 26686 - DNA, 489 bp, Oryza sativa
  unsure (1)..(489): unsure at all n locations
ngatctccatttatatacagaacaattgataccacaatcatcattgtgcatttatgctgattcagggtntgatctatgcagactatccttgctcgcgttggtgcattgaactcttttttcacattgggaagggcgttctcttttgcatatggtggtctctgtgcagcaattcaaatacatgctgatcctcttaataatctaatcggtgcaccagtttcattttttgaccaaaatcctagtggccggatactgaacaggttggtattctgttatcgttagtaagctccacaggtttagaaattgacccttgatgagactnntaccaaatacagaatatcctcagacctatatgccattgatgattctcttccgtttatcctcaacatattcgtggcaaacttcttcagcttgcttgngactctggnttgaatatcttattcacaggtaaatatggaaacatattngctgtatatggnccaatcatgtatt

SEQ ID NO: 26687 - DNA, 429 bp, Oryza sativa
catgcaagcttcatactagaagcatctgttcttttctttctgcagccttccaatcttgcttgtgatgcctctcaatcttcttgactttctttgctatcttggtgcccatacaaaagatagcttgaagtgccttcttgatggtagaagaagagctctagcgctgaggagcaactgaaggagcggctgaagctaaacctcttatataccgggatggaggagggggagccgcagcaaaaaaggaaggagcatgagggtggaaagccttctaatcacgttgtttggagaagtaaattcctatcatttcctcaatcatcttcataatgtatgggggtataaatgcaacctctcttaagatcatagatggtctcaagagtctcagaaccaatgagcttataacactgaaggcagggcactggtagcgcatatagc

SEQ ID NO: 26688 - DNA, 451 bp, Oryza sativa
  unsure (1)..(451): unsure at all n locations
ngagtngaattataagaggctctattgtactatattatactataattacggagatactagagtagagaaagtcggaggaattccggagttgtcggtaatcctcttcttatttcttttactatgttaattactctgctntaatcgaaatatcatctggagtaattaagatctattgtgtgagagttatctcttagttagttcctaatcaacgtacgggatcactgatcactataatccagtaaaacatagtggttgctttagtgtctagctaacgctaaagtagtttttaactgcgtatacgtggtgtctgggtagttaatttccggtgtttgcttcgtatcccacagtatgtttgaggtgggtgtataggtggtgacagctctcaaatacactgaagtcctccctgtccgggtacattgtaaagccatatctangagcagcgggctggcca

SEQ ID NO: 26689 - DNA, 482 bp, Oryza sativa
  unsure (1)..(482): unsure at all n locations
tcagctcttctggatcgcttcagctatgatgggtgtcttgtactaagattcgatcatcggtaccccggagatctctatttataccgtagatccccttagtttccaagtaggactcggagacaacgaatcccgtacggtatagcaatattgttatctcctacgaatacaactctgacaccttctatcggagagattatttctttttttgaggtggaagcggcaagagtattgccaaatatattagagggagaagagtttaacatagtgtttagaagcgcgaaattacataacaaataagagcggctcggcgtgcacggtcgtanggaggtaacggattacaaaaggatacttcccgtatacttgaggatatattgtatccgtatatctcatgactcctaagatagagagtatgtcttatctgtaaccctaacaaaagtagtaaatgatactctntccgtttcatattataagactttctagca

SEQ ID NO: 26690 - DNA, 420 bp, Oryza sativa
  unsure (1)..(420): unsure at all n locations
cttattaaccgcattcactatgtatcatactgatggctccaactgtgtgttggaccggagccatttgtctgtctgttgctgaaacagagtgaagctggggataagtgtttacacagacagtaacttgctgaagctgcaaactgttctggaccgtaggaaccattgcgtgtggtgtggttttgtctcccctgttcgtgcatgttgtggtaatattttgctgaacggatagatactcaagcaagctgcaatggatgtgtgcatatatatgcttatntaatcttaagctaaatgtatcttatctacaccttatggatctatcgtgttgtggcactatgaaggagctcccatgttaatcatatggatcatagcaatattaatatgacagtagaacgtgttggaagtccatgtcacatatatata

SEQ ID NO: 26691 - DNA, 431 bp, Oryza sativa
  unsure (1)..(431): unsure at all n locations
agcttattgtgctccaccttacatccattgtatactggagttatggagnccttcaccatggttgtgaacttgcgatattccctatcatcagtgtcaaatctctccccgtcgtgtagcatctgatctagattaggttcaccgtgatcgacacatgtttggttatcctcctcgcagccaacatccgcatcatgcccgtgacagttgccggcactttcctcacgtgcacctcctcgccaaggaagttgtccctaaaacccattgtaaggagatgttgaattacccgtgagccggaagttgtctgtctttcttgcattcatggcatggacaccaaatatattccggtgcatcaacaagagccgttactcccctgagatactccacagagtcacgatccgctatagtatccattctagaccatatatgcatgggta

SEQ ID NO: 26692 - DNA, 397 bp, Oryza sativa
gcatgcagcttgttattacgtgtggtttttattttgcgaagaagctaaagaagtgaggtttttatgtgggcttaacaaagaaattcacgacatgcttgattgtcaaagatatacatctctttctcatttgttacaacttgcttgcaatgctgaaagtaaaatagaggaggacatgaagaagcaacatgctatgtttttgtcttctattactaaccacttgcaggaagtgcataatcatgaaaaggaggagagagacatgaaagagccgccagtcccattgatcacactcaaagtcgaggcacctccattatctgaaagggcatcaaaggtaaacttaatggtgctgaaattaataaaggtgagtgtgttgttaatgaaatgaattcgtccactttta

SEQ ID NO: 26693 - DNA, 479 bp, Oryza sativa
  unsure (1)..(479): unsure at all n locations
tcgagttagagcagnntgcttatcagccaagtgcatatgttctctactggttccttactgtacatgtacagccatacacacgatctgaacaaagtaaaatgtactatcccgtaaagctgatcagtataatgcatgcgtactcctctcccgcagaatggaagaaccggctaaggctctgtttagttctcaaaataaaacttttcaccttctcacattaaacgtttaaacacatacataaaatattaaatatagataaaaaaatcaattatacagattacgtgtaaattgcgagacaaatcttttaagtctaattacaccatgatttgacaatatggtgctacagtaaacatttgctaacaacgaattaattaggcttaataaattcgtctcgcagtttccaagatgaaatctgtaatttgtttgttattagacaacacttaacattntaaatatgtgtccatataaacgtggatatctta

SEQ ID NO: 26694 - DNA, 407 bp, Oryza sativa
cataattgcgtaataagagagagtcttaattaaggtctcccttaacatcagttaccgcgggaaccaggcttatcaatgaggtgcgataacggtaaccgcctattcaagtttagaatcatgctagtagagtttgcatgaaattcattaacttacatagcaaaccgattcttaaaaaaacacaattccataaccagagtgatagttgaaacaaggtctccctaaaggtcagttatcacggtaacgggcttatcaacaagatgtggtaacggaaaccacccacctcaagttagaatcaagcccgtagagtttatatgagcaaacagaatcttaaaaaaacattactcctatctataacagagagatagagagcttatattatgtgaaaaaatgcttaaaattttatgtga

SEQ ID NO: 26695 - DNA, 480 bp, Oryza sativa
  unsure (1)..(480): unsure at all n locations
tagacctgttctgatgaattatgacaccccattactcttttgttttgcctgtnngtgagttcatgttatgtcttctcttctttccggcttcaaaataaagcattcgaaggttgaaggggcttattgcttgggtgtgtttcataatggaaaagatccgacaacactattatggggtaagatcttcaactcttggtctcttacgaggaacttcaagaaaatttccattggacttcttttatgtatatcatctgactacactatctctactttattcgcatataacttgttactagtgtatgctgaataacatctgcacctgtactatgagtctttgaccagcttatacactcgcgtctgctggaaacttgagtagaaaaccaagtaactctctttgtagaaaatactactatataacaataggcttcttatctntttcagcataaccagctgatgcactcttcaatatattttagatataat

SEQ ID NO: 26696 - DNA, 431 bp, Oryza sativa
agcttgtatactatcaatgcaattttatctcatcaataacatctgagtcctcatattactctcaatcaaccttataacttcctaccatcctcatttaatatgggacacctaagctgtaactatttttctctcccactcctaaaattgcacttatattgcaattttttttactaacagttttttttaaaaagttaataagcttagtactagctagcttacacagagttaagctttactatatcatgaactacatatctatataccatatatatgcccctacaaagagaccatagaaaagtaaacaaaatcgatcaaaaaccgatggccggccggcaagcacgtcagggtatattaagaccatgcatgcttcgtacgtacgtatagtacatgcctacatggtagtaatatatatgcacgatccactggtggag

SEQ ID NO: 26697 - DNA, 499 bp, Oryza sativa
acggacacttagatactcaagctaaggaatagtggaggataactctattgtaagatatgatttgtgtgtgtgacatgacaatgtgagagagataggaggaggctctgctcgctagctgcctcgataaataagtcaagcacacatgtagacttccctaaaggggatagaagttggcggcgacaaccttgggagctgtctgggatgggaggactcttttttttttgtgagagtgactaaaataagttcattgcatgcaaacaccactcaagtgaccgacccgcggttctgactttctcgcatttgaattgattggataggattcattgatgtcgccagcagcgacgggctacccatagaaggcttgtgatgcacctgcttcacacatcatgaaggggctgttcatattgattcagtttacaccatattaatatttgttttttacagtattaatgtgtacatctttctatctaattttggtataacatgagaaatcttgtct

SEQ ID NO: 26698 - DNA, 309 bp, Oryza sativa
  unsure (1)..(309): unsure at all n locations
ttacatgctctngtgctggaagaagaagaaaaatctggagagaaggagggagaacagaaagaagacataactgaggaaagggaggaaaaaatcccatagaaaactccagagaattggagactgaggagctaatgtatgtctcacagaatgccatgcaggggactaccagacctgatacattttcagtgataatcctcatcaatgggaaaagagatgttgggctggtcgatagtgggagcactagtatattcatggatcaggagtatgctatacgcaaccaatgtcccttagttaacactgagtctaaaa

SEQ ID NO: 26699 - DNA, 447 bp, Oryza sativa
  unsure (1)..(447): unsure at all n locations
gataacccatgtgcaccagcanaacgctnnggaatgattgaatgggttgcaccanaatcaaacaatatttntgccggtgtcgagtcgacaggaaatgtgcccaatataacctctggtgctgactgcgcctcctctgctgacgcatgattgacacgggcctgaacaaacttgggtccagcacgtcttggcttctggcaccttccgaccgtgtgtccgggctcgttacaattgaagcagagttcgggcttttctccaaacttcttgggctgttctggctgagctggcagagctggctgagctggaatcattaatggacttggagtaggcttgagcctgtgctgctcactgttgttgtgactgccactatggtgggtcttgttgaagctacccgggtggtanggacgggactgccggataatcatggtggaaggtcaccctgatgttcca

SEQ ID NO: 26700 - DNA, 404 bp, Oryza sativa
  unsure (1)..(404): unsure at all n locations
ctcttcagcaagggcttaacagagactacctttctttagaccacatgtnngccacacgagtagttagtttaagtcatttgaagccgattgactttggagccattggttaaaggaagttatatgactctttatccacaggaaaacaccatagaaattatgaaattgattacttctgtgggcaacatacactgtgttggagccaccacatactctctaccattacctgacacaacttgtagacacaattaagatacgaagaaggcttaatgatgtgttctacacacacacccactccagagagttttctatggttgatatacatagacataaatgtgctgttataatatattattaacgaatggaacttttatgtgtgattgctgagctaatgatcttcatggttg

SEQ ID NO: 26701 - DNA, 403 bp, Oryza sativa
tgggtaccccatgtggaggccttcagcgacgtcttccggacgccagcccaacacatgcgcttacccttcttctatccccttctctcctctccttgattggaatctgaatgcgcgcagctttgcttcaaattcgtgttctctttgaataatctgggtagaattatcttcactatgagtgtttttggagggcgatttccatcgttggcggcaagtcctggattcctcggccgaaattctatcacttcttttgttaaggaagagggatttcagccctcactctgacataaagaagatggattgaagagaacactgcaatatggtagattgatataaatcttcgttacacactggaggatgctgctgctgactgctgaaatattaatgcaagcgattatttgtggct

SEQ ID NO: 26702 - DNA, 299 bp, Oryza sativa
tgcaagctgctcgttagccggaggtggaactatctatttgtcttgcagagggctgtccgtagaagagccagtgttttttttcccctcactcaaacgttattttagattttggggatgatttcagcgttctatccaagccaacacccgtgggttgtactatgtgtctagcctattttctgtgaacaaccttgctacttcaaaatagttcatagtgcattcattatttcttgtacttagcttggtgaaaaagtggaaatactctgttaattttagacaatggttttctaaggatttggcaa

SEQ ID NO: 26703 - DNA, 358 bp, Oryza sativa
  unsure (1)..(358): unsure at all n locations
ctaagcttgctagctatcctcggcagcaccgatcaacattaaatgttgtagaatcttcccgaatgcctgtgcttccaatgagtaaccatcataagcatccatgtcaacctcatctagcttactctntcactcttctgcaatcgccttggccagcttcctaatttcagagctccaagggtggttgtcacctggcttcctcggtactagtgcaaggtgtatagcttcccatcaaataatgctacttctacactggcccttggagaatattctgtttattctcaggtgaactactatggtcagatgggaagaaaccctcctaagaaccaagcacaaatcgtgcatggtcagtatcacaatc

SEQ ID NO: 26704 - DNA, 392 bp, Oryza sativa
aatagattttacaaagtaattgacatatctgatatgatgacatatacttaaagtcaaacagtagtcacctttaatgtataatcacacccataagtgtaatggatgatgaatgtgttgtccgatttcgcgtcccaaggaggctgcaattagtatcaagcacatcttatatgatataagacatcgtgacgaagcgtgagatgatttatctagtgacagtttctaagcacctgaatcataaaatccttacgaaggctgtagtgcacaccatgcaatgcactagcgacagcatatgcatacctataaacatgaatatgaaagatcaaattaataaggggtgtgcatgtttaagtcaagaagaaatactgtacacataatagtaccgacattttcaa

SEQ ID NO: 26705 - DNA, 458 bp, Oryza sativa
actaaaaactcagcttacaactcgcaacagctgttgagtccaccagttggtctatttgaggaagagggaagtgatcctctgggcacgccttgttgaggtcagtgaagtcgacgcacatcctacacttcccggtggccttccgcaccatgactgggttggctagccactctggatggagtactctctctgatgaaaccagctgtgagaaggttatcgagctcttcttctcgtatggcctgttttcgatctggtgcaaatctccgcagactttgttttattggctcggcatcgggtcgcaccatgagtatgtgctcaatcaccttcctgaggacccccgacatgtctgacggctgtcaagcgaacacgtcaacattgtcgcggaggaaggtgatgagcgcgagttcctatttctcgtccagtgatgccccgatcttgactgtcttgtccggggtggcgct

SEQ ID NO: 26706 - DNA, 434 bp, Oryza sativa
agctttccaaaacactctaaattaagtatcacaatcaattctgcactttggattatctaaaaggaacgaagggactgttcagattgatgacattttcaaccatactattttttttggcaaagttgtaaaaaaaactatatttagtttgttgccaaaccttggtaaatacataaaaaatcatacgaaaattttgataatattgtcaacttactaaaaatttaacattgtcaaaatttgataagttttattttagctctaatatgagcagccccgaaggctcaagaatgattttgtgagccccttgggtttgcttgccgcctcaaacactccaaaaggtaggaagatgagtgaatccaacaaattcactgatcagtggccctttaccacctatggcccctaagtcagcgacaacataattcttcatatagatagct

SEQ ID NO: 26707 - DNA, 424 bp, Oryza sativa
  unsure (1)..(424): unsure at all n locations
tcgagacagacaaccaanatattcacacgcaattttcccctctctatccaaagcacgtactctcacaaaaagagaaaaagaaataagcaccccaacaaaaagggaagaggaggcaatgccaccggtggggcccacatgtcggcgggatggtggggcccacaggtcatggaggtggggcccacggaggggcgcgcgcgagaggcacatccagccgtgcacagctgcggcagatgggatcacacgaacctgcacgaccatacttcttctccacagactctctctctctctcattaaattcacgagctttctctctctctctctctctctctctctctctnctcctcctcctctccttctgcttcccatcagcaccagcttctccggccgtccgtcatcgctgttgaccgcagcatccgcagtcaca

SEQ ID NO: 26708 - DNA, 416 bp, Oryza sativa
agctgcgatgacccaatcctatgcacttgaatcagcgccccagaagccagcgagggatctccttctccgaattgaatgccctgtcatggttgctgaactccttcctcggcttgaatgctctgtcctgtttgttggaggttgggtcacctgcccgcagtgaatgctccgtgctccccttccgccggacctccgtccaagctgtctcctcagcggcggcaaggcccctatctttcttcacgacgtcgcgccacgagccgaactgcggcttggatggtggccggcgggcaccggagtggtggtccgccgggtggtaggtgagagcctcacgccccatcgctcctccctccaggcaggcctcattggaatgcattttcactcacagtcactatggtggcaacaaacggcacaatcactta

SEQ ID NO: 26709 - DNA, 348 bp, Oryza sativa
agaccaagtccttgaactcctacataactctctgcattattcttggattgccccttctccaactgaacatgaggggctcgcaccgtgatgagaacatgcgaatcataccgtgtgcatggtgctcttatcacatattcctgccttatacaggatgattgggacatctgtaccactctggatcacctgcattggtatcatatgccgactgcagactttggcaccatatgtgttatacgagacacgtctgattgcagtccctcatgatttgatgggattgtgaggactctacatccctcctcactcacatatcgacccgcacatgtaacctatataacctttgcatgtaaa

SEQ ID NO: 26710 - DNA, 431 bp, Oryza sativa
  unsure (1)..(431): unsure at all n locations
agcttatttcagaatattctttctctgttctgtttaccgcatatcagcacacaccttattcacagtagcccatgagttgagatgaaaacggtcggaaaatccctataccgattttattttcattnttttctcgaaaatggaaatgaaatggtagacccaaaaagatattggtaatatcggtatattggaaacgggaccgtcagaatagaatataccgatactggtcggaagtcgaaaattcatgtctgaatcagcggagcctggcatagcacacatcttaactttattcttgcattatcaccctcagcataacactgttagattaatgatatgataataagtgtgacgaacaatatagtcaagttcaacaatacttcaacatcgataattggaaaagaccaaagtttagcataatacacatgccacgtcat

SEQ ID NO: 26711 - DNA, 373 bp, Oryza sativa
  unsure (1)..(373): unsure at all n locations
ttttctaggcagcgcgataataagataagctctatcttaccatctattatattttatataaatgatataggtgcatatatttctattttttaattataggatagattttaaataaataatagatgtgcccttattttgggaggtaataaggaacaccaaattctcttttcacatttacgttaccggcaagaataaattaataaaaaagggaattgctaaccttcagtcgggagataatgcatgcccaaattttgcagattttaaccactggatgagcntcatgattcgtgctctatacctattcttcaactacgcaccctcttttctccaacgccagtgaaagcacgacatatgatcctacaagatacgatct

SEQ ID NO: 26712 - DNA, 441 bp, Oryza sativa
  unsure (1)..(441): unsure at all n locations
agcttatgcatcatactagcatatatatttgtatgagttctttctgtattgaatttggaatgtagggaagcaaaatgtacacaaatttgcctgtcattcctgtatgatacaatatcggcatatggctgtttccagacccaagatgtatgtaactacagagcaaacaaaatttcaattaccatggtttttaccaacaaaatggcttagctccagttattgtgcctgtttgcctagctacggtttgggtatcaacagcagcctttttctttagaactttntctcttttttttttggagaactttcatttgggaagatgctggtacagctatgctgcccttctgattcgctgaatttctgtcaacctcaaatcttctgaatcctaacctgcttaattcataatctgttcattgctcaagcctgctcacaagttataatggtctt

SEQ ID NO: 26713 - DNA, 252 bp, Oryza sativa
tactctgaaatctgctgccatcttcctctgagtatgcacacctgttcatggatgtgggccgaacaacgctgtgtcttcggcaggttattaatgccttcaactggctcttgtctttgctatgggtcatcatctggattcctaattgcatccggaccttactcctggctatctgctgtgttgagaaagggccttgcctctcctcttgttcatcatctacctgcagaacgggatttccctctttaagctaggcat

SEQ ID NO: 26714 - DNA, 437 bp, Oryza sativa
ctttcctgttcagcccaatggccgaacaagctaaggctctcattctctctccgagcgctagcggtgacgacggggagccgaacccacaccgtcgagctcgtactccaccgccccctccacgccgaagtcctatgcgggaggaggcgctcgagagggtcgaaagatccgagacttcgacatccacaggtgatggagaagggcgcctagatggggagcgtcgcctcctcgtctacggcgacggcagcacgccccaaggcgcgctccaagctgcgggcgcgctcctacgtcacccgcccgttgtccttgacccggagtctccagcccaacgttggctggacgacgtggccaacttggtcatgactgcacagcagcgcctatgtgctggtgggcggtgctccgccaccaatacctctggcgctgttatcaccggcttcttg

SEQ ID NO: 26715 - DNA, 416 bp, Oryza sativa
  unsure (1)..(416): unsure at all n locations
agctntagggtgcaataaagtgcatcgttccagctcacaacaaagttatttgtttcaatagacagggagactcaaatctacaacacaattataagttcaaaattaatgttttaaagtccaaatagcatatcaaaagcattaatacaatagaactttctaaaataaagaaatccaatgaagagcatatggtttaaacgaaaggatggaaaatgacgcatcaagggagaaaactagaaatgtttgataaaatgaatccatgattttcataaaggcaaagatgtgcaacaaaattcatgggtgcagctcacgacaagttatggattaaaaatgaagcgtcaacggagaaaccaattaatcgttcgaaacaagcaaactaccgttttcataatattaaaaggatgcaacgaaatgtagat

SEQ ID NO: 26716 - DNA, 439 bp, Oryza sativa
  unsure (1)..(439): unsure at all n locations
tgcatctttaaaataatcatgaaactcatgcttcatttgtgaccatgtagaaaatgaattaggagcaagtaaactataccatgttgatgcatagtttgacaaagaaagaagaaacaactttaacttaagctaatcattactaccggccttaccaaattgatcaataaattggccgatatgctccattgttgttctaacatcctcacctataaatcttgtgaagntgggcacctcaaatccttgcgggtatgggaccgaatctacgtgtttaggatatggcctttgatatgtatgcatggctactttggattctatttcactactatcctgcaagacattgtcatcatcttttccaacatccacatgaccgatttgtgactcggtcttaggtgacaatgctatttcactttcgcttgtgatacaatccgaaccgtcattt

SEQ ID NO: 26717 - DNA, 429 bp, Oryza sativa
ttcagcattttcttcaacattgacttcaacataggacatagctgtactgtaccttgaagtctctttccacacacccatctccatccttacatccacaacacgtcgccaatcctcattggcagcatacaagtttgacgctagcacataattccccccgtattcaggctccatttcgatcacatgatcgaccaccttcctcgcgagaatggcatttcctagatcccgacatgctccggtcaatacacgccatattacagggtcaggcctcactggcatagccaggacgaactcaaatgcctcttccagcataccagatttgcacagcaggtccaccatgctcccatagtgctccatccaaggtgtgatgtgatactcttcaaccatagacttgaacaaatggcgcgcttcattgacgagccccgagtgact

SEQ ID NO: 26718 - DNA, 376 bp, Oryza sativa
agcttaaatcaatctttttgcccggggtttacttctatcgagagtaagctcaaatggatcatatgcccctatataaccgttggggcaatgaaattaaccctcctaataataactcgctaatatatacattttatatttgaaaatgatattaagaattgtactaaacatctcaatgctaagagagtatctaattaaataggctctttcaaagaaggaagcattataaatgcctattagacaaaatttacaaaacaggttttgggatgcccatctcaaaaagcatgcttttatttaattaaaggaattctaagctttgggcaaatggttacaaaaacatcaatttgtcaaaatacaaaaattcctaagataaacaaag

SEQ ID NO: 26719 - DNA, 400 bp, Oryza sativa
gatccttaagtcacctgcggcatgcaagcttaggttttctctgcagtttggattaatataatcatacaagactgaccatattgtgaagatgatgaaagaagtaaagtaaattcttacagatttggttcagcatcaaagatttctggtcaagtttcacagacacgtgtatattttagttgaccagttctgcatactactactaggcaacacaatagccttctaatgtgacaaaaaaatatttgttttgatgcgggcgttatcttggtgacttagctaatttggaaagaacgcaatgctcgtgtctttgaggggcacgcagtctcaccggtgaatctttgtgcgtcaattgaggatgagtggaaattgtggtaagaagcgggcttgaccacctttctttgag

SEQ ID NO: 26720 - DNA, 454 bp, Oryza sativa
  unsure (1)..(454): unsure at all n locations
tccctagctgagcccttccgccctggcgcggattgcagtgttcgactaggcatgtcataccgcgctggcttggccccaaccgcggagttgttcgacgccatcttcactgctaccatcctttccaaaactgtgcagacggctgctgggccgaagatgatggtcttcggcagtgccaacttcattcttcgaccggaacggtcagatgtctagctcgtccatgcttccatgcccaagtggcatcaccactggatgcaaaagtggttctaccacaacattccatatgtggtcggttccgaacgggcggaggccttgcactgccgtcaccatgccatctccatcgaactgaaaccgaacgtggaggtggaaggcacgctggagtcgaggctcatacttcttcgcaagatcgccctccggctaagcacccgcgatcttgtngaagaatactacatgcttc

SEQ ID NO: 26721 - DNA, 407 bp, Oryza sativa
  unsure (1)..(407): unsure at all n locations
agctatagcttcatgtttgagttgtacatactatattttgatattgctgagcaatatttttccttgtttgttttgatgtaccagtgttttctttgtttcattttcggacgagtttctaatattttcatgggtaatttattgttntgtaggccctttcctccctgaatgttcgaagactagntatacctgccatacctgaattgcaaaatacctggactactgtttttggttataaacctgttgaaccttccaagagacaaaaaatcaagtctctgaatatcttgattatccatggcactggtcttctagagaagcggttgcttgcaacaggcactattaaccatgagaacactactggttcatgcttccataccaaattatcatgaaaatattccttgaattctctt

SEQ ID NO: 26722 - DNA, 414 bp, Oryza sativa
  unsure (1)..(414): unsure at all n locations
taaaacaaatgttgcatctaaagtttgaattaacaagatatcattattgtaccagagctgtgcggccataatgatcagattcattatggtctaatccacgcttcagaagctgatgcaacaagaagctatcccctttggaagctgcaaagcagagtgtgattgggaaatccatttggcccctggccaacatgtcatcgatctcctttgcgacagcaacaatggaggcaatttctttcttctctctcagatactaaacatcacaaggaagaagaagaagaagaagcatctgaatagatcanannattcccctttctcgatgccgggagcggttttcgttgtcggaaaattttgcttacctgaataagattgttcatgacaattgtcccatctgcaatgttggactggatgatcctg

SEQ ID NO: 26723 - DNA, 397 bp, Oryza sativa
  unsure (1)..(397): unsure at all n locations
agctattaggaaatatacaaaaatcctctatttccttattngacttttaactctgcacattctaattgttagaggctttcacacggattttaattattctaggcataatttagaggatatattttagggtcgctttggaacgtgacaggcactgtttcacatttttaccaattatgatattggtttagtgctgtcacattattgcttctaagtctcaatttttatatgtgcaaaattttatccaaaaccattggcttagcgatgtatatggtattttgcattggcggttggaaatcatttgagcattagtactcagaatttacaccatgtatgccatatattttcaagtgcggcctacacgtgccttatgacttgaccgtattttttttggaatatg

SEQ ID NO: 26724 - DNA, 441 bp, Oryza sativa
taagcttccacatcagtggtgggttcttcatctcggacagatatctcttgttgaatcttcaagtgagccatcatctgagggaggtgtgcacgttacttgcttcactgaggacctgcatgatgttatcctccatattcagataataaggttctctaagcatgtcaacatggtttcctggatccaagatatgtaattccaaaatataaattgttctacgtaacaactttttctagagttttcagatgttgtttggatcaatgtctccataaaaaagatcagtgcatctgagttgtgcttgtgataattgattaaagagatgctgataattgatccaataacatgttctttttttttatttttggttagctcctacaaaacctggctttggcattgacacacaagttagtaagtgatgcatatacgactttaagcttaattgac

SEQ ID NO: 26725 - DNA, 359 bp, Oryza sativa
  unsure (1)..(359): unsure at all n locations
agcttaatatcccgcggaagaatttgatgtctgaagagcgaagccgccatagaagaaatgcgagaagactacgatctcatgtgtatcaggggttggaaaagcctcaccgcacgctggccgccacccgatgatctccttggctgggagaacgccgtgcgccaccatctccttcaggttctcttccgttacgtcggacggcgcccattggccttcgaagctttccttctcttccgccatcgattntatccgaatgcgctgatttgattcgagggatggctagggagaaatgagggattaaggcggtggatcacgggaaggattttgatgcacttttcgaaggtggatttgagtggagtggt

SEQ ID NO: 26726 - DNA, 438 bp, Oryza sativa
  unsure (1)..(438): unsure at all n locations
tagactntataactaatatgagacagctcatttggttagtgttcgcttccccacgtctatacgtacgcttccgcacattcactcaaatttccctatgtctaccagttgcgccattgcatctatcagtatttacgatcgaattagccatctaaatatcacattttctcaatgctacgaacctgaaaaattaagtagacgatttgattggaaacaatttattagaaataacatggcaaagtgaagaatatagaaaagacaacaaagtgaaaccatctgcactaaaacaaacaggtggtaccaaccgaaagaaatgaaggagaaattaccaatataaaatctagcagttgaaattattttagataaagaaagttctattagtctttgaccattacaacaaggtaatataattaatctaagaacactcccagcatgtatata

SEQ ID NO: 26727 - DNA, 415 bp, Oryza sativa
agctataactaatcttgttgcacatgataggcatggaatattttctcctttggttggctcacctgagcatggtctgtaattccaattgtggccacagagccatcattcttgacccactcatgagaggagctgtacttcaacccatcaagaactgcaataccagcatgaaatcatcaccatggcttaaatcaacagggaccatagttacaacaagtatactcaactcttttcaacaactggaatttctaaattttattcccttcccttttcaatcatttagtatgtctccggtgtataactaccgcatggaccagtcaatgtaacattatagaatgttaaaagaaagaaagtaaaaagggagccacagcaatttattactgggtgcaaggataacatggcacaatgcaagaatgta

SEQ ID NO: 26728 - DNA, 451 bp, Oryza sativa
  unsure (1)..(451): unsure at all n locations
tatctaaacagtttagtttgtgatccatactctattatactatagttgtagaataaaaaaaatgaactagaagtcagtttataaactgaagaacccacctttttcaaattcttaaaaccgactatcaatcagctgcttctcagaatctgcttctcagaatcttaagtttcttaaacatgttcgaagctggttgggtagctagattagcttaattttagctcttttgtggcattcactacacgaatcagtgaggggtggagcacttgttctctcttggatggagaggaaaatgcangtgcatgcatatgccgganagggaagattattgagctcagattggctattacagtttactccactcgtcattcactcttcctgattcgccaaatcgatagagtagccgacagcatccatccaacccgctgcagtgagaaaatgacagtgcgtattg

SEQ ID NO: 26729 - DNA, 385 bp, Oryza sativa
  unsure (1)..(385): unsure at all n locations
agcttcacanaaccctcattgatggttgtagtgttctcaatatcctcttcgccaagaccttggatgatatgcagattcctcgctccgagctaaaaccaagcaatgcgccttttcacggagtaatcccaagactattcgaatctccacttgggcagatcaccctcacagtcacttgttggcacttcgggaaaatattccgtacagagaacatcagctttgaagtcgtcgatttccagacagcataccatgccatactcggacgcccggcgttagccaaattcatggacgttccgcactacacatacatgatgatgaagatgcctggaccccgaggagtcctattcctacggagcgacatcaagcaagccgtcacatgcgacaagga

SEQ ID NO: 26730 - DNA, 398 bp, Oryza sativa
catgtgaccctgtttagatgggacttaaacttttatttccctatcacatccgatggttaagaattaattataaatattaaacgtagactattaataacaacccatccatatcttggactaattcgcggagaatctattgaacctaattaatccctgattagcctatgtgatgctacagtaaacattatctaattatagataactacgctaaaaaaaagttaagcgaattaggttcatttatgtaatttgtttcgtaaatagtctatatttaatactctaaattaatgtctaaatacagggactaaagttaagtcctgtatccaaacagcacaggtacatgcgaagtactgatccgctttgtgcaggtgctgttgttattttgttctgacatgtgatac

SEQ ID NO: 26731 - DNA, 364 bp, Oryza sativa
  unsure (1)..(364): unsure at all n locations
ngcttgttttaacataatacaattttcttttgcctagcaggtggcaacaaaacaaagagctgagtatcatatacatggaggatgaccaaatgacattactatgagaatgaccagaaaagtttctatagaatattattaaaaatgttaggtatctaaaagtagtctgattaagtccaagatatttcaaatactaatgttcattctacttactactccctccatcccaaaatataaggcacaaccacttttctctcatgtctcataatataaggcgtgcatgcatgcatacattaactagcatcttttggtcctataaaattgatttgttttaatcctacactatcaaaacctccaatcacattgc

SEQ ID NO: 26732 - DNA, 453 bp, Oryza sativa
tgtggcgagcgattattgttttcgcttaaattttccatttacatacctctctactgttgaatttcattcgcttcccttaagcacaaaaatggacatacggtgtaccctttacttctaacacaagggggtgtttagattcaggggtataaagtcttggcgtatcacatcgagtattgtataagatgtcatatggggtgttcggacactaataaaaaaactaattacagtatccgtcaataaaccacgagacaaatttattgcctaattaatccgtcattagcacatgtttactgtagcacaacattgtcaaatcatggagcaattgggcttaaaagaattgtctcgcaaagcagtcgcaatctgtgcaattagttatctcttagcatatatttaatacttcatgcatggcagggttatggataccacatacctaatattagttgactaaatctc

SEQ ID NO: 26733 - DNA, 385 bp, Oryza sativa
  unsure (1)..(385): unsure at all n locations
agctattttcggtcgaaccagctccatcttncttggtgagcggacgacatgtgggtctctattgatggttctcgataagtggattggccccaatatgagtcggtttgagctgacttgtgggtccctcaatccgtgtgcttgcatgtgattctttgaggtatgtttctttatatgccggcttcattatttcttcattgcgggacttattctctgtcatacatgttaattctgtaagtgtagtataaatacattatttattattgatatatgtgtaattaagaaatgttagttctcccttttatttattatgattgctggggggttgaaattggtacttaacgactatcaacaacactctcaagctaaatctttgctcgtcccaagt

SEQ ID NO: 26734 - DNA, 402 bp, Oryza sativa
  unsure (1)..(402): unsure at all n locations
agcttatgcggctaattatctgcgagtttatacccatanagggactgccttgtgccggcacatatgaatgaacagtctaactaacaactggttgcaaacaaatgcttaatattagtgaatgtctacttggtatgaataaacacacctaacaaaagggggacactcctggagatgacgcttaatcttaaacagtatacggggaatttaagggcgtcaattgtgataaccgcttatacaanttaagatgataatcattggtcgctattcgaccaaattaaaggggcaggtgtaaaatagcctacaaatcgaggattataatccccgttaaatcacatcttttatagaaaccaacatatcttatagcctgggaataacaagagcttaatcttttcaaaacaatgg

SEQ ID NO: 26735 - DNA, 53 bp, Oryza sativa
ggaaccaagcaccgggccgcaggggagggggtttttgtttcttttgcacacga

SEQ ID NO: 26736 - DNA, 367 bp, Oryza sativa
atctctaagcgacctgagcatgcaagctgcatgtaaaaggacatggtttctttctttattttcggagaactcctgtgctatatatataatcgtattaagcacacatgttctgcctccatgggtaattcataatttccacacaaaactattgataaaatagtgggttcatatgtttattaaggttaaaggtttagcctatgcctggagaataatcaactctttgttcagatttatgaggatgatatcatctttgggtggacgacccacgctttggttgtatatatcgctgagactatacgcagggaatttgagatgaccatgatggaggagatatcgtacttttgggattgcaaattaagcacacacc

SEQ ID NO: 26737 - DNA, 434 bp, Oryza sativa
tcactaaagataacccatgtgcaccagcaaaacgcttttaaattaaggaatgggttgcaccagaatcaaacaatattactgccggtgtcgagttgacggtgaatgtgcccaatataacctctggtgctgactgcgcctcctctgcagatgcatgattaacacgggcctgaacgaacttgggtccagcacgtcttggctattggcactttccaaccgtgtgtccgggtttgttacaattgaagcagagttcgggtttttctcccaacctcttgggctgatctggcagagctggctgaactgattgagctggaatctttactgaactcggagtagggttgagactgtgctgctcactgttgttgtgactgccattatggtggttcttgttgaagctacccgggtggtatggactgtgctgtccgataatcatggtg

SEQ ID NO: 26738 - DNA, 404 bp, Oryza sativa
  unsure (1)..(404): unsure at all n locations
agcttngaagtgagtccagttagggcattgttgtttcaccaaggttgatagtaagatgaaggtgcaaaaaagtaaggtgaacaaacacactgcaaggtgttttgataagcagaataagacatacgaggtcacagagaggggtggtataacacgtggtggagttagattcggcgcaagagccttcaaagttgaaggtgaggggaactcatgttcttgccaaaagccattgctctaccatatgccttgctcacatcttatacacgtttatctgattcatgcaattgatgaagaatctcccaaccgaatgccgtatcagttctcttcaagaaccgttgtgaacacatgggcaagtcgctttgagccataccttgaacctcaacaatgggcaccgtacaatgtgaaaa

SEQ ID NO: 26739 - DNA, 435 bp, Oryza sativa
tattgcaactcaaactgtataatagatcataaggtcattaatttctgagatatatttcttaatttaccgtaacttttacgaaaaaaattactaaagtactttaggacagtgggtgagattcgtgctctcataagggtgttaacagtgcgtcgctcatatttgccgttcctcgcatgccacacagaccaagaacgtgttaagctacatgtttcacagtgcaagttgttagtagtgggtctcaccggtaccatctttatcacttttgaactctccctctctcctctccttttttggtccccaccaaatgaagcccccccctctcctctctcttttcttcccctagcggaggaaccgaagctgacggcggtagagaagagcgacgacgccgacgctgagcgtgcctaacggtgctggtgcctgcagcggaatgagggc

SEQ ID NO: 26740 - DNA, 283 bp, Oryza sativa
agctatataggggctcaggaggggtggtctctttcgttaaacccccgatttggccggcgacgtgggaaagtggggatagagagttggggggtgggattcaaataaatttccgcccttgtggggacccttgcgttcgggagaggagggtgaatcggtcagttacttggccgctgttactttggcgtggagtggtgcgccgatgcttattggacgatgtggggcgccggccgctggagctcctgctccaattgctacaggaggaatacgaccgacaggttgtccc

SEQ ID NO: 26741 - DNA, 424 bp, Oryza sativa
tatctagaaacttctctcataatatgggatgaagccctcatgactcatataagatgctttgaagctttagatctaaccttacgtgatttgctttctgaacagacaccttctaacagtatagttccattcggtggtaaagatattatttttggaggtgattttcgacagatattaccagttataagaaaaggttcgcgtgcctccatagttgatgcatccattacgaattctcctctttggcgacatgttactcttcttatactgacaatcaatatgagacttcttcacggtgaccttggtgagcaaggttgtagagatcttaaggactttgcgtgatgggttctagtgcttggtgatggtaggttgactgcgacaaaagaaaatggtgaatcataaccaacatgggtggatattcctgatgatc

SEQ ID NO: 26742 - DNA, 455 bp, Oryza sativa
  unsure (1)..(455): unsure at all n locations
ttgcanaattattatgaagctacgcgactagaaattgatccctatgatcgaagttatatactctataacataggccttatacacacaagcaatggagagcatacaaaggctatggaatattatttccgggcactagaacgaaaccccttcttaccacaagcttttaataatatggccgtgatctgtcattacgtgcgactatctccactatagaaagaaaaataagaaaggatcaaattttctagtatttactagaaaagggggctttctacatagggatcgtcaaaacaacgattttgccctatcagctgtaggaagaaaggacacttcacgagaatcaaaataggaagaaagaaagtatggcctatactactctatggatagagttctcanattgatagagaaagcaccgtaaagatcaattagtgaccgactgggtcgatacaactaataaa

SEQ ID NO: 26743 - DNA, 419 bp, Oryza sativa
  unsure (1)..(419): unsure at all n locations
agcttgttattatgtacaanaagatatagtttaattgttgatctgctatggccgactataattacacacacctttcgctttcttttttcagcggtaacttgaaaagaacaggtgaacattcaccagattaatcccacacttgcttacaaaattaacagaaactacaatgttattagacggtaagagccacaggacaaaagatcatgctcctatccagatgcaagctgaaaatctattcaaggagaccgggagaactcctacagcccaagcacatcgaactcatggggcatgtaatcttcgcttggacggtagtacttgttgggagaatacaaagcaaagtttgtgacttgactactgtaaaggcacgcaaatctctcgacctgtgttaacatgcaaagagaaagattaatccaaaaaaa

SEQ ID NO: 26744 - DNA, 435 bp, Oryza sativa
tcgcgcgcgtatgataacagagccatcaatccacgcacctggaggcccttccactgctcggtgtcgcagatgagcgccgacgacgccatggctgctagctgcaacaaccaaaaaaaaaacaacaaaaatcacccaaacgatcaacgaaaccaaccaaatcatcagcgcaaaacgcatccatcttcaccggaaatcagaaccaaagcggaatcgaacgaaatcggcagaaaaaccagatgcgatagcaaacagtagagagcaaaaaataaattcgtgggggcgaggaattataccgtggggggaagaagccgatcggtgggtgaggaagcggatccgcgcttcgcttcctgcgaattactaatttttatatctcagaattttttttcctttttccaattcttcccgtgtcttccgtcaccgtgggctgaaaatagt

SEQ ID NO: 26745 - DNA, 408 bp, Oryza sativa
agcttcaccttgtgactggattaagtatctttaatcccagatactaatcggcaggttgcttctacaagcccattttaagaagagaaagatgtacccacagccattaatggagtagataacagaaagtaccatttcgggttggcatttatcaattaatttgaccagtatttctccatatttgttgtattatcttctttatgtagtaattttaccaattttttactaccactggtgaccgtgctatggctagtttcattgaggatagacatcatggggaggtccaggaatatatttatgcagtgttcgcatgtcagctttaggattattggcaaggatgacgaactgtagaagagatttagaatgatcttcattacttaatttaaatgactatgcccatactcctttttg

SEQ ID NO: 26746 - DNA, 451 bp, Oryza sativa
tgtcgacaacggcgtcaacaccggccccattattgtttccctacttcaacaatgctggtgtggactcatgtcagcgaaattgttttcccggtttacaccacggtaccaatctcggctggtccatcaatgaccggaaacgagaacgccgtaactataacctcaaacgaccctgtgtcgaaggatcctcccgccatagcggagaacagaacatcgacgtcatacgagtccgagaaggttcctagtgcggccaaaccttgtccttccgacaagaaccatgagctgacaaggacagcttccgaggtaacaaagtcctggtgtcccatccacaagtccaggaagcacaacttgcaagcttgctgggtttttctcaacgtacaagctgaaattcatgcttgcaaggagcgtggaatccagcgtacttctccaactcgtgatgtctattgtcctattc

SEQ ID NO: 26747 - DNA, 358 bp, Oryza sativa
ggatcttaagtcacctgcggcatgcaagcttaagcagaaacctgcccttatttatttacagcatatatatgccatctttttagattgtaaaaaatatactaacagagataaagtgttttgtgacttgtgactggtcgtaaataaatatactgcaagtttcatacttaaaaaaggtagaaataatttgtccttaaatttaaaaaacgcatgagttctcttataatgcagagaatgcaaaaagaaagaggtaatgcacatagcacaactattttggctgatagatcagagtagctgaatatttctggtagtgggacgaaacatatataaacatggttattgcctatatatgcctaacatg

SEQ ID NO: 26748 - DNA, 449 bp, Oryza sativa
  unsure (1)..(449): unsure at all n locations
atggaaggtgataaaccaaaagaatccaagagggttgataccactagctatcagaagggctctcataaaggggctatgccacttcctttacctccaactacaaggggtggacctccatttttatcacaagacaggagaagcgctgatcaagtcgctcagtcaaaggaagctgaaaggctggcagctctcaagtcttatagaagatcgaaggtactttgttttgtctgcggagaaaaatggagcaaggatcataaatgtgcatcttcaattcagctgcatgttgtacaggaattgatggatgtcttgcatgtcactttgttgtctgatcatgaagcatatgaattccaagaaaacgatacacttatggctatttcacctcaggctgttaatggcactgaatcaagtcactctatcagatngagagggtgggttcatggtattgaagtgtt

SEQ ID NO: 26749 - DNA, 401 bp, Oryza sativa
agctttcaccactgtcaacttggttatcttctcttacaaggatgaaccattctttctcgccaaacaagttgttcaagtgttctacatagttgacccgtgtaacaagaaactacatgttgttcgtgaagggaaaaggagaattgttggattggacaatattgcagacgaggatgattacaaccagcacgtccatggcataggtcaagaaatacctctagaagaggaggaggaagaagatgaagttcaatatgcacgtgtcgaccatgaagaaggattatttttgtaatttatgtacgtagtttatgtctacatgtctgttatttggtaataatgaagtgcaatttctactggtagtgaaataaattatttaagttatataaatatgttgtgtattggaaaat

SEQ ID NO: 26750 - DNA, 421 bp, Oryza sativa
actcctcaagaacacttctgttggcgacttgacaactcccattggccgatgccaagactctgaagacgatgctgactctacgccggcgaagactatgggcttaccaaatcttggcgctaacagctatatatgcttctttttggaaaaggctatcctaataacacatttgctcctcatatggtgctcttgagcggtaatgattatatttgcttacaatcaatccttagtagcctttagggtaaccacttctctaaactcttaagtcctatgtggggcccaaggtagaaatacgttaacttgacactattcaccagattattgaattggatcatctgctccacacttcatacaataatatgtgataagccatttattatgataatttccttatactatgagcttagaccacttggtttaatgt

SEQ ID NO: 26751 - DNA, 412 bp, Oryza sativa
agcttggcgacgcaggcgtggagctgttcctttctcgaaggtcgcgcagcgcgctctgcgactgtaggatggtgccgaatgtgaactcgttgggcacgaagccgttcccaagaatgccggataagagggcgactcgcgttccggtgccggccgctgcgggtgagcgcgccaatggccgccggggccgagacgacgtcccggtgcggcatttcgtcgagcataattgtgggcggattcatggaaccgtgtgaacggcaccaccagctgtgccgtgggctacgtcagggtccttatggaacccccaaggtgctgcatttgatcgctggaattctggccttttggagcggaccagctttgccgttttgatgtggtggatgaggatttctgttcttgttggtcagctgatgcatcc

SEQ ID NO: 26752 - DNA, 441 bp, Oryza sativa
actaagcttataaacataccttggacattcctggaagataaccacgatcagtaagtgtatccatttcattaaagccctctagcatttccacttgctgttggtagtattcagcaactacgtcctcatgaccttgagctgaagatagaatcgtacatcaatcacagaaaattatgtccagcatgaagatagatagtgacattagtggagcaagcaagcatgtatgcttcacatgttctactgaattataccacttctcagtgaacctgataactctgatatctaattaattatatttcatctattgattatatcacatgtagaaccactgaataaaatgctacagctattgaaatgtacaggataaaaatgtcaattctgatttaaatagtactactagtactaggattgtggtgccttgaattcaaccaccaatagaccacg

SEQ ID NO: 26753 - DNA, 377 bp, Oryza sativa
agctagtcgctatagaagacttctctcttgttcagtccaagaacggagctagcagctcgagcaatcaacctttattggctggcatcttgaagagtaaaactaaagggcgtatctatagatgaaattatttatcaatcaaaccttgttatgggaccacttcacgaactaaaaacaaaagttgaaaaattaactatattaaaaaaaaccataatatcaactccatatagaatatttaaaatgtatatttcgaacgaatcccatacgttatagcgaaaaagaccatgctgacacggaaaactggccttggcacctatggccactcgactcagccttaacggtcaatcgctcgtcatttagccgcctactggaagtcctct

SEQ ID NO: 26754 - DNA, 453 bp, Oryza sativa
  unsure (1)..(453): unsure at all n locations
ttctaggtgtgcatgacttaatatgcctaagctaatgttcagtgccagcagaagaacgagcactcaaagttttatgacagtaattgcatttagcagagactcgaaccctattaccattggtcgtttcataaagttcctcaaagtcatcccataccttggaagttttggtcttcttgttggtacaagtcgcactagaaccagtccgcgttccattgccactgtcgtcgaccggcgggtcgtcgtcatcgacattcacatggatcgggatgtctgaggtattgccgaacacctncacacgatcctcctccacatcatcatcgtcatcaccgcgcatcctcatagtcctcaactcgtagttgacagaggtaggatcgtcgtccatcgcaggcactctggtccctcaacggcggctgccgctaacaacgggcttgcgacctgaagcagccaacaaca

SEQ ID NO: 26755 - DNA, 389 bp, Oryza sativa
agctcaacgcaatatgattatttatattctatacaaaacttatcgaccctaagggtcggcctgtacataactacaacctcatccatgcgcgctctatggtcctataagagccggcatgaacaagattactaagcgctctataaaccagaaatcatgtcgatcccaatcattatacctaaggcggatgagcctcgttttccgttgtgactcaccacttagagcggatcaacgaaaagggagtgggtttgggggtacagggtatagcagcgtctatatcgcggtggctcgccttggggggtggaggtagacgcgagcacctgttccattttaaaaagggtcagaacccttctccttgttggggtcggggttaatgggggaggagggatgaa

SEQ ID NO: 26756 - DNA, 445 bp, Oryza sativa
  unsure (1)..(445): unsure at all n locations
tgacctgttgctggaaacacaagttccccatcactttctctgatgtgtccttgaagctcgtttcatactagttgcacataggactagcagcaaatgcagagatgtgttcttttattcatgcattttttgtcttctcttttttcttcatccatgcacggtgccagcagcagggcttgacttcttcggtgctgcccaccggacctcttcactgcgcttgcactgtgaagtcagatctatagagaatatgaggaaaaagaatggggagagaagtgggatggaggaagaagataatgggcaatttggtccaaaaatacattttagtgtatggaaggggtatgttgtggcatttcttaaataatctgtaaattgcaatggcatgactccaaatatgtactccctccatcngcaaatgatctacatatagttttttagggtattcctaaaa

SEQ ID NO: 26757 - DNA, 408 bp, Oryza sativa
  unsure (1)..(408): unsure at all n locations
tagcttaantacaacaatccgcagatcttcttttaacatctttaaacttccgatgatcatatcttggtcatacgaactctgaatcgacccgctcaagactctcaatgtttgctataacctaaagaactgtgagctttctttttatgtgttgttatctgcttctttataggcccgaagctttgctagtgtgcttcgcgtacctactgtcgttccggaggttcccgaaacgtggttcaaggacttcccgaaggttcggaaggccggtctctctgagcaaggcaagtcacatcattcttgagcatattgaatcccacttataaaattattttgattaaattaatgcattatcgcttattaaatttctgcgtatcactgtatattaaccacccctattacctttgataacct

SEQ ID NO: 26758 - DNA, 415 bp, Oryza sativa
catcaatggactcctgacgtctactattgagtgtggttcgttcgacaaattcctacctctatatctatctctgaggtgtttgggttttgcaaaactccatagatatgcagaagagaaatgctatccccactccgaccaagacagaacttttaccaaaagtttattgtgatctttttgttcaaataacaattaaggtgaagcagggtcaggaacaacgaatctctttatgataaacagatccattttgcaagctcgttattacgggtagttcctacaaagaatcggactaatgacgtatacaatgcttgaattatcgacgtagatgctacatagtgggttctcatccttcagagactacgagtgtaataggagcatccgttgacaaaaggatcaccctaagatgatcatctcatgg

SEQ ID NO: 26759 - DNA, 355 bp, Oryza sativa
agatgacccgaatgcgggatctagaagacactattacacgccttcgtgctttgaagatgaaaccaaacccagtaaagggcatctccggaggaaccgcagggaagatgctccgacttatggtatcttaaagaggcatacagggcaacccggagacaatcagcgcctaccttaacatgaaaacgccgagctccctagaagacgtccaaaagctgactggttgcatggcggcgcttcaccggtaatgcataccactcggagagcgtgggaagcccttcttcgagctgctggagaagactgacaattttcaattgtaaaccggaacacaagaagcctttcaaacttgaagaaacttgta

SEQ ID NO: 26760 - DNA, 422 bp, Oryza sativa
gacgagtcgtcgtccacatcatgtgatgtagaattggaatacagcatcattgcccgaatgagatagacaagatgacgtggacgaagtggccaacacgtgggatctaccacatgatattcgaacttgagccttagatgatgaatatacagtgcgctttatcctaacctagactgacttaacgcccactaatgatctattatacctttgtcctgcgtcaaccaaagagcaagatatctgacggaggactccttcacattaatagacagacagaatgatagggctaaacatttctttctttttagggaaaagagaactctgtttgataagtaacatgatacactcttggtgcaaatccgttacacaagggggcttgtcacgtaaaccgtcaatgagagttcgttaacaattggcaggtatgacta

SEQ ID NO: 26761 - DNA, 404 bp, Oryza sativa
agctttacagacatctcttcgatgaagttactgctactgtggccgttcctgccttcatctttcatgaatcacatttgacagacgttcacatggcgacatgaacccccaaggtcattgatttataggaatggcagcaacaaggagggaatggcggttctcaaacacattcccgccgtcggtcgattactaccaccactcgacacgtagctagagaaagggtgaagcatattccgtatgcgcttcgcccataaaatgaacccttgtggtcaatcgttacccaagaagaccggatccaaaaagggaagggtgcccttaatctatacaaattttcacactacttttaaggggggtatcccccttggtaagtcgcgttatacttctaaaaactaaacccccctttttat

SEQ ID NO: 26762 - DNA, 408 bp, Oryza sativa
tgtgcgctggcatgccgaagaacggaaagtctatagtatgctgaggcacccatcagattcagtacagtggaggacaatcgataggatttaccaggaattctcaaatgacccaagaaacatgcgttttgcaatgtgtacggaccgcattaatacttttggtgatttgagcagttgtcacagtacatggcttgttctgcttgttaactataaccttactttctggttgtgtttcaaaagaaagtatattatgcttgccatgctcattcaaggaccgagacaaccgggcaacgatattgatgtggttcttgaaccgataatcgatgacttccaaaggctatggaatgacggcacacgaacatgggacgcatatgcacaatagtatttcaacctccatgcgatgctgctttg

SEQ ID NO: 26763 - DNA, 269 bp, Oryza sativa
  unsure (1)..(269): unsure at all n locations
nagctttacgagaacgcacgcgggtcatttatccgtcccaggagctaaaagcgccatgcactactaagcgcacacgtattataacactgagagagaggatctggggctccccggaaagagaagactcacacacacttaaacagagggatcaacggtaagagtctctctctacacacacacgatggagagaccataccactaggcgacacacgaggaagggcacgacctataagcccaaaccccaacgagctaaccaatcgaagcgcacc

SEQ ID NO: 26764 - DNA, 447 bp, Oryza sativa
gcttccatgcaattctctacaccttgagtctggtttgatttaataaggatgatggactagaggaggccaacgagatatgtgatactttgcaattggctcatgagggatcacccgccgttcgtgaggccaagattgaattattggaaggaaggcttggaagatttgtgatggatgacaaggagacaccacaagaaatgtatgataggatgatgatccttgtcaacaagaattaaggacttgggagtgaggacatgacaaatcactttgtggtcaagagacttctccgtgaatttggtccaagatatcccactcttgtatcaatgatacgggaaaagaaagacttcaagagactcaccctatgtgacattcttggaagaattgtgtctcatgagatgcaagaagaggaagctcgtgaatcgacgcaaatggtgaagaatgccgtcataa

SEQ ID NO: 26765 - DNA, 340 bp, Oryza sativa
ccggatccttaagtcacccgcggcagcaagcttgatcagcactgccattctgtttaactcgcatacacgtagacacacaagctttgatccttctgttcgccatggacggcgaggcgacgagcttgatgatctccccggagatcctctacaccgtgaccaaagctgccctgttcatgctggtgcaggcgctggactaccttatcctccgtagcttatgaagcgttttctacaaagaccgcatgctgatgtcgtccatgagcttccggacaatgccgtccatgagcgtcatgcgctttcctcgtccgatcatccgacgttcccgtcggcaccgaccagccca

SEQ ID NO: 26766 - DNA, 452 bp, Oryza sativa
tggtaccaagtactaggggtatggtacctcaatggtatcatgcctggtacctaagtaccatccagtatccatgggtaccatgtgcatggtattaggtaccagatacctataattatcaggtaccacatggtacctgatacctattgtacctgatacctcgagggtatcatgcatggtacctaggtaccatccatgggtatctgttaacagtgaaatttggtaagcccagagtagtcatcggcttagagtcagcatcggcttcgaagtcctgagattagccgatgagagttgtcaagtcgtcagttgtcggattcttgctatattcggttaaggaaattgatctactaaaggaagcttatccaaaagagaccgagttcaaagagaatgcggcatggcaggttatctattaattacgaaatagttgttagtttccttttatctataggaaagtg

SEQ ID NO: 26767 - DNA, 371 bp, Oryza sativa
agcttaacgtctactccaggcttttgtttattattgtcgaaaacaggcccaatgatattgctcggtggtaacatacagcgttctcagcatcttcctgctcgagggatacgtacgtgtgactggccataccggatactcctcccagggccataacaatagccagggaatcattgacctcactgccacaaactacatgttcttccacacgcaaaacaaattcaccgccgttggctgtgatgccatggcaatgataacaaacagcacccatgttgtcgtgtacaccaacagcacggtgatgagctaatacagtggggggtgcgtgtcgttctgcgcattcaaaggaaacttcattagcggccaatgctctggtg

SEQ ID NO: 26768 - DNA, 439 bp, Oryza sativa
  unsure (1)..(439): unsure at all n locations
tatcacaaggcgcccggacttgaaactcttcactaggagctgtgtgtattgtgttgcttacgttaatcacgtacacgtaaacacgctagctaagatggacagganaaggttggagctgagctaatggctactcggctagtacacccattccctctatctccgtagttttacgcaaaatatttgttcctaaataagtgtagttttaggctgaatttaaatcagatgtaagaccgcagttgttggcggctcgaaaaatggggtgaatcgttagttaagtgtagttttaggctgaatttaaatcaaatgtaagaccgcagttgttggcagctcgaaaaatggagtgaatcgttagtaaatgatggatcgaatatcaattactataanactgaaatattgatttatttgattattctttcaagaaatagaaatttttacacaa

SEQ ID NO: 26769 - DNA, 100 bp, Oryza sativa
agcctgaggcgacgcaagaaggatctattcttcttcaatagcagatgagccgcgctagcaggcgcttcaaggacggaaccacgaaactgcccaactacaa

SEQ ID NO: 26770 - DNA, 403 bp, Oryza sativa
agctttgctcagaaatctcaaatatattgcactgtattgtgatatatatatatgcccccctagtttacaatgtcaagagcattgataaaaatacgaaacaactaagggcgatataacaatatcggccattgtatatcagcaaaccacgactgattacaatagaaccactaagggcgatataacaatattggccattgtacatcggctaaccacaaccgattacaataaaacaactaagggcgatattacaatatcggccatctcaaggcgatgcaaatacatcggctatcatgtatcggcaatactatccgatcatgcgttaacccaaacacttggataatatttcttcaaatatttgccattaagcgctcgcccaataactttttcatcgagttcttgcaac

SEQ ID NO: 26771 - DNA, 448 bp, Oryza sativa
  unsure (1)..(448): unsure at all n locations
ngcccaacatatgacaacattgcattatgaatacaatatcatatacaacactaaacatatagtgtgctctttacgatattgttttctattattatacataactcaggaaatgttacatcacagggacatgcataagagaaaggttatgagagtgattgaactatatgacatcacaacatagatttcgttggtattttcttaaccacaacatttttggtacactagaatttatttgaaaaacatttatgtaaagaataaaggctgacaggtgaataaaaagttcatggataactcacacctaccactggaagacaagaacagcaatagtactaacaatcaacgctccaacaacagtggaacttgatgcatacacaactacaccctgatgataataattctcacaattacgagaaaagttgttccacagacaatctaaagggtccactaa

SEQ ID NO: 26772 - DNA, 391 bp, Oryza sativa
  unsure (1)..(391): unsure at all n locations
acctctaagncacctgcagcatgcaacatctcatgaagcggtgctttttctctaggcgtgacgaacgctgacacccggcttccttgaccttgattcagaatcctggacatcttgaacagaagatgccaaacatagaaggcttcttggcctatcaggacataaggggtcaaagaggactgaagggctcagagacacaatgccctctggagatggcgtgaaggacatgggtatggaaggccaactcccaaggccactagctcaaaggagcgaactacatagacaagcgtagcccttcgtcatatcatgctccacgtgaactgcccattttggcaagggaagctcatgctgatcatatttaacgatcgtcgagaaaaagcgtttaagcctgcaa

SEQ ID NO: 26773 - DNA, 102 bp, Oryza sativa
ttggccgggtcacgctcaaactatatgacgcctgctttctctcgttccaaacgtcaaacgacgcgcatgcgctagcggaggatggattctattctctcgggt

SEQ ID NO: 26774 - DNA, 410 bp, Oryza sativa
agcttgagcattgctgcggataacagttctttcttctaagcgagctccatgtcatcatggggtatatcaatacctgtacacacaactttccaaatattttgatgcaaagagattagacgcaacttcatcttgtgcatccaagcagaataatatgccccatcaaattgaggaccacccccggaaagctcagagacgatattgttagaaggaatggaacgtttgctcataatcaaaaagtttaataactgccttgggaggctgagttcccttgctgcgttgctcaacttcatctccaattttcccgtcccattcccctaagtccgacattgaagtaaatcatagcggttgaacttgaataagaataccttactcccaaccaattgaactgcaaaaatattccctaaacgggg

SEQ ID NO: 26775 - DNA, 448 bp, Oryza sativa
tgtctaggaggtcctctgcatggtacatgacatactttatcttccgcatccatgggagggagccgtaagacagtgaaggtgttacctctgccccatggaggacagactgcgtgcgaagcagcgcgacacgaagtctgttcatctcatggctgatgccgcagtcggccgcccagctctgaagctggtaggacagatacttgtcaaaaatgacctggatgaaccagccacctacagctaggtaactggacatgtccatgcttctcttttcttgaactttgttatctccggcaaggactaagaatcccttgaatattttccgaactagctaagtccatcttcaattctaatgggaatcccctggacacctaagccaagtcttctgccaagtatttgcaaagacttcttcaacttgaatgtcggaggatctggacattctgaaagggacaca

SEQ ID NO: 26776 - DNA, 418 bp, Oryza sativa
agcttgaagaagtgggtgatatacctcacgattctacttcgccaacacattccatgtttattcttaatggtgggctgggggcatcatcggagttcaatagaggtgtccggcgagtgattcttgacgagcctaatagttgagttagtaatgcatggcgttttgaaggatgttctataaaagggtggcaacggcttcctccctaaacgattggggctattaaagtttgatcggtcagtttgtgaggaaaaaggataggatcacgaattattgttgatggaccgattggcctatggttgatgaaccttaaaaggaaaaataattttatgaggttaaactctttatattctatatggggggtgtcaaattggagccaaaataaatctaattgccaaaattatgtgtaggtgaggataattaa

SEQ ID NO: 26777 - DNA, 438 bp, Oryza sativa
  unsure (1)..(438): unsure at all n locations
tgccgttcgccttgggaacgaccaccgggttcgccagtttcttcggatggatgacctcacggatgaatccggcctccagaagtcgcgccacctcctcgcggatgaaggcttgacgttccggggcctgccgccgcactttctgccggaccggccttgcgcccggccgcacggcaagacggtgctcaatcaaccccctggggaccccgggcatatccgccggtctccatgcgaagacgtcagcgtttgcccgcaggaaggagacgagcgcgtcttcctatntgccgtccagaagaccaccgatccgtgtggtcttagacgggccgtcgcccagggcaacctccttgaccgggacctcgtcgcctgtgatcatccgctgcctcggggtggcggtggcgtatgcgccaagcctctcgtcgcacccttcggcttggacgcacg

SEQ ID NO: 26778 - DNA, 446 bp, Oryza sativa
actaacaaactcaccctgagactgcatgggacaaaagagggcaacttgattctattttcaaataacacggggtacaaaacactatgccctaggaacacacatattcctggataggtaagctgctagctgcatactaatatcaaatgcataaaagcaaacgaacgaaaataaaatgtgtgtagggcttgtgatgcatcacgagtgttaaaagctcatgaaactggccccacaagtacaacactgtcattctttcataagatacctccttttaactatcgtgctaatgatttacatgcttcattttatatgaaaaattatttaactttgtagtatatatccggcaaactgatgggattctctattctctcagtaacagcaaaactaatcgattcttggtccgagcatgaaagcaacactatggatgaacaggactgtgctacttgcta

SEQ ID NO: 26779 - DNA, 441 bp, Oryza sativa
agctcgtgaggatcatagctctggatgtatgttatatcacgccctggaagaaggagaaccgctcagtttgatgggtcttctcagcgtccaggaggaggttcgtgattcggtaccacgcctcggtaagacgactgactacacccgggacgcatttcagcgttgcacacaagggacgccaccttccttcccgcagtggcaacgctttgtaaaatacgcctatttgtaaaagcttacggagttatacacttaattacctaggaaaaatgtcaacataaaattgagctagataaaatttcattaaatactttgcttagttaactattttctagattttctgggaattattggagctcggatagtactttttataaatgagacctcttttcgcgaagtattataattgggaaaagtgtttaaaattcgctgctaagccggtgggct

SEQ ID NO: 26780 - DNA, 430 bp, Oryza sativa
  unsure (1)..(430): unsure at all n locations
cacggctattcgaatggattatactnttattagaggtgtacaattttacccacaagacatgcctttctcacgcgttgccacgtgccacttaccaccatggtaaatgagcggagggtgtcacatagttcttcacccatcctagccttgcacaagagcaccgacccaacgcctgcctatggccgaagctaccgggacaggtaagttaaggctaagccccacgtcatcagaacatccttcgagagtggccacccgaatgcttgtcctgtgccatgacatctcgactatcggacacccgcccatatagccttcatttgcctcagagatatccatcacccgacttcatccatctctatatgtccttttngtcatgactagactaaactacaaactaagccttacccattagacatgtagaagtacggtattacat

SEQ ID NO: 26781 - DNA, 367 bp, Oryza sativa
agctacaaatgatcaagtgaggcctgtttatattcttcgtcaaattatgtcaccatatcacatcgtacgtttgaacacctacttgatgaattaaatataggcttagaataactaatcgcacagattgtgactgaattgcgagacgaatatttttagcctaattgcaccatgatttgataatgtggtgctaccagaattcgtcttgcatattactgacggattcttgaattagtctttttattattgcctcgtacacccatgtgacaccttatataatatttgttgtgacacgccaaaactttactacatcccctgaatttaaacaccccttacatattactagttcatgatcttatttttgactttg

SEQ ID NO: 26782 - DNA, 418 bp, Oryza sativa
tcttgttcttctaggcagtggttctgagatctcacagtatcattctattatcatgctaaaaacattctgtgaacttggtgcgccacttcacgggtgcatgggacctggagcgttgactcatttgccttggcatgctcgtctcagtttggagagatatgtcttatttgaccaaaatgtaactccatcaccaaagcctcaacaatcttttgagttgattcttcacaagatactgcacagagacaacaaagataacattgaggcgatccaaggtttattacctctcgctgagagggctaatgattcaagggtgcaagatctccttttgggaagcaatatgtacaatgggttggcactgctgctgcaacggagagacatttgaagcaaccaagtgaggtctcacacttgctttctggtgatg

SEQ ID NO: 26783 - DNA, 380 bp, Oryza sativa
agcttggaggtctcccgacgtgtttgattctcacgggctggaagatccgggttagtaatgtcatgtgggtaaagtgtaccccctctgcagaggacattaaactgttcgaacacccgtgcccacagtcatgggcggatgtgaagggattcctagcgtagttttggttgactactgcttgtgaaatagttgttgagaaaaggggttcgatggttgaaaaatctgcaactgatgggatcagctaagtccgggtggccgtatgaaaagttgtttggcccgggtggtctgttgaaaaagctgtgtacgggtgccaaccgtgttgcaatcctaaagattggatacattggacattacttcgacctgacgagatgcactgtttcatt

SEQ ID NO: 26784 - DNA, 448 bp, Oryza sativa
  unsure (1)..(448): unsure at all n locations
tggcttgactacccatccacctgcacgaattatcttctttaccctagctttattatcctctataaataactttgtacatcctcaaaaacaattgggttttggttagttgaattatgccaagtgccattcaccttgtctctagtccttgctcgattagtcggcgactatagattcagagcccccaatagttagtgtgttgatttgccgggtcgattagatctaccacttcaatcgcaactattcctttgtgcttaattccctattcgcaatatttagattgcatcttatcttgttcttgcagtgttctctcgtttgcattgtagggatcatcaaccgcgcgtcacggatggtacgacatcgtttgtggtgtagcgatggcacggcgtcctggatttgttctggttggtagccacatcgcanacgttcgactcgatcatagcgagagtta

SEQ ID NO: 26785 - DNA, 381 bp, Oryza sativa
agagagctccaatggatttgacggatcagcctacaccttttcagcgccgctatccaagtaaagatatccaatatcgttctagctcagctaatagtggagaagattcacaaatattaagcagtgccacgctgatgagtctggtgttaaatcattcaatttcacgcgaatgagacgaaggattaaaaagatacgccagaggttaatggctcttaagcatgattttgttgaaccactcatacgcgataatacaggaattgtgcacaggtctgctctacgtactgcataagctaagttaagttgatggcttcaggacttgcaaagacttcgtcaagctagaaaagagggtgctgccagtattggtttgattggtagtgacatgac

SEQ ID NO: 26786 - DNA, 420 bp, Oryza sativa
  unsure (1)..(420): unsure at all n locations
gaccgcggcatgcaagctnaagagagagcaatagctattttaaggcgatcaactacctgcaccaggggagagaaatgcagagtaagcaatttcgacattaagcacgcacacacaaccttcctgatgcaaaacataagatccaataggacaccagatcagtggaccgcgactaaacagaacaccgaggaacaaacagtacagcaccaaacagggcataacccagaacagagggccaaataaccacaaagatggcgtccagaagcttcagcgtcaaaccaacacgcgtgaagacaacatctcgggaatgccgctacacgagacggatggacgaagaacaaacgcacgaccaaacacaaaaccacaagcacagcagtcataccacccacaggggaagacgggcaggcaacagaggacaaacac

SEQ ID NO: 26787 - DNA, 449 bp, Oryza sativa
  unsure (1)..(449): unsure at all n locations
tgagtatactaactgttcatggcgttctagttactattagtggagctgctgnatctcaagaacaaccagcttgcgttcctttctcctgtggacatcttgaaggtatcaggtaccctttccgtatacaaggtgatccacttggctgtggtgatgaagcttatgagctagtctgtagagatggcagtagctataattcacatcaacacaggaaaatattttgtgaaagacatctcctataacgagtctagattttgggttgttgatgctaatttagacaacagcagttgccctcttccactgtggaataatcttccctacttcaatgacatgggcactaagctgtacacttctgcatatcggtgtgctacatttctaaattgctcacggccgataaacaatggcatgtacatgcctgtngcttgcttgagtgggaatacttcttttgttat

SEQ ID NO: 26788 - DNA, 435 bp, Oryza sativa
tgagcattgcggaggatgagttgtacatgctcctacgtgagctccatgacatcatgggggtatatcaatacatgtacaaacaactttccaaatacttagatgcacagagattagatgcaacttcatcttgtgcttccaagtggcataatatgtcccatcaaattgaggagcacgcccggaaggcacggagacaaggttgtgagagggaatagtaagtttgttgtaatcaaaaggtatagtagctcccttgggtggtggaattcccttgctgcttgcttcatcttcattcccattttccccgttctttcctactaagttcgacatcgtggatcactcaaagcggtgaagcttatataagagcaacctgctatgataccaattgaacatgcagagatgtagtctagagggggggtgaacaggctttactgaaatttt

SEQ ID NO: 26789 - DNA, 409 bp, Oryza sativa
agcttcctttagtagatcaattttcttttatctttatagcaagaatccgacaactaacggcttgacaactctcatcggctaatctcaagacttcgaagccgatgctgactctaagccgatgttgttcctccgttaaattctccactgtgaccatgatcttggcattgacttcttcttcagacatgtggatataaaactcgtgtcccactgggcgtgccaatttgtgttgacgaaaaatatcgaacacaccggcctgcttagctcctgtgcaggtccaaatcttaatgagatgcgggcgtgcgagtccagttgatcctgcacttgacaagatatgcaaattgtagatcaaaacagccgatctgctgacaagccgatggagtagtctaaccgatagccgataatactcgtt

SEQ ID NO: 26790 - DNA, 405 bp, Oryza sativa
  unsure (1)..(405): unsure at all n locations
ataattctatagaaaacccactgatatttatatgctatagacgagcaatgaatatcaatcttctgggcgcctccattttctagtatgtagcgaattcagggtgctttggcatgatattgcgctcagaacgctgcaaaaggtcatcaatcttctgctgcactgtccagtacaatccatagtcttccgcaagggccttggctggaggagagtctccatctcctgtagtcatggtgggagtagacaacggacgatgtatgggttgtttccatggtaaaggcaactgctgcaccacgggatagcacaagcnctaatggatcacctctctttgcaattaaaaagtataggcataggatgaagtctgacaatgtgcaactatttaaagtacattttgtaaaccgagtattg

SEQ ID NO: 26791 - DNA, 408 bp, Oryza sativa
agcttgctccatatgcctttccgtgctgttaggcactccaatttgccaaacacaaaaccagacttttgagggttcccgtctacaagagagttctcgtatatttccttgcactcttgtacaacctaagaacgaggaatgaacagtgaacacgtaattatcaattaaaaaattctgactaacagtttttctaatcactttcaaaaggcataatttgaccactggaataggtctaatttgcactgtttcgcacaaaattgaaccgcacatgcatatgatgtgaaaaatgttatgttcttacctctttggcttccttccttggaatgccttccctcattcccacaagcttctcaacaacctcaggctacataacgtagatatcaagttcagcacatcaacagaaatgaatgc

SEQ ID NO: 26792 - DNA, 443 bp, Oryza sativa
tgaaattggcacgcttagtgccggttcgttcaaaaatatgagaaagcttgagaggatcaagagcagtggaactaaccgaagacgatatccctccgcgatagcagcttcttgtccgagctccccgtgccgctcctccctttcttccgaaagatgctcgacatgaatgactgtaaaaaaaatagagcaagaacaagcaacaaaattcagccacattctgaattttctcctctttttgaagggatttttttggacgagctgctgagagatcttaccttcttcttcttgccattcttgacgaattcatcaacagaggcaggctttgggatgtcacagggagaattgtgatttgacatccagctcgatgtaaatgaagcaagcaaacggtatggaccctcatccgggagcctatcgtggaggcgggttttattcccgcaaagcgagag

SEQ ID NO: 26793 - DNA, 252 bp, Oryza sativa
caagctttattgaaatactgaagagaattttgtttttttttgcatgtggaagcccccggccaatcctgcacgcccggaggggtgcggtgttggcctgagctccatacctgacacctctacctcccacatatgggttagaaagcgaccaatagtgttcctatgtttacatgggttaagcatttctgtgccgtcttccgtggccagccgaacggagcccggtctggggacgccgatcactcaatactgaccctc

SEQ ID NO: 26794 - DNA, 415 bp, Oryza sativa
tggcggcgatggcggctatgatgacggttgacgagctctgcaacagcggcggaggcaatggcttcgacggtggccgatggcggtagcggtgggtgcgacggtggcagcatcaatgaaggtcggcgagccccacggctacgacttcgacgacggtggcaatgtcgagtggtactgggaagcgggcagtggtggcttcgatgacggtcggtgagcccgccagcaacggtgattggtgagcgttgctgggaagcgggaaccggtagtggatattagatagggctgacggcaattttgtcagtttgaaatttctctctcctccttatatcagaaatgataaaatattgtctcagatgagggcaagttacacgaattatggggtgttcatgagtagcgacgcgattgtacagcgtctcct

SEQ ID NO: 26795 - DNA, 416 bp, Oryza sativa
agcttctcgtttcacaacagtaatgcactactatatttaccttgaaagaccaatactattcacgtaaagcacataagttggtaccaaaaaatagttccagacagtgctaaatcatcaattgtaactgaacaactcaactaactttttagaatcatgctcaagagaaaatttcaatcgtaaacatctagcatataattagtaaataagggaatgatgtttaacattattctctaacaaaagatgacatacctgattaatcatggcaaggaggttgattgctgattactaccaatgcacttcaacttcaattgatttctgctagcagtcaacaacccgaatagcacctacccaatatgatgaatattcattttgcaagcactgcaatcacctggtcttgatttcctttttataaaaaa

SEQ ID NO: 26796 - DNA, 447 bp, Oryza sativa
  unsure (1)..(447): unsure at all n locations
gaaatggaagttntntntttcgcatnttaagcaccacgattccacaaacctttactcatgtacagcagtgtaactctccattgctactcattttctggtttgcaccgcattagtagaatatcatgcaacctatttgattcactagctcttagaagaatcagtggtagtttgaaaatttccatttaatggatgttttatgattctaccactactagatgtttcatcagcttcaaattcatagtgatatactgatatgctttgtctcaaaaagaacaagaaatcatagtgatacgattcaacatgagactctatataactgctaatgtttgagtgcgaggtctaggcgactaggcattttattttagtggttgctggtaacttaaagggtacgtttgcctctttagagtaattcaacaatatagtatcagtcacaatgcaactaaaaca

SEQ ID NO: 26797 - DNA, 418 bp, Oryza sativa
agctataatccattgaatcaaagggcctattctcgtaatatctcctatagcatatcgacatcctatgaaatatcctacataaattcctcttgattcaaaggaggccatattaagggataggatagatgcatgctcgaatgtataataattcaatgatggtaggacggagcctagtctgtacatattccgaagaatttgtttctcaatccatgaaataataatacgtattgaacatgttagtttttttacattttttctgggagaacagtatgtatgcaatatatctcatagcaattcgatgggagcggcacggctaaatcttctatctttttctcaaccgaacttaccatattatgttatattattccatgagtacaaaaatacagaactcttatatggttcgtcaactattcacaat

SEQ ID NO: 26798 - DNA, 354 bp, Oryza sativa
  unsure (1)..(354): unsure at all n locations
catagaggaaatggacagtactctgatgctgacaactttactttagaatgcatatttggatgtattggcgctcaaacgttaatgcaatatatgagaatgttcatgatctttgcagggacggacgtgatcaatcatcaacaaccaccgtgagaccgatggaacttgctgcattaacttgcaaggcttcattgcataagacgaacgaanattaatatatatgtaaccatcgggcagctatgagactaactcacgattacgatctaataacacacaggtctcgtctctgaatgcaattattaagcatgtgggctcgtttattatcgtaatcgagaaaagaagatcaccgctctcgat

SEQ ID NO: 26799 - DNA, 393 bp, Oryza sativa
  unsure (1)..(393): unsure at all n locations
agctctcctatagtgtgacacttatgtcatcatagcatcccaagcagagctgctcacatttttttatttattcaacaggatacagtggagaattttaacccgtttgctgagaaaggagaacatggtacagggtaaggaatgcttcattaaagtaaaattgcagatttattttattttagcggaattaattaaattcaatctttttttgtaatattattcaatttataaccaattaatttaactgttgctacttgggacatattgcaggtgggcattctcgccactaaccattgaaaaaatgctgtgggtaagtttatgttgaacctgcacctaattttagntcttctatccattccttaatcccataatatatgccatacaacatcaatacta

SEQ ID NO: 26800 - DNA, 412 bp, Oryza sativa
ctggtgggccgacaaaagaaagtaaaaaaatgaacgggccatatgcatgatctgatgcctactgtcactgacacgtgtcggatggattcccaggggttactaccggtgcacgtatcgcaacgcgcaaggctgcccggcgaccaagcaggtgcagcgctccgacgccgacctcgccgtcttcgacgtcacctaccagggcgcccacacctgccaccagaagcagcgccgcgccgccgccgccggcgaccaaccgcctacgtcgtcgccgcatgccgacccgagcgtggagctgctcgtcaacttcaagcacggcctgaaggtggagaccaacgggctggctcctccgccgccgccgccttcgacgacgacgacgaacttccacgacgaccaacacttttgcttccctccatgc

SEQ ID NO: 26801 - DNA, 427 bp, Oryza sativa
  unsure (1)..(427): unsure at all n locations
ggcagaagaaaaggcagagagcaaatggcgctacaccatgaattctccaagcctgaatgaacccgactgccttttcttttgatgccgatcgttctttcaacagaggtgcactcatgtcatccttctcagcatccttctcatggatatcctcctcgattccaatcatctccggaccgacaggcaagaacagaaacacttgaagcccaacgactgcgatcatcactccagggactgcaaacgaccatgaccatccanacttcaacattgcagctgcaattaaagaaccagatatgtttccacagatgtatgagcattccaaaatcccattatcagccctcttttgctctttccaaaccaattaccaacaactgcaaccacagatggccagcccgatgactgaaacaggccagccatcatttgaacaccc

SEQ ID NO: 26802 - DNA, 407 bp, Oryza sativa
tgcagcatgcaagcttctatgagagcttgtcctatttgtgtatagggcatcatactttcttcatgtcgtcgccttatgggtctgggtgtttgggcaggttcacgaattctgctgcgaagacttccgttagagctttctctttcccactcttgcgactcttcttcttgcttgattccgatgcgtctctggctggtatcttctactccgcttgacgttcttgcgtcccagtgtgtcgtccatgtgagcgcatcgatcgacaattcttaatatttttcgagcagttgttatccgccttgtcgccaacttctgggtggtgtaaagatctctgacaccagtcttgaaagcgcggatcacggaggcatcgttaatctggggaatcgatttctgcctcattaaagcccaaacgt

SEQ ID NO: 26803 - DNA, 430 bp, Oryza sativa
tatggagtctactttcagatggttgtggtcccatattaaaattcctaccgatctgccgggaatctgcaaaacaagccaagtatctcaaccagtccgaatctgaattgggttttgggccttgtaattgtgtcgtgggcttagcccaaggtggtgtgcgccctagggcaaccctaggatgtccctaatcacatttattcagtagccgtcatcgtttagagttgggttttgcttagattattctgtcaagaacaatatcgccactagatcggtttgtggaaccccaaattcgagtgattaatcattcatatgcaatttggttgcaatctatcttgttcttgcttgtgttctttgattcgcatgcagggattagccttctcggcgaggtcaaccgggttttggcacggttgataaccagaggagatgtggtgct

SEQ ID NO: 26804 - DNA, 377 bp, Oryza sativa
  unsure (1)..(377): unsure at all n locations
agcttgccaagaactgtaatgtnttcattatgttcagagtttcctaccaggtatacctgtttcctgatctttggaaagtttggaaatgttaggttgataacatataatacattgataattaatggttggtgagtggaataaagggaacatacttcctcatctgagacccatctcagtgctgttgatagagttcctgaatcagtgactatccttagacccttttgctttgtaatgtccatttgatttctttgttcctcatcgccccaaggtttaatacggtgaatggatttaaaatggcgttgcatatttcttggaatgcgcgaagctggatatatatccacaaaacctggtttggtcataacattatcactggacct

SEQ ID NO: 26805 - DNA, 433 bp, Oryza sativa
  unsure (1)..(433): unsure at all n locations
tgtttcttttatgatactcctatcttactactccttattaaaaagaacttatcaatcattcatgggttttatatgtacatctcatctatatttctatatggaaatggaccaaattagtcaatggttgcgaataatagctcaggacaggggacagcaacaacattacaaaatcatttgtatgagcgaatgtagctgaaccattctagtagctggttaacaagccaagcatgtcattggatacaaaaaaatgttggcaactgtatagaaatttacaagactctgaaatctgaatctagaaaagcatcaactcatttgggcatacaaaaagtgcagttcagaaaatgtgcangactcccatgctaccatgatcactccgaacttccttccttgaacaccttgacccaattctagcactgtcaatatttcaccagtc

SEQ ID NO: 26806 - DNA, 370 bp, Oryza sativa
agcttgaagctgatatgtgagtctgtctttgatgaaggatgctacctcctttgaacattttcttctatcggtatttatgaggttttctgatacacctttggacttgtcggcaggtgtcaaaggtattaatgcgtgatctttctaggtgtaaggcatttgacaacctgaaaaggttgaagcttggtgagtggtttctgagaaatggatgctattcgctactcttcttgcttcggtactcacctcacatagaaaaacttcgcctgcaacttaccaaagcaagatataacacctccccccttccacattgcatgtttttggcacgggcttagtttaatgggtccctttttattcttgtatcaacttggagctg
